United States Patent Application Publication US 2012/0005773 A1 - sequence listing, part 5

SEQ ID NO: 17565 - protein, 814 aa, Buchnera aphidicola str. Sg (Schizaphis graminum)
MKLLKFGGTSLANAKKFLCVADIIEKKNKKEQIAVVLSAPAKITNYLATIIENKIDDEVLKKINLAKNIFIELIQDIKRIQPLFPYENTKSTIEIEFNKLKKIINGILLIKQCPEGIKPIIISRGEILSVDIMKNILQSRNHEVTILNPVTNLLSIGNYLDSTIDIKESKKRIKKINIDQKNIILMAGFIAGNKEGELVVLGRNGSDYSAAILASCLNAKCCEIWTDVDGVLTADPRIVSNTYLLDYISYQEAMELSYFGAKVLHPRTIEPISQFQIPCVIKNTNNTESKGTWIGKENNPSDNSLKGVTYLDNIIMFNISGSCLKDSGNTIARIFTILSRESMKIILIIQSSSENQINFCTFEKDIDYILLILKKEFTLEIKEGLLNDFNIVKNLTILSVIGSNISEKNNIASKIFSSLGSSKINVLAIAHGSSKHSISIVIKKENLLQGIQNIHNTLFFKKTIINVFLIGIGGVGKALLKQILKQEKFLDQKNIKIQFRMIANSKKLLFLKNSINLNNWEENFKKSKEKFNLTILNELLKNTCDSNSVIIDCTSDYILSKQYISFIKKGFHIITSNKKANTDSLKYYSEIRTTALKENKKFLYETNVGAGLPVINTLQSLFSTGDCLISFKGILSGSLSFIFGKLEEGVLLSEATKEAKKLGFTEPNPFDDLSGIDVARKLLVLAREIGYSIELKDISIEPILPERFKKYQNSEEFLFKLKELDSFFSERVNKARDIGNVLRFIGSIEKNGKCSVKIEEINSNNPLYKVKNGENALTFYTNYYQPIPLVLRGYGAGNDVTASGVFSDLLRIIL

SEQ ID NO: 17566 - protein, 278 aa, Buchnera aphidicola str. Sg (Schizaphis graminum)
MKKRKQYCGYIAIVGKPNVGKSTLINEIIENEISITSKKKNTTQKNILGIKTKQLHQFIYVDTPGIYLNNEKDDSFKIIKSSILILFIVDRTVWKTDDEIVLNKIKKNKIPIICVINKIDKILDKSIILPHINFLLKKINPIEIIPISAKKRENIVLLENLIYPYLPNNNHIFPKKYITTHSLSFSISEIIRQKLIFFLRDELPSIITVKIESIEEKFKKKLYIRAAIYVKHERQKKIIIGKKAEGIKKISIASRLDIEKKINMKIYLIIWVKVKIKK

SEQ ID NO: 17567 - protein, 333 aa, Buchnera aphidicola str. Sg (Schizaphis graminum)
MKFIDQTIIQVIAGNGGNGCVNFRREKYIPKGGPDGGDGGDGGNVWLQSDNNLNTLIDLRFKKTFQAPHGENGSGKNCSGKKGSDIKIYVPVGTKIINYQTREIIGDLIKHKQKILIAKGGWHGLGNTRFKSSINRTPRQRTLGSVGEKRDIQLELILIADVGTLGMPNAGKSTLVKSISGAKTKIANYPFTTLNPVLGSVNTEGKKFIIADIPGIMQNASQGFGLGVRFLKHLERCKILLHIVDLCPTDHSNPVENIRIILNELKKYNTSLYNKPRWLILNKIDLIKSSEIKKIIDKIKNFLKVEERFYLISSIKKIGVKKLCSDIAFYLQK

SEQ ID NO: 17568 - protein, 567 aa, Buchnera aphidicola str. Sg (Schizaphis graminum)
MRFKKMNNKIEKNDNNFIYKIINEDFKKNKNLLLHTRFPPEPNGYLHIGHAKSICLNFELANVYNGYCNLRFDDTNPVKENIKYINSIKNDIKWLGYQWHKKVRYSSEYFPILYEYAKELIQKGLAYVDELTKEEIREYRGTLSTVGKNSPYRNRSITENLKLFEKMKKGEFKEGEACLRAKINMSSSFIVMRDPVLYRIIFSTHHQTKKKWCIYPTYDFAHCLSDSIEGITHSFCTLEFQDNKNLYNWILKNTSIKHYSKQYEFSRLNLEYSILSKRKISILIEKKIVNGWDDPRILTISGLRKKGYTASSIRDFCHRIGITKQNNLIEFSMLEYCIRKELNKKAIRTMAVLEPIKIFLYNIDNDHEEKLIVPNHPKHLHLGTHEIIFTNTIYIEREDFKEKYDKKYKRLKIGEEVRLRYAYIIKAEKIEKDESGNIIKIICFCDINSLGKKPINRKNPAVIHWIAVKNSFPAKFKLYNQLFKIKNPDQEKNFLSYLNSNSLIVKNGFVEKKIAQKIIKKMSNNFIKLFFQFERTGYFCVDEVDSKENKLVFNRTVSLKDSWNLKK

SEQ ID NO: 17569 - protein, 404 aa, Buchnera aphidicola str. Sg (Schizaphis graminum)
MKNPIYLDYAATTPVEFKVAKKMMNYLTIDGIFGNPASRSHKFGWEAEEVIDIARNEISELIGSDSREIVFTSGATEANNLAIKGIAFFHRKKGNHIITSKTEHKSVLDACRYLESVGFSVTYLTPKNNGIIDLNDLKKNINKNTILVSIMHVNNETGIIQDITNISKICRSHDIFFHVDATQSVGKIAINLKNLFVDLMSFSAHKIYGPKGIGGLYVRRKPRVRLSALSHGGGHERGMRAGTLPVHQIVGMGESFKLARKKINDDFIHLTNLRNDLWNGIKNIEEVYLNSDLKQGAPHILNVSFNYIEGESLIMALKDLAISSGSACTSSSLEPSYVLRALGIKDELAHSSIRFSIGRFTTKEEIQHTVKSVHKSIHRLRALSPLWEMFKSGVDLNSIEWDHT

SEQ ID NO: 17570 - protein, 590 aa, Chlorobium tepidum TLS
MDRNSVIGFALIAAIMIVWLQFMKPEQKLGLEKAAASREAVQKTPAAALPAPSAAVAAAARADSLGSFAQASVGTEKTITVSNDLFTATLSSKGATLKSLVLKKHLDGNRKPFNLISASDKGALSMLFLSSDGKKIDTRDLYFRSLDAKTTETVTGKEKLSVSYVLDVDATRSIQITYTFTGDSYVVDYDLKLNGFGSSIAGNEYQLDWDGGLNYSEKDQVDESHNAIASAYLGGSVVKLDAKDAKKTWQDEESGKAQWVAVRNKYFVAAIMPQRTTDGIYLHGTKKDGSDFKNYVAALKMSFPAGQQSVDDHYRLYVGPLDYNTVKSLNADLEKIMDFGWDWLTRPFAEYLILPIFNWMNKYVTNYGLIIIIFAFLIKLVTWPLSLASTKSMKKMSALQPVMKELQEKYKDNPAKLQSELGRIYKEAGVNPLGGCLPTVIQMPLLFAMFYVFRSSIQLRQHGFLWVKDLSVPDSVYHFAFKLPLYGDHIAIMPILMAVTVFFQQKITPNAQSNEQTKIMMWLFPAMMLFFFNNMPAGLALYYLMFNIFSVAQQAYMNATITDEEKAAAAMQVAAATKPAQSAKKGGKKK

SEQ ID NO: 17571 - protein, 222 aa, Chlorobium tepidum TLS
MKFFIDTASLDEIKAANELGVLDGVTTNPSLIAKIVKDSTNFTYADFKAHIAKICEIVDGPVSAEVTTLKAGEMIAQGEELAAIHKNIVVKCPLTVDGLKAIKHFSSNGIKTNATLVFSPTQALLAAKAGADFVSPFVGRLDDISTSGMELVRQIVTIYDNYGYLTEVIVASVRNPLHVVESAMVGADIATIPYSVIKQLANHPLTDKGLEKFMEDAAVMKP

SEQ ID NO: 17572 - protein, 438 aa, Chlorobium tepidum TLS
MNTADTRQRLLDIEKQIASLREEQATVKAQWEAEKELIHTSRRLKEELEDLRVQAENYERSGDYGKVAEIRYGKIAEIEKALEENNRKIEARQASGDLIMKEEIDAGDIADIVSRWTGIPVSKMLQSERQKLLGIESELHRRVVGQDEAVRAVSDAVKRSRAGMGDEKRPIGSFIFLGPTGVGKTELARTLAEYLFDDEDALIRIDMSEYMEAHTVSRLVGAPPGYVGYEEGGQLTEAVRRKPFSVVLLDEIEKAHPDVFNILLQILDDGRLTDSKGRTVNFKNTIIIMTSNIGAQLIQSEMEHLEGRDADAALAGLKEKLFQLLKQQVRPEFLNRIDEVILFTPLTRENLREIVTIQFNRIKETARRQRITLEISDEALMWLAKTGFDPAFGARPLKRVMQRQITNRLSEMILAGQVGEDDTVEIGLENDAIVMKKK

SEQ ID NO: 17573 - protein, 470 aa, Chlorobium tepidum TLS
MVVMKFGGTSVGSAAAMRQVIANVAEKKKSSAPLVVLSACSGITNKLIQIADAAGSGCLEEAQQLVGEVRQFHLDLIGELIESEELQQEVIAKIEVYLTRLERLTEGIEIVGELTERSKDRFCSFGELLSTSVFAAALNEAGVSCKWIDVRTVMITDDRFGFARPLAEICQKNTSEIIKPLLDAGTVVVTQGYIGATESGRTTTLGRGGSDLSAALFGAWLHSESIEIWTDVDGVMTTDPRIVPEAKSIRVMTFSEAAELAYLGAKVLHPDTIAPAVQKNIPVYVLNTWHPDSKGTLITNDPELLAGKSHGGLVKSIAVKKAQAILNIRSNRMFGRHGFMSELFDVFERFGISVEMISTSEVSVSLTVDDAVVSEPLIKALGALGEVEIEHKVATVSVVGDNLRMSKGVAGRIFNSLRNVNLRMISQGASEINVGVVVDESDVQAAVASLHCEFFAESQCDAIFEKPAGS

SEQ ID NO: 17574 - protein, 854 aa, Chlorobium tepidum TLS
MEGNFSNRVQDVIRLSREEALRLGHDYIGTEHLLLGLIREGEGIGAKILKNLKVDLFQLKQKIEENTHPKVPATQMGNVPLTKQAEKVLKITYLEAKICKSTIIGTEHLLLSILKGDDNIAAQILEQFGVTYDQVRDELMTITTGRSEAYEPPMEGSYSSGSGSPARPSKKSETKRGERTKTPVLDNFGRDITRLAMEDKLDPIIGREKEIERVAQVLSRRKKNNPVLIGEPGVGKTAIAEGLALKIVQRKVSRVLYDKRVVALDLAALVAGTKYRGQFEERMKALMNELERSRDVILFIDELHTIIGAGGASGSLDASNIFKPALARGELQCIGATTLDEYRQYIEKDGALDRRFQKIMVEPTSVEETIQILNNIKNKYEAHHHVHYSEDAIEKAVKLSERYITDRFLPDKAIDVMDEAGARVHLSNIHVPQEILELEKSIEEIKSEKNKVVKMQNFEEAARLRDKEKNMLEALDHAKQEWEEQSMESVYDVTEADITSVIAMMTGIPVAKVAQSESKKLLTMEAELKKEVIGQDEAIKKITKAIQRTRAGLKDPSRPIGSFIFLGPTGVGKTELAKALTRYLFDSEDALIRADMSEYMEKFSVSRLVGAPPGYVGYEEGGQLTEKVRRKPYSVVLIDEIEKAHPDVFNILLQVLDEGVLTDGLGRKVDFRNTIIIMTSNIGAKEIKSFSTGGGMGFAPPSDATGDYKAMKSTIEDALKRVFNPEFLNRIDDTIVFHQLEKSDIFKIIDITAGKLFKRLKEMGIEVEIDEKAKEFLVEKGYDQKYGARPLKRALQKYVEDPLAEEMLKGRFTEGSVIQITFDEKEKELRFLDGASSAEPTPKKSKKEETLDKE

SEQ ID NO: 17575 - protein, 620 aa, Chlorobium tepidum TLS
MSIYSILPLLNEVFSTNQTALKAEPATTTHPTLALQKTRPPQPDQRLSTTDATGKNPGDKTLKSKAIQLKTWALEKFQAMFNAPTKEETLLKICLFLISAFALKNLFIYLNKQIIFRIQTKTAKKLRDDVFSSIIEMQLDYFNKNRVGNLMNYVYNDVENVNNSISATFVNFLQNPFSIIVFLAVLLTLSWQLTLFSAVTSIFILVFVRMIGKKIRGLARRYQVNMGNMNSVLQEKFNGIKIIKSTAFEEVEFNKFKAFTKEFRTLGIRISQLKNMIGPLNETLMIAAIAMVLWFGGLQVFNGMMTANELLLFAFTLYSTMGPIKQLGDANTAIEAGLVSVERLFEVLDAEPEIVNGNRSISTFNEAIRFEDVCFKYNKEDPNAPNILDHVSFEIKKGEMVALVGQSGSGKSTAVDLLMRFYDVDSGRITIDNIDIREFDYKQLRKMIGVVSQEVILFNDTIEQNIAYGVHEEIEHDQIEKAAKLANAHQFIMEKPEQYDTMIGDRGIQLSGGQRQRIAIARAMVKNPELLIFDEATSALDNESEKVVQDAIDHAMENRTALVVAHRLSTIKNADKIIVMERGKVVEAGNHAALLEKNGVYKMLYDIQFTGQAANRQQTT

SEQ ID NO: 17576 - protein, 128 aa, Chlorobium tepidum TLS
MKLHMLKSKIHNAIVTSGDLEYEGSITIDKELLDMADMIANEKVLVVNNNNGERFETYIIEGTRGLREIQLNGAAARCALPGDEIIIMTFAEMEPEEARNWKPMIVIVDRMNNPKRRHRVGSEDEYLG

SEQ ID NO: 17577 - protein, 299 aa, Chlorobium tepidum TLS
MSERLDENFSRAIDLMLACTGKIIISGMGKSGIIGQKIAATLSSTGTTAIFLHPAEAAHGDLGVVSEGDTVICLSKSGMTEELNFILPALRERKATIIAFTGNPRSYLAMNADVVLDTGVEQEACPYDLAPTSSTTAMLAMGDALAICLMKKKNFTDQEFALTHPKGSLGKQLTMRVGDVMATGDALPVVSEDAMLSDLILEMTSKRYGVSGVVDAEGKLTGIFTDGDLRRLVQTGESFLDKKAVEVMTPNPKTVAPDMKAKACLELLETHRITQLMVCDEKRCPVGIVHIHDLVTLGL

SEQ ID NO: 17578 - protein, 305 aa, Chlorobium tepidum TLS
MQPPLFSCGHVTFVGAPNAGKSTLLNRLLDHKLSIVTPKPQTTRKKITGIYHDDRSQIIILDTPGIMDPKQSLHESMLEITRRSLRESDVIVALIPFQKGDEPIDRKFASELIEQWVKPTGKPFVIALNKADLVPEETAKEAQTEIISKYKPVATLALSALTGGNIPELVELLRPLLPFDEPIWPDDILSTEPERFFVGEIIREKIFLQYGREIPYSTEVVIDEFKEQHENNPSRKELIRCSVIVERNSQKQIIVGQKGAAIKKLGQAARKEIEELLDRPVYLEIFVKVRPDWRKKKNLLKSYGY

SEQ ID NO: 17579 - protein, 516 aa, Chlorobium tepidum TLS
MVQKLIFILTGVLLMLGIAMGGDLHAYTQPDPSGAKVGVTADISAANPGKPTAAEITDQIGKNKVSINMVWVLITGFLVMFMQAGFAMVEAGLTRAKNAAHTMSMNMMIYPIGMLGFFVSGFAIMFGGLGTLGTLGGYEGLNQEFAINLFGHTIGLFGMKGFFLNNVYDVGVFALFLFQMVFMDTTATIPTGSMAERWKFSAFAIYGIFVGTIIYPLYGNWVWGGGWLATLGSNFGLGHGHVDFAGSSVVHMTGGVLALVGAIIIGPRIGKYNKDGSPNAIPGHNIPMAIVGAFILAFGWFGFNPGSTLAGTDLRISVVAVNTMIASATGAAASMLYMWLFKTKKPDPTMMINGLLAGLVAITAPSAFVNVQAAALIGLISGVLVIEAAFFIEKVLKIDDPVGAVAVHGVNGAWGCLALGLFADGTYGDGWNGVAGPVTGLFYGNPGQFYAEVIGVLANIIYVGAIGWVVFKLIDVTIGNRVNPDDELDGLDIPEMGVEGYCGIRLDKNSETPLSK

SEQ ID NO: 17580 - protein, 97 aa, Chlorobium tepidum TLS
MAKSKVKWFDGKKGYGFILNPDGGEDIFVHFSSIISDQSFKVLNQDADVEYDLDKTQKGLQAKNVRELSVSAATVASGVENPAVRLGVQGEFNSLPQ

SEQ ID NO: 17581 - protein, 633 aa, Chlorobium tepidum TLS
MGKIIGIDLGTTNSCVAVMQGTQPTVIENSEGSRTTPSMVAFTKTGERLVGQAAKRQAVTNPKNTIFSIKRFMGRKYDEVPNEKKLASYDVVNEGGYAKVKIGDKTYSPQEISAMILQKMKQTAEDFLGEKVTEAVITVPAYFNDAQRQATKDAGKIAGLEVKRIINEPTAAALAYGLDKKKENEKVAVFDLGGGTFDISILELGGGVFEVKSTDGDTHLGGDDFDQVIINYLADEFKKQEGIDLRKDAIALQRLKEAAEKAKIELSSRTDTEINLPFITATQEGPKHLVINLTRAKFEAMSAALFDKLFEPCRRAIKNSKFDIKEIDEVVLVGGSTRIPKVQALVKEFFGKEPNKSVNPDEVVAIGAAIQGGVLQGDVTDVLLLDVTPLSLGIETLGGVMTKLIEANTTIPTRKQEIFSTAADNQTSVEVHVLQGERPMASDNKTLGRFHLSDIPPAPRGVPQIEVTFDIDANGILNVSAKDKATGKEQSIKIEASGKLTEAEIEKMKEDAKAHAAEDQKRKEEIELKNSADSLIFSTEKQLTELGDKLPADKKAAIESALEKLKEAHKSGRVDAIKPAMDELSKVWSDAASNLYGQPGAEPQPETNGHAGGSKGGDGAVNAEYEVIDGDDK

SEQ ID NO: 17582 - protein, 377 aa, Chlorobium tepidum TLS
MSVSIAIPKERAQDERRVAISPAGVQILVEQGIRVVVESNAGCFCNFHDQDYAEAGAIIVTSPEELYPQANVIVKVSPPQPEELQLLLPGQMLISAVHLGTVSRQMLKTLIDKNITALGFEFIETRDGELPIVRTLSEIAGSLAIQTAAKYLETGYGGSGILLGGIAGVPPAHVTIIGAGTVGLFAAQDALGLGAQVTVIDKEINRLRRFEAFFNRHLVTAIANEHYISQLAKMSDVMIGALSPKLKLNKPLVSEQVVKTMKPGSVIIDVSIDQGACFATSRHTTHTNPIYVKYGVTHYCVPNIPSAVAKTATFALTNTLLPFLLKLNAHQTIPEILWNSHSLRKGTYLYKGYITKKILAELTDLPFREIDMLLATA

SEQ ID NO: 17583 - protein, 380 aa, Chlorobium tepidum TLS
MKREAENPNHFSAMNIGIPREIKIRETRVACTPAGVRQLVGAGHRVVVERGAGEASGFSDEKYRLAGAVLASSAEEVWKSELVVKVKEPLAEEYRFFRKELVIFTYLHLAGVPGLAKALVDSGVTAIGYETVEVGGRLPLLAPMSEVAGKMSVLMGGYYLSKHNGGEGKLLCGVPGVLPGRVLVLGGGVAGMSAARIAAGLGAEVTVMETNHDRMRELEAQLPAEVHTIYSNEQHLEELLPGTDLLIGAVLLPGATAPKLVTRGMVQSMKPGAVIVDIAIDQGGCVETSRPTSHVDPVFIEEGVVHYCVTNMPAAYPATSTEALTGVTLPYVRRLADLGLESAMVVMPGLAGGLNVWNGKITQEAVARSLGMACGENPFA

SEQ ID NO: 17584 - protein, 618 aa, Chlorobium tepidum TLS
MSPESRTLPGIIRSGDPSICRPPVAGNCRSFTSDHFQQMFKPKLFTVLPELTKEQLGRDIVSGILVGIVALPLGIAFAIASGVSPEKGLISAVIGGFLISFLGGSRVQIGGPTGAFIVILYGIVQQYGLNGLMIATIMAGVILIIMGLSHLGSLIKFIPYPVVVGFTSGIAIIIFSSEVKDFLGLHMASVPADFIDKWAAYFKALPTASPETILVGAVALLIIVFWPKVSRKIPGPLIALIVTTVAVHMLHLQVDTIETRFGDISASIPAPSFPSLDMATIRHLIMPATTIALLGAIEALLSAVVADGMIGARHKSNMELVAQGVANIVSPLFGGIPVTGAIARTATNIKNGGRTPIAGIVHAITLLGIMLVFGSWAKLIPMPTLAAILIVVAWNMSEHHVFRQLLKSPKSDVAVLLTTFGLTVIFDLTIAIEVGMLLSVILFMKRMASLANVGVITGELKDEEDEADPNAIVNRSIPEGVDVFEISGPLFFGAASKFKDAMHVVEKAPSIRILRMRKVMSIDATGLNMLKELFNDCRKSGTTLILSGVHTQPLFAMQQYGLADEIGEENIFGNIDDALDRARSLLGLPVQGRPAGFVASVKREKELQAKIESKGSGK

SEQ ID NO: 17585 - protein, 404 aa, Chlorobium tepidum TLS
MALVNPHGKEKVLKPLLLTGDELVSEKERAKSMKQVRLSSRETGDLIMLGIGGFTPLTGFMGHADWKGSVETCTMADGTFWPIPITLSTSKEQADTIAIGEEVALVDDESGELMGSMKVEEKYCIDKAHECREVFKTDDPAHPGVLMVMNQGDVNLAGPVKVFSEGSFPTEFAGIYMTPAQTRKMFEENGWSTVAAFQTRNPMHRSHEYLVKIAVEICDGVLIHQLLGKLKPGDIPADVRRDCINVLTEKYFVKGTTIQAGYPLDMRYAGPREALLHALFRQNFGCSHLIVGRDHAGVGDYYGPFDAHHIFDQIPEGALETKPLKIDWTFYCYKCDAMASMKTCPHEPADRLNLSGTKLRKMLSEGEEVPEHFSRPEVLEILRRYYAGLTEKVDIKMHSHAIGK

SEQ ID NO: 17586 - protein, 495 aa, Chlorobium tepidum TLS
MKNSFRKKPLSLLLEEMKSEHRLNRVLGPLALTSLGVGAIIGTGIFVLIGVAAHDKAGPAVTLSFALAGLACVFAALCYAEFASMAPVAGSAYTYAYATLGELFAWIIGWDLILEYAVASATVAHGWSHYFQDFMGIFGLHIPEIFSRAPLDFDPATGSLVLTGSMFDLPAVIIVLIVTVILVKGIRESAGFNTAMVIVKVAIVLLVIVLGAQYVKPENWQPFAPFGYSGLSVFGHTILGETGAGGAPVGVLAGAAMIFFAYIGFDSISTHAEEARRPERDVPIGIIASLIICTMLYVAVAAVITGMVPYDQINIDAPVSYAFKQVGLDWAQFLVSLGAITGITSVLLVMMLSQPRIFLAMARDGLLPNKFFGVVHPKFKTPWNATILTGIFVAILGAFLPLRLLAELVNIGTLFAFVVVCAAVLIMRRTNPDAERPFRAPLVPFVPIAGILTCLLLMFSLPAENWWRLIVWLLIGFCIYFFYGRHHSVLNQHHD

SEQ ID NO: 17587 - protein, 400 aa, Chlorobium tepidum TLS
MSVESFERFLSRRVLSMQESQTMKITGLAKKMQAEGKDVVSLSAGEPDFPTPENVCEAGIEAIRKGFTRYTANSGIPELKKAIIRKLQRDNGLEYAEDEIIVSNGGKQALANTFLALCDEGDEVIVPAPYWVSFPEMARLAEATPVIVETSIETGYKMTPEQLAAAITPKTRILVLNSPSNPSGAVYNEAEVRALMQVIEGKEIFVLSDEMYDMICYGGVRPFSPARIPEMKPWVIVSNGTSKSYSMTGWRIGYLAAPKWIINACDKIQSQTTSNANSIAQKAAVAALDGDQSIVEQRRAEFEKRRDFMFRELNTISGIECTLPEGAFYIFPSIKGLLGKTFGGKVMKDSTDVAEYLLTEHYVATVPGDAFGAPENLRLSYAASIEELAEAVNRIRKAFS

SEQ ID NO: 17588 - protein, 441 aa, Chlorobium tepidum TLS
MKSFLSKSGAIAAGLLLAAATFSPPIQAATPTPDAVNAFAIDNFFLFICAVLVLFMQAGFALVETGLNSAKNAVNILFKNLMDMAIGGIIYYFVGYGLMYPGEAFSGGFFGFGGPGISTAMPEIAGGTLYPAVDFLFQVAFAATAATIVSGAVAGRMQFRAYLIYSAVISAVVYPISGFWLWGGGWLKALGFHDFAGSLLVHALGGFAGLAGAIVLGPRIGRFNEDGTPNAMPGHNLALSTLGVFILLIGWYGFNPGSQLAIVGGDNTAAVMKIAVNTTLAACAGAVVAMIFAWGLFKKPDLTMALNGMLAGLVAITANCDVVSYNASLIIGAVGGILVVLGIMLLDKLRIDDPVGAWPVHGLNGIWGGVAAWIFGGQPMVAQLVGSLVVPFWGFVTMMVLFLILKAMGILRVHKDEEMKGLDISEHEEEAYYGFDIYTTQ

SEQ ID NO: 17589 - protein, 414 aa, Chlorobium tepidum TLS
MPFSALGIIDHLRKALAEEGYNSPTPIQKEAIPVILEGNDLLACAQTGTGKTAAFALPVLQRLHQSRMHGEKRKIRCLVLTPTRELAIQIGESFTAYGRHTGLINTVIFGGVNQNPQTARLVRGVDILVATPGRLLDLIGQGHLHLRDIEYFVLDEADRMLDMGFIHDIRRVLAVLPKKRQSLFFSATMPPEIIKLSAAILHNPKEVMVTPVSSTVEIINQQILFVDRENKNSLLAHLLKERNIESALVFTRTKHGADKVARFLAHHDITAEAIHGNKSQNARQRALGNFKTRQTRVLVATDIAARGIDIDELEYVINIDLPNIPETYVHRIGRTGRAGNRGAAYSFCNAEEKAYLRDIEKLIARKIPVIEDHPFPMVNTIPENAAASKQPARKVPHQKKPSGTHPGNSHWKRK

SEQ ID NO: 17590 - protein, 401 aa, Chlorobium tepidum TLS
MSKEKIAVAYSGGLDTSVMIKWLKDKYEGAEIVAVTGNLGQKMEVDNLEQKAIATGAKSFHFVDLRKTFVEEYIWKALKAGALYEDVYPLATALGRPLLAKALVDVALAEGCTMLTHGCTGKGNDQVRFEVAFAALAPHMKVVAPLREWEFTSREQEIAYAMEHNIPVSATKKNPYSIDENIWGISIECGVLEDPMVAPPADAYQITTAPELAPDEPTVVDIEFAQGVPVALDGQQMEGLDLIVRLNELGAMNGVGRLDMIENRVVGIKSREIYEAPAATILHFAHRELERLTLEKSVFQYKRNIGQDYANLIYNGTWFSPMRKALDAFVDETQKPVTGMVRIKLYKGSMTLLGRTSPNSLYNEALATYTEADTFDHKSAEGFIKIYGLGLKTFHEVNKSE

SEQ ID NO: 17591 - protein, 323 aa, Chlorobium tepidum TLS
METPIKIVAGRSNPELAKKIAAYLGTPLCDAKAENFSDGEISVNYFESIRGSDMFIIQSTNPPADNLMELLIMIDAAKRSSAYRITAVLPYYGYARQDRKDKPRVAITAKLVANLLTQAGADRILTMDLHAPQIQGFFDIPFDHLYSSVVLIDHVKNMDIADNLVVASPDVGGVKLARKFASELGTELVIVDKRRPKANVAEVMNIIGDVKGKNVLLVDDMIDTAGTIVNAAKAIKEAGGLKIYAAATHPILSGPAIERINTSVFEKVIVTDSLVSEHDFCSKIETVTISNLFGEAIKRIYDGESVSYLFDSKNISQKITNHH

SEQ ID NO: 17592 - protein, 386 aa, Chlorobium tepidum TLS
MGLSLGERCGLVMQSDIRAMSIECARMGGINLSQGVCDTPVPPVVLQGAADAVMQGANIYTHHTGIRELREAIVAKQRRFTGVAFDAEREVVVSAGATGAMYCAFQALLNRGDEVIVFEPFYGYHVSTLRAVEAVPLFVPLDPSDGWSFRVEALEAAVTPKTKALLINTPANPSGKVFSCDELALLAEFAIRHDLFVFTDEMYEHFVFGGLSHVSMASMPGMRERTITISGLSKTFSVTGWRIGYALCDPRWAASIGYFNDLFYVCAASPLQVGVTAGLRLLGDDYYHGLAAEYEVRRDLFCAALAEAGLEPHVPQGAYYVLAGTERLPGATAREKAMHILRETGVASVPGSAFYHDGGGENLVRFCFAKESHVLEAACEKLLKLR

SEQ ID NO: 17593 - protein, 584 aa, Chlorobium tepidum TLS
MKNLLALRPYLFRYRKSLAAGIACVIATNFFAVAAPRYLGEAIDLMGKPFEMHEILHKIGLYILFAALSGIMLYLVRQLIIVTSRHIEFDLKNDYYSHLQTLSTSFYDTTGSGELISRGTNDLNAIRDFLGPGIMYSINTLFRLLFAIGAMLAISPLLTLFALLPAPFLSWSVYKRGVSLRFQSKKIQENYASITNLVQENISGIRVVRNYNREEWETSRFEALNQDYYDKNLRLGRIQAGFMAVLTALTALSLIPVIWAGGLGVMNGTMTIGDIAQFVVYVTMLSWPIISIGWVTNIIQKAAAAQGRLDEIFNTKPDIVEPASRQTSETKKPLKGELAFEHVSFAYPSQPEREVLRDISFTVEPGTKVAIVGATGSGKSTLVNLIPRLYDPTSGRITIAGQDIKSLSLGVIRRTIGFVPQSNFLFSDTIRNNIDFGSNGGGIDVIEASRIAMLHDDVEDFPDGFDTMLGEKGINLSGGQKQRACIARALRWHPSILVLDDALSAVDTATEASIFDGLLKKLPETTIVLISHRISTVRNCDRIIVLHDGAIAESGTHEELLQNGRYYADLYMQQMLEEEISALS

SEQ ID NO: 17594 - protein, 410 aa, Chlorobium tepidum TLS
MPFVPVIFLRIFAMMPRPVCTILALNTGSSSIKFSLYESGDTEELLFSGSLTRIGLPDGRFSVTDPEGRFIDCERVDVPDHAAACRYVFSWITQHGPGMPDAVGHRVVHGGPRHTTPEKVTSELLDSIAEIVPYAPEHLPQALNAIRYAASELPGVFQVACFDTAFHSTMPPLAKLCPIPEEYRNQGVQRYGFHGLSYQYILSQLQAEGDPFARKGRLILAHLGHGASMAAVLDGRSVETTMGFSPAGGLVMSTRTGDLDPGVVLFLLQQGHLDSDGLRDMVNKKSGLLGVSGLSDDMRDLLDAEAENEQARLAGELFCYSARKHIGALVAVLGGLDMIVFTGGIGLYSPDVRERICSGLEFLGVQVDHEKNLNHSGIISTDTSRVVVKVIETNEEVTIVRETRRVLENG

SEQ ID NO: 17595 - protein, 400 aa, Chlorobium tepidum TLS
MPSRQIYFDNNATTPLHPEVKKELVAAMEMYGNPSSMHAFGREARANVEDARHRVAAFMGADESEIVFTGSGSEGNNTVLSLFACGTSQCFPGMKPKIVTTKIEHPCVLETSQCLVHRGVDVSYLDVDAYGKIDLGQLEEYLKSDGVGLVSVMMANNEIGTIQDIPAISALAHQYGALMHTDAVQAFGKIPVDVNELGVDFLTISGHKIYGPKGIGALYVRKGTPYCPFIRGGHQERGRRAGTENTLGIMGLAMAVDMRKIEMAAEAERLRGFREMLREGISARIDDALFNGHPTDSIPNTLNVSFPGAEGESILLYLDLAGIAVSTGSACASGSLDPSHVLLATGVDAERAHGSIRISMGRSTTVEDVEYMLDVLPGIIERIRNMSTAYIKGGPHAAIR

SEQ ID NO: 17596 - protein, 199 aa, Chlorobium tepidum TLS
MESAKVLFLDRDGTINRDIGRYVSSREEFILIDRADEAIAIAREAGFRIVLITNQAGIARGIVTPQDVEDVNDYLNELLAERQTSFDRCYYCPAHPNYPHPEYDRFIDHRKPSPRMVEQAIADLREEGFEVDRSASFFIGDKLIDVECGQRAGLKTILVRTGHNEESLCEQHQIFPDHVADDLYQAVTGYILGQPTSRD

SEQ ID NO: 17597 - protein, 818 aa, Chlorobium tepidum TLS
MRVFKFGGSSIASAAKISNVAGIIRRELKSTPLVVVVSAIGKVTDMLAETAALAGNGDAAYRDKLEGIASLHGGIIRELFGTEASAEETWLGEMMAELNDVLHGVFLLRELSDKSLALVLSYGERLSCRIVSRYMHVSGTPAECVDARSVIVTDDNHCFAKVDRLATGKLIHERFRSFDVLPVVTGFIASAPDGSVTNLGRGGSDFTATILGAALHAEEVWIWTDVDGFYSADPKRVPDARVIPEISYAEAMELSHAGAKVLHPLAVQPVMKAGIPLRIKNSFNPEKPGTRIGIEAAGAEALPGTVTGLTSINHVVLLSLSGSGMAGVPGTASRLFTCLARHSINIIFISQASSEQSISLAIAPGQASMAKKVLEEEFAREIEERRIDPVSVRRNLAMVAVVGNKMLGHPGVSAQLFETLGKNGVNVIAVAQGANEMNISLVIDSADENKALNCVHESFFLSMRKVHVFIVGTGTIAKSLISQIRRHRATLQKELGLDVVVAGLANTRSMCIEPAGIDLEHWHDSLKPRESHEGIGQYIRLIQERNLHNTIVVDCTASRQVAECYPALLRANISVATANKLGMAGPWDLYRKIMDALRSSNAKFLYETNVGAGLPVINTLNDLKNSGDKIVCIEGVLSGTLSFIFNELRKGGRFSEIVRKAKESGYTEPDPRDDLSGADFARKLLILGRELGYQLEYADVECQSLVPEPLRGEMSPAEFLDQLSSIDDWYVDEMASAASEGMTIAYTGELRDGKAKVGLKRVPLESPVAGLNGSENLVVFTTERYLKTPLVVKGPGAGGEVTAGGVFADILRIASYLV

SEQ ID NO: 17598 - protein, 335 aa, Chlorobium tepidum TLS
MKFVDSAKISVKAGDGGRGCVSFRREKFVPKGGPDGGDGGRGGHVYLRANKQLTTLLDFKYRKSYIAGRGGHGLGARKSGKDGKDVIIGVPCGTVVRNVETGEVICDMVEDGQEIMIAKGGRGGWGNQHFATATRQAPRFAQPGEPGEEYELEMELKLMADVGLVGFPNAGKSTLISVLSAARPKIADYPFTTLVPNLGIVRYEDYKSFVMADIPGIIEGAAEGRGLGIQFLRHIERTKTLLIMVPSNTEDIAAEYATLLKELEKFDPSLLSKPRLVVITKMDIAPEDFTMPELEKGVKVLAISSVAGQGLKALKDELWRQVSLQNQSPSEHAGS

SEQ ID NO: 17599 - protein, 442 aa, Chlorobium tepidum TLS
MHFDPNKFTVKAQEALQAASMLASSKQNQQIEPEHLLSVMLGDHDNIACQIARKLETPVDTLLSVVDREIDRIPKVTGASATGQYISSDLGKVFDTALKEAEQLKDEYISSEHLFIAMSEAGVKVSKLLKDAGIDRNAILKVLTSFRGSQRVTSQNAEESYQSLKKYSRNLNDLVIKGKLDPVIGRDDEIRRVLQILSRRTKNNPVLIGEPGVGKTAIVEGIAQRIVGGDVPENLKSKQIAALDIAALVAGTKFRGEFEERLKALVKEVQASDGEVILFIDELHLLVGAGSAEGSMDAANILKPALARGELRCIGATTLDEYRKHIEKDAALERRFQTVIVDQPSVEDTVSILRGLKEKYEIHHGVRIKDAALVAAAELSNRYIADRFLPDKAIDLIDEACSRLRLEIDSEPEELDRINRELRRLEIEREALKRELEATGSV

SEQ ID NO: 17600 - protein, 351 aa, Triticum aestivum
ALTLDELQYSVCEAGRNFGSMNMDEFMSNIWNAEEFQAATGGGLVGMEVAPVVGAGAGGGGADAGGSNLARQESFSLPPPLCRKTVEEVWAEINREPRQVHAQPQGARASQQPPVQPPVAANDRQGTLGEMTLEQFLVKAGVVRGSGAGGQAPVPVGMVHAQMNPVQQGQQPGPMMYPMAPANGMFQVMGDGMGFVPNGYAGMAVVPPPPPPQGGMGIVSPGSSDGRSAMTQADMMNCMGDGAMMENGGARKRGAPEDQSCERSIERRHRRMIKNRESAARSRARKQAYTVELEAELNHLKEENARLKAEEKTILLTKKQMLVEKMIEQSKENVNVKKGGTLSRRCGSCIW

SEQ ID NO: 17601 - protein, 819 aa, Serratia marcescens
MRVLKFGGTSVANAERFLRVADIMESNARQGQVATVLSAPAKITNHLVAMIDKTVAGQDILPNMSDAERIFADLLSGLAQALPGFEYDRLKGVVDQEFAQLKQVLHGVSLLGQCPDSVNAAIICRGEKLSIAIMEGVFRAKGYPVTVINPVEKLLAQGHYLESTVDIAESTLRIAAAAIPADHIVLMAGFTAGNDKGELVVLGRNGSDYSAAVLAACLRADCCEIWTDVDGVYTCDPRTVPDARLLKSMSYQEAMELSYFGAKVLHPRTITPIAQFQIPCLIKNTSNPQAPGTLIGKDSTDADMPVKGITNLNNMAMINVSGPGMKGMVDMAARVFAVMSRAGISVVLITQSSSEYSISFCVPQGELQRARRALEEEFYLELKDGVLDPLDVMERLAIISVVGDGMRTLRGISARFFSALARANINIVAIAQGSSERSISVVVSNDSATTGVRVSHQMLFNTDQVIEVFVIGVGGVGGALIEQIYRQQPWLKQKHIDLRVCGIANSRVMLTNVHGIALDSWRDALAGAQEPFNLGRLIRLVKEYHLLNPVIVDCTSSQAVADQYVDFLADGFHVVTPNKKANTSSMNYYQQLRAAAAGSHRKFLYDTNVGAGLPVIENLQNLLNAGDELVRFSGILSGSLSFIFGKLDEGLSLSAATLQARANGYTEPDPRDDLSGMDVARKLLILAREAGYKLELSDIEVEPVLPPSFDASGDVDTFLARLPELDKEFARNVANAAEQGKVLRYVGLIDEGRCKVRIEAVDGNDPLYKVKNGENALAFYSRYYQPLPLVLRGYGAGNDVTAAGVFADLLRTLSWKLGV

SEQ ID NO: 17602 - protein, 819 aa, Serratia marcescens
MRVLKFGGTSVANAERFLRVADIMESNARQGQVATVLSAPAKITNHLVAMIDKTVAGQDILPNMSDAERIFADLLSGLAQALPGFEYDRLKGVVDQEFAQLKQVLHGVSLLGQCPDSVNAAIICRGEKLSIAIMEGVFRAKGYPVTVINPVEKLLAQGHYLESTVDIAESTLRIAAAAIPADHIVLMAGFTAGNDKGELVVLGRNGSDYSAAVLAACLRADCCEIWTDVDGVYTCDPRTVPDARLLKSMSYQEAMELSYFGAKVLHPRTITPIAQFQIPCLIKNTSNPQAPGTLIGKDSTDADMPVKGITNLNNMAMINVSGPGMKGMVGMAARVFAVMSRAGISVVLITQSSSEYSISFCVPQGELQRARRALEEEFYLELKDGVLDPLDVMERLAIISVVGDGMRTLRGISARFFSALARANINIVAIAQGSSERSISVVVSNDSATTGVRVSHQMLFNTDQVIEVFVIGVGGVGGTLIEQIYRQQPWLKQKHIDLRVCGIANSRVMLTNVHGIALDSWRDALAGAQEPFNLGRLIRLVKEYHLLNPVIVDCTSSQAVADQYVDFLADGFHVVTPNKKANTSSMNYYQQLRAAAAGSHRKFLYDTNVGAGLPVIENLQNLLNAGDELVRFSGILSGSLSFIFGKLDEGLSLSAATLQARANGYTEPDPRDDLSGMDVARKLLILAREAGYKLELSDIEVEPVLPPSFDASGDVDTFLARLPELDKEFARNVANAAEQGKVLRYVGLIDEGRCKVRIEAVDGNDPLYKVKNGENALAFYSRYYQPLPLVLRGYGAGNDVTAAGVFADLLRTLSWKLGV

SEQ ID NO: 17603 - protein, 819 aa, Serratia marcescens
MRVLKFGGTSVANAERFLRVADIMESNARQGQVATVLSAPAKITNHLVAMIDKTVAGQDILPNMSDAERIFADLLSGLAQALPGFEYDRLKGVVDQEFAQLKQVLHGVSLLGQCPDSVNAAIICRGEKLSIAIMEGVFRAKGYPVTVINPVEKLLAQGHYLESTVDIAESTLRIAAAAIPADHIVLMAGFTAGNDKGELVVLGRNGSDYSAAVLAACLRADCCEIWTDVDGVYTCDPRTVPDARLLKSMSYQEAMELSYFGAKVLHPRTITPIAQFQIPCLIKNTSNPQAPGTLIGKDSTDADMPVKGITNLNNMAMINVSGPGMKGMVGMAARVFAVMSRAGISVVLITQFSSEYSISFCVPQGELQRARRALEEEFYLELKDGVLDPLDVMERLAIISVVGDGMRTLRGISARFFSALARANINIVAIAQGSSERSISVVVSNDSATTGVRVSHQMLFNTDQVIEVFVIGVGGVGGALIEQIYRQQPWLKQKHIDLRVCGIANSRVMLTNVHGIALDSWRDALAGAQEPFNLGRLIRLVKEYHLLNPVIVDCTSSQAVADQYVDFLADGFHVVTPNKKANTSSMNYYQQLRAAAAGSHRKFLYDTNVGAGLPVIENLQNLLNAGDELVRFSGILSGSLSFIFGKLDEGLSLSAATLQARANGYTEPDPRDDLSGMDVARKLLILAREAGYKLELSDIEVEPVLPPSFDASGDVDTFLARLPELDKEFARNVANAAEQGKVLRYVGLIDEGRCKVRIEAVDGNDPLYKVKNGENALAFYSRYYQPLPLVLRGYGAGNDVTAAGVFADLLRTLSWKLGV

SEQ ID NO: 17604 - protein, 923 aa, Pisum sativum
MELRVICIIRLVVACVLCLCIFIRSASSATEGFESIACCADSNYTDPKTNLNYTTDYRWYSDKSNCRQIPEILLSHRSNINFRLFDIDEGKRCYNLPTIKDQVYLIRGTFPFDSVNTSFYVSIGATELGEVTSSRLEDLEIEGVFRAPKDNIDFCLLKEDVNPFISQLELRPLPEEYLHDFSTNVLKLISRNNLCGIEDDIRFPVDQNDRIWKATSTPSYALPLSFNVSNVELNGKVTPPLQVLQTALTHPERLEFVHVGLETDDYEYSVLLYFLELNDTLKAGQRVFDIYLNSEIKKEGFDVLEGGSKYSYTVLNISANGSLNITLVKASGSKFGPLLNAYEILQARPWIDETDQTDLEVIQKMRKELLLQNQDNEALESWSGDPCMLFPWKGVACDGSNGSSVITKLDLSSSNLKGTIPSSVTEMTKLQILNLSHNHFDGYIPSFPPSSLLISVDLSYNDLTGQLPESIISLPHLNSLYFGCNQHMRDDDEAKLNSSLINTDYGRCNAKKPKFGQVFMIGAITSGSILITLAVVILFFCRYRHKSITLEGFGGKTYPMATNIIFSLPSKDDFFIKSVSVKPFTLEYIELATEKYKTLIGEGGFGSVYRGTLDDGQEVAVKVRSATSTQGTREFDNELNLLSAIQHENLVPLLGYCNEYDQQILVYPFMSNGSLLDRLYGEPAKRKILDWPTRLSIALGAARGLAYLHTFPGRSVIHRDVKSSNILLDHSMCAKVANFGFSKYAPQEGDSYVSLEVRGTAGYLDPEYYKTQQLSEKSDVFSFGVVLLEIVSGREPLNIKRPRVEWSLVEWAKPYIRASKVDEIVDPGIKGGYHAEALWRVVEVALQCLEPYSTYRPCMVDIVRELEDALIIENNASEYMKSIDSLGGSNRYSIVMDKRALPSTTSTAESTITTQNVSHPQPR

SEQ ID NO: 17605 - protein, 925 aa, Medicago sativa
  misc_feature (635)..(635): Xaa can be any naturally occurring amino acid
  unsure (1)..(925): unsure at all Xaa locations
MELQVIRIFRLVVACVLCLCIFIRSASSATKGFESISCCADSNYTDPKTTLTYTTDHIWFSDKRSCRPIPEILFSHRSNKNVRIFEIDEGKRCYTLPTIKDQVYLIRGVFPFDSLNSSFYVYIGVTELGELRSSRLEDLEIEGVFRATKDYIDFCLLKEDVNPFISQIELRPLPEEYLHGFATSVLKLISRNNLGDTNDDIRFPDDQNDRIWKRKATSTPSSALPLSSNVSNVDLKDSVTPPLQVLQTALTHPERLEFVHDGLETDDYEYSVFLHFLELNGTVRAGQRVFDIYLNNEIKKEKFDVLAGGSKNSYTALNISANGSLNITLVKASGSEFGPLLNAYEILQARSWIEETNQKDLELIQKMREELLLHNRENEALESWSGDPCMIFPWKGITCDDSTGSSIITMLDLSSNNLKGAIPYFVTKMTNLQILNLSHNQFDSLFPSFPPSSLLISLDLSYNDLDGRLPESIISLPHLKSLYFGCNPYMKDEDTTKLNSSLINTDYGRCKGKKPKFGQVFVIGAITRGSLLITLAVGILFFCRYRHKSITLEGFGGKTYPMATNIIFSLPSKDDFFIKSVSVKPFTLEYIEQATEQYKTLIGEGGFGSVYRGTLDDGQEVAVKVRSSTSTQGTXEFDNELNLLSAIQHENLVPLLGYCNEYDQQILVYPFMSNGSLLDRLYGEASKRKILDWPTRLSIALGAARGLAYLHTFPGRSVIHRDVKSSNILLDQSMCAKVADFGFSKYAPQEGDSYVSLEVRGTAGYLDPEYYKTQQLSEKSDVFSFGVVLLEIVSGREPLNIKRPRIEWSLVEWAKPYIRASKVDEIVDPGIKGGYHAEALWRVVEVALQCLEPYSTYRPCMVDIVRELEDALIIENNASEYMKSIDSLGGSNRYSIVMDKRALPSTTSTAESTITTQTLTHPQPR

SEQ ID NO: 17606 - protein, 901 aa, Medicago truncatula
MELQVIRIFRLVVAFVLCLCIFIRSASSATKGFESIACCADSNYTDPKTTLTYTTDHIWFSDKRSCRQIPEILFSHRSNKNVRKFEIYEGKRCYNLPTVKDQVYLIRGIFPFDSLNSSFYVSIGVTELGELRSSRLEDLEIEGVFRATKDYIDFCLLKEDVNPFISQIELRPLPEEYLHGFGTSVLKLISRNNLGDTNDDIRFPDDQNDRIWKRKETSTPTSALPLSFNVSNVDLKDSVTPPLQVLQTALTHPERLEFVHDGLETDDYEYSVFLHFLELNGTVRAGQRVFDIYLNNEIKKEKFDVLAGGSKNSYTALNISANGSLNITLVKASGSEFGPLLNAYEILQARSWIEETNQKDLEVIQKMREELLLHNQENEALESWSGDPCMIFPWKGITCDDSTGSSIITKLDLSSNNLKGAIPSIVTKMTNLQILDLSYNDLSGWLPESIISLPHLKSLYFGCNPSMSDEDTTKLNSSLINTDYGRCKAKKPKFGQVFVIGAITSGSLLITLAVGILFFCRYRHKSITLEGFGKTYPMATNIIFSLPSKDDFFIKSVSVKPFTLEYIEQATEQYKTLIGEGGFGSVYRGTLDDGQEVAVKVRSSTSTQGTREFDNELNLLSAIQHENLVPLLGYCNEYDQQILVYPFMSNGSLLDRLYGEASKRKILDWPTRLSIALGAARGLAYLHTFPGRSVIHRDVKSSNILLDQSMCAKVADFGFSKYAPQEGDSYVSLEVRGTAGYLDPEYYKTQQLSEKSDVFSFGVVLLEIVSGREPLNIKRPRIEWSLVEWAKPYIRASKVDEIVDPGIKGGYHAEALWRVVEVALQCLEPYSTYRPCMVDIVRELEDALIIENNASEYMKSIDSLGGSNRYSIVMDKRALPSTTSTAESTITTQTLSHPQPR

SEQ ID NO: 17607 - protein, 925 aa, Medicago truncatula
MMELQVIRIFRLVVAFVLCLCIFIRSASSATKGFESIACCADSNYTDPKTTLTYTTDHIWFSDKRSCRQIPEILFSHRSNKNVRKFEIYEGKRCYNLPTVKDQVYLIRGIFPFDSLNSSFYVSIGVTELGELRSSRLEDLEIEGVFRATKDYIDFCLLKEDVNPFISQIELRPLPEEYLHGFGTSVLKLISRNNLGDTNDDIRFPDDQNDRIWKRKETSTPTSALPLSFNVSNVDLKDSVTPPLQVLQTALTHPERLEFVHDGLETDDYEYSVFLHFLELNGTVRAGQRVFDIYLNNEIKKEKFDVLAGGSKNSYTALNISANGSLNITLVKASGSEFGPLLNAYEILQARSWIEETNQKDLEVIQKMREELLLHNQENEALESWSGDPCMIFPWKGITCDDSTGSSIITKLDLSSNNLKGAIPSIVTKMTNLQILNLSHNQFDMLFPSFPPSSLLISLDLSYNDLSGWLPESIISLPHLKSLYFGCNPSMSDEDTTKLNSSLINTDYGRCKAKKPKFGQVFVIGAITSGSLLITLAVGILFFCRYRHKSITLEGFGKTYPMATNIIFSLPSKDDFFIKSVSVKPFTLEYIEQATEQYKTLIGEGGFGSVYRGTLDDGQEVAVKVRSSTSTQGTREFDNELNLLSAIQHENLVPLLGYCNEYDQQILVYPFMSNGSLLDRLYGEASKRKILDWPTRLSIALGAARGLAYLHTFPGRSVIHRDVKSSNILLDQSMCAKVADFGFSKYAPQEGDSYVSLEVRGTAGYLDPEYYKTQQLSEKSDVFSFGVVLLEIVSEREPLNIKRPRIEWSLVEWAKPYIRASKVDEIVDPGIKGGYHAEALWRVVEVALQCLEPYSTYRPCMVDIVRELEDALIIENNASEYMKSIDSLGGSNRYSIVMDKRALPSTTSTAESTITTQTLSHPQPR

SEQ ID NO: 17608 - protein, 923 aa, Pisum sativum
MELRVICIIRLVVACVLCLCIFIRSASSATEGFESIACCADSNYTDPKTNLNYTTDYRWYSDKSNCRQIPEILLSHRSNINFRLFDIDEGKRCYNLPTIKDQVYLIRGTFPFDSVNTSFYVSIGATELGEVTSSRLEDLEIEGVFRAPKDNIDFCLLKEDVNPFISQLELRPLPEEYLHDFSTNVLKLISRNNLCGIEDDIRFPVDQNDRIWKATSTPSYALPLSFNVSNVELNGKVTPPLQVLQTALTHPERLEFVHVGLETDDYEYSVLLYFLELNDTLKAGQRVFDIYLNSEIKKEGFDVLEGGSKYSYTVLNISANGSLNITLVKASGSKFGPLLNAYEILQARPWIDETDQTDLEVIQKMRKELLLQNQDNEALESWSGDPCMLFPWKGVACDGSNGSSVITKLDLSSSNLKGTIPSSVTEMTKLQILNLSHNHFDGYIPSFPPSSLLISVDLSYNDLTGQLPESIISLPHLNSLYFGCNQHMRDDDEAKLNSSLINTDYGRCNAKKPKFGQVFMIGAITSGSILITLAVVILFFCRYRHKSITLEGFGGKTYPMATNIIFSLPSKDDFFIKSVSVKPFTLEYIELATEKYKTLIGEGGFGSVYRGTLDDGQEVAVKVRSATSTQGTREFDNELNLLSAIQHENLVPLLGYCNEYDQQILVYPFMSNGSLLDRLYGEPAKRKILDWPTRLSIALGAARGLAYLHTFPGRSVIHRDVKSSNILLDHSMCAKVADFGFSKYAPQEGDSYVSLEVRGTAGYLDPEYYKTQQLSEKSDVFSFGVVLLEIVSGREPLNIKRPRVEWSLVEWAKPYIRASKVDEIVDPGIKGGYHAEALWRVVEVALQCLEPYSTYRPCMVDIVRELEDALIIENNASEYMKSIDSLGGSNRYSIVMDKRALPSTTSTAESTITTQNVSHPQPR

SEQ ID NO: 17609 - protein, 923 aa, Pisum sativum
MELRVICIIRLVVACVLCLCIFIRSASSATEGFESIACCADSNYTDPKTNLNYTTDYRWYSDKSNCRQIPEILLSHRSNINFRLFDIDEGKRCYNLPTIKDQVYLIRGTFPFDSVNTSFYVSIGATELGEVTSSRLEDLEIEGVFRAPKDNIDFCLLKEDVNPFISQLELRPLPEEYLHDFSTNVLKLISRNNLCGIEDDIRFPVDQNDRIWKATSTPSYALPLSFNVSNVELNGKVTPPLQVLQTALTHPERLEFVHVGLETDDYEYSVLLYFLELNDTLKAGQRVFDIYLNSEIKKEGFDVLEGGSKYSYTVLNISANGSLNITLVKASGSKFGPLLNAYEILQARPWIDETDQTDLEVIQKMRKELLLQNQDNEALESWSGDPCMLFPWKGVACDGSNGSSVITKLDLSSSNLKGTIPSSVTEMTKLQILNLSHNHFDGYIPSFPPSSLLISVDLSYNDLTGQLPESIISLPHLNSLYFGCNQHMRDDDEAKLNSSLINTDYGRCNAKKPKFGQVFMIGAITSGSILITLAVVILFFCRYRHKSITLEGFGGKTYPMATNIIFSLPSKDDFFIKSVSVKPFTLEYIELATEKYKTLIGEEGFGSVYRGTLDDGQEVAVKVRSATSTQGTREFDNELNLLSAIQHENLVPLLGYCNEYDQQILVYPFMSNGSLLDRLYGEPAKRKILDWPTRLSIALGAARGLAYLHTFPGRSVIHRDVKSSNILLDHSMCAKVADFGFSKYAPQEGDSYVSLEVRGTAGYLDPEYYKTQQLSEKSDVFSFGVVLLEIVSGREPLNIKRPRVEWSLVEWAKPYIRASKVDEIVDPGIKGGYHAEALWRVVEVALQCLEPYSTYRPCMVDIVRELEDALIIENNASEYMKSIDSLGGSNRYSIVMDKRALPSTTSTAESTITTQNVSHPQPR

SEQ ID NO: 17610 - protein, 708 aa, Medicago sativa
MELQVIRIFRLVVACVLCLCIFIRSASSATKGFESIACCADSNYTDPKTTLTYTTDHIWFSDKRSCRPIPEILFSHRSNKNVRIFEIDEGKRCYTLPTIKDQVYLIRGVFPFDSLNSSFYVYIGVTELGELRSSRLEDLEIEGVFRATKDYIDFCLLKEDVNPFISQIELRPLPEEYLHGFATSVLKLISRNNLGDINDDIRFPDDRNDRIWKRKATSTPSSALPLSFNVSNVDLKDSVAPPLQVLQTALTHPERLEFVHDGLETDDYEYSVFLHFLELNGTVRAGQRVFDIYLNNEIKKEKFDVLAGGSKNSYTALNISANGSLNITLVKASGSEFGPLLNAYEILQARSWIEETNQKDLELIQKTREELLLHNQENEALESWSGDPCMIFPWKGITCDDSTGSSIITMLDLSSNNLKGAIPYFVTKMTNLQILNLSHNQFDSLFPSFPPSSLLISLDLSYNDLDGRLPESIISLPHLKSLYFGCNPYMKDEDTTKLNSSLINTDYGRCKGKKPKFGQVFVIGAITSGSLLITLAVGILFFCRYRHKSITLEGFGGKTYPMATNIIFSLPSKDDFFIKSVSVKPFTLEYIEQATEQYKTLICEGGFGSVYRGTLDDGQEVAVKVRSSTSTQGTKEFDNELNLLSAIQHENLVPLLGYCNEYDQQILVYPFMSNGSLLDRLYGEASKRKILDWPTRLSIALGAPRGLA

SEQ ID NO: 17611 - protein, 487 aa, Streptomyces coelicolor A3(2)
MMHTLPMSKVLTSLPTGERVGIAFSGGLDTSVAVAWMRDKGAVPCTYTADIGQYDEPDIASVPDRAKTYGAEVARLVDCRRRWSRRGWGALTCGAFHIRSGGRAYFNTTPLGRAVTGTLLVRAMLEDDVQIWGDGSTFKGNDIERFYRYGLLANPQLRIYKPWLDADFVTELGGRKEMSEWLVAHDFPYRDSTEKAYSTDANIWGATHEAKTLEHLDTGVETVEPIMGVRFWDPSVEIAPEDVTIGFDQGRPVTINGKEFASAVDLVMEATPSAAGTAMGMSDQIENRIIEAKSRGIYEAPGMALLHAAYERLVNAIHNEDTLAQYHTEGRPLGRLMYEGRWLDPQSLMIRESLQRWVGSAVTGEVTLRLRRGEDYSILDTTGPAFSYHPDKLSMERTEDSAFGPVDRIGQLTMRNLDIADSRAKLEQYAGSRFIGTANPPIGAAQAAATGLIGAMPEGGAQAIASRGEVSADDELLDRAAMESGTD

SEQ ID NO: 17612 - protein, 923 aa, Vicia hirsuta
MELQALWITRLAVACVLCLCIFIRSGSSATGGFESIACCADSNYTDPKTNLNYTTDYKWFSDKSSCRQIPEILLSHRSNVNFRLFDIDEGKRCYSLPTIKDQVYLIRGTFPFDSVNSSFYVSIGATELGEVTSSRLEDLEIEGVFKATKDSVDFCLLKEDVNPFISQLELRPLPEEYLRDFSTDVLKLISRNNLCGIEDDIRFPVDQNDRIWKATSTPSYALPLSLNVSNVDLKGKVTPPLQVLQTALTHPERLEFVHDGLETDDYEYSVLLYFLELNNTLTAGQRVFDIYLNSEIKKENFDVLEGGSKYSYTALNITANGSLNMTLVKASGSKFGPLLNAYEILQARPWIDETSQPDVEVIQKMRKELLLQNQDNEALESWSGDPCMIFPWKGVACDGSNGSSVITKLDLSFNDLKGTIPSSVTEMTNLQILNLSHNHFDGYIPSFPSSSLLISVDLSYNDLTGQLPESIISLPHLKSLYFGCNQHMSDDDEAKLNSSLIITDYGRCKAKKNKFGQVFVIGAITSGSILITLAVGILCFCRYRHRTITLEGFGGKTYPMATNIIFSLPSKDDFFIKSVSVKPFTLEYIELATEKYKTLIGEGGFGSVYRGTLDDGQEVAVKVRSATSTQGTREFDNELNLLSAIQHENLVPLLGYCNEYDQQILVYPFMSNGSLLDRLYGEPAKRKILDWPTRLSIALGAARGLAYLHTFPGRSVIHRDVKSSNILLDNSMCAKVADFGFSKYAPQEGDSYVSLEVRGTAGYLDPEYYKTQQLSEKSDVFSFGVVLLEIVSGREPLNIKRPRVEWSLVEWAKPYIRASKVDEIVDPGIKGGYHAEALWRVVEVALQCLEPYSTYRPCMVDIVRELEDALIIENNASEYMKSIDSLGGSNRYSIVMDKRVLPSTTTMAESTITTQNVSHPQPR

SEQ ID NO: 17613 - protein, 923 aa, Melilotus albus
  misc_feature (64)..(64): Xaa can be any naturally occurring amino acid
  unsure (1)..(923): unsure at all Xaa locations
MELQIIWILRLVVACVLCLCIFIRSASSATKGFESIACCADSSYKDLKTTLNYTTDYIWFSDKXSCRQIPEILFSHRSNKNVRLFDIDEGKRCYDLPTIKDQVYLIRGTFPFDSLNSSFYVSIGATELGEVRSSRLDDFEIEGVFRATKDYIDFCLLKKDVNPFISQLELRPLPEEYLHGLATSVLKLISRNNLGGTEDDIRFPVDQNDRIWKATSTPSSALPLPSNVSNVDLKGSVTPPLQVLQTALTHPERLEFVHDGLETDDYEYSVFLYFLELNGTLKAGQRVFDIYLNNEIKKEKLDVLAGGSKNSYTVLNISANGSLNITLVKASGSEFGPLLNAYEILQARPWIEETNQIDLEVVQMMREKLLLHNQDNEALESWSGDPCMLFPWKGIACDDSNGSSIITKLDLSSNNLKGTIPSTVTEMTNLQILNLSHNHFDGYIPSFPPSSVLISVDLSYNDLTGQLPESIISLPHLKSLYFGCNQHMSDEDTAKLNSSLINTDYGRCKAKKPKFGQVFVIGAITSGSLLITLAVGILFFCRYRHKSISLEGFGGKTYPMATNIIFSLPSKDDFFIKSVSVKPFTLEYIEQATEQYKTLIGEGGFGSVYRGTLDDGQEVAVKVRSSTSTQGTREFDNELNLLSAIQHENLVPLLGYCNEYDQQILVYPFMSNGSLLDRLYGEAAKRKILDWPTRLSIALGAARGLAYLHTFPGRSVIHRDVKSSNILLDNSMCAKVADFGFSKYAPQEGDSYVSLEVRGTAGYLDPEYYKTQQLSEKSDVFSFGVVLLEIVSGREPLNIKRPRIEWSLVEWAKPYIRASKVDEIVDPGIKGGYHAEALWRVVEVALQCLEPYSTYRPCMVDIVRELEDALIIENNASEYMKSIDSLGGSNRYSIVMDKRALPSTTSTAESAITIQTLSHPQPR

SEQ ID NO: 17614 - protein, 236 aa, Oryza sativa Japonica Group
MAPRTSDKTMSPAAAATGLALGVGGVAGAAAVGTGQHFRGVRKRPWGRYAAEIRDPAKKSRVWLGTFDTAEEAARAYDAAAREYRGAKAKTNFPYPNGAPAAGVNSGSSNSSTVESFGSDVQAPMKAMPIPPSLELDLFHRAAAAAAAGAGGMRFPFEGYPVSHPYYFFGQAAAAAAAFGSRMLKIAPAPVTVAALAQSDSDSSSIVDLAPSPPAALAKKAIAFDLDLNCPPPMEV

SEQ ID NO: 17615 - protein, 118 aa, Saccharomyces cerevisiae
MGHHHHHHMVSQETIKHVKDLIAENEIFVASKTYCPYCHAALNTLFEKLKVPRSKVLVLQLNDMKEGADIQAALYEINGQRTVPNIYINGKHIGGNDDLQELRETGELEELLEPILAN

SEQ ID NO: 17616 - protein, 483 aa, Rubrobacter xylanophilus
MAQSGGVVIVSNRAPVTFSRSESGERTYARGAGGLVTALNAVSRRAEGALWIASAASEEDVRVAREPGVCEIEDLRIVLVEHDPSAYDLMYNHLANPLLWFVQHGLYDLPYAPELGGETLRAWEEGYLPTNRNFARAAAEALSDMEEPVVLLHDYHLYMVPELLREEVGEEPLISFFVHIPWPEPGLWRVLPSYIREGVLRSLLRSDIVAFHTRRYARNFMASAAELLGAEVDPRGGAVRWGGREVWVRSYPISIDPAEFEEAAESPEVLREEEYVRNLPGALLVRVDRADLSKNVVRGFRAYGRMLELHPEMRGRVTFLAQVQPSRGDIPEYAAYAEAIRRSAGEVNEAFGTPSWRPVELSMQDNFPRSVAAYKNYDALLVNAVRDGMNLVAKEAAVVNRKDGVLILSENAGAHEELKDNALSVNPFDLDDQAAAIHRALTMPAAERARRARALREAVLSNTIEDWVAAQMHDMAARRKAFS

SEQ ID NO: 17617 - protein, 353 aa, Pereskia aculeata
  misc_feature (342)..(343): Xaa can be any naturally occurring amino acid
  unsure (1)..(353): unsure at all Xaa locations
GAFKSYKLAAKAISRLQSLPSRNLPLLCDVFVKEVSELTGYDRVMVYKFHEDEHGEVISEYRRPDLEPYLGLHYPATDIPQASRFLFLKNRVRMICDCSATPVEVIQDKKLAQPLSLGGSILRAPHGCHAQYMANMGSIASLVMAVTINEDEDEVKSDPSTGKRLWGLVVCHHTSSRLIPFPLRYACELLVQVFGMQINKEVELAAQIRESHILRIQTVLCDMLLRDSPVAIVTQSPNVMDLVKCDGAALYYKGQVWLLGISPTEDQIKNITQWLLEYHGSTKGLSTDSLMEAGYPGASELGDAVCGMAAVRIRSKDVLFWFRSHTAKEIKWGGAKHDPVDXXDGRKMHPRSS

SEQ ID NO: 17618 - protein, 370 aa, Pereskia aculeata
  misc_feature (15)..(15): Xaa can be any naturally occurring amino acid
  unsure (1)..(370): unsure at all Xaa locations
GAFKSYKLAAKAISXLQSLPSRNLPLLCDVFVKEVSELTGYDRVMVYKFHEDEHGEVISEYRRPDLEPYLGLHYPATDIPQASRFLFLKNRVRMICDCSATPVEVIQDKKLAQPLSLGGSILRAPHGCHAQYMANMGSIASLVMAVTINEDEDEVKSDPSTGKRLWGLVVCHHTSSRLIPFPLRYACELLVQVFGMQINKEVELAAQIRESHILRIQTVLCDMLLRDSPVAIVTQSPNVMDLVKCDGAALYYKGQVWLLGISPTEDQIKNITQWLLEYHGSTKGLSTDSLMEAGYPGASELGDAVCGMAAVRIRSKDVLFWFRSHTAKEIKWGGAKHDPVDNDDGRKMHPRSSFKAFLEVVKWRSQPWED

SEQ ID NO: 17619 - protein, 366 aa, Pereskia aculeata
  misc_feature (11)..(11): Xaa can be any naturally occurring amino acid
  misc_feature (35)..(35): Xaa can be any naturally occurring amino acid
  misc_feature (40)..(40): Xaa can be any naturally occurring amino acid
  misc_feature (53)..(53): Xaa can be any naturally occurring amino acid
  misc_feature (62)..(62): Xaa can be any naturally occurring amino acid
  misc_feature (324)..(324): Xaa can be any naturally occurring amino acid
  unsure (1)..(366): unsure at all Xaa locations
SYKLAAKAISXLQSLPSRNLPLLCDVFVKEVSELXGYDRXMVYKFHEDEHGEXISEYRRPDXEPYLGLHYPATDIPQASRFLFLKNRVRMICDCSATPVEVIQDKKLAQPLSLGGSILRAPHGCHAQYMANMGSIASLVMAVTINEDEDEVKSDPSTGKRLWGLVVCHHTSSRLIPFPLRYACELLVQVFGMQINKEVELAAQIRESHILRIQTVLCDMLLRDSPVAIVTQSPNVMDLVKCDGAALYYKGQVWLLGISPTEDQIKNITQWLLEYHGSTKGLSTDSLMEAGYPGASELGDAVCGMAAVRIRSKDVLFWFRSHTAXEIKWGGAKHDPVDNDDGRKMHPRSSFKAFLEVVKWRSQPWED

SEQ ID NO: 17620 - protein, 369 aa, Pereskia aculeata
  misc_feature (15)..(15): Xaa can be any naturally occurring amino acid
  unsure (1)..(369): unsure at all Xaa locations
GAFKSYKLAAKAISXLQSLPSRNLPLLCDVFVKEVSELTGYDRVMVYKFHEDEHGEVISEYRRPDLEPYLGLHYPATDIPQASRFLFLKNRVRMICDCSATPVEVIQDKKLAQPLSLGGSILRAPHGCHAQYMANMGSIASLVMAVTINEDEDEVKSDPSTGKRLWGLVVCHHTSSRLIPFPLRYACELLVQVFGMQINKEVELAAQIRESHILRIQTVLCDMLLRDSPVAIVTQSPNVMDLVKCDGAALYYKGQVWLLGISPTEDQIKNITQWLLEYHGSTKGLSTDSLMEAGYPGASELGDAVCGMAAVRIRSKDVLFWFRSHTAKEIKWGGAKHDPVDNDDGRKMHPRSSFKAFLEVVKWRSQPWE

SEQ ID NO: 17621 - protein, 370 aa, Pereskia aculeata
  misc_feature (328)..(328): Xaa can be any naturally occurring amino acid
  unsure (1)..(370): unsure at all Xaa locations
GAFKSYKLAAKAISRLQSLPSRNLPLLCDVFVKEVSELTGYDRVMVYKFHEDEHGEVISEYRRPDLEPYLGLHYPATDIPQASRFLFLKNRVRMICDCSATPVEVIQDKKLAQPLSLGGSILRAPHGCHAQYMANMGSIASLVMAVTINEDEDEVKSDPSTGKRLWGLVVCHHTSSRLIPFPLRYACELLVQVFGMQINKEVELAAQIRESHILRIQTVLCDMLLRDSPVAIVTQSPNVMDLVKCDGAALYYKGQVWLLGISPTEDQIKNITQWLLEYHGSTKGLSTDSLMEAGYPGASELGDAVCGMAAVRIRSKDVLFWFRSHTAXEIKWGGAKHDPVDNDDGRKMHPRSSFKAFLEVVKWRSQPWED

SEQ ID NO: 17622 - protein, 370 aa, Pereskia aculeata
  misc_feature (15)..(15): Xaa can be any naturally occurring amino acid
  misc_feature (42)..(42): Xaa can be any naturally occurring amino acid
  unsure (1)..(370): unsure at all Xaa locations
GAFKSYKLAAKAISXLQSLPSRNLPLLCDVFVKEVSELTGYXRVMVYKFHEDEHGEVISEYRRPDLEPYLGLHYPATDIPQASRFLFLKNRVRMICDCSATPVEVIQDKKLAQPLSLGGSILRAPHGCHAQYMANMGSIASLVMAVTINEDEDEVKSDPSTGKRLWGLVVCHHTSSRLIPFPLRYACELLVQVFGMQINKEVELAAQIRESHILRIQTVLCDMLLRDSPVAIVTQSPNVMDLVKCDGAALYYKGQVWLLGISPTEDQIKNITQWLLEYHGSTKGLSTDSLMEAGYPGASELGDAVCGMAAVRIRSKDVLFWFRSHTAKEIKWGGAKHDPVDNDDGRKMHPRSSFKAFLEVVKWRSQPWED

SEQ ID NO: 17623 - protein, 370 aa, Pereskia aculeata
  misc_feature (15)..(15): Xaa can be any naturally occurring amino acid
  misc_feature (57)..(57): Xaa can be any naturally occurring amino acid
  misc_feature (66)..(66): Xaa can be any naturally occurring amino acid
  unsure (1)..(370): unsure at all Xaa locations
GAFKSYKLAAKAISXLQSLPSRNLPLLCDVFVKEVSELTGYDRVMVYKFHEDEHGEXISEYRRPDXEPYLGLHYPATDIPQASRFLFLKNRVRMICDCSATPVEVIQDKKLAQPLSLGGSILRAPHGCHAQYMANMGSIASLVMAVTINEDEDEVKSDPSTGKRLWGLVVCHHTSSRLIPFPLRYACELLVQVFGMQINKEVELAAQIRESHILRIQTVLCDMLLRDSPVAIVTQSPNVMDLVKCDGAALYYKGQVWLLGISPTEDQIKNITQWLLEYHGSTKGLSTDSLMEAGYPGASELGDAVCGMAAVRIRSKDVLFWFRSHTAKEIKWGGAKHDPVDNDDGRKMHPRSSFKAFLEVVKWRSQPWED

SEQ ID NO: 17624 - protein, 370 aa, Pereskia aculeata
  misc_feature (15)..(15): Xaa can be any naturally occurring amino acid
  misc_feature (328)..(328): Xaa can be any naturally occurring amino acid
  misc_feature (341)..(343): Xaa can be any naturally occurring amino acid
  misc_feature (356)..(356): Xaa can be any naturally occurring amino acid
  unsure (1)..(370): unsure at all Xaa locations
GAFKSYKLAAKAISXLQSLPSRNLPLLCDVFVKEVSELTGYDRVMVYKFHEDEHGEVISEYRRPDLEPYLGLHYPATDIPQASRFLFLKNRVRMICDCSATPVEVIQDKKLAQPLSLGGSILRAPHGCHAQYMANMGSIASLVMAVTINEDEDEVKSDPSTGKRLWGLVVCHHTSSRLIPFPLRYACELLVQVFGMQINKEVELAAQIRESHILRIQTVLCDMLLRDSPVAIVTQSPNVMDLVKCDGAALYYKGQVWLLGISPTEDQIKNITQWLLEYHGSTKGLSTDSLMEAGYPGASELGDAVCGMAAVRIRSKDVLFWFRSHTAXEIKWGGAKHDPVXXXDGRKMHPRSSFKXFLEVVKWRSQPWED

SEQ ID NO: 17625 - protein, 358 aa, Pereskia aculeata
  misc_feature (3)..(3): Xaa can be any naturally occurring amino acid
  misc_feature (27)..(27): Xaa can be any naturally occurring amino acid
  misc_feature (32)..(32): Xaa can be any naturally occurring amino acid
  unsure (1)..(358): unsure at all Xaa locations
ISXLQSLPSRNLPLLCDVFVKEVSELXGYDRXMVYKFHEDEHGEVISEYRRPDLEPYLGLHYPATDIPQASRFLFLKNRVRMICDCSATPVEVIQDKKLAQPLSLGGSILRAPHGCHAQYMANMGSIASLVMAVTINEDEDEVKSDPSTGKRLWGLVVCHHTSSRLIPFPLRYACELLVQVFGMQINKEVELAAQIRESHILRIQTVLCDMLLRDSPVAIVTQSPNVMDLVKCDGAALYYKGQVWLLGISPTEDQIKNITQWLLEYHGSTKGLSTDSLMEAGYPGASELGDAVCGMAAVRIRSKDVLFWFRSHTAKEIKWGGAKHDPVDNDDGRKMHPRSSFKAFLEVVKWRSQPWED

SEQ ID NO: 17626 - protein, 358 aa, Pereskia aculeata
  misc_feature (15)..(15): Xaa can be any naturally occurring amino acid
  misc_feature (342)..(343): Xaa can be any naturally occurring amino acid
  unsure (1)..(358): unsure at all Xaa locations
GAFKSYKLAAKAISXLQSLPSRNLPLLCDVFVKEVSELTGYDRVMVYKFHEDEHGEVISEYRRPDLEPYLGLHYPATDIPQASRFLFLKNRVRMICDCSATPVEVIQDKKLAQPLSLGGSILRAPHGCHAQYMANMGSIASLVMAVTINEDEDEVKSDPSTGKRLWGLVVCHHTSSRLIPFPLRYACELLVQVFGMQINKEVELAAQIRESHILRIQTVLCDMLLRDSPVAIVTQSPNVMDLVKCDGAALYYKGQVWLLGISPTEDQIKNITQWLLEYHGSTKGLSTDSLMEAGYPGASELGDAVCGMAAVRIRSKDVLFWFRSHTAKEIKWGGAKHDPVDXXDGRKMHPRSSFKAFL

SEQ ID NO: 17627 - protein, 368 aa, Pereskia aculeata
  misc_feature (15)..(15): Xaa can be any naturally occurring amino acid
  unsure (1)..(368): unsure at all Xaa locations
GAFKSYKLAAKAISXLQSLPSRNLPLLCDVFVKEVSELTGYDRVMVYKFHEDEHGEVISEYRRPDLEPYLGLHYPATDIPQASRFLFLKNRVRMICDCSATPVEVIQDKKLAQPLSLGGSILRAPHGCHAQYMANMGSIASLVMAVTINEDEDEVKSDPSTGKRLWGLVVCHHTSSRLIPFPLRYACELLVQVFGMQINKEVELAAQIRESHILRIQTVLCDMLLRDSPVAIVTQSPNVMDLVKCDGAALYYKGQVWLLGISPTEDQIKNITQWLLEYHGSTKGLSTDSLMEAGYPGASELGDAVCGMAAVRIRSKDVLFWFRSHTAKEIKWGGAKHDPVDNDDGRKMHPRSSFKAFLEVVKWRSQPW

SEQ ID NO: 17628 - protein, 344 aa, Pereskia aculeata
  misc_feature (7)..(7): Xaa can be any naturally occurring amino acid
  misc_feature (31)..(31): Xaa can be any naturally occurring amino acid
  misc_feature (91)..(91): Xaa can be any naturally occurring amino acid
  unsure (1)..(344): unsure at all Xaa locations
AAKAISXLQSLPSGNLPLLCDVFVKEVSELXGYDRVMVYKFHEDEHGEVISEYRRPDLEPYLGLHYPATDIPQASRFLFLKNRVRMICDCXATPVEVIQDKKLAQPLSLGGSILRAPHGCHAQYMANMGSIASLVMAVTINEDEDEVKSDPSTGKRLWGLVVCHHTSSRLIPFPLRYACELLVQVFGMQINKEVELAAQIRESHILRIQTVLCDMLLRDSPVAIVTQSPNVMDLVKCDGAALYYKGQVWLLGISPTEDQIKNITQWLLEYHGSTKGLSTDSLMEAGYPGASELGDAVCGMAAVRIRSKDVLFWFRSHTAKEIKWGGAKHDPVDNDDGRKMHPRS

SEQ ID NO: 17629 - protein, 370 aa, Pereskia aculeata
  misc_feature (15)..(15): Xaa can be any naturally occurring amino acid
  unsure (1)..(370): unsure at all Xaa locations
GAFKSYKLAAKAISXLQSLPSHNLPLLCDVFVKEVSELTGYDRVMVYKFHEDEHGEVISEYRRPDLEPYLGLHYPATDIPQASRFLFLKNRVRMICDCSATPVEVIQDKKLAQPLSLGGSILRAPHGCHAQYMANMGSIASLVMAVTINEDEDEVKSDPSTGKRLWGLVVCHHTSSRLIPFPLRYACELLVQVFGMQINKEVELAAQIRESHILRIQTVLCDMLLRDSPVAIVTQSPNVMDLVKCDGAALYYKGQVWLLGISPTEDQIKNITQWLLEYHGSTKGLSTDSLMEAGYPGASELGDAVCGMAAVRIRSKDVLFWFRSHTAKEIKWGGAKHDPVDNDDGRKMHPRSSFKAFLEVVKWRSQPWED

SEQ ID NO: 17630 - protein, 353 aa, Pereskia aculeata
  misc_feature (15)..(15): Xaa can be any naturally occurring amino acid
  misc_feature (42)..(42): Xaa can be any naturally occurring amino acid
  misc_feature (326)..(326): Xaa can be any naturally occurring amino acid
  unsure (1)..(353): unsure at all Xaa locations
GAFKSYKLAAKAISXLQSLPSHNLPLLCDVFVKEVSELTGYXRVMVYKFHEDEHGEVISEYRRPDLEPYLGLHYPATDIPQASRFLFLKNRVRMICDCSATPVEVIQDKKLAQPLSLGGSILRAPHGCHAQYMANMGSIASLVMAVTINEDEDEVKSDPSTGKRLWGLVVCHHTSSRLIPFPLRYACELLVQVFGMQINKEVELAAQIRESHILRIQTVLCDMLLRDSPVAIVTQSPNVMDLVKCDGAALYYKGQVWLLGISPTEDQIKNITQWLLEYHGSTKGLSTDSLMEAGYPGASELGDAVCGMAAVRIRSKDVLFWFRSHXAKEIKWGGAKHDPVDNDDGRKMHPRSS

SEQ ID NO: 17631 - protein, 369 aa, Pereskia aculeata
  misc_feature (15)..(15): Xaa can be any naturally occurring amino acid
  unsure (1)..(369): unsure at all Xaa locations
GAFKSYKLAAKAISXLQSLPSHNLPLLCDVFVKEVSELTGYDRVMVYKFHEDEHGEVISEYRRPDLEPYLGLHYPATDIPQASRFLFLKNRVRMICDCSATPVEVIQDKKLAQPLSLGGSILRAPHGCHAQYMANMGSIASLVMAVTINEDEDEVKSDPSTGKRLWGLVVCHHTSSRLIPFPLRYACELLVQVFGMQINKEVELAAQIRESHILRIQTVLCDMLLRDSPVAIVTQSPNVMDLVKCDGAALYYKGQVWLLGISPTEDQIKNITQWLLEYHGSTKGLSTDSLMEAGYPGASELGDAVCGMAAVRIRSKDVLFWFRSHTAKEIKWGGAKHDPVDNDDGRKMHPRSSFKAFLEVVKWRSQPWE

SEQ ID NO: 17632 - protein, 369 aa, Pereskia aculeata
  misc_feature (54)..(54): Xaa can be any naturally occurring amino acid
  misc_feature (69)..(69): Xaa can be any naturally occurring amino acid
  misc_feature (71)..(74): Xaa can be any naturally occurring amino acid
  misc_feature (152)..(152): Xaa can be any naturally occurring amino acid
  misc_feature (195)..(195): Xaa can be any naturally occurring amino acid
  misc_feature (232)..(233): Xaa can be any naturally occurring amino acid
  unsure (1)..(369): unsure at all Xaa locations
GAFKSYKLAAKAISRLQSLPSRNLPLLCDVFVKEVSELTGYDRVMVYKFHEDEXGEVISEYRRPDLEPXLXXXXPATDIPQASRFLFLKNRVRMICDCSATPVEVIQDKKLAQPLSLGGSILRAPHGCHAQYMANMGSIASLVMAVTINEDXDEVKSDPSTGKRLWGLVVCHHTSSRLIPFPLRYACELLVQVFXMQINKEVELAAQIRESHILRIQTVLCDMLLRDSPVAXXTQSPNVMDLVKCDGAALYYKGQVWLLGISPTEDQIKNITQWLLEYHGSTKGLSTDSLMEAGYPGASELGDAVCGMAAVRIRSKDVLFWFRSHTAKEIKWGGAKHDPVDNDDGRKMHPRSSFKAFLEVVKWRSQPWE

SEQ ID NO: 17633 - protein, 370 aa, Pereskia aculeata
  misc_feature (15)..(15): Xaa can be any naturally occurring amino acid
  misc_feature (304)..(304): Xaa can be any naturally occurring amino acid
  unsure (1)..(370): unsure at all Xaa locations
GAFKSYKLAAKAISXLQSLPSRNLPLLCDVFVKEVSELTGYDRVMVYKFHEDEHGEVISEYRRPDLEPYLGLHYPATDIPQASRFLFLKNRVRMICDCSATPVEVIQDKKLAQPLSLGGSILRAPHGCHAQYMANMGSIASLVMAVTINEDEDEVKSDPSTGKRLWGLVVCHHTSSRLIPFPLRYACELLVQVFGMQINKEVELAAQIRESHILRIQTVLCDMLLRDSPVAIVTQSPNVMDLVKCDGAALYYKGQVWLLGISPTEDQIKNITQWLLEYHGSTKGLSTDSLMEAGYPGASELGDXVCGMAAVRIRSKDVLFWFRSHTAKEIKWGGAKHDPVDNDDGRKMHPRSSFKAFLEVVKWRSQPWED

SEQ ID NO: 17634 - protein, 370 aa, Pereskia aculeata
  misc_feature (15)..(15): Xaa can be any naturally occurring amino acid
  misc_feature (39)..(39): Xaa can be any naturally occurring amino acid
  unsure (1)..(370): unsure at all Xaa locations
GAFKSYKLAAKAISXLQSLPSRNLPLLCDVFVKEVSELXGYDRVMVYKFHEDEHGEVISEYRRPDLEPYLGLHYPATDIPQASRFLFLKNRVRMICDCSATPVEVIQDKKLAQPLSLGGSILRAPHGCHAQYMANMGSIASLVMAVTINEDEDEVKSDPSTGKRLWGLVVCHHTSSRLIPFPLRYACELLVQVFGMQINKEVELAAQIRESHILRIQTVLCDMLLRDSPVAIVTQSPNVMDLVKCDGAALYYKGQVWLLGISPTEDQIKNITQWLLEYHGSTKGLSTDSLMEAGYPGASELGDAVCGMAAVRIRSKDVLFWFRSHTAKEIKWGGAKHDPVDNDDGRKMHPRSSFKAFLEVVKWRSQPWED

SEQ ID NO: 17635 - protein, 370 aa, Pereskia aculeata
  misc_feature (15)..(15): Xaa can be any naturally occurring amino acid
  misc_feature (99)..(99): Xaa can be any naturally occurring amino acid
  unsure (1)..(370): unsure at all Xaa locations
GAFKSYKLAAKAISXLQSLPSRNLPLLCDVFVKEVSELTGYDRVMVYKFHEDEHGEVISEYRRPDLEPYLGLHYPATDIPQASRFLFLKNRVRMICDCXATPVEVIQDKKLAQPLSLGGSILRAPHGCHAQYMANMGSIASLVMAVTINEDEDEVKSDPSTGKRLWGLVVCHHTSSRLIPFPLRYACELLVQVFGMQINKEVELAAQIRESHILRIQTVLCDMLLRDSPVAIVTQSPNVMDLVKCDGAALYYKGQVWLLGISPTEDQIKNITQWLLEYHGSTKGLSTDSLMEAGYPGASELGDAVCGMAAVRIRSKDVLFWFRSHTAKEIKWGGAKHDPVDNDDGRKMHPRSSFKAFLEVVKWRSQPWED

SEQ ID NO: 17636 - protein, 370 aa, Pereskia aculeata
  misc_feature (15)..(15): Xaa can be any naturally occurring amino acid
  misc_feature (328)..(328): Xaa can be any naturally occurring amino acid
  unsure (1)..(370): unsure at all Xaa locations
GAFKSYKLAAKAISXLQSLPSRNLPLLCDVFVKEVSELTGYDRVMVYKFHEDEHGEVISEYRRPDLEPYLGLHYPATDIPQASRFLFLKNRVRMICDCSATPVEVIQDKKLAQPLSLGGSILRAPHGCHAQYMANMGSIASLVMAVTINEDEDEVKSDPSTGKRLWGLVVCHHTSSRLIPFPLRYACELLVQVFGMQINKEVELAAQIRESHILRIQTVLCDMLLRDSPVAIVTQSPNVMDLVKCDGAALYYKGQVWLLGISPTEDQIKNITQWLLEYHGSTKGLSTDSLMEAGYPGASELGDAVCGMAAVRIRSKDVLFWFRSHTAXEIKWGGAKHDPVDNDDGRKMHPRSSFKAFLEVVKWRSQPWED

SEQ ID NO: 17637 - protein, 210 aa, Medicago truncatula
MCGILAVLGCSDDSQAKRVRILELSRRLKHRGPDWSGLRQHGDNYLAHQRLAIVDPASGDQPLFNEDKSIIVTVNGEIYNHEDLRKQLPNHKFRTQCDCDVIAHLYEEYGENFVDVLDGIFSFVLLDTRDNSFIVARDAIGVTSLYIGWGLDGSVWIASELKGLNDECEHFEVFPPGHLYSSKDREFRRWYNPPWFNEAIIPTTPYDPLV

SEQ ID NO: 17638 - protein, 196 aa, Medicago truncatula
MAARAGVYLLVFMSLVTAESSITPSEFIRSSCRATRYPVLCVQCLMGYASVIGQSERQLTITALSVSISRTRSSASFVKKISKARGIKPREYRAVQDCIENMGDSLDSLSQSVRELGNIGHAVGEDFVWHMTNVQTWVSAALTDDNTCLDGFAGPSMNGIVKAAIKDRVVNVAQVTSNTLALVNRFASSHRTAETP

SEQ ID NO: 17639 - protein, 276 aa, Medicago truncatula
MTDVPFGVLLSGGLDSSLVAAVTARYLAGTKAAKQWGAKLHSFCVGLKGTPDLKAGREVADFLGTVHHEFQFTIQDGIDAIEDVIYHTETYDVTTIRAATPMFLMSRKIKSSGVKWVISGEGSDEIFGGYLYFHKAPNKEEFHQETCRKIKALHRYDCLRANKSTYAWGLEARVPFLDKDFIKVAMDIDPEYKMIKHEEGRIEKWILRKAFDDEENPYLPKHILYRQKEQFSDGVGYGWIDGIKDHAAKHVTDRMMLNASHIFPFNTPLTKEAYYY

SEQ ID NO: 17640 - protein, 290 aa, Medicago truncatula
MQDLERACKDHYTKRCWGIGLGLGFRVISLSHGFRKLSIDHIVSAYKRTSRRAIFLDYDGTLVPQSYINKTPNPEVVSVLNSLCNDTKNIVFIVSGRARDSLNEWFTSCKLLGLAAEHGYFLRWNSDSEWETSHLFADLDWKQVVLPVMQSYTEATDGSNIEVKESALVWHHQDADPDFGSCQAKELLDHLESVLANEPAIVKRGQHIVEVKPQGVTKGLVAEKVLLNMVNAGNPPDFVMCIGDDRSDEDMFESILSTVSCPSLPSAPEIFACTVGRKPSKAKYFLDDTT

SEQ ID NO: 17641 - protein, 270 aa, Medicago truncatula
MILPTFLRKRFHRVKLGFFLHRPFPSSEIYRTLPVRDEILKGLLNSDLIGFHTFDYARHFLSCCSRMLGLDYESKRGHIGLDYFGRTIFIKILPVGIHMGRLDSVLNLPSTSSKLKEIQEEFKDKKVILGVDDMDIFKGINLKFLAVEQLLQQNPNLQGEVVLVQIINPARGSGKDVQEAKKEAYLIAKRINDIYGSKHYQPVIIIDRSAPRFEKSAYYALADCCIVNAVRDGMNLVPYKYIVCRQGTAKLDEAVGRQSDSPRTSMLVVS

SEQ ID NO: 17642 - protein, 101 aa, Medicago truncatula
MSSGAAAPNTEEDKKPEAGGAHINLKVKGQDGNEVFFRIKRNTQLKKLMNAYCDRQSVDFNAIAFLFDGRRLRAEQTPDELEMEDGDEIDAMLHRTGGSVV

SEQ ID NO: 17643 - protein, 186 aa, Medicago truncatula
MATNVLLFLLLTLLSIATSTPTNFIKSSCSTTSYPTLCVESLSAYATTIQQDPHQLVQTALSLSLNKTQSTKGFVTKCKKFKGLKPREYAALHDCVEEITDSVDRLSRSLKELKLCKINGQDFNWHISNVQTWVSSSMTDASTCSDGFGGKALDGRMKTSIRSRMVNLAQVTSNALSLINQYGTNH

SEQ ID NO: 17644 - protein, 196 aa, Medicago truncatula
MGRGRVELKRIENKINRQVTFAKRRNGLLKKAYELSVLCDAEVALIIFSNRGKLYEFCSSPSMLKTPKILSSLNANLIHLSSQVRSTKTQFMLDQLADLQNKEHMLVEANRSLSMKLEEININSRNQYRQTWEAGDQSMAYGNQNAHSQSFFQPLECNPTLQIGTDYRYSPPVASDQLTATTQAQQVNGFIPGWML

SEQ ID NO: 17645 - protein, 195 aa, Medicago truncatula
MAFAGTTQKCMACNKTVYLVDKLTADNRIFHKACFRCHHCKGTLKLSNYNSFEGVLYCRPHFDQLFKRTGSLEKSFEGTPKIVKPERNIDNEKPAAAKASSMFGGTRDKCSGCQKTVYPTEKVTVNGTPYHKSCFKCCHGGCTISPSNYIAHEGKLYCKHHHIQLIKQKGNLSQLEGDHEKNAGKINGEEVAAET

SEQ ID NO: 17646 - protein, 156 aa, Medicago truncatula
MAFSSFLGRVLFASIFILSAYQEYNEFGVEGGPSAKALKPKLDSFAHRIHSQVGFQLPEIDIKLVITGAIALKGLGGVLFIFGSSFGALLLLLHQLIATPIRYDFYNYDNEDKEFTQLFIKFTQNMALFGALLFFIGMKNSIPRRQPKKALKTKTY

SEQ ID NO: 17647 - protein, 160 aa, Medicago truncatula
MSDEEHHFESKADAGASKTYPQQAGTIRKNGYIVIKNRPRKVVEVSTSKTGKHGHAKCHFVAIDIFTSKKLEDIVPSSHNCDVPHVNRTDYQLIDISEDGFVSLLTENGNTKDDLKLPTDDNLLTQIKEGFAEGKDLVVSVMSSMGEEQINALKDIGPKN

SEQ ID NO: 17648 - protein, 294 aa, Medicago truncatula
MKPIFCGNLDFDARQSDVERLFRKYGKIDRVDLKSGFAFIYMEGERDAEYAIRRLDQTEFGRKGRRIRVEWTKAERDNRRSGGDSKKSSTNTKPSKTLFIINFDPVHTRTRDLERHFDPYGKISNLRIRRNFAFIQFETQEEATKALEATNLSKFMDRVITVEYAIRDDDVKRDGYSPDRRGRGSPDGRYGRGSPDGRYGRGRSPSPYRRGRGSPDYGRGSNPASRPEPGGSPKYERAESPANGRYDSRSPPPRGSNPPSRPEARGSPKYERAESPMNRRYDSRSPPPRDRSRS

SEQ ID NO: 17649 - protein, 269 aa, Medicago truncatula
MGLNDQDSLHLVLGLSLNTSTTPKEITTTTPMNPYSTSNEPSLTLGLSGESYNLISHKQATKGYGEELCRQTSSPHSVVNSSFSSGRVLQVKRERDEEEEEVEERVSSRVSDEDEDATNARKKLRLTKEQSLLLEESFKLHSTLNPKQKQALARQLNLRPRQVEVWFQNRRARTKLKQTEVDCEFLKKCCETLTDENRRLKKELQELKSLKVAQPLYMPMPAATLSICPSCERLGRVADGGGGSNKITAFTMAPNTHFYNPFNNPSAAC

SEQ ID NO: 17650 - protein, 379 aa, Medicago truncatula
MLRLCLSPLDFCFRRRGASDFLLWHTDLKPHASGDFSIAVAQANYSLEDQSQVFTSPSATYVGVYDGHGGPEASRFVNNRLFPYLHKFASEQGGLSADVIKKAFSKTEEDFLHLVKLSLPISPQIASVGSCCLLGAISDNVLYVANLGDSRVVLGRKYLENKNCRVEAVRLSTDHNVADEEVRREVEALHPDDSHIVVYSRGVWRIKGIIQVSRSIGDVYLKRPDFYRDPIFRQFGNPIPLKRPVMTAEPSIIIRELESDDLFLIFASDGLWEQLSDEAAVDIVFKYPRAGIAKRLVRAALQEAAKKREMRYADIKKIDKGIRRHFHDDITVIVIYLDQHGSSSSGEFKQTAVGYTTAPVDIFSLNADESEKSMLGSVG

SEQ ID NO: 17651 - protein, 289 aa, Medicago truncatula
MKAIFCGNFEYDCRESELERLFRRYGKVDRVDMKAGFAFIYMEDERDAEAVIRALDRIEFGRKGRRLRVEWTKQERGVRRPAERPKRSSANARPSKTLFVINFDTYQTRTRDLERHFEPYGKIVSVRIRKNFAFVQYESEDDACKALEATNNSKLMDRVISVEFAARDDDRRNGHSPDRGRDRQRDRSRDGRRSPSPYRRERGSPDYGRGPSPYKRERSSPDYGRGTAVVEAPIEGSEVVLLMGVETLVLTEGRGMVLRLFATPAAVLIIKSGGELTDLGPIVLKKERG

SEQ ID NO: 17652 - protein, 211 aa, Medicago truncatula
MSDEDEYRCFVGGLAWSTSDRKLRDTFEKFGKLTEAKVVVDKFSGRSRGFGFVTYDEKKVMEDAIDAMNGIDLDGRTITVDRAQPQQGSARDDGDRYRERGRDRDRDYRGGRGSNDGGCFNCGKPGHFARECPSGEGGRGGGGRYGGRESRYGGSGGGGGGHYGPDRNGDRSSGGRSRDGGSRGDSGSDRYYRDRDRAGPYERRGSGGGYR

SEQ ID NO: 17653 - protein, 231 aa, Medicago truncatula
MAFEHEDFFTQEWKAIPNSGTETEKNCDSCFDCNICLDFAHEPVVTLCGHLYCWSCIYKWLFVQSASLAPDEPPQCPVCKDGISHTKMVPLYGRGQTLSRCDRDSDAKPTLEDISIPPRPPASGIQSLLAMATSPQNGSRQQLPYRNPYQTQHINSSTYQDNDTPQMHNLGTFMTPLFPQFVFGFGNSENSHHMVGNSSSRWRRQEMLANKSLNRISFFLFLCFLLCFILF

SEQ ID NO: 17654 - protein, 372 aa, Medicago truncatula
MVEHSSGTNLSYRGDIVGMEGGTSLQDDSKYYDDDGRVKRTGTIWTTCSHIITAVIGSGVLSLAWSIAQMGWVAGPGAMIFFSIITLYTSSFLADCYRCGDTEFGKRNYTFMDAVSNILGGPSVKICGIVQYLNLFGSAIGYNIAAAMSMMEIKKSLCVHTSDGKDACHISGNPYMIAFGVAQLFLSQIPDFHNMWWLSIVAAVMSFFYSTIALALGISKVAENGTVMGSLTGVSVGTVTPAQKVWGVFQGLGNIAFAYSYSFVLLEIQDTIKSPPSEGKAMKIAAKISIAVTTTFYLLCGCMGYAAFGGNAPGNLLAGFGVSKAYWVVDAANAAIVIHLFGAYQVYAQPPICFRRERGSKKMAQNWQRIQS

SEQ ID NO: 17655 - protein, 339 aa, Medicago truncatula
MERYEIIKDIGSGNFGVAKLIREKWSGELYAVKFIERGFKIDEHVQREIINHRSLKHPNIVRFKEVLLTPTHLAIVMEYAAGGELFERICTAGRFSEDEARYFFQQLISGVSYCHSMEICHRDLKLENTLLDGSPAPRLKICDFGYSKSSVLHSQPKSTVGTPAYIAPEVLSRREYDGKIADVWSCGVTLYVMLVGAYPFEDPEDPKNFKKTLQRILSVHYSIPDYVRITQECRHLLSRIFVANPDKRITIPEIKKHPWFLKNLPLEFMEDGENWSQNDESNSSQNIEEILTIIQEAMKAGDGPKVGDQFLGGSMDFDDLDTDADIDDIETSGDFVCAL

SEQ ID NO: 17656 - protein, 491 aa, Medicago truncatula
MGGSVRDVKSKSELDEVVRGGSPAVLHFWASWCEASKHMDQLFSHLAIDFPHTHFLRVEAEEQPEISEAYSVSAVPFFVFFKDGKTVDTLEGADPSSLANKVSKVAGSINSGDAASPASLGMAAGSAVLETVKELAQDNLSSNEKSKVQPGLSSHLKKRLQELVDSHPVLLFMKGSPEEPKCGFSRKVVDILKEEKVKFGSFDILSDSEVREGLKKFSNWPTFPQLYCKGELVGGCDIAIAMHESGELKDVFKDHGIDTVDETNITDSGNTKGGISKSTDLSTNLASRLDGLVNSGSVMLFMKGKPDEPKCGFSRKVVEILRQEDVPFESFDILTDEEVRQGLKVYSNWSSYPQLYIKGELIGGSDIVLEMQKSGELQKTLHEKGVLPKETIEDRLKKLIASSPVMLFMKGTPDAPRCGFSSRVVNALREEGVVDFGHFDILSDDEVRQGIKVFSNWPTFPQLYYKGELIGGCDIIMELRNNGELKSTLSE

SEQ ID NO: 17657 - protein, 210 aa, Medicago truncatula
MVFSSIPSYLDPLNWQQVHGAGSIIRPGSIPDQAQAQAAHEVHTGQVQTHQAKLPPPSETNLKCPRCESTNTKFCYYNNYNLSQPRHFCKTCRRYWTRGGALRNVPVGGGCRRSKKTKKSNTSSTPSKSPISNSNDKDYSTSASAIHSTSTPLGEFLHPTNRPNYMTSLQNLNRFGVGNMFQIGDYSSTTGGGEGGVVDQWRFSAVSFHE

SEQ ID NO: 17658 - protein, 407 aa, Medicago truncatula
MAPAAASSDSSIQPRDVCIVGVARTPMGAFLGTLSSVPATKLGSIAIEAALKRANVDPAIVEEVFFGNVLSANLGQAPARQTALGAGLSKSVVCTTVNKVCASGMKATMLAAQSIQLGINDVVVAGGMENMSSVPKYLAEARKGSRLGHDSLVDGMLKDGLWDVYKDVGMGVCAELCADNHSITREDQDNYAVQSFERGISAQENGYFGWEITPVEVSGGRGRPSTIVDKDEGLGKFDAAKLRKLRPSFKETGGSVTAGNASSISDGATALVLVSGEKALKLGLQVIAKITGYADAAQDPELFTTAPAIAVPKAIANAGLETSKIDFYEINEAFAVVALANQKLLGLDSAKVNVHGGAVSLGHPLGCSGARILVTLLGVLKQKNGKYGVGGVCNGGGGASALVVELL

SEQ ID NO: 17659 - protein, 463 aa, Medicago truncatula
MDGKSSLQITKASGAYDDDGHAKRTGNLKSAVAHIITAVIGSGVLSLAWSTAQLGWIGGPVTLLCCAIVTYISSFLLSDCYRNPDSVTGKRNYSYMDAVRVNLGNKRTYVAGFLQFLTLYGTGVAYVLTTATSLKAIMRSNCYHKEGHQAPCRYEANIYMVLFGVVQIVMSFIPDLHNMAWVSVVAALMSFTYSFIGLGLGISTVIKNGRIMGSITGVQKAKVADKIWLIFQAIGDISFSYPYSIILLEIQDTLESPPPENQTMKKASMVAIFITTFFYLCCGCFGYAAFGDATPGNLLTGFGFFEPYWLIDIANVCIIIHLVGGYQIYSQPIYSTADRWFTKKYPNSGFVNNFHKVKLPLLPSFEINLFRFCFRTSYVISTTGLAILFPYFNSVLGLLGAINFWPLAIYFPVEMYFVQKKVGAWTRKWIVLRIFSFACFLVTMVGFVGSFEGIISEKIRGKG

SEQ ID NO: 17660 - protein, 390 aa, Medicago truncatula
MCEKENPNSHSALLDGKYELGRVLGHGTFAKVYHAKNLNTGKNVAMKVVGKEKVIKVGMIEQIKREISVMKMVKHPNIVQLHEVMASKSKIYIAMELVRGGELFNKIVKGRLKEDVVRVYFQQLISAVDFCHSRGVYHRDLKPENLLLDEDGNLKVSDFGLCTFSEHLRQDGLLHTTCGTPAYVSPEVIAKKGYDGAKADIWSCGVILYVLLAGFLPFQDDNLVAMYKKPVPKSIAMRKKEKEEEEDKVFEFMECEKSSTTMNAFHIISLSEGFDLSPLFEEKKREEREEMRFATGGTPSRVISKLEQVAKAVKFDVKSSDTKVRLQGQERGRKGKLAIAADIYAVTPSFLVVEVKKDKGDTLEYNQFCSKELRPALKDIFWTSADPPAA

SEQ ID NO: 17661 - protein, 200 aa, Medicago truncatula
MDEMDINMENYDELFGMALTHSEELFENGGFNSLFGAKAMSAGDSNCQDANAAEGSSIGHVNAAQPACSTAASADSILSTKTEPNLCITAKQSQSSLSFSGINEDGGAGDYQDCGASSMLLMGEPPWLNTCPENELQLQSANRCSAVMRYKEKKKTRKFDKRVRYASRKERADVRRRVKGRFVKAGEAYDYDPLSQTRSY

SEQ ID NO: 17662 - protein, 167 aa, Medicago truncatula
MGYICDFCGDQRSMVYCRSDAACLCLSCDRNVHSANTLARRHSRTLLCERCSSQPALVRCSEEKVSLCQNCDWLGHGNSTSSNHKRQTINCYSGCPSSAELSSIWSFVLDIPSLSETTCEQELGFMSINENRSAWVDPKIRTCLIQIKPLIYLIWISLSPVHLHARI

SEQ ID NO: 17663 - protein, 296 aa, Medicago truncatula
MSIEKEDFGLSLSLSFPQNPPNPQYLNLMSSSTHSYSPSTFNPQKPSWNDVFTSSDRDSETCRIEERPLILRGIDVNRLPSGADCEEEAGVSSPNSTVSSVSGKRSEREVTGEDLDMERDCSRGISDEEDAETSRKKLRLTKDQSIILEESFKEHNTLNPKQKLALAKQLGLRARQVEVWFQNRRARTKLKQTEVDCEFLKRCCENLTDENRRLQKEVQELRALKLSPQFYMQMTPPTTLTMCPSCERVAVPSSAVDAATRRHPMASNHPRTFSVGPWATAAPIQHRTFDTLRPRS

SEQ ID NO: 17664 - protein, 355 aa, Medicago truncatula
MASSVEKEGSGAVGAAAGAPEEPVSFELPAPSGWTKKFFPKKSGTPKKNEIVFTSPTGEEIRTKRQLEKYLKTNGGPNISEFDWGTGETPRRSSRIVEKVKAAPPAEPKTDPPKKRSRKSSASKKEASEDEAEETKDVEMQEAGETKDDKDVELEKKVVNENEDKKGAEDADVKESIQPGETTDEGKSNTADGDLQASKENIDDKGAEGSGVVQNKDEEKTGQPAEETKQEEKTEQPAEETKREEKIEQPAEETKQEERIEQPVEETKQEEKNGQPVEETKQDGGSGDAEKSEAAPTSEKMAQVEGENNEEDNRITRESGGETKEKDAIRMHDEANYKVHDINKAESEVTVNGSS

SEQ ID NO: 17665 - protein, 321 aa, Medicago truncatula
MAQILAPSTQCQARITKISPVATPISSKMWSSLVMKQNKKVARSAKFRVMAVNSGTINRVEDLLNLDITPFTDSIIAEYIWIGGTGIDVRSKSRTISKPVEHPSELPKWNYDGSSTGQAPGEDSEVILYPQAIFKDPFRGGNNILVICDAYTPQGEPIPTNKRHKAAEIFSNPKVEAEIPWYGIEQEYTLLQTDVKWPLGWPVGGYPGPQGPYYCAAGADKSFGRDIFDAHYKACLYAGINISGTNGEVMPGQWEYQVGPSVGIEAGDHIWASRYILERITEQAGVVLTLDPKPIEGDWNGAGCHTNYSTKSMREDGGFEV

SEQ ID NO: 17666 - protein, 378 aa, Medicago truncatula
MLSELVNFLKACFRPGSDGYARTTSDAGGKQDGLLWYKDSGQHICGDFSMAVVQANNLLEDQSQIESGSLSLNESGPHGTFVGVYDGHGGPETSRFINNHLFQHLKRFTSEQQSMSVDVIRKAFQATEEGFMSLVSQLWSISPQIAAVGSCCLVGVICNGTLYIANLGDSRAVLGRVVKATGEVLAMQLSTEHNASIESIRQELYSMHPDDSNIVVLKHNVWRVKGIIQISRCIGDVYLKKAEFNREPLYAKFRVPQPFKRPILSSEPSILVHQLQPQDQFIIFASDGLWEHFSNQEAVDIVQNNPRAGIARRMVKTALKAAAKKREMRYSDLNKIDRGVRRHFHDDITVIVVFLDSNLMSRASTVKFPGISVRGGWC

SEQ ID NO: 17667 - protein, 338 aa, Medicago truncatula
MSTIARRGIHYMQRLNSANVSSALLENGQNRVIDASLTLIRERAKLKGELVRALGGAVATSSLLGVPLGHNSSFLQGPAFAPPRIREAIWCGSTNSTTEEGKDLQDARVLTDVGDVPIQEIRDCGVDDHRLMNVIGESVKLVMEEDPLRPLVLGGDHSISFPVIRAVSEKLGGPVDVLHLDAHPDNYDEFEGNYYSHASSFARVMEGNYVRRLLQVGIRSITTEGRAQAKKFGVEQYEMRTFSRDRHFLENLKLGEGVKGVYISIDVDCLEPAFAPGVSHIEPGGLSFRDVLNILHNLQGDVVAGDVVEFNPQRDTVDGMTAMVAAKLVRELAAKIAK

SEQ ID NO: 17668 - protein, 225 aa, Medicago truncatula
MGGVAWTEEEDHLLKKCIQQYGEGKWHRVPLLAGLNRCRKSCRLRWLNYLRPNIKRGNFAEEEVEMIVKLHKLLGNRWSLIAGRLPGRTANDVKNYWNCHLSKKLNALEADQDRSQSSKDVQIIRPQARNIGSSSVKRRSQGESPTDQVLVQQESDMTTFDADGKNHMLESQQDMMVYSCLDQQGMVGEFPMDFQLEGFEVMVSGGEGSSSQWNWGGFALRYGSI

SEQ ID NO: 17669 - protein, 257 aa, Medicago truncatula
MLHMSGDIVDKEKISRCLQTLQSTSPSYLLLASLDAARAQLSESPDTVFNQAIELANEAKSSLKRFPGILVLENSSFLTIRAIDPLRLTVGFWELGLSGYEADEILYRDFGIVCELVGNKSITYALNLGTCRDHVQRLLSGIKHLAATYPSIQQPKDEVLTEHTPFDDIITSLTPRDAFFASKRKVTIKESIGKVSGELICPYPPGIPVLIPGEVITERAVNYLLHVRSKGADISGASDPLLSSIVVCNVHKKQLVS

SEQ ID NO: 17670 - protein, 267 aa, Medicago truncatula
MSHFGRQGPPDIADTYSLLVLNITFRTTADDLFPLFDKYGKVVDIFIPRDRRTGESRGFAFVRYKYADEASKAVDRLDGRMVDGREITVQFAKYGPNAERIHKGRIIETSPRSKSSRSRSPSRRRHHDDYRDKGYRRRSRSRSYDRYERDRYRGGRDRDYRRRSRSRSASPDYKRRGRGRYDDERRSRSRSRSVDSRSPARRSPSPKRSPSPKKSISPKKSPSPSPRRESPDTRSRDGRSPTSRSVSPRGRPEASQSPSPRNSDGDE

SEQ ID NO: 17671 - protein, 237 aa, Medicago truncatula
MNCSQFATTMRSAFSLHHFNSPRLSRHVSNVSASLQPQGQGTDTPPRIGFLGLGIMGTPMALNLIKAGVDLTVWNRTKSKRDPLISLGAKYKPSPEEVAASCDLTFAMLADPQSAVDVACGKHGVANGIGPGKGYVDVSTVDVDTSKLINGHIKSTGALFLEAPVSGSKKPAEDGQLIFLTAGDRNLYETVAPFLDIMGKSKFYLGDVGNGAAMKLVVNMIVGRSFKTRLLFFFYSV

SEQ ID NO: 17672 - protein, 168 aa, Medicago truncatula
MAGYLPFEEADLPTLFRRISAGEFVCPVWFSAGAKTFIHKILDPDPKTRVKIVEIRKDPWFRKNYSPIKLREDEQVNLDDIKAVFDDIEDQYVSERSEIAEGGPLIMNAFEMITLSQGLNLSPLFDRHQDYVKRQTRFVSRKPATVIISSIEAVAESMSLKVHSRNYR

SEQ ID NO: 17673 - protein, 239 aa, Medicago truncatula
MEIGFLGLGIMGKAMSINLLRHGFKVTVWNRTLSKCDELVEHGASVGETPAAVVKKCKYTIAMLSDPAAALAVVFDKDGVLEQINGKGYIDMSTVDAETSIKISEAIKAKGGDFLEAPVSGSKKPAEDGQLVILAAGDKAFYDEALPAFDVLGKKSFFLGEVGNGAKMKLVVNMVMGSMMNAFSEGLTLAERSGLNPSTLLDVLDLGAISNGMFKLKGPTMLKNSYAPAFPLKHQQKDM

SEQ ID NO: 17674 - protein, 337 aa, Medicago truncatula
MAGGRVFSNGPANISNINMNILLQNQQQTPRGNSSQQPLDSLFLSSSASFFGSRSMVSFEDVQGRKRRNRSFFGGFDLDENGEDEMDEYFHQSEKKRRLSVDQVQFLEKSFEEDNKLEPERKTKLAKDLGLQPRQVAIWFQNRRARWKTKQLEKDYDSLNDGYESLKTEYDNLLKEKDRLQSEVASLTEKVLEREKQEGKFKQGESETKEFLKEPTINKPLVDSVSEGEGSKLSIVEASNNNNNNNKLEDISSARSDILDCESPRYTDGVLETCDSSYVFEPEYQSDLSQDEEDHNLLPPYIFTKLEDVNYSDPPHNSTSYGFQEEDHHQALWPWSY

SEQ ID NO: 17675 - protein, 280 aa, Medicago truncatula
MSHFGRSGPPDISDTYSLLVLNITFRTTADDLFPLFDKYGKVVDIFIPKDRRTGESRGFAFVRYKYADEASKAVDRLDGRMVDGREITVQFAKYGPNAERIQKGRIIETSPRSKSSRSRSPSKRRHRDDYKEKDYRRRSRSRSYDRHERDRHRGRDRDHRRRSRSRSASPGYKGRGRGRHDDERRSRSPSRSVDSRSPVRRSSIPKRSPSPKRSPSPKRSPSLKRSISPQKSVSPRKSPLRESPDNRSRGGRSLTPRSVSPRGRPGASRSPSPRNSNGDE

SEQ ID NO: 17676 - protein, 242 aa, Medicago truncatula
MNCSQFATTMRSAFSLHHFNSPRLSRHVSNVSASLQPQGQGTDTPPRIGFLGLGIMGTPMALNLIKAGVDLTVWNRTKSKCDPLISLGAKYKPSPEEVAASCDLTFAMLADPQSAVDVACGKHGVANGIGPGKGYVDVSTVDVDTSKLINGHIKSTGALFLEAPVSGSKKPAEDGQLIFLTAGDRNLYETVAPFLDIMGKSKFYLGDVGNGAAMKLVVNMIMGSMMASFSEGLLLSEKVGLV

SEQ ID NO: 17677 - protein, 270 aa, Medicago truncatula
MGLNDQDSLHLVLGLSLNTSTTPKEITTTTPMNPYSTSNEPSLTLGLSGESYNLISHKQATKGYGEELCRQTSSPHSVVNSSFSSGRVLQVKRERDEEEEEVEEERVSSRVSDEDEDATNARKKLRLTKEQSLLLEESFKLHSTLNPKQKQALARQLNLRPRQVEVWFQNRRARTKLKQTEVDCEFLKNCCETLTDENRRLKKELQELKSLKVAQPLYMPMPAATLSICPSCERLGRVTDGGGGSNKITAFTMAPNTHFYNPFNNPSAAC

SEQ ID NO: 17678 - protein, 240 aa, Medicago truncatula
MDFDSLLFQNQNQNLMYFPNNFSWELEEDFVNFFSDVNNYSNSSGSLSSTESNSSGSVLSNEPLEVSSNTTYKQVIKETQTSSPPPPPPIKESKKRAFRGVRTRPWGKFAAEIRDSTRKGVRVWIGTFDTAEAAALAYDQAAFSTRGSLAVLNFPEEVVRESLKEMASNFKPLDEGTSPVLALKRKHSMRKKSNKVSTKRIKSEYHSDQIQIETNINSQNLFVFEDLGAEYLDQLLSLTY

SEQ ID NO: 17679 - protein, 473 aa, Medicago truncatula
MSSSSCTKSILPSLIFSSSSSTSSETKSSKSSNLSFLNSNTFGIIPNNIKLSHANSQQRCFMVNSVLKTVDQTKQTNNVVSVNDENEKPTILVSEKLGEAGLQVLRQLGNVECAYDLSPEDLCKKISSCDALIVRSGTKVTRKVFEAGKGKLKVVGRAGVGIDNVDLQAATEFGCLVVNAPTANTIAAAEHGIALLAAMARNVSQADASLKAGKWLRSKYVGVSMVGKTLAIMGFGKVGSEVARRAKGLGMNVIAHDPYAPADRARAVGVELVSFDQAITTADFISLHMPLTPTTNKVFNDNTFAKMKNGVRIINVARGGVIDEDALVKALDSGIVAQAALDVFTEEPPAKDSKLVQHENVIATPHLGASTKEAQEGVAIEIAEAVVGALNGELSATAVNAPMVAPEVLSELAPYVVLAEKLGRLAVQLVSGGSGIQSVKVVYRSARGPDDLDTRLLRAMITKGIIEPKKKKK

SEQ ID NO: 17680 - protein, 452 aa, Medicago truncatula
MSLFWFLFFSAHLAIASSLKDSGLKHKQPDMQLKLYPMTSLKSPPNSTSLLFAYMFAKDEERIRYFHSRLAKNSDANASFKKVGPKLAGIPLKSGLSMGSGNYYVKMGLGSPTKYYTMIVDTGSSFSWLQCQPCTIYCHIQEDPVFNPSASKTYKTVPCSSSQCSSLKSATLNEPTCSKQSNACVYKASYGDSSFSLGYLSQDVLTLTPSQTLSSFVYGCGQDNQGLFGRTDGIIGLANNELSMLSQLSGKYGNAFSYCLPTSFSTPNSPKEGFLSIGTSSLTPSSSYKFTPLLKNPNNPSLYFIDLESITVAGRPLGVAASSYKVPTIIDSGTVITRLPTPVYTTLKNAYVTILSKKYQQAPGISLLDTCFKGSLAGISEVAPDIRIIFKGGADLQLKGHNSLVELETGITCLAMAGSSSIAIIGNYQQQTVKVAYDVGNSRVGFAPGGCQ

SEQ ID NO: 17681 - protein, 240 aa, Medicago truncatula
MQRREGNKRSAGGDIAPTTRHYRSVSMDSFIGKLNFNDESLKMPPSPGGLMSPGNSGDGNNAAFSLEFGNGEFSGPELKKIMANEKLAEIAMADPKRAKRILANRQSAARSKERKMRYISELEHKVQTLQTEATTLSAQLTLLQGDSVGLTNQNSELKFRLQSMEQQAKLRDALNEALTAEVQRLKIVTAELNGESLPSNCMIPQHSVNPMMFQQQHQHQQHQQQQQQNGNANSKNELKQ

SEQ ID NO: 17682 - protein, 385 aa, Medicago truncatula
MCGILAVLGCSDPTRAKRVRVLELSRRLKHRGPDWSGLHQHGDCFLAHQRLAIVDPASGDQPLFNEDKSVIVTVNGEIYNHEALRKQLSNHTFRTGSDCDVIAHLYEEYGEDFVDKLDGIFSFVLLDTRDNSYIVARDAIGVTSLYIGWGLDGSVWISSEMKALNDDCEHFECFPPGHLYSSKDGGFRRWYNPPWYSEAIPSAPYDPLALRHAFEKAVIKRLMTDVPFGVLLSGGLDSSLVASITSRYLATTKAAEQWGSKLHSFCVGLEGSPDLKAGKEVADYLGTVHHEFTFTVQDGIDAIEDVIYHVETYDVTTIRASTPMFLMSRKIKSLGVKWVISGEGSDEIFGGYLYFHKAPNKEEFHQETCRKIKALHQYDCQRAIN

SEQ ID NO: 17683 - protein, 517 aa, Medicago truncatula
MEEENVYTKDGTVDYLGNPANRKKTGTWKACPFILGNECCERLAYYGMSTNLVLYFKERLHQHSAVASKNVSNWAGTCYITPLIGAFVADSYLGRYWTIASFSILYVIGMTLLTLSAPVSGIKPECQGKDNCHATTLQSAVCFLALYLIALGTGGIKPCVSSYGADQFDDDDEDEKKHKSSFFNWFYFSINIGALIASSLLVWIQDNVGWGWGFGIPAVAMAIAVVSFFSGTKLYRNQKPGGSPLTRIAQVIVASIRKYRVDAPTDKSLLYEIADTESAIKGSRKLDHTNELRFFDKAAVQGESDNLKESINPWRLCTVTQVEELKSILRLLPVWATGIIFATVYGQMSTLFVLQGQTMNTHVGNSSFKIPPASLSIFDTISVIFWVPVYDRIIVPIARKFTGHKNGLTQLQRMGVGLFISIFSMVAAAFLELVRLRTVRRNNYYELEEIPMTIFWQVPQYFLIGCAEVFTFIGQLEFFYEQAPDAMRSLCSALSLLTVAFGQYLSSLLVTIVTNIS

SEQ ID NO: 17684 - protein, 520 aa, Medicago truncatula
MKKCLNWWDLIWFGFGAVIGAGIFVLTGQEAHNHAGAAIVLSYVASGISAMLSVFCYTEFAVEVPAAGGSFAYLRIELGDFVAFIAAGNILLECVLGSAAVSRSWTSYFTSLLNRPKDSLRIKAHHLKDGYNLLDPIAVGVLVISAMIAMISTRKTSLLNWIASAVNIGVIIFVIVAGFSHANTSNLTPFLPYGVKGVFQASAILYFAYGGFDSLATMAEETKNPPKDIPIGLIGSMSVITVIYCLMALSLSMMQKYTDIDTGAAFSVAFQKVGMNWAKYVVAFGALKGMTTVLLVGRLGQARYIAHIARSHMIPPWFALVHPKTGTPINATLLITISSACMAFFTSLDVLSSLISVSTLFVFVMISIALLVRRYYVRGVTTKENQLKLVVFLILIVASSMGISAYWGLKPNGWIGYTGTVPVWFFSTLGMSYFLTQQRKPRFWGVPLVPWLPSLSIATNIFLMGSLEYEAFIRFGICTLIMLVYYVFFGLHSTYDMAHQQEKVQTINVNHKETARIEGP

SEQ ID NO: 17685 - protein, 129 aa, Medicago truncatula
MKMLRWSMFITLTLLTVLPFLFENGTEASNSASAFVQNAIYSNRITIFSKSYCPYCLRAKRVFVELNEQPFVIELDLRDDGYQIQGVFLDLIGRRTVPQVFVYGKHIGGSDDLSAAVQSGELQKLLKSS

SEQ ID NO: 17686 - protein, 280 aa, Medicago truncatula
MVLQMNKLMAMLLFHLYMGWVLSQMNSFEEVNRECNGNFYNSLSDNCTNKLAKIDEDIDGLNVYNILEPCYHGTEADKIITSYIRLPSSFRELGETEKPHPVRKRMFGRAWPLRAPVRDGNVPTWPQLINSNNVPCTDGSVANAWLNNEEVRKAIHTAEKSVVSSWDLCTDKISFDHDAGSMIKYHKNLTSRGYRALIFSGDHDMCVPFTGSQAWTRSIGYKIVDEWRPWLSNGQVVGYTQGYDHNLTFLTIKGAGHTVPEYKPQEALDFYKRFLAGSPI

SEQ ID NO: 17687 - protein, 376 aa, Medicago truncatula
MKTIPLILMGCGGVGSHLLQHIVSSRSLHSSQGLCLRVVGIGDSKSLVVVDDLLNKGFDDSFLLELCRLKHGGESLSKLGDLGQCQVFVHPESEGKILEIASQLGKKTGLAFVDCTASSDTIVVLKQVVDLGCCVVMANKKPLTSTMGDFEKLLTYPRRIRHESTVGAGLPVISSLNRIISSGDPVNRIIGSLSGTLGYVMSEVEDGKPLSQVVRAAKSLGYTEPDPRDDLGGMDVARKALILARILGRRINMDSIQIESLYPKEMGPDVMTDDDFLSCGLLLLDKDIQERVEKAASNGNVLRYVCVIEGPRCEVGIQELPKNSALGRLRGSDNVLEVYTRCYSNQPLVIQGAGAGNDTTAAGVLADIVDIQDLFP

SEQ ID NO: 17688 - protein, 510 aa, Medicago truncatula
MAVVAAPKKNNSMNKKDNPNLLLGRFELGKLLGHGTFAKVHLAKNLKTGESVAIKIISKDKILKSGLVSHIKREISILRRVRHPNIVQLFEVMATKTKIYFVMEYVRGGELFNKVAKGRLKEEVARKYFQQLICAVGFCHARGVFHRDLKPENLLLDEKGNLKVSDFGLSAVSDEIKQDGLFHTFCGTPAYVAPEVLSRKGYDGTKVDIWSCGVVLFVLMAGYLPFHDPNNVMAMYKKIYKGEFRCPRWFSPELVSLLTRLLDIKPQTRISIPEIMENRWFKIGFKHIKFYVEDDVVCDLDSLDLDGEDNNNKVVKVDDHHDEVLESVSENESDSEVVNRRIRNRGSLPRPASLNAFDIISFSQGFDLSGLFEEKGDEARFVSSASVPKIISKLEEVGQMVRFNVRKKDCKVSLEGSREGAKGRLTIAAEVFELTPSLVVVEVKKKGGDKVEYDKFLNTELKPALHSLTKEESAGSSSQTTPDESLQQRAFSDSAIDKHSDSIESLNLDT

SEQ ID NO: 17689 - protein, 524 aa, Medicago truncatula
MRKSAADRFRHLFNRSLVFVRNQNQQYHHPSPLRSLSSMASDSPFPVTAQNINPQVLKCQYAVRGEIVTLAQNLQKALQANPDAHSFDEIIYCNIGNPQSLGQQPITFFREVLALCDYPALLDKSETQGLFSADSIERAWQLVDQIPGRATGAYSHSQGIQGLRDTIAAGIEERDGFPCNANDIFLTDGASPAVHMMMQLLIRSEKDGILCPIPQYPLYSASITLHGGHLVPYYLDEATGWGLEISELKKQLEEAKSKGISVRALAAINPGNPTGQVLAEDNQRAIVEFCKQEGLVLLADEVYQENVYVPEKKFHSFKKVSRSMGYGDNDICLVSFQSVSKGYHGECGKRGGYMEVTGFSPDVREQIYKVASANLCSNITGQILASLIMSPPKVGDESYESFMAERGAILSSLTTRAKALEEALNKLEGVTCNKAEGAMYLFPRIRLPEKAIKAAEAEKSAPDAFYCKRLLNATGIVVVPGSGFGQVPGTWHFRCTILPQEDRIPAIVTRLTEFHQKFMDEFRD

SEQ ID NO: 17690 - protein, 159 aa, Medicago truncatula
MSDEEHHFESKADAGASKTYPQQAGTIRKNGHIVIKNRPCKVVEVSTSKTGKHGHAKCHFVGIDIFTGKKLEDIVPSSHNCDVPHVNRTDYQLIDISEDGFVSLLTESGGTKDDLKLPTDETLLSQIKDGFGEGKDLIVSVMSAMGEEQICGLKDIGPK

SEQ ID NO: 17691 - protein, 160 aa, Medicago truncatula
MSDEEHQFESKADAGASKTYPQQAGTIRKNGYIVIKNRPCKVVEVSTSKTGKHGHAKCHFVAIDIFTSKKLEDIVPSSHNCDVPHVNRTDYQLIDISEDGFVSLLTENGNTKDDLKLPTDDSLLTQIKDGFAEGKDLVVSVMSAMGEEQICALKDIGGKN

SEQ ID NO: 17692 - protein, 227 aa, Medicago truncatula
MVRGKTQMKRIENATSRQVTFSKRRNGLLKKAFELSVLCDAEVALIVFSPRGRLYEFASSSILETIERYRSHTRINNTPTTSESVENTQQLKEEAENMMKKIDLLETSKRKLLGEGLGSCSIDELQKIEQQLEKSINKIRVKKTKVFREQIDQLKEKEKALVAENVRLSEKYGNYSTQESTKDQRENIAEVEPYADQSSPSSDVETELFIGLPETRSRRISPKVWLV

SEQ ID NO: 17693 - protein, 217 aa, Medicago truncatula
MREDHMIQSYIDTYITILLVNMAARAGVYLLVFMSLVTAESSITPSEFIRSSCRATRYPVLCVQCLMGYLCVIGQSERQLTITALSVSISRTRSSASFVKKISKARGIKPREYRAVQDCIENMGDSLDSLSQSVRELGSIGHAVGEDFVWHMTNVQTWVSAALTDDNTCLDGFAGPSMNGIVKAAIKDRVVNVAQVTSNTLALVNRFASSHRTAETP

SEQ ID NO: 17694 - protein, 142 aa, Medicago truncatula
MPKVKADSKPADNRLKRKGAGAGRKQTKKAAKDPNKPKRPPSAFFVFMSDFREQYKKDHPNNKSVAAVGKACGEAWKSMSEEDKAPYAARALKKKEEYEVATQAYNKKLEGKDEEDGSDKSKSEVNDEDEDEEDEDDDEDDE

SEQ ID NO: 17695 - protein, 284 aa, Medicago truncatula
MGGFSDTKVLQDLLLYAARAALSYWVLVTGLRYLDPNRESSKKALEQKKEIAKRLGRPLIQTNSYEDVIACDVINPDHIDVEFDSIGGLETIKQTLFELVILPLQRPDLFSHGKLLGPQKGVLLYGPPGTGKTMLAKAIAKESGAVFINVRISNLMSKWFGDAQKLVAAVFSLAHKLQPSIIFIDEVDSFLGQRRSSDHEAVLNMKTEFMALWDGFATDQSARVMVLAATNRPSELDEAILRRLPQAFEIGYPDRKERADILKVILKGEKVEDNIDFSYIAGLC

SEQ ID NO: 17696 - protein, 595 aa, Lotus japonicus
IACCADLNYTDPLTTLNYTTDYTWFSDKRSCRKIPETELRNRSNENVRLFDIDEGKRCYDLPTIKNGVYLIRGTFPFDSLNSSFNASIGVTQLGAVRSPRLQDLEIEGVFRATKDYIDFCLLKGEVYPFISQLELRPSPEEYLQDFPTSVLKLISRNNLGDTKDDIRFPVDQSDRIWKASSISSSAVPLSSNVSNVDLNANVTPPLTVLQTALTDPERLEFIHTDLETEDYGYRVFLYFLELDRTLQAGQRVFDIYVNSEIKKESFDVLAGGSNYRYDVLDISASGSLNVTLVKASKSEFGPLLNAYEILQVRPWIEETNQTDVGVIQKMREELLLQNSGNRALESWSGDPCILLPWKGIACDGSNGSSVITKLDLSSSNLKGLIPSSIAEMTNLETLNISHNSFDGSVPSFPLSSLLISVDLSYNDLMGKLPESIVKLPHLKSLYFGCNEHMSPEDPANMNSSLINTDYGRCKGKESRFGQVIVIGAITCGSLLITLAFGVLFVCRYRQKLIPWEGFAGKKYPMETNIIFSLPSKDDFFIKSVSIQAFTLEYIEVATERYKTLIGEGGFGSVYRGTLNDGQEVAVKVRSSTSTQ

SEQ ID NO: 17697 - protein, 304 aa, Anabaena sp.
MTQAKAKHADVPVNLYRPNAPFIGKVISNEPLVKEGGIGIVQHIKFDLTGGNLKYIEGQSIGIIPPGVDKNGKPEKLRLYSIASTRHGDDVDDKTISLCVRQLEYKHPESGETVYGVCSTYLTHIEPGSEVKITGPVGKEMLLPDDPEANVIMLATGTGIAPMRTYLWRMFKDAERAANPEYQFKGFSWLVFGVPTTPNILYKEELEEIQQKYPDNFRLTYAISREQKNPQGGRMYIQDRVAEHADQLWQLIKNQKTHTYICGLRGMEEGIDAALSAAAAKEGVTWSDYQKDLKKAGRWHVETY

SEQ ID NO: 17698 - protein, 216 aa, Medicago truncatula
MQPKSETANQPRSGPHSFQPGGVYSEPWWRGVGYNPVAQTMSGANSSSLDCPNGDSESNEEGQSLSNSERNEEDDDAAKDSQPAAPNQSGNYGQEQGMQNTASSAVIREECLTQTPQLELVGHSIACATNPYQDPYYGGMMAAYPHQPLGYPPFIGVPHARMPLPLEMAQEPVYVNAKQYQGILRRRQARAKAELERKLIKSRKPYLHESRHQHAL

SEQ ID NO: 17699 - protein, 238 aa, Panax ginseng
MGRAPCCEKMGLKKGPWTTEEDQVLISYIQQHGHANWRALPKQAGLLRCGKSCRLRWANYLRPDIKRGNFTKEEEDTIFQLHEMLGNRWSAMAAKLPGRTDNEIKNVWHTHLKKKLKNYQPSSQVVTKQQSMIKSNGHKNPDFSARPEVCGPPQGSSSELSSVTVMTTAVKQEQMDSSESTFPEIDESFWTQAEDSKMEFSEFRGPNDKLGCQMIEDGMDFWYNLFIRAGELPELPEF

SEQ ID NO: 17700 - protein, 425 aa, Arabidopsis arenosa
SVWFASEMKALSDDCEQFMCFPPGHIYSSKQGGLRRWYNPPWFSELVPSTPYDPLLVRNTFEKAVIKRLMTDVPFGVLLSGGLDSSLVASVALRHLEKSEAACQWGSKLHTFCIGLKGSPDLKAGREVADYLGTRHHELHFTVQDGIDAIEEVIYHVETYDVTTIRASTPMFLMSRKIKSLGVKMVLSGEGSDEIFGGYLYFHKAPNKKEFHEETCRKIKALHQYDCLRANKSTSAWGVEARVPFLDKEFINVAMSIDPEWKMIRPDLGRIEKWVLRNAFDDEKNPYLPKHILYRQKEQFSDGVGYSWIDGLKDHANKHVSDTMLMNASFVFPDNTPLTKEAYYYRTIFEKFFPKSAARATVPGGPSVACSTAKAVEWDAAWSQNLDPSGRAALGVHVSAYGEDKTEDSRPEKLQKLAEKTPAIV

SEQ ID NO: 17701 - protein, 677 aa, Arabidopsis arenosa
MKERDSESFESLSHQVLPNTSNSTHMIQMAMANSGSSAAAQAGQDQPDRSKWLLDCPEPPSPWHELKRQVKGSFLTKAKRFKSLQKQPLPKRILSILQAIFPIFGWCRNYKLTMFKNDLMAGLTLASLCIPQSIGYATLAKLDPQYGLYTSVVPPLIYALMGTSREIAIGPVAVVSLLISSMLQKLIDPETDPLGYKKLVLTTTFFAGIFQASFGLFRLGFLVDFLSHAAIVGFMGGAAIVIGLQQLKGLLGITNFTTNTDIVSVLRAVWRSCQQQWSPHTFILGCSFLSFILITRFIGKKYKKLFWLPAIAPLIAVVVSTLMVFLTKADEHGVKTVKHIKGGLNPISIHDLDFNTPHLGQIAKIGLIIAIVALTEAIAVGRSFAGIKGYRLDGNKEMVAIGFMNVLGSFTSCYAATGSFSRTAVNFAAGCETAMSNIVMAVTVFVALECLTRLLYYTPIAILASIILSALPGLININEAIHIWKVDKFDFLALIGAFFGVLFASVEIGLLVAVVISFAKIILISIRPGIETLGRMPGTDTFADTNQYPMTVKTPGVLIFRVKSALLCFANASSIEERIMGWVDEEEEEENTKSNGKRKILFVVLDMSNLINVDTSGITALVELNNKLIQTGVELVIVNPKWQVIHKLNQAKFVSRIGGKVYLTIGEALDACFGLKV

SEQ ID NO: 17702 - protein, 667 aa, Nicotiana benthamiana
MAGGAWNRRASLIVFGIVLFGCLFAFSIATEEATKLGTVIGIDLGTTYSCVGVYKNGHVEIIANDQGNRITPSWVAFTDGERLIGEAAKNLAAVNPERTIFDVKRLIGRKFDDKEVQRDMKLVPYKIVNKDGKPYIQVKIKDGETKVFSPEEISAMILTKMKETAEAYLGKKIKDAVVTVPAYFNDAQRQATKDAGVIAGLNVARIINEPTAAAIAYGLDKKGGEKSILVFDLGGGTFDVSILTIDNGVFEVLSTNGDTHLGGEDFDQRIMEYFIKLIMKKHGKDISKDNRALGKLRREAERAKRALSSQHQVRVEIESFFDGVDFSEPLTRARFEELNNDLFRKTMGPVKKAMDDAGLEKTQIDEIVLVGGSTRIPKVQQLLKDYFDGKEPNKGVNPDEAVAYGAAVQGGILSGEGGDETKDILLLDVAPLTLGIETVGGVMTKLIPRNTVIPSKKSQVFTTYQDQQTTVTIQVFEGERSLTKDCRLLGKFDLTGIAPAPRGTPQIEVTFEVDANGILNVKAEDKASGKSEKITITNDKGRLSQEEIERMVKEAEEFAEEDKKVKERIDARNSLETYVYNMRNQINDKDKLADKLESDEKEKIETATKEALEWLDDNQSAEKEDYEEKLKEVEAVCNPIITAVYQKSGGAPGGESGASEDDDHDEL

SEQ ID NO: 17703 - protein, 542 aa, Thauera sp. MZ1T
MNLTESLLHALVDHGARQIFGIPGDFALPYFRIIEQTGILPLHTLSHEPGVGFAADAAARVQGGIGVAAVTYGAGALNMVNAVAAAYAEKSPLVVISGGPGLGESQSGLLLHHQAKTLDSQLRIFQEITCDQVRLDDAARAPADIARVLGNCVRNSLPVYIEIPRDMVARPCAPVVREAPRAVDADALAACVDEILARLRAARAPVLMAGVEVRRFGLEDKVAELSRRLGIPVVTSFMGRGLLADQDAPLMGTYMGLAGLPEVSALVEDSDGLFLVGVIISDTNFAVSGKHIDLRHTIQALEARVTMGYHTYADIPLDALIDGLLARVPHADAHFTVDRPAFPHGLQADEATIAPADIACAVNDLMAAHGKLPIASDMGDCLFTAMDIEHTALVAPGYYATMGFGVPAGLGVQAATGQRPLILVGDGAFQMTGWELGNCRRYGWDPIVLLFNNASWEMLRTFQPESGFNDLDDWGFAQMAAGLGGDGVRVHTRAQLKAALDKAIATRGRFQLIEVMIPRGVLSESLSRFVNAVKRLNAAKAA

SEQ ID NO: 17704 - protein, 399 aa, Thauera sp. MZ1T
MDARVRELVKATIPVLKEHGVALTTYFYQRMFRHNPELKNIFNQSHNETGKQPVALAMAVLAYAENIDDPSVLAPVITLIANKHASVGIRAEHYPIVGKHLLASIREVLGDAASDELIAAWGVAYGALADVFIDAESKLYNQACNADGGWSGWRSFRIIDKVRESEEITSLHLVPCDGGPLPAYRAGQYTTARVFVPELGVMQLRQYTLSIAPGAMHFRISVKREPAGATTPAGRVSNRLHDFYKVGDMLELAPPFGEFFLDETHDGPVVLISGGVGITPMISMLDRLVAAAPSRPVQFVHACRNAAVFAFGAHLAKVAERNPQVRLHLFHDEGAVSAPVQAGRVDLRALAGEVLAEGADYYLCGPVGFLEAQIATLHELGVESARIHAEVFDTGGIAT

SEQ ID NO: 17705 - protein, 443 aa, Thauera sp. MZ1T
MSAVVFARHAMTPSERLRDAGWVAFVGLILGIPLIGLTTVDVGGRLGIETRFGLLAAAVAAVFAGRLLLRWAIDQARNRKQDRDRASTSTAADRAHGAQRVVNVLGWVALGASIALPIVFSDNRYVVDTATTVLIYVMLGWGLNVVVGLAGLLDLGYVAFYAVGAYSYALLSTQFGWSFWEALPVSGALAASFGILLGYPILRLRGDYLAIVTLGFGEIIRIILVNWTEFSGGPNGISSIPRPSFFGLDFTRSAPEGGQTFSGFFGLEFSPMHRLIFLYYLILVLALLTHAFVSRLRKLPVGRAWEALREDEIACQAMGMNTTNIKLSAFAIGAMLGGFAGVFFAARQGFISPESFTFTESAIILAIVVLGGMGSQMGVVLAATLLVLIPEFGRNFAEYRMLLFGLAMVLIMVWRPGGLLSHREPTVRLNALDKTPATPEAAR

SEQ ID NO: 17706 - protein, 440 aa, Thauera sp. MZ1T
MRKLLAYLPAAALLAGVSGGAFAQEAAAAVAEVHKGDVAWIMTSTLLVLMMALPGLALFYGGMVRAKNMLSVLMQVMTVFSLNALLFAIYGYSLTFTEASPFIGSLDKVFLSGVTIETLADTFTETVKLPEFAFIAFQATFAGITGALIVGAFAERMKFSAVLIFSVIWFTLCYLPICHMVWGPGGYLLEDGALDFAGGTVVHINAGIAGLVGAWMVGKRIGYGREALAPHSLTLTMVGASLLWVGWFGFNAGSNLEATAGAALAFINTLVATAAAVLAWSLGEALIKGKPSMLGAASGAVAGLVAITPACGSVGPMGAIVIGTLSGFICLWGVNGLKHMLGADDALDVFGVHGVGGIVGAILTGVFAAPSLGGTGAEDFSIASQVWIQTWSVLVTIVWSAVVAFVAYKVADLLVGLRVPEDEERQGLDTTAHGETAYRY

SEQ ID NO: 17707 - protein, 314 aa, Thauera sp. MZ1T
MDLLGLANYAVFMAILIGIYALLALGLNIQWGFTGLFNAGIAGFFAVGAYTSAILTSLPATGRLGGYELPLVVGWLAAMAAAALIAWPIGKICLRFRSDYLAIATIGIAEIIRLVIRTEGWLTGGVRGVTGVPRPFGDLDYMPSQIAYLAIVATLVLIAYLLVERQVKAPWGRMMRAIRDNELAAAAMGKQVEARRLQAFVFGSALMGLAGALFVHFNRSITPEAIDPMIATFLIWIMLILGGSGNNRGAILGAAVIWIIWSVSELLTDRLPTEVAVQAKYARVFIIGLTLQLVLRFRPEGILPERQAGSPPHR

SEQ ID NO: 17708 - protein, 314 aa, Thauera sp. MZ1T
MIKHGLQIFACNASRELACDISNRLGLRPGRIDISRFSNDNLRVQIQENVRERDVFVVQSFTEPVSEHIMELMITLDALRSASAQRITAVIPYYSYARSDKKDAPRISITGRLIADLLQTAGANRVLTMDLHADQVHGFFSVPVDHLTAVSLIAEHFRNRYDLSNMVAVATDAGGAKRTGRFSEKLGIPMAIIDKRRVSDTAVKQGAVVGEVAGRDVVIFEDEIATAGTLVSSVDTLKAAGARSIHAAATHGVLCGPAIERLRAAAIDSVVVTNTVALPEDKRLDKLTVLNVAPLFAAAIERIHSGQSVGALFE

SEQ ID NO: 17709 - protein, 402 aa, Thauera sp. MZ1T
MSDPVVIVSVARTPLGGFQGDLSSLTTPQLGSIAIKAAVERAGVAPAQVQEVIMGCVLPAGLGQAPARQAALGAGLPLSAGCTTINKVCGSGMKATMLAHDLILAGSNEVMVAGGMESMSNAPYLLPKARAGYRLGHGQMFDHMFLDGLEDSYSKENKGRLMGTFAEDCAGHFNFTRQAQDEFAIASTTRAQAAINNGDFSWEVVPVTVASRKGDVVVDKDEQPLKAQIDKIPSLKPAFKKDGTVTPANSSSISDGAAALVLMRKSTAEKLGVKPVATIIGHATHAQEPALFTTAPVGAMQKVLAKAGWSTEQVDLWEINEAFAVVTMAAMHEMKLPHDKVNVNGGACALGHPIGASGARILVSLIGALRKRGLKRGVASLCIGGGEATAMAIEVDSSVACG

SEQ ID NO: 17710 - protein, 560 aa, Thauera sp. MZ1T
MYQYDEHDQRLLDQRVAQFRDQMRRHLAGELSADEFRPLRLQNGLYIQRHAPMFRISVPYGHLASRQLRKLAHLARSYDHGYAHFTTRTNVQFNWPKLEDVPEMLAELASVQMHANQTSGNCIRNITADPFAGVAADEVADPRPFAEILRQWATYNPEFAFLPRKFKIAFNSAAEDRVVLRVYDIGLDLVRNEAGELGFRVLVGGGLGRTPILGEEIKPFLPWQHLISYCEAILRVYNRWGRRDNLWKARIKILVKALGPEEFGRQVEEEWANGKDGPNTITAAELARVSAHFAPPAYETLPAQDAAFDELLAGNKAFATWVKRNVRAHRQPGYAAVVLSLKKTGTAPGDVTAEQMDLIADLADRFSFGEARMLHEQNVALADVRRTDLFELWQAARAAGLATPNIGLLTDIICCPGGDFCSLANARSIPIADAIQRRFDDLDYQHDIGEIDLNISGCMNSCGHHHVGHIGILGVDKNDEEWYQVSIGGTQGNGTTLGKVIGPSFALDEIVGVIEKLLETYVELRHEDERFIDTVQRVGTEPFKARVYADRQPQRKAAHV

SEQ ID NO: 17711 - protein, 399 aa, Thauera sp. MZ1T
MSKQIQDAYIVAAVRTPVAKRNGAFRAVRPDDLLARVLREVVAKVPSLDRTEIGDVVTGCAMPEAEQGMNVARIGLLLAGLPDSVPGITINRFCASGLQAVADAASRIRLGEADVMIAAGTESMSAMPQIMGNKVSLNPEIFARAENLSIAYGMGLTAEKVAQQWKVSREDQDAFAVESHRRACAAIAAGQFADEILPYAVKSYAPGVDGTVRITERLVEHDEGPRPDAAADRLGKLKPVFAARGSVTAGNSSQMSDGAAAVLLMSETALKRYDVTPIARFSSFAVAGVPPEVMGIGPVEAIPRALARAGVALADIGWTELNEAFAAQALAVMRQLGMDPAKVNPLGGAIALGHPLGATGAIRTATLMAAMQRDPGLRYGMISMCIGTGMGAAGVFERV

SEQ ID NO: 17712 - protein, 407 aa, Thauera sp. MZ1T
MNTEIILGIGMFTAIVLALAVFIIAARSKLVSSGDVTIDINGEKKIVVPAGGKLLQTLAGNGLFLPSACGGGGTCAQCKCVVMEGGGSMLPTEESHFTKRDAKEGWRLSCQTPVKQDMKIEVPEEVFGVKKWECTVESNPNVATFIKELTLRLPEGEDVHFRAGGYVQLECPPHVVNYKDFDIQDEYRGDWDKFNLWRFVSKVDETTIRAYSMANYPDEKGVVKFNIRVASPPPGRDDVPPGKMSSWVFNLKKGDKVTVYGPFGEFFARDTDHEMVFVGGGAGMAPMRSHIFDQLKRLHSKRKISFWYGARSMREAFYVEEFDKLAAENPNFKWHLALSDPLPEDNWTGYTGFIHNVLYENYLKDHPAPEDCEFYMCGPPMMNAAVIKLLLDLGVERENIMLDDFGG

SEQ ID NO: 17713 - protein, 177 aa, Thauera sp. MZ1T
MKLIILDRDGVINVDSGQYIKSPEEWKPIPGALEAIARLNQWGWRVVVATNQSGIGRGLFGMDTLNAINDRMVRSLAQAGGRLDGIFFCPHAADSTCDCRKPKPGMLLQIAERFNVELADVPCVGDGLRDLQAAAAAGAQPWLVLTGKGEATRASGELPPGTLVYPDLDAVAAALTA

SEQ ID NO: 17714 - protein, 329 aa, Thauera sp. MZ1T
MDPISASGESRAVALARRVLRIEADAVAALGARIGEEFERAVEIILARHGRVIVTGVGKSGHIGRKLAATLASTGTPAYFVHAAEAAHGDLGMITPEDVVIALSNSGSSEELLTIVPLVKRQGARLIAMTGKPDSPLAREADAHLDAGVAEEACPLNLAPTASTTAALALGDALSVALLDARGFAAEDFARSHPGGALGRRLLTHVGDVMRPAPAVPRVGSDAPLTQALLAMTAGGMGMTAVVDADEVPVGIFTDGDLRRALEKGCDVRSARVSEVMTRSPRSIAPGALAAEAAATMENMRISQLLVLDDAGRLAGALTTHDLMLAKVI

SEQ ID NO: 17715 - protein, 400 aa, Thauera sp. MZ1T
MTASPTFRSTLLSQRAADIQPFHVMELLRRARELEAQGRDIIHMEVGEPDFGTPAPVVEAATRFLAGGDVHYTPALGLPALREAIARFYHDRFGADVAPERIVVTAGASGALMLALAATTDPGDEWLLPDPGYPSNRHLIRAFEGVARALAVDAASRYQPRPEQVDAAWGKRTRGLMVATPSNPTGTLLSVAEIAALHRRTRARGGVLLVDEIYQGLTYGVESASALADPVLNAADDVFVVNSFSKYFGMTGWRLGWLVAPAGFVRELEKLAQHFFISPSTPAQHAALAAFAPATIAILEERRHKFAQRRDVLLPALRALGFGIAAEPQGAFYVYADVSALADDSEALARRMIEEAGVAATPGLDFGHHLPRRHLRIAYTTHGARLLEAAERIRRLGLGS

SEQ ID NO: 17716 - protein, 757 aa, Thauera sp. MZ1T
MDELIRSAALDYHRYPHPGKISVTPTKVLSNQRDLSLAYSPGVAAACDAIVEDPAQAAELTARSNLIGVVTNGTAVLGLGNIGPLAAKPVMEGKGVLFKKFAGIDVFDLEIDEPDADKLIDMIAALEPTFGGINLEDIKAPECFYIEQKLRERMKIPVFHDDQHGTAIVVGAAVLNGLHLQGKDLKKVKLVTSGAGAAALACLGLLVKLGVPVENIWVTDIEGVVYEGRTALMDPIKARYAKKTDARKLAEVIEGADVFLGLSAGGVLKGEMVAKMAANPLILALANPTPEILPDEVKAVRSDAIIATGRSDYPNQVNNVLCFPFIFRGALDVGATTITDEMQLAAVKAIAELARVEQSDIVAAAYGEKVAGFGREYIIPRPFDPRLIVKIAPAVAEAGMASGVATRPITDWNAYRSQLNNFVWHSGLIMKPVFAAAHKNPKRIIFSEGESEKVLRAVQQVVDEGLARPILIGRPEVVAKNIERFGLRLAAERDFELVNPDSDPRFNQLWQHYHGLMERRGVSVEYAKKEVRRRTTLIGALLLKFGYGDGLICGTYGMHRLHREFVEDVLGRREGVDHLYTVNLLSLPGRTLFLADTYVNYDPTPEQVVEMTLLAAEEMKRFGIEPRIALLSHSSFGSADSPTAEKMRTAMRMLHEHHPELQVEGEMHGDSALDARHRLQIFPNAKMREDANLLIFPTLDAANIAFNLLKNAAGSGMTVGPILLGAAKPVHILTPSATVRRIINMTALTVVEAGQAG

SEQ ID NO: 17717 - protein, 67 aa, Thauera sp. MZ1T
MATGTVKWFNDSKGFGFITPDDGSEDLFAHFSAITMSGFKSLKEGEKVSFDVTQGPKGKQASNIQRA

SEQ ID NO: 17718 - protein, 227 aa, Thauera sp. MZ1T
MPNTTPLDIPSLLRRIPLFSELSEADIQLVARYTRERQVARGEVLFQRGDLPHGFYFVVSGQVKLAFSSSQGTEKVVEIIGPMQSFGEAVMFMNHPYPVFAEALSETVLVHVGQAVVSELIDQDSTFARKLLAGMAIRLHGLIQDVETYSLRSSTQRVIGYLLQVADNDAPCEIALPTSKQVIASRLNLTPETLSRIFHDLSDAGLITVQGKRVSLHDPVRLSRYNA

SEQ ID NO: 17719 - protein, 67 aa, Thauera sp. MZ1T
MANGTVKWFNDSKGFGFITPEAGGDDLFAHFSAIQGQGFKTLAEGQRVTFDVTTGPKGLQASNIRAA

SEQ ID NO: 17720 - protein, 109 aa, Thauera sp. MZ1T
MDIQDVIRDQVTNNGVVLYMKGTPQFPQCGFSSTAVQILKGCGVREVLAVNVLADPEIRQGIKEFSNWPTIPQLYVKGEFVGGSDIMREMYDSGELQQMLKDAGLVGED

SEQ ID NO: 17721 - protein, 401 aa, Thauera sp. MZ1T
MTQAFICDAIRTPIGRYGGSLASVRADDLGAVPLKALMTRNPQVDWTAVEDIIYGCANQAGEDNRNVARMSGLLAGLPIEVPGTTVNRLCGSGMDAIGLAARSIKSGETELMIAGGVESMSRAPFVMGKAESAFSRSAAIYDTTIGWRFINPLMKKLYETHSMPQTADNVAADFDISRADQDAFALRSQQRWAAAHAAGRFKDELVPVVIPRKKGDPIVFDTDEHPRPETTLEMLAKLKGVNGPELSVTAGNASGVNDGACALLLASDAAAAKHGLTPRARVVAMATAGVAPRIMGFGPAPAVRKVLAKAGLTLDQMDVIELNEAFAAQGLAVLRDLGLADDEERVNPNGGAIALGHPLGMSGARLVTTAAYELQRRNGRYALCTMCIGVGQGIAMIIERV

SEQ ID NO: 17722 - protein, 764 aa, Thauera sp. MZ1T
MDQDFITAALDYHRSPTRGKISVVPTKGLTNQRDLALAYSPGVAAACDAIVADPAEAFELTSRGNLVAVVTNGTAVLGLGNIGPLASKPVMEGKGCLFKKFANIDVFDIELAENDPDKLIEIIAALEPTLGGINLEDIKAPECFYIEKKLRERMKIPVFHDDQHGTAIISAAGLVNGLKVVGKNIADVKLVCSGAGAAAIACLDMMVSVGLRRENIYVCDSKGVIYEGREPNMEPTKARYAQKTEGRALGDVIAGADVFLGLSTAGVLKPEMVAKMAAKPLIFALANPNPEILPADAKAVRPDCIVATGRSDFPNQVNNVLCFPFIFRGALDVGATTINEEMKLACVKAIAELAEAEASDIVASAYGGQELSFGSEYIIPKPFDPRLIVKIAPAVAKAAMDSGVATKPIADLEAYASSLNAFVYQSGIVMKPVFSAAKAVPLEQKRVIYAEGEDERVLHAVRVVLDEGLARPILIGRPEVIEMRIKKIGLNLKPERDFEIVNPESDPRYRELWTEYYKLMKRDGVTPDLAKAKIRRDTTLIGVMMLRRGDADALVCGTFGSYDYHLKQVADVIGLAPGAKQFAAMNLLLLTKRMLAITDTYVNENPSAEEVAEIARMASDELRRFGIEPSVALLSHSNFGSSNSASARKMRRACEILRETSPDLNVDGEMHGDAALSEEIRDKLHPDSGLKGEANLLVMPNLDAANISFNLMKVANGDGVSVGPILLGAAKPVHIVTPSATVRRLVNMTALAVVDAKESRNAGA

SEQ ID NO: 17723 - protein, 563 aa, Thauera sp. MZ1T
MKLDFRPKLFDTLPGYSRATFVGDLSSGITVGVLALPLAMAFAIASGMSPTAGIWTAIVAGFLIAFLGGSKVQIGGPTGAFIPIIYAIVADLGVQNLLIATMMSGVLLFAMGALRLGNMIRFIPLSVVIGFTNGIAVVIFISQIKDFLGLQIADLPGEFFAKMGALAAALPTLHLPTVAVALVSLAILVAWNRQAVKTAWMRRLPGPLAVLIILTAINALIALPVDTIGSRFGGIPQEIPPFGLPELSLSTLGKLIAPAITIALLGAIESLLSARVADSQIDDRHDPNQELMAQGIANVAAPLFGGFAATGAIARTATNIRTGGRTPIAGMIHAGVLLAIVLALAPLASHIPLATLSAIVVIVSINMGEWHAFAPKELARYSLNYRTILLGTFFITVVFDLTLAVEIGMALASLFFIYRMSDLTRIDRVPLEDFYGVEALSHPDGTPRIVAYKLKGSLFFGAANKLENLLLGLPGHPEVVVLDLDKVINIDTTGLDILQTLHRNLQKRGAHLVLCGLNSQPGSIVFRSGFSDKLGDDNIAANLTEALIRAQRLSGREPEIAYA

SEQ ID NO: 17724 - protein, 397 aa, Thauera sp. MZ1T
MKFFDEARIEVYAGDGGNGAATFRREKYIPKGGPSGGDGGRGGSVYAVADRNLNTLIDYRYTRSFRAERGENGGSRDCYGKGGDDITLRFPVGTVIKDLESGELVADLDEDGKTVLIAQGGRGGLGNIHFKSSTNRAPRKKTMGQEGEYRNLHLELKVLADVGLLGMPNAGKSTFIRSVSAAKPKVADYPFTTLAPNLGVVRTSEARSFVIADIPGLIEGAAEGAGLGHQFLRHLQRTHLLLHLVDLAPFDPEADPVADAKAIAEELRKYDEALYNKPRWLVLNKLDLIPEEERAERVAAFLEAYGPVERHFQISAMKGEGTQALIFAIQDLLDAERARIEAERAERVAAEAARLAAAEAARAAADAAYEREALLDEDDERPEDALDSEEDDSPPSR

SEQ ID NO: 17725 - protein, 103 aa, Thauera sp. MZ1T
MYAVIKTGGKQYRVAAGEKIKVEQIPADVGSEITIDQVFMVGEGDAVKIGTPVVAGASVKATVVSHGRHDKIKIFKMRRRKHYQKHQGHRQNYTELRIEAISA

SEQ ID NO: 17726 - protein, 571 aa, Thauera sp. MZ1T
MPSPYPHLPFLAWPAQWREHGLRGDLVAGITVALVLIPQALAYAKLAGLPPHIGLYAALLPAVVAALFGSCGQLSTGPVALTSLLVGASILPLGATAGGDLVGLALLLALLSGLIQLALGVLRLGWLLNLLSVPVLMGFVNAAALIICLTQIPPLLGLAMPHSDHLLVDFVRALGGLDALQPAAAAFGVGSLAVLVGLKRLWPRLPGVPLVVAATIALSAWTGFAAQGGAVVGAVPAGLPGFSLPPLRPELIAALLPAAFVVAMVSFMEAASSAKLICGRTRQPWNQDQELVGQGLGKLAAAFTGGLPVSASFSRSALNYANEARTGLSSLVTAAFVLAALLWLTPLLWHLPKPVLAAIILQAVAGLIDTGVMRRAWRASRDDGAAAAITFLATLAFAPNIQNGVFTGLILSLALLVYRGMRPRVALLGLHEDGTYRDRERFGLHHPHPRLVILRFDGPLSFVTAATFEDAMLGAARAQESVRVVLVSAAGINAIDATGLHTLASLVERFHGQGQKIAFCGLKKQVIDAMERDGVWTRISAHSNYRTEHQALDALQPALAAAGPAASAPAP

SEQ ID NO: 17727 - protein, 374 aa, Thauera sp. MZ1T
MPLVIGVLKETHPGERRLSVVPDVVKKYQGLGASVVMQKDAAKGAHFRDTDFADVTWVDSAADVVAAADVVLCVQPPAAETLAAMKPGSVLCGMLQPWYSTERVQQLVDGQVTAFALELLPRISRAQSMDILSSQGAVAGYECALIAADHSPKFFPMLTYAAGSIRPAKVLVIGAGVAGLQAIATARRIGAMVEAYDVRPETREQIESLGAKFVDTGVSAAGAGGYARELTEEEKAKQAERLAKAVAQCDALITTAAIPGRKAPRIITADMIARMKPGAVVVDMAAETGGNVEGTVAGEKVWINDVLVIGPTNIPSRMPVHASEMVAKNLFNFISPFIKDGALALDWEDEVMAGSCLAHAGELRHAGVKQALGL

SEQ ID NO: 17728 - protein, 529 aa, Thauera sp. MZ1T
MTLLIGVPKETFAGEKRVATVPEVVAKLIKLGFSVAVESGAGAAANFSDDDYRAAGAEVSPGSAELLGRADIVFKVRPPTLDEVGMLREGATLIGFVWPAQHPELMAALQARKTTVLAIDCLPRQLSRAQKMDALSSMAGISGYRAVVEAANAFGRFFNGQITAAGKIPPAKVFIAGAGVAGLAAIGTAANLGAVVRANDTRAEVADQVVSLGGEFVKVDYDEEGSGGGGYAKVMSEGFQAAQRQMYAREAKDADIVITTALIPGKPAPKLITAEMVQSMKPGSVIVDLAAEQGGNCELTVPGEAVVRHGVTIIGYTDLVSRLARQSSTLYSNNLLRLTEDLCKAKDGNIAVNFEDDAIRGLTVIKQGELTWPAPPPKLPAASAKPKASSAPITAPKGHGHGAGAPMPVKSLAIVFGVGALLFLLVGLYAPASFLTHFTVFVLACFVGYMVVWNVTPSLHTPLMSVTNAISSIIAIGALVQIAPPLAEGASDRPGGLIGVLAFVAITLTAVNMFGGFAVTRRMLAMFRK

SEQ ID NO: 17729 - protein, 69 aa, Thauera sp. MZ1T
MSTQTGTVKWFNDAKGFGFITPEGGGDDLFAHFSEIQSKGFKSLAENQRVEFEVKTGPKGLQAANIRPL

SEQ ID NO: 17730 - protein, 223 aa, Thauera sp. MZ1T
MTQATAVSVVALKTFPLFHGLSDESLASIARVSMMRRFPRGQSVVCAGDRPDYVYLVLTGSLKVVVSDEDGREVILSILGQGELFGEMGMFDERPRSASVIAVVPADLVLISKQDFRRIMQDSFDVSWRIMCNLAERLRNADRKIESLALMDVYGRVARLLIEMAEDVGGQSVVVRRISKQDIAKMIGASREMVSRVMKDLGQQGLIEEGPDGILLRERLNDV

SEQ ID NO: 17731 - protein, 410 aa, Thauera sp. MZ1T
MALIVQKYGGTSVGTPERMRSVARRVANFRAQGHRVVVVVSAMSGETNRLIALARAVAPSPRTRELDVVVSTGEQVSIGLLCMALDDLGVPARSYTGAQVRILTDSTHTRARILDIDAAPIRKDLDAGGVVVVAGFQGVDAHGNITTLGRGGSDTTAVALAAALEADECQIYTDVDGVYTADPRIVPEARKLDAVRFEEMLELASLGSKVLQIRAVEFAAKYKVKLRVLSSFEEDPGEGTFITVEESSNMERPVISGIAFVRDEAKLTLTGVPDRPGIAYQILGPIADADIDVDMIIQNAPRDGSTDLSFTVARADLARAVKVLEGVQAHVGARSIESDDTMCKVSVVGVGMRSHPGVAAKMFRTLAEEGINIQMITTSEIRISVAIEEKHLERAVRALHKAYGLDVAAE

SEQ ID NO: 17732 - protein, 261 aa, Thauera sp. MZ1T
MLKINNLHAAIDGKAILKGLNLEVADGEVHAIMGPNGSGKSTLAQVLAGRETFTVTDGSVDWNGADLLALPAEERARAGLFLAFQYPVEIPGVSNAYFLKAAVNAVRRHRGLPEYDAMDFLARVKAEMKAVGMKEEFLYRSVNEGFSGGEKKRNEVLQMALLEPRLAVLDETDSGLDIDALKIVAEGVNRLRSPARSMIVITHYQRLLDYIVPDKVHVLSQGRIVRSGGRELALELEEHGYGWIDAAQGDKAGGASAGARP

SEQ ID NO: 17733 - protein, 403 aa, Thauera sp. MZ1T
MLKFPIYLDYSATTPVDPRVAAKMIPWLTEHFGNPASRSHAYGWEAEKAVEDAREQVAALVNADAKEIIWTSGATESNNLAIKGAAHFYQGKGKHLITVKTEHKAVLDTVRELEREGFEATYLDVQENGLIDLEVLKAAIRPDTIVVSVMFVNNEVGVVQPIAEIGEICREKGIVFHVDAAQATGKVDIDLDRLKVDLMSFCAHKTYGPKGIGALYVRRKPRVRLEAQMHGGGHERGLRSGTLATHQIVGMGESFRIAREEMAEENARVGKLRDRLLAGLTDLEATFVNGDLAQRVPHNLNISFAYVEGESLIMAVKDIAVSSGSACTSASLEPSYVLRALGRNDELAHSSIRFTIGRFTTEEEIDYTIKLLHDKIGKLRELSPLWEMYKDGVDLDAVQWAAH

SEQ ID NO: 17734 - protein, 387 aa, Thauera sp. MZ1T
MNFAPIYLDWNATTPLDPAVREAMLPWLGAAEPARFGNASSRHEYGRQARAAVDEARARVAAAVGAHATEVIFTSGGSEANNLFLKGAAPNREPGVVAVSAIEHPCVREPARQLRRAGWTLREIAVDAQGVIDPADWSAVLEARPGLVSVMLANNETGVLQDVAALARAARAAGAWFHTDAVQALGKVAVDFRALGVHAMTLSAHKIGGPLGAGALVLDKRVELAPLIAGGGQERGLRSGTENVAAIVGFGVACERAVARREGEGVRLAALRDELCAALAGRGARIFSAAAPRLPNTVFFAVEDIDGETLVGRLDRAGFACASGSACSSANPEPSRTLLAMGVERGLARAAVRVSLGRDTRADDVRSFIETFVRVTDELKNLASIGA

SEQ ID NO: 17735 - protein, 257 aa, Thauera sp. MZ1T
MNQKNRYRILVVDDDARLRELLSRYLQEQGFSVKAVGDAPMMDRALHREHYDLIVLDLMLPGEDGLSICRRLRAAENQIPVIMLTAKGDDVDRIVGLEMGADDYVAKPFNPRELVARIQAVMRRQPHTLPGAPTPEDEIVAFGRVKVNLGTRVLVRDGEEIQLTTGEFSLLKVLLTHPRQPLSRDKLMELARGREYGVFDRAIDVQVSRLRKLVEDDPAKPRYIQTVWGFGYVFVPDEQKGGEDNGGQPDTPAGGED

SEQ ID NO: 17736 - protein, 309 aa, Thauera sp. MZ1T
MSDASQTPLSDQPTGEDGFRAGFVAIVGRPNVGKSTLLNRLIGQKISIVSSKAQTTRHRVTGILTEPGAQFVFVDTPGFQTHHRNALNRSMNRTVSQVLADVDLVFFVIEAGRFTEDDRKVLAVIPESSKVILVINKVDQLKDKTRLLPFIAQVREARDFTEIVPLSAEKGRNVDELVKAATPLLPVGTPMFEEDEITDRSERFLASEFLREKLFRLLGDELPYGIAVEIEKFEVEGNLRRIYAAVIVDKPGHKSMVIGRGGEKLKRISSEARVELEKLFDGKVFLEVWVKVKSGWADDERALKSLGYE

SEQ ID NO: 17737 - protein, 552 aa, Thauera sp. MZ1T
MDQRRLILFLIFSFSLVMLWDGWIKQNQPPVAQQQAAAGSAAPADGAVPTPTLSATPGQPVVPGEQAAQAAAAPRAVVETDLLRAEVSAQGGDIVRLELKQHKASGEAGGNFVLLDDGTTRHQYAAQSGLIGEGLPTHKTLFQLPAGELRLKDGENGVELRLQAPEQNGVQVTKVMRFARGSYLIDVSYEIRNGSGQALAPHAYFQLTRDGNPAEQVEAFGVTTFTGPAFYTDANKFQKVQFADITDGDAKFPKTAADGWVAMVQHYFVGAWLPKAGEQREYFARALGNNLFSAGVILPVASIATGAEGAVSTRLYAGPQEQDKLEGIAPGLDLVVDYGWLTVIAAPLFWVLSWFHNLTGNWGWAIILVTVAIKAIFFPLSAASYKSMAKMRVLGPRLQRMKEMYGNDKAKMQQEMMNLYRTEKINPLGGCLPILVQIPVFIALYWVLLGSVEMRHAPWLGWIQDLSAKDPYFILPIIMGVSMLVQMKLNPTPPDPIQAKVMMAMPIIFTFMFLWFPSGLVLYWVVNNCLSIAQQWQITRMIESGKSAGKPA

SEQ ID NO: 17738 - protein, 545 aa, Azospirillum brasilense
MKLAEALLRALKDRGAQAMFGIPGDFALPFFKVAEETQILPLHTLSHEPAVGFAADAAARYSSTLGVAAVTYGAGAFNMVNAVAGAYAEKSPVVVISGAPGTTEGNAGLLLDHQGRTLDTQFQVFKEITVAQARLDDPAKAPAEIARVLGAARSLSRPVYLEIPRNMVNAEVEPVGDDPAWPVDRDALAACADEVLAAMRSATSPVLMVCVRSAATGLEAKVADVAHGLGVPVVTTFMGRGLLADAPTPPLGTYIGVAGDAEITRLVEESDGLFLLGAILSDTNFAVSQRKIDLRKTIHAFDRAVTLGYHTYADIPLDGLVDALLERLPPSDRTTRGKEPHAYPTGLQADDGPIAPMDIARAVNDRVRAGQEPLLIAADMGDCLFTAMDMIDRGLMAPGYYAGMGFGVPAGIGAQCVSGGKRILTVVGDGAFQMTGWELGNCRRLGIDPIVILFNNASWEIVRTFQPESAFNDLDDWRFAEMAAGMGGDGVRVRTRAELKAALDKAFATRGRFQLIEAMIPRGVLSDTLARFVQGQKRLHAAPRE

SEQ ID NO: 17739 - protein, 589 aa, Prunus persica
MLRALTLRRSLQSLHHHHHLKTHISTAIPQNPLNPLGPARACSSLSSPSASSSASELRKYLGYTALVLFSAAATYYSFPFPENAKHKKAQIFRYAPLPEELHTVSNWSGTHEVQTRVFHQPETLEELEKVVKDAHEKKTRIRPVGSGLSPNGIGLSRAGMVNLALMDKVLEVDKEKKRVRVQAGIRVQELVDGIKEHGLTLQNFASIREQQIGGILQVGAHGTGAKLPPMDEQVISMKLVTPAKGTIEISKEKDPELFYLARCGLGGLGVVAEVTIQCVERQELVEHTSVSNMEEIKKNHKKLLSENKHVKYLYIPYSDTVVVVTCNPVSKWKGPPKFKPKYSSDEAIQHVRDLYKECLQKCSVVPVKNDVDINELSFTELRDKLLALDPLDKDHVVKVNQAEAEFWRKSEGYRVGWSDEILGFDCGGQQWVSETCFPVGTLSKPSLKDLEYIEDVKQLIEKNEVPAPAPIEQRWTACTKSPMSPASSTKDDDIFSWVGIIMYLPTTDARQRKEITEEFFHYRRLTQVQLWDKYSAYEHWAKIEVPKDKEELASLQARLRKRFPVDAYNKARKELDPSRILSNNMLEKL

SEQ ID NO: 17740 - protein, 559 aa, Corynebacterium ammoniagenes
MTIATDKKPRPKRTPKPEGQWKIDGMEPLNDDERIKQEDPGFSAKQRVIDIYSKQGFASIPPEDLAPRFKWLGIYTQRKQNLGGELTGQVPNSELQDEFFMLRIRFDGGRATPQQLRVVGEISQEFARSTADFTDRQNIQLHWIRIEDMPEIWERLEAVGLSTMMGCGDVPRVILGSPVAGVAQDEIIDATPAIETIVNEYLHREDVQNLPRKFKTAISGNARQDVTHEIQDVSFVGTNHPEYGPGFDCFVGGGLSTNPMLAQSIGAFVPLERVPEVWHGVVSIFRDYGFRRLRNRARLKFLVAQWGVEKFRQVLEDEYLESPLQDGIPTVPHMGNRDHVGVHKQQDGKFYVGVKPTVGHTTGEQLVAIAEVAESFGIERIRTTPMKELLFLDVDEDVIEPLSKKLSETGLYPKPSEFRRGVMSCTGLEFCKLAHTTTKSRAIELVDELEEIIGDLDVPISITLNGCPNSCARTQVADIGFKGQTLTDENGDRIEGFQVHLGGAMGLNPDFGRKLRGHKVKASEVTDYVVRVVTNFKEQRNPGEQFRDWVLRAEDEDLS

SEQ ID NO: 17741 - protein, 301 aa, Oryza sativa Indica Group
MAIIHDTSDQQEDNMRSYMDGGGAAAYEEEEEEVEDDDGGGGGGGGGLGEKKRRLAAEQVRALERSFEADNKLDPERKARIARDLRLHPRQVAVWFQNRRARWKTKQIERDFAALRSRHDALRLECDALRRDKDDLAGEIDELRDRPKRLEQASPMFPRTVACMDATRLVSWVNYLSTMCKQLALYLLKVVDGSTDSDSSAVFNEEASPYSGAAIDHHHHQTPASYDTAGFTSFFAPSTTLTSSLSFPSMFHASSHFDGHQELLVGGGGAGAVADADLGGAGFFAGDEHAGGLSWYGAEGW

SEQ ID NO: 17742 - protein, 442 aa, Oryza sativa Indica Group
MSPARGGTPEEEEGGADVEKAAAETGGRGTWRHAAFHVATTIATPAAYAPLPFALASLGWPLGVCSLVTGTLVTWCSSLVVASLWQWNGDKHTSYKLLAKSIFGPWGYWYVSFFQQVASIGNNIAIQIAAGSSLKAVYKHYHTTDDGAMTLQQFIILFGAFELLLSQLPDIHSLRWVNAACTASTIGFAGTAIGVTIYDGHRIDRKEVDYSLQGSAASKIFRAFNALGTIAFSFGDAMLPEIQSSVREPVRMNMYKGVSTAYSIIVMSYWTLAFSGYWAFGSGVQPYILSSLTFPRWTIVMANLFAVIQITGCFQIYCRPTFAQFEQRIQAKDAGYRARMWRLVYTSAYMVVITLISAAMPFFGDFVSVCGAVGFTPLDFVLPALAFLKAGKLPENPGLRHAVKVITSAVAVLFSIVGALACIGAVRAIALDVKTYKFFHDM

SEQ ID NO: 17743 - protein, 974 aa, Oryza sativa Indica Group
MKIPFVTKWSHRSHEPAAPSNPAAQQQPPPPSPAGVGVSSAAAAAVVEEAEMETGGDDFITQEEEYQIQLAMALSASASVSAPSGGGGSGDTEGEQIRKAKLMSLGRGDLSAAADRGVGDSAEALSRRYRDYNFLDYNEKVIDGFYDIFGLSAESARQGKMPSLAELQTSIGDLGFEVIVVDHKFDSALQEMMEVAQCCMLGCPDTTVLVRRIAEVVAGHMGGPVIDATEMFTKWLGKSIEQRTSHQTSLLPIGRIDIGLSRHRALLFKILADSVGIPCKLVKGSHYTGVEDDAINIVKMNNEREFLVDVMAAPGTLIPADVFISKGTPFNLTKPLVQNQVVELASNIENDPSAAHSEHVGNRLHMFGNGNSLSENQSGCEKTMIAGSEVSQLWTLAPQMQSDQQSTSAGAHSMQKEDLKLTPDSQENEESKKQISETDSFRGIELGKSSLAFKGLNNRNNEYQRHRENIAPAPGRSQQPLVMKNWSACNDISNKQYNIAERLVRRRNTSDNAASSSQLAWSTAKHYNPNGRERNDRLCAAPGRNYDNRKVGASTTATASATGERLDRPNLAPVHYYDDKPNGISSVNAASTSGIVKVAEKGPHDLEKVPIYSRFDSQIYSSMQGYSPEVKENKENYDRHDNMRLHPDPRRSPLDRLMDTSRQNSESVSPPQAGSSTVDMVLGEVSECEILWEDLLIGERIGLGSYGEVYHADWNGTEVAVKKFLDQEFYGDALAEFRCEVRIMRRLRHPNIVLFMGAVTRPPHLSIVSEYLPRGSLYTIIHRPDCQIDEKCRIKMALDVARGMNCLHTSVPTIVHRDLKSPNLLVDNNWTVKVCDFGLSRLKHGTFLSSKSTAGTPEWMAPEVLRNEQSNEKCDVYSFGVILWELATLQMPWSGMNPMQVVGAVGFQDRRLDIPMEVDPLVASIIQDCWQKDPNLRPSFSQLTSYLNTLQRLVIPCHQETAGSYVPQEISLYR

SEQ ID NO: 17744 - protein, 388 aa, Oryza sativa Indica Group
MMEIRSTVGAHGTGARLPPIDEQVISMKLVTPAKGTIELSREKDPDLFYLARCGLGGLGVVAEVTLQCVERHQLIEHTFVSNADEVKKNHKKWLSENKHIKYLWIPYTDTVVVVQCNPPSRWRTPKFTSKYGKDEAIQHVRDLYHESLKKYRTKAESNDPEVDQLSFTELRDRLLALDPLDKDHVIRINKAEAEYWKKSEGYRMGWSDEILGFDCGGQQWVSETCFPAGTLAKPNMKDLDYIEELLQLIEKEDIPAPAPIEQRWTACSRSPMSPASSSQEDDIFSWVGIIMYLPTSDARQRKEITEEFFNYRSKTQTNLWDGYSAYEHWAKIEVPKDKDELAELQARLRKRFPVDAYNKARMELDPNKVLSNAKLEKLFPVTEVQHEK

SEQ ID NO: 17745 - protein, 610 aa, Oryza sativa Indica Group
MDKGALVVQVMDDSSNGGVGAAAAGGSFSSLRAYGRALAQTPRRLARRACAATSPGEEMSRVRARSGARMARRLRWHDLVGLGLGGMVGAGVFVTTGRATRLYAGPGVVVSYAIAGLCALLSAFCYTEFAVDMPVAGGAFSYLRVTFGELAAFLTGANLIMEYVFSNAAVARSFTAYLGTAVGVDAPSKWRIAVPGLPKGFNEVDLIAVGVILLISVCICYSTKESSVVNMVLTAVHVAFILFIIVMGFWRGDTRNLTRPADPAHNPGGFFPHGAAGVFNGAAMVYLSYIGYDAVSTMAEEVERPSRDIPVGVSGSVMLVTLLYCLMAASMSMLLPYDAIDTEAPFSGAFKGSSGWGWVSNVIGAGASLGILTSLMVAMLGQARYLCVIGRSGVMPAWLAKVHPCTATPVNASAFLGVFTAALALFTELDVLLNLVSIGTLFVFYMVANAVVYRRYVAADDDDADHRRAWPTLVFLAAFSLVALCFTLLWQFAPAGRARTGLLAACGAAAVATVGAFRALVAEARRPELWGVPAMPWVPAASVFLNVFLLGSLDRPSYVRFGFFTAAAVLVYVLYSVHASYDAEEGGGAGAGAAALDGAKVQDEAADFKV

SEQ ID NO: 17746 - protein, 307 aa, Oryza sativa Indica Group
MPQVRNQNLGMVADTESSGSLGGSSNAASDKAVDGSLDKRSQEKAPKKTHKAEREKLKRDQLNDLFVELSSMLVLDCAIPILPFYDPKKNGSYAVQFAKISPYPERQNSGKATVLGDAARVLRDLVSQVESLRKEQSALLTERQYVGSEKNELQEENIMLRAQILELHNEICARMGNNHLNQSNLAMSQPVANNGSNSATQPVPHHIWGNGPNLAMVHPTNTLSPLHNQHHQSAGASQVYASRPQELQLFPGTSVSTERERSRAGSGSTPATSSGLTDSLPGQLRLSLPQSSQEESSSGSKKGRKKG

SEQ ID NO: 17747 - protein, 583 aa, Oryza sativa Indica Group
MRRLLLAGILRRASSSPSSHHHLHLVRALSASSPLPASDADLRKYAGYALLLLGCGAATYYSFPLPPDALHKKAVPFKYAPLPDDLHAVSNWSATHEVHTRVLLQPDSLPALHDALAAAHGERRKLRPLGSGLSPNGLALSRAGMVNLALMDKVLDVDAKKKTVTVQAGIRVAELVDTLREHGLTLQNFASIREQQVGGIIQVGAHGTGARLPPIDEQVISMKLVTPAKGTIELSREKDPDLFYLARCGLGGLGVVAEVTLQCVERHQLIEHTFVSSADEVKKNHKKWLSENKHIKYLWIPYTDTVVVVQCNPPSSWRTPKFTSKYGKDEAIQHVRDLYRESLKKYRTKAESNDPEVDQLSFTELRDRLLALDPLDKDHVIRINKAEAEYWKKSEGYRMGWSDEILGFDCGGQQWVSETCFPAGTLAKPNMKDLDYIEELLQLIEKEDIPAPAPIEQRWTACSRSPMSPASSSQEDDIFSWVGIIMYLPTSDARQRKEITEEFFNYRSKTQTNLWDGYSAYEHWAKIEVPKDKDELTELQARLRKRFPVDAYNKARMELDPNKVLSNAKLEKLFPVTEVQHVK

SEQ ID NO: 17748 - protein, 600 aa, Oryza sativa Indica Group
MDKGALMPSPDETCCVGGGGGSSFSSLRAYGRALAQTPRRLAARACAAASPGEEMSRVRARSGADMARALRWPDLVGLGLGGMVGAGVFVTTGRATRLYAGPAVVVSYAIAGLCALLSAFCYTEFAVDMPVAGGAFSYLRVTFGELAAFLTGANLIMEYVFSNAAVARSFTAYLGTAVGVDAPSKWRIAVPGLPKGFNEVDLVAVGVILLITVCICYSTKESSSVNMVLTAVHVLFIMFVIVMGFWRGDTRNLTRPADPEHNPGGFFPHGAAGVFNGAAMVYLSYIGYDAVSTMAEEVERPSRDIPIGVSGSVVLVTLLYCLMAASMSMLLPYDAIDTEAPFSGAFKGSSGWGWVSNVIGAGASLGILTSLMVAMLGQARYLCVIGRSGVMPAWLARVNPRTATPVNASAFLGVFTAALALFTELDILLNLVCIGTLFVFYMVANAVVYRRYVAAAEDDEEGRRRGAVPTLAFLLAFSLVALCFTLVWKLAPRGGARTGLLVACGAAAAAAVAAFRALVPQARRPELWGVPAMPWVPAASVFLNVFLLGSLDRPSYVRFGFFTAAAALVYVLYSVHASYDADEAAAALDGAKVLDEGCKV

SEQ ID NO: 17749 - protein, 482 aa, Oryza sativa Indica Group
MSDMASGQKAKQQVMKPMEVSVEAGNAGDAAWLDDDGRARRTGTFWTASAHIITAVIGSGVLSLAWAIAQLGWVAGPAVMLLFAFVIYYTSTLLAECYRTGDPATGKRNYTYMDAVRANLGGAKVTFCGVIQYANLVGVAIGYTIASSISMRAIRRAGCFHHNGHGDPCRSSSNPYMILFGVVQIVFSQIPDFDQIWWLSIVAAVMSFTYSGIGLSLGIVQTISNGGIQGSLTGISIGVGVSSTQKVWRSLQAFGDIAFAYSFSNILIEIQDTIKAPPPSEAKVMKSATRLSVATTTVFYMLCGCMGYAAFGDAAPDNLLTGFGFYEPFWLLDVANVAIVVHLVGAYQVFVQPIFAFVERWASRRWPDSAFIAKELRVGPFALSLFRLTWRSAFVCLTTVVAMLLPFFGNVVGLLGAVSFWPLTVYFPVEMYIAQRGVPRGSARWVSLKTLSACCLVVSIAAAAGSIADVIDALKVYRPFSG

SEQ ID NO: 17750 - protein, 507 aa, Oryza sativa Indica Group
MARRGRRSPASPAVAIALFVFLAYGGGGGVCKAAPASAVVKSVPGFDGALPSKHYAGYVTVEEQHGRNLFYYLVESERDPAKDPLVLWLNGGPGCSSFDGFVYEHGPFNFESGGSAKSLPKLHLNPYSWSKVSSVIYLDSPAGVGLSYSKNTSDYNTGDLKTAADSHTFLLKWFQLYPEFLSNPFYIAGESYAGVYVPTLSHEVVKGLHDGVKPTINFKGYMVGNGVCDTVFDGNALVPFAHGMALISDDIYQEAQTACHGNYWNTTTDKCENALYKVDTSINDLNIYDILEPCYHSKTIKKVTPANTKLPKSFQHLGTTTKPLAVRTRMHGRAWPLRAPVRAGRVPSWQEFARGSRPSGVPCMSDEVATAWLNNDDVRAAIHAQPVSSIGSWLICTNVLDFIHDAGSMISYHKNLTGQGYRAFIYSGDHDMCVPYTGTEAWTRSLGYGVIDSWRPWHLNGQVSGYTQGYEHGLTFATIKGAGHTVPEYKPQESLAFYSRWLAGSKL

SEQ ID NO: 17751 - protein, 175 aa, Oryza sativa Indica Group
MSRDPLVVGSIVGDVVDHFGASALLRLFYNHREMTSGSELRPSQVAGEPAVQITGGRDGRALYTLVMVDPDAPSPSNPSKREYLHWLVTDVPEGGDTSKGTEVVAYESPRPTAGIHRLVFIVFRQTVRQSIYAPGWRSNFNTRDFAACYSLGSPVAAAYFNCQREGGCGGRRYRS

SEQ ID NO: 17752 - protein, 508 aa, Oryza sativa Indica Group
MAMAVEGAGAGVVVSEPEVVSIPPTPRGMSTPEGTATPPPAAGRGAATPARRVVEGLRGYLEEVGHLTRLNPQDAWLPITESRSGNARYAAFHTLNAGLGFQALLLPLAFPALGWSWGIISLTVAYFWQLYTLWILVKLHEAVPGRRYNRYVELAQAAFGEKLGMWLSLFPTIYLSAGSATALILVGGETMKLFYQIVCGPICSPSPISTIEWYLVFTSLAIVLSQLPNLNSIAGVSLIGGTTAITYCTMSWVLSVSQPRPPTVSYEPQAYTSLGSSLFSTLNALGIIAFAFRGHNLALEIQATMPSTFKHPAHVTMWRGAKVAYALIAMCLFPVAIGGYWAYGNMVPQGGMLTALYAFHSHDIPRGLLAATFLLVVFNCLSSFQIYSMPVFDSFEAAYTGRTNRPCSVWVRSGFRVFYGFLSLFISVALPFLSSLAGLLGGLTLPVTFAYPCFMWICIKKPERFSSGWYLNWGLGLLGTAFSLSLCVGGVWSIISSGMKFKFFKPPS

SEQ ID NO: 17753 - protein, 218 aa, Oryza sativa Indica Group
MAARLLAPLLLLLLLLLAPLPPPAAAAEPEEARCPREWLPPFVAAAAAALRPSCRASAERCPAEEINGEELVKELSGKEECTAVLFYASWCPFSQRMRPVFDDLSSMFPRIKHLAVEQTNAMPAVLSRYGVRSFPSILIACGPYAYWPVGSKELDSLVNVYTAVTGQEPIAYLGPRKWSAARTGSTQHVKLWKSSIIEALKSEPYLAFSILFICLKIL

SEQ ID NO: 17754 - protein, 304 aa, Oryza sativa Indica Group
MRDPIPSPASNLLRLPLPLPLRLPLRRTQAANPPPSTRLLLRRPPVSHPPLSSLPPRELDLLGLTSSHPTMAANVGESTSGSSSGGADSGGSFECNICFELPQEPIVTLCGHLFCWPCLYKWLHIHSHSPECPVCKAVVEEDKLVPLYGRGKDRVDPRSKNVPGADIPNRPAGQRPATAPQANPNTHFPNANPNPWFMGGGIPLANARWGNYTFSAAFGALFPLLSCQVHGFPDATAYGQPAGFPYGYGHGHGHGHGHAFHGGHAHAAAAPRHGPPGQQQQADVYLKALLILVGFLVIASLITF

SEQ ID NO: 17755 - protein, 416 aa, Oryza sativa Indica Group
MAPPPHSDSDLLKPRDVCIVGVARTPIGALLGSLSSLPATKLGSVAIQAALRRANVEPALVQEVFMGNVLSANLGQAPARQAALGAGLPDTVPCTTVNKVCSSGMKAVMLAAQTIQLGMHDVVVAGGMESMSNAPKYVAAARRGSRFGHDVLIDGMLKDGLWDVYNDFPMGMCAELCADQHSISREEQDLYAIQSNERAIAARDSGAFSWEIAPVEISSGRGKPPLIVDKDESLAKFNSAKLRKLGPTFKKNGSVTAGNSSSISDGAAAIVLVSGQKAKSLGLQVIARIRGYADAAQAPELFTTTPALAIPKAVSNAGLQTSQIDYYEINEAFSVVALANQKLLGIPSGKLNLSGGGVSLGHPIGCSGARIIVTLLGILRHKNGKIGVAGVCNGGGGASALVVELMQPSLFTRSSL

SEQ ID NO: 17756 - protein, 922 aa, Oryza sativa Indica Group
MERSLLPWLLLLLCFADGVFQSRAQPDSKGFISIDCGIQPNTSYVHNTTKISYVADDDFTDGGSNYNVSPEYIKPQLSQRYYNLRAFPDGARNCYTARSLAPGIKYLIRASFLYGNYDGLNKLPVFHLYIGVNFWTMVNITSLGLGGSRYEEAIVVVPDDFVQVCLINTGTGTPFISSLELRPLDKRLYPQVNATLGLLQLNRLNFGPTDNSLVRYPDDPHDRFWGNWDSYTSSLWKEISTASRVDNLDGDIFDAPTAVMQTAVTPRNASGNIYFFWEPWPQPNDPTPPYTVIFHFSELEILTNNASRQFYINLNGEPLIDTAYEPTYLTARYLYGLEPLERTSRYNITINATANSTLPPLINAAEIFSIISTAVIGTDSQDASSMMAIKDKYQVKKNWMGDPCMPKTFAWDKLTCSYPNSSGARIISLNLSSSGLSADISSAFGNLKALQYLDLSNNSLTGSIPDVLSQLPSLRVLDLTGNQLSGSIPSGILKRIQDGSLNVRYGNNPNLCINGNSCKAAKKKSKLAIYTVIPAVLVVLIASVTTLFCLLRRKKQGPMNNSLEQQNEMSTSTSHVLINSGYGDNVSLRLENRRFTYKELEKITNKFKRVLGRGGFGYVYHGFLEDGTEVAVKLRSESSSQGAKEFLIEAQILTRIHHKNLVSMISYCKDGIYMALVYEYMPEGTLEEHIVGLEYLHKGCNPPIIHRDVKATNILLNTRLEAKIADFGLSKASSYDNITHVSTNALVGTLGYVDPEYQMTMQATTKSDVYSFGVVLLELVTGKPAILHEPNPISVIHWTRQRLARGNIEDVVDTCMPSDYDVNGVWKAMDIAFTCTAQASTQRLTMTEVVMQLQECLELEDARCAIGDAHNEFYPDPRSDHNLSYNTYVSDRSNDVSQNSGVSMMEHNFGRVPTMASGPAAR

SEQ ID NO: 17757 - protein, 350 aa, Oryza sativa Indica Group
MSQRRVAGPMGVMSKQQQEAMAEEMMELRRGPWTLEEDNLLMNYIACHGEGRWNLLARCSGLKRTGKSCRLRWLNYLKPDIKRGNLTPEEQLLILELHSKWGNRWSRIAQHLPGRTDNEIKNYWRTRVQKQARQLKVDANSTVFRDAVRCYWMPRLLEKMAGAATDPTPPPPPPLHHHAAMATASSSPFDFDTHLQQAEAATACVVPNNVYHHHIDPSPSTSTSAGSTAAAAAFQPLPCFSELRWDQQMQSSGELDDGAAGLFVDSASALGSLSLDGLDLGPAEYYSDSTLLDYLNSSCTGSAMMTMMTASGNAGSYNYCGGAMDGGDTWRSDEVCQAAARKLGEWGGGI

SEQ ID NO: 17758 - protein, 459 aa, Oryza sativa Indica Group
MAKALLSSSLLPSLQPRAAAARLPLLTLPSLRRHGGRRASACRVRASLHGLDSIAGLDLHAALERAEAALYTLADAAVVAADAAAGGGGGGGGGGGEAAAAVAQKNGGWFGFISEALEVVLKVLKDGLSAVHVPYSYGFAIILLTVIVKAATLPLTKQQVESTLAMQNLQPQIKAIQQRYAGNQERIQLETARLYKQAGVNPLAGCFPTLATIPVWIGLYQALSNVANEGLLTEGFFWIPSLGGPTTIAARQSGAGISWLLPFVDGHPPLGWHDTICYLVLPVLLVASQFVSMEIMKPPQTDDPSQKNTLLVLKFLPFMIGWFSLSVPSGLSIYWFTNNILSTAQQVWLRKLGGAKPVVNQGGSGIITAGRAKRTSAQPAQPGERFKQLKEEESKRKGNKALAAGDSDLSASTSEDEESDDEITEEGGPEERYNSSSNKKLPNYSGKKGKRSKRKRMVQ

SEQ ID NO: 17759 - protein, 306 aa, Oryza sativa Indica Group
MPRRARPDRAGRPPPRRLTDTGAGEGSSVAADPTKPETNPESSCRDPSTSTSGGEAAACSPYPPPSIAGGASDHRRAPLRSAAAQGSHGEVGVDRPHERAREIEPRAASSYFVLVFVSTPDLSDENTVSRAVSQPAIQQFRNYSSGLGGDSSAKGDSSSTRVAADPDTHQDFQPTSKSSNMSFDDIVARDIKENPVLIYMKGFPESPMCGFSALAIKVLKLYDVPISARDILGDLKLKECVKAHTNWPTFPQIFIKGEFVGGSDIILDMHQASELIVPRFYYQKGQLKDVLGDISQKHEQKESSCR

SEQ ID NO: 17760 - protein, 796 aa, Oryza sativa Indica Group
MGTGGGEGDKSAALPLEALLALGLDQRTAENALVNSKVTANLAAVIAEAGISGCDKTVGNLLYTVATKYPTNALVHRPVLIDYIVSTKIKNPAQLDAALSFLTNTGPDSLDTGKFEEACGVGVVVSIEEIKSTVNEVLKHNMEAILEQRYHINVGNLCGQVRKMHPWGDAKATKDEIDKKLAEILGPKTDADNVKPVKKKKEKAAKVEEKKAAVVTAASPSEEELNPYSIFPQPEENFKVHTEIFYSDGNIWRAHNSKEILEKHLKATGGKVMTRFPPEPNGYLHIGHAKAMFIDFGLAKERNGHCYLRFDDTNPEAEKKEYIDHIQEIVHWMGWEPYKVTYTSDYFQALYEHAVELIRKGLAYVDHQTAEEIKEYREKKMNSPWRDRPIEESLKLFEDMRRGLIAEGAATLRMKQDMQNDNKNMSDLIAYRIKFTPHPHAGDKWCIYPSYDYAHCMVDSLENITHSLCTLEFDIRRPSYYWLLVALGLYQPYVWEYSRLNISNTVMSKRKLNRLVTEKWVDGWDDPRLLTLAGLRRRGVSSTAINSFIRGIGITRSDNSLIRVDRLEYHIREELNKTASRAMVVLNPLKVVITNLEDEKVIDLDGKMWPDAPADDASSYYKVPFSRIVYIEKTDFRLKDSKDYYGLAPGKSALLRYAFPIKCTEVVYGDNPDEIIEIRAEYDPSKTTKPKGVLHWVAQPAPGVEPLKVEVRLFDKLFLSENPAELEDWLGDLNPNSKEVIKGAYAVPSLATAVLGDKFQFERLGYFAVDTDSTPENIVFNRTVTLRDSYGKAGPK

SEQ ID NO: 17761 - protein, 180 aa, Oryza sativa Indica Group
MSSANSLVLGRVIGDVVDLFSPEVTLRVMYNGVRVVNGEDLRPSAVSARPSVEVGGDLHQFYTLVMVDPDAPNPSNPTLREYLHWLVTDIPGTTDANYGREVVCYESPRPAAGIHRVAVVLFRQMARGGVDQPPLLRHNFSTRGFADDHALGAPVAAAFFTCKPEGGTGGRRFRPPSRHS

SEQ ID NO: 17762 - protein, 362 aa, Oryza sativa Indica Group
MGWSSSRAMLVARAVALAVVFLAAEAQLSPGYYNATCPGVVSIVRRGMAQAVQKESRMGASILRLFFHDCFVNGCDASILLDDTANFTGEKNAGPNANSVRGYEVIDAIKAQLEASCKATVSCADIITLAARDAVNLLGGPNWTVPLGRRDARTTSQSAANTNLPPPGASLASLLSMFSAKGLDARDLTALSGAHTVGWARCSTFRTHIYNDTGVNATFASQLRTKSCPTTGGDGNLAPLELQAPNTFDNAYFTDLLSRRVLLRSDQELFGSGAGNGTTDAFVRAYAANATTFAADFAAAMVRLGNLSPLTGKNGEIKHHRNEKESKYNTRFTRLNPDQKNAQLAGHTPLLRAAEMGAYYDG

SEQ ID NO: 17763 - protein, 991 aa, Oryza sativa Indica Group
MLASRIPLKRCTAAAVVPLPGELEMEEGPTPPAGGGEGSGAAVVPAKRRRERVVPSRFRDSVVSLPLPPAKKGRPAKKAAAREGGDGEVYDVEVRAVEQQGATAAAFGAVETAVWPGDERPAQTEEELYRACRNIRRSSSSSGFSGSVVTSLSNAGGSVAPEGKPVVVVECKPKREGGDKKEDFYWPEDFVLGDVVWARSGKKCPAWPAVVIDPLLHAPAVVLNSCIPGALCVMFFGFSSGGHGRDYGWIKQGMIFPFVDYLDRFQGQALYKLKANRFRQAIEEAFLAERGFCELEMDEGCSLEKSVNDQSVPDGLQEGSGSNNDQECQSEAQVVGKSPGCCDSCGNRVPPKIAKKKKQAGEQLLCRHCDKLLQSKQYCGICKKIWHHTDGGNWVCCDECQIWVHVECDLTCINMEDLENADYFCPDCKSKRKTVPPVEQMNTPNSSECASTSKEKLPEMIPVFCFGMDGMYLPKKHMILCQCNSCKERLMSLSEWERHTGSRKKNWKMSVKLKSNADPLVTLLDDIPCANVKSSTPSINKEELLKLLANSFRPVNARWTTERCAVCRWVEDWDYNKIIICNRCQIAVHQECYGARDVQDFTNWVCRACELPKQKRECCLCPVKGGALKPTDIDQLWVHVTCAWFQPKVSFPVDETMEPAMGILSIPSEYFKKACVICKQMHGACTQCYKCSTYYHAMCASRAGYRMELQYSEKNGRNITRMVSYCAFHSTPDPDNVLIVKTPEGVFSTKFLPQNNEKQSGTRLVRKENLQEKVLPAKISDCPAARCLPYEMLKNKKEPGEAIAHRIMGPRHHSQESIEGLNACMDQKDEKSFATFRERLRYLQKIENKRVSCGRSGIHGWGLFAAKKIQEGQMVIEYRGDQVRRSVADLREARYHREKKDCYLFKISEDVVVDATEKGNIARLINHSCMPNCYARIMSVGDEKSQIILIAKRDVSAGEELTYDYLFDPDESEDCRVPCLCKAPNCRGYMN

SEQ ID NO: 17764 - protein, 469 aa, Oryza sativa Indica Group
MDSLGVLLVAPMNAYLEQELDRRCRLFRLWESPADRRDDYLRAHASSIRAVVPYAPQGVDAAMIDALPSLEIVSSFSVGIDRVDLDACRRRGVRVTNTPDVLTDDVADLAVGLAIAALRKIPQADRYVRAGKWKSKGDFTLTTRFSGKRVGILGLGRIGLAVAKRAEAFDCPISYHSRSEKPFPKYKFYPNVVDLAANCDVLVVACSLNPETRHIVNRKVIDALGPEGVLINIARGAHVDEPELISALLEKRLGGAGLDVFEDEPFAPEQLFELDNVVLVPHVGSDTEETCRAMADLFSGKRVGIIGLGRIGLAVAKRVEAFDCPVNYYQRTKQDHPGYTYYPSVVELAASSDVLVVACPLNEHTRHIVNREVMEALGPRGVLINIGRGPHVDEAAMVAALADGRLGGAGLDVFEDEPNVPEALLGMDNVVLVPHVGSATHETRTAMADLVLGNLEAHVAGKPLLTQVV

SEQ ID NO: 17765 - protein, 693 aa, Oryza sativa Indica Group
MEGGDERQRWRFNQTRVQSPLGSTSLHRLSLEVAMWAPKVVHCRCLTSHTHARLPRKSDGNDFAELLWENGQAVVHGRKKHPQPAFPPFGFFGGTGGGGGSSSSRAQERQPGGIDAFAKVGGGFGALGMAPAVHDFASGFGATTQDNGDDDTVPWIHYPIIDDEDAAAPAALAAADYGSDFFSELQAAAAAAAAAAPPTDLASLPASNHNGATNNRNAPVATTTTREPSKESHGGLSVPTTRAEPQPQPQLAAAKLPRSSGSGGGEGVMNFSLFSRPAVLARATLESAQRTQGTDNKASNVTASNRVESTVVQTASGPRSAPAFADQRAAAWPPQPKEMPFASTAAAPMAPAVNLHHEMDRDRAGRTMRVHKTEARKAPEATVATSSVCSGNGAGSDELWRQQKRKCQAQAECSASQDDDLDDEPGVLRKSGTRSTKRSRTAEVHNLSERRRRDRINEKMRALQELIPNCNKIDKASMLDEAIEYLKTLQLQVQMMSMGTGLCIPPMLLPTAMQHLQIPPMAHFPHLGMGLGYGMGVFDMSNTGALQMPPMPGAHFPCPMIPGASPQGLGIPGTSTMPMFGVPGQTIPSSASSVPPFASLAGLPVRPSGVPQVSGAMANMVQDQQQGIANQQQQCLNKEAIQGANPGDSQMQIIMQGDNENFRIPSSAQTKSSQFSDGTGKGTNARERDGAET

SEQ ID NO: 17766 - protein, 596 aa, Oryza sativa Indica Group
MASSASLQRFLPPYPHAAASRCRPPGVRARPVQSSTVSAPSSSTPAADEAVSAERLEPRVEQREGRYWVLKEKYRTGLNPQEKVKLGKEPMSLFMEGGIKELAKMPMEEIEADKLSKEDIDVRLKWLGLFHRRKHQYGRFMMRLKLPNGVTTSEQTRYLASVIETYGKEGCADVTTRQNWQIRGVTLPDVPAILDGLNAVGLTSLQSGMDNVRNPVGNPLAGIDPDEIVDTRSYTNLLSSYITSNFQGNPTITNLPRKWNVCVIGSHDLYEHPHINDLAYMPAVKGGKFGFNLLVGGFISPKRWEEALPLDAWVPGDDIIPVCKAVLEAYRDLGTRGNRQKTRMMWLIDELGMEAFRSEVEKRMPNGVLERAAPDDLIDKKWQRRDYLGVHPQKQEGMSYVGLHVPVGRVQAADMFELARLADEYGSGELRLTVEQNIVIPNVKNEKVEALLAEPLLQKFSPQPSLLLKGLVACTGNQFCGQAIIETKQRALLVTSQVEKLVSVPRAVRMHWTGCPNSCGQVQVADIGFMGCLTKDSAGKIVEAADIFVGGRVGSDSHLAGAYKKSVPCDELAPIVADILVERFGAVRREREEDEE

SEQ ID NO: 17767 - protein, 454 aa, Oryza sativa Indica Group
MAHAAFDAEAGAAAKPPADDAGAAFVLESKGTWWHAGFHLTTAIVGPTVLTLPYALRGMGWALGLTVLTAVGAVTFYEYSLMSRVLEHCEARGRRHIRFRELAADVLGSGWMFYFVVIVQTAINTGVSIGTILLAADCLEIMYTSLSPNGPLKLYHFIIIVAVALAFLSQLPSFHSLRHINFASLLLSLGYTILVSAACIGAGLSKDAPGKDYTLSSSKSEQTFNAFLSISILASVYGNGILPEIQATLAPPAAGKMMKALVLCYSVIAFAFYIPSITGYWAFGSHVQSNVLKSLMPDTGPALAPTWLLGLAVLFVLLQLLAIGLVYSQVAYEIMEKSSADATRGKFSRRNVVPRLLLRTLYLAFCAFMAAMLPFFGDIVGVVGAVGFIPLDFVLPVVMYNIALAPPRRSPMFLANTAIMVVFSGVGAIGAFASIRKLVLDAGQFKLFSNNVVD

SEQ ID NO: 17768 - protein, 224 aa, Oryza sativa Indica Group
MCGRAGEPAVRKGPWTLEEDLILVSYISQNGEGSWDNLARSAGLNRNGKSCRLRWLNYLRPGVRRGSITPEEDMVIRELHSRWGNRWSKIAKHLPGRTDNEIKNYWRTKIHRKPRGRSQLLQEPCEDAMGMGMSTTTSEAASTSASSGQSQASPGVWDEYMQASSFPHPELVSFAADHHLEMAGVGEVAAAAAAQFVPTEFGFNDGFWNFVDNFWETMPVSDVV

SEQ ID NO: 17769 - protein, 1012 aa, Oryza sativa Indica Group
MIFKRNQRSEILSLRRCNAGGGAGVGEDDGDGGERRPKRRRGDEFFPVELLGDVPVAGIPYAAFGFRWCEEAEVASPAAASRAAAAAAAASRPPVVRTSRGRAQVLPSRFNDSVLIDPWKKDKPAKPPVPAKAVQLVPKSEVLYRKGAIADRSLTMSELDENGDDDYEEGHNFVASRKYSMSLSTVTSVHGEPYSYYHRKGLMKRQYDDDDDDDDDDDDDDDDDDDDEDEDEDEEAEEEEEEEEEEEEEEELSYWRNDFVYGDIVWARLGKRQPVWPGVVVDPAQPAAAQALPPQPRSGAVLCVMLFGWAAEFGDEKKFIWVRQGGIFPFVDYMDRFQGQTELSSCKPGDFQRALEEAFLADQGFFEVPMDGNTTGQPARYKRALQCESCGNCFPNKDPSMMVYVMEQLACRQCAKILRSKEYCGVCLKSWQHKCGGRWVCCHGCESWVHAECDKKCSNLKDLRDNSYFCPYCRVKQNSNLSSKKTKSYEHRTDNSTQKSSKPDKVAVICFGMEGTYLRDLELISCHCGPCKGQKFLFNEWERHAGCRSKNWKSSIKIKDTLMPFGKWIEQHQSSSYSTNPAKRSSQKMKKQKLLDLLSEPYDTVNVKWTTERCAVCRWVEDWDYNKIVICNRCQIAVHQECYGVRGKQDFTSWVCRACETPDQKRPQVAFASDELMEPAIGILNITPLLFMKMCVICRQIHGSCTQCYRCSTYYHAICASRAGYRMEIRCLEKNGKQTTNKISYCAHHRAPNPDNVLIIQTPAGTISSKKLVQSNGTVAASRLIRKDLPKDSVSEVEISENLSAARCRFYVKKELKRSREGAIAHRVRGSCQHRWDEIDSLNPPREERDPESFSTFKERLHYLQKTEHTRVCFGRSGIHRWGLFARRGIQEGEMVLEYRGEQVRRSVADLREEQYRVQGKDCYLFKISEEVVVDATDKGNVARLINHSCTPNCYARIMSVGHDESRIVLIAKKNVSAGEELTYDYLFDPDEADDRKVPCLCQTANCRKFMN

SEQ ID NO: 17770 - protein, 1261 aa, Oryza sativa Indica Group
MDESGRGTGDDHARETKDAAAAASSSSGKKVPLFSLFRYADRLDVLLMVVGTVGALGNGISQPLMTVLFGNVINSFGANTSGSVLRSVTKVVLNFIYLGIGTSVASFLQVSCWTMAGERQSARIRSLYLKAVLRQDITFFDTEMTTGEAVSRMSSDTLLIQGALGEKGGKLVELLSSFIGGFIIAFTRGWLLTLVMLTSLPLIAIAGAVSAQALTRVSSKRQTSYSDAGDTVEQTIGSIRTVVSFNGEKKAIAMYRNFIKKSYKATIEEGIITGFGMGSVMCVVFGSYGLAFWYGGKLIIEKGYTGGKIMTILFAVLTGASSLGNATPAVAAVVEGQSAAYNLFKTIERKPEIDSDDNNGMVLEDMNGDIELKDVYFRYPARPEQLILDGLSLQVASGTTMAIVGESGSGKSTVISLVERFYDPQSGEVLIDGISIKKLRLDWIRGKIGLVSQEPLLFMASIKDNIIYGKKDATLEEIKRAAELANAANFIDKLPNGYDTLVGQRGTQLSGGQKQRIAIARAILKDPKILLLDEATSALDVESERIVQEALNRMMVERTTLVVAHRLSTVRNVDCITVVRKGKIVEQGPHDALVKDPDGAYSQLIRLQETHRDERHKLPDSRSKSTSLSFRRSRTKDFLSKSNRYSFKSPLGLPVDIHEDGMTSEQQKVDHSDSKAIKKTPFGRLFNLNKPEVPVLLLGSIAASVHGVILPLYGIIMPGVLKSFYEPPDQLRKDSRFWALMSVVLGVACLISIPAEYFLFGIAGGKLIQRVRTLSFQRIMHQEVAWFDKPSNSSGALGTRLSVDALNVRRLVGDNLALIVQAVATLTTGFAIAFAADWRLALIITCVIPLVGAQGYAQVKFLKGFSEESKEMYEDANQVAADAVGSIRTVASFCSEKRVVAIYNKKCEALRKQGIRSGIVGGIGLSFSNLMLYLTYGLCFYVGAKFVSQGKTTFSDVFKVFFALVLAAVGVSQSSALSTNATKARDSAISIFSIIDRKSRIDSSSDEGAIMENVTGSIDFNNVSFKYPSRPDVQIFSDFTLHIPSQKTIALVGESGSGKSTIIALLERFYDPDSGNISLDGVEIRSLKVSWLRDQMGLVGQEPVLFNDTIRANITYGKHSEVTEEEITAVAKAANAHEFVSSLPQGYDTVVGEKGVQLSGGQKQRVAIARAILKDPKILLLDEATSALDAESERVVQDALDRVMVNRTTIVVAHRLSTIKGADMIAVLKEGKIAEKGKHEALLRIKDGAYASLVQLRSNSE

SEQ ID NO: 17771 - protein, 793 aa, Oryza sativa Indica Group
MEGSRVDAVAGGRRWGEGEEGGRRGGGGGGGGGTGGGGGGGRRGGEDGGEVSLREWLDRPGRAVEAPECLHVFRQVAESVAIAHAQGVAVGSARPSCFVVSPPFARVAFIESASGSDVSGSCSGSDGSEEADPESSPPRRRRDGASGGEDRGGKTFPLRSVLAMELTWYTSPEEADDRGGATFASDVYRLGVLLFELFCTFETMEEKMRAMANLRHRVLPPQLLLKWPKEASFCQLLMHPVPETRPKMSDVLQSEFLNRSRNSLEEREAALRLREEIEEQELLLDFLLQLQRRKQDIADNLQDTVAFLSSDINEAHQQSALGQCGNFSFELDKEVCSETVEDQSDCGSRKRFRPELPAVDMEEQNRSLEECSGTVPSSVLIQESVLSKSSRLMKNFKKLETAYFLTRSKLARQVGNPVSSCHQVVKRTTGSPVVTEGSSIDDFALEGHYGTRQRGWMNSFLEGLCSYLSFSKLKVKAELKQCDLLNSSNLVCSVGFDRDKEFFATAGVNKKIKVFEYNMIVNEHRDIHYPVVEMSNRSKLSCICWNSYMKSHIASSDFEGIVQVWDVTRSQVFVEMREHERRVWSVDFSLADPTKLAGSVGTIRTRANVCSVQFQPDSARSIAIGSADHKIYCYDLRNIRAPYCTLVGHTKTVSYVKYVDASTIVSASTDNSLKLWDLSMSQARIIDSPLQTFTGHTNTKNFVGLSISDGYIATGSETNEEYFGSLTLVRKVFVYHKAFPMPVLAYKFSVTDPISGQEIDDPSQFISCVCWRGQSSTLLSANSSGNIKILEMD

SEQ ID NO: 17772 - protein, 180 aa, Oryza sativa Indica Group
MSDVPTVEPLVLAHVIHDVLDPFRPTMPLKITYNDRLLLAGVELKPSATVHKPRVDIGGTDLRVFYTLVLVDPDAPSPSNPSLGEYLHWMVIDIPGTTGVNFGQDLMLYERPELRYGIHRMVFVLFRQLGRGTLFAPEMRHNFHCRSFAQQYHLDIVAATYFNCQREAGSGGRRFRPESS

SEQ ID NO: 17773 - protein, 895 aa, Oryza sativa Indica Group
MRSVSELVWSPDEGLSIKIAASSLSTRKTSLHWNADTLSIVISSPQQSGAGESGHIIDATVEDAEKMPSQLRTRSDSSARVFMSSPSRIRNTDAQQSTSIRSHGQDSKYCGGMDVMNEGKETSDNFCVDKLEKEDEVGSCPTRYCNDTSHSLGSASRKEVMPIIAEKQAFCATTVHDERSWAANAWRARLVKAISQKDSVLPKNADNIHSTSAFGSIGNTENMPGKLTSMLGNRNDSSQDQAMQEKHKDGLIVARCESVSAVNPVARCELASGVNPLARHESTSGCNPRKLEKGKEKLIYDMCNCVSNTNEGDDSNESIESCPSTKAPKRKHGQFSAAEMTSGNKRCRREDNESSCSGLFHKNDSSFFNWMSTLTNGVKVFDETTAVPLNQKFSAATGEEFPTNPVPLQNNCGVPLQSVGFNSLFQSLYSQNVMITSRNTCHQSESSYTANRLTLGFKSSKPVSMGRETLNVATETLAAGRIQMDSYGDRGAFQNQMGIFPLRAERNQNGFHGSSSNAASGHKDDFSESLWVSRLLPKTPMKVMDTTRCDEETDFCSANPKGLGDSSSPQDFNVEKELNNSQYFTSKGSDNETTSSKCAAPQDENKPSETMASIFAKRLDALRHANTSAVHVAITCDHGTPKGRNHKTSSFVVSYNSHDEQESGQKTHKSSGGEGRIVLWTGDKGKEQLSPGNDKELGEKVLSKHENQNCEGSSDGKVVPPKCNLETNTYIEEIDRKRLQNKEGAPNSMENQPDNKQMVPYGIVPNDVYDEASVVFGALQRLRLSRSDIIRWMRSPVMHTTLDGFFLRLRFGKWEEALGGTGYHVARINGVLDKNHLSVTIRNSTCQVDSRFVSNHDFHQDELKAWWSAAMKSGWKLPSQEELNTKLRERELLRF

SEQ ID NO: 17774 - protein, 936 aa, Oryza sativa Indica Group
MLKQKDLMVISYSCSAGTKLAWILSLLLILVAATQVHGVSPPGFLNIDCGLTNRSTYNDTDTTLTYVSDREFVESGKSYDIMAQYMAGAANEQEKTLRSFPDGQRNCYTLPTNSTKKYLIRATFTYGNYDGLNSSEKGSLFLFGLHIGVNFWTTVNLTKWDPSNTVWKEVITVAPDKSVSVCLINMGSGTPFISTLDLRPLQDTMYPFVNASTSVSYFSRIRFGSVDEYITRFPTDQYDRFWEGWVFTMHTFPWVNKSSNGKVAELPNIDTFGLPPAILGSASTINGNYSWLNISVSASNSLATDLELLPVFHFVELGNNGSKRIFDIYNVDEPQALFSNFSPPSFLSSMFHNWFLRKGRRAYFQLRKTPDSQLPPLINAYEVYSRVQVENFTTASSDVDSMKTIKEKYMVIKNWNGDPCSPREYVWNGLTCTYPNGGQNPRIIEINLSGSGLQGELEISFMKMSSLKKLDLSHNNLTGTIPDYQVNSLTVIDLSNNQLNGSIPDSILQRYKAGLLELRLEGNPICTKVRASYCGNKKNTRTRILLISVLVPVTSLLVVLFIFWRLCWKGKSRKSEDDYDMYEEETPLHIDIRRFTYAELKLITNNFQSIIGKGGFGTVYHGILENNDEVAVKVLVETSIAESKDFLPEVQTLSKVHHKNLVALVGYCQNKKCLALVYDFMPRGNLQQLLRGGYDSLNWEERLHIALDAAQGLEYLHESCTPSIVHRDVKTPNILLDKNLVAKISDFGLSRAFNAAHTHISTVAAGTLGYLDPEYHATFQLTVKTDVYSFGIVLLEIVTGQPPVFMDPQTVHLPNWVRQKIANGSVHDVVDKKLLDQYDATHLQTVIDLAMNCLENASIDRPSMTEVVSVLKVCLPISSERQSATSTPRKKNVMDAEIPRQFQLMISGASTTSYEGSSFQSGYTGGVSEISHISGR

SEQ ID NO: 17775 - protein, 521 aa, Oryza sativa Indica Group
MGAPSREDEEAKKMEAGGDTVGQKLDAGALFVLQSKGFGYAIPIDMIPYVNDLAHRMYPAAIVRGTALLFYLNDWRRDKRKCTSGMMGSLAIKPIINSNAWSWLHCGYHLTTSIVAPPLLSLPFAFASLGWAAGLICLVIGAAVTFYSYNLISLVLEHHAQQGRRQLRFRDMATDILGPGWGRFYIGPIQFLVCFGAVVACTLLAGQSMKAIYLIANPGGTIKLYVFVAIFGVFMMILAQMPSFHSLRHVNLISLVLCLAYSFCAVAACIYLGSSKGAPEKDYSIAGANTRDRVFGVFNAIAVIATTYGNGIIPEIQATVAAPVTGKMFKGLCLCYAVVVTTFFSVAISGYWAFGNQSQGTLLSNFMVGGRAVIPEWLLLIIELFTLLQLSAVAVVYLQPTNEVLEGLLSDPKAGQYAARNVAPRVLSRTAAVALGTTIAAMVPFFGDMNALIGAFGFLPLDFAVPAVFYNVTFKPSKKGAVFWLNTTIAVVFSALAVVASVAAVRQIILDANSYKLFANV

SEQ ID NO: 17776 - protein, 384 aa, Oryza sativa Indica Group
MSKNMKVTDDQEVTSQERDQSGGTKVGGEEEIAPLARQSSILSLTLEELQNSLCEPGRNFGSMNMDEFVANIWNAEEFQATTGGCKGAMEETKVVDSGSGSGDAGGSGLCRQGSFSLPLPLCQKTVEEVWAEINQAPAHTSAPASALQPHAGSGGVAANDRQLTLGEMTLEDFLVKAGVVRGSFTGQAAMGSGMVNGPVNPMQQGQGDPMMFPVGPVNAMYPVMGDGMGYPGGYNGMAIVPPPPPAQGAMVVVSPGSSDGMSAMTHADMMNCIGNGMMIENGTRKRPHREDGCAEKTVERRQRRMIKNRESAARSRARKQAYTVELEAELNYLKQENARLKEAEKTVLLTKKQMLVEKMMEQSKEKMNANRGGSQLRRSGSCMW

SEQ ID NO: 17777 - protein, 570 aa, Oryza sativa Indica Group
MAIALRFAAAPLRLRLVSPAPPAIGGAGDGGRRGGGGAERIGVLGRARCRRRRGGGGRLEVAAAAADDSARCRAKGVGAAAAAAETLGGIGVGGGDQLSVVMKFGGSSVSSAARMREVAGLILAFPEERPVVVLSAMGKTTNLLLLAGEKAVGCGVIRVSEIEEWNLIKDLHIKTVEELALPRSVIHTMLDELEQLLKGIAMMKELTLRTTDYLVSFGECMSTRIFAAYLNKIGVKARQYDTFDIGFITTDDFGNADILEATYPAVAKRLHGDWIRDPAIPIVTGFLGKGWKSGAVTTLGRGGSDLTATTIGKALGLREIQVWKDVDGVLTCDPNIYPNATTVPYLTFEEAAELAYFGAQVLHPQSMRPAREGDIPVRVKNSYNPKAPGTLITKQREMDKVVLTSIVLKSNVTMLDIVSTRMLGQFGFLAKVFSIFEDLGISVDCVATSEVSISVSLDPSKIWSRELIQQELDHVVEELEKIAVVHLLQQRAIISLIGNVRRSSLILEKAFQVLRKSGVNVQMISQGASKVNMSLIVHDSEAKQCIKALHQAFFEDDVLTEVEEEALHMS

SEQ ID NO: 17778 - protein, 410 aa, Oryza sativa Indica Group
MAKPISIEVWNPSGKYRVVSTKSMPGTRWIRLLADNDCRLEICTETKTILSVDDILALIGDRCDGVIGQLTEEWGEVLFSALKRAGGTAFSNMAVGYNNVDVEAANRNGIAVGNTPGVLTETTAELAASLSLAAARRIVEADQFMRAGLYDGWLPHLFVGNLLKGQTVGVIGAGRIGSAYARMMIEGFKMNLIYYDLYQSTRLEKFVTAYGQFLKANGEQPVTWKRAATMEDVLREADVISLHPVLDKTTYHLINPERLAIMKKEAVLVNASRGPVIDEVALVEHLKANPMFRVGLDVFEDEPYMKPGLADMKNAVVVPHIASASKWTREGMATLAALNVLGKIKGYPVWGNPNLVEPFLKEDATPPAACPSIVNAKQLGRPAIVKALRTGARSIILYLSVQDHTPLHEV

SEQ ID NO: 17779 - protein, 285 aa, Oryza sativa Indica Group
MLPRSRTLPPRIHDGVVVVAQNRTFAGSAMGVAVGFVTKTGDVVTPAQKVWRNLQALGDIAFAYSYSIILIEIQDTLRSPPAEARTMRKATGISVVVTSVFYLLCGCMGYAAFGDDAPGNLLTGFGFYKPYWLLDVANMAIVVHLVGAYQVYCQPLFAFVERRAERRWPNGLPGGDYDLGWIKVSVFRLAWRTCFVAVTTVVAMLLAFFNDVVGILGALGFWPLTVYFPVEMYIAHRRIRRWTTTWVGLEALSLAWLLVSLAAAVGSIAGVLLELKSYRPFRSTY

SEQ ID NO: 17780 - protein, 265 aa, Oryza sativa Indica Group
MAAAAAGMGGGGGVQQQETTTTVVQVAAEASRKKVEVRSAGRRGRREMRRIEDPTSRQVTFSKRRSGLLKKAFELSVLCDAEVALIVFSPRGRLYQFASASSDLQRTIDRYLNHTKNSSAHEGEESCVQKWRSEATTLGKKIEAIEGYKSKLLGEGLGSCSVQELQELEVQLEKSLCSVRQKKQKMLMDQILELREKEMNLLKENMVLRDQCKALSSPWSTSVGELKNKQADDDVHRHEDYSGGGVRDDDDRRMMEDVETDLIYD

SEQ ID NO: 17781 - protein, 188 aa, Oryza sativa Indica Group
MAMSPHDQHEHEPDHAHRSPSNGTAATSTIATNRWGPYSGAGDFASNMAVILAALLAALALALALNAAVRYLLRRHRRARQQPAAAAAAAEDPEKPPVQEADPPPPPPALVYSAAGTKLAGAAECAICLAEFVDGDTVRVMPVCGHGFHARCIERWLAGGRRSSCPTCRAPAATPPGATATEPPAVAP

SEQ ID NO: 17782 - protein, 131 aa, Oryza sativa Indica Group
MAAAARHRGTVKWFNDTKGFGFISPDDGSEDLFVHQSSIKADGFRSLAEGEQVEFAISESEDGRTKAVDVTGPDGSFVKGGAGGGGGGGGGFGSRAVGGGVDSRQARRHVFICPTVQLMGSKSEDRQQMQQ

SEQ ID NO: 17783 - protein, 603 aa, Oryza sativa Indica Group
MVALPSLSPPPPRPSPSPATPRRRPPPPPPPHATPSHRVRSRPATVVSAASGVTDGYHSTIRSLNSRGRHVPRKSLGQNYMLNSKVNEELVAAAGVEEGDVVLEIGPGTGSLTAALLDAGATVFAVEKDKHMATLVNDRFGSTEQLKIIEEDITKFNVRSHFLPFLEEKSHHTRKYAKVVSNLPFNVSTEVVKLLLPMGDVFSVMVLLLQDETALRFADASIQTPEYRPINVFVNFYSEPEYKFKVERTNFFPQPKVNSAFNGKRKMLRKSLQHLCSSSEIEAALANIGLPVTNIDFISVSLLYLHKVTVRFTGIGLRRVACPKMRPVFCGNLDYDARQSEIERLFSKYGRVERVDMKSGFAFVYMEDERDADEAIHRLDRIEFGRKGRRLRVEWTKEDRSGGRRGNSKRSPNNTRPTKTLFVINFDPINTRTRDLERHFDQYGKISNVRIRRNFAFVQYELQEDATKALEGTNGSTLMDRVISVEYALRDDDEKRNGYSPERRGRDRSPDRRDYRGRSASPYGRGRERGSPDYGRGRERGSPDYGRGGDRGSPDYHRGASPQGGNKGDERGSPPNNYDRERREASPGYDRPRSRSPARYERE

SEQ ID NO: 17784 - protein, 258 aa, Oryza sativa Indica Group
MGSSASSGKQSNQQAPPWPTTSRASAFASGFSPSEILWMLPATGLLTASEISRAVAAAETAKAIAAAAAAVAMAAACSSAAFLAYPGSLGAGPRPLRLFRAFAAASSSGSGSKKKARKSKGAGNKGEASGGGGGKGKEKALEPPPAVIRRAPAGSASVFQQPEPGFTPGGGGGGKGPTEEERRQRQANENAFLLAWLGLGLIILAEGLALAASGFLPEEWDSFFVKFLYPSFTPTVSKRMRRVETRLESKWFIFAMVI

SEQ ID NO: 17785 - protein, 370 aa, Oryza sativa Indica Group
MPLSYSAAAAAAPSPLAARSRGLLRRPPRSSPVVVQWYDDQYAVIDRVVDVAMRCKKIDQLRAVNGIPPYAPVSNRSLLSPVTLPIIRDANIKNDTRLRIFSGTANPSLSQEIASYLGLELGKINIKRRASAKNITAVIPYFGYARADRKSQGRESIAAKLVANMITEAGANRVLVCDLHSSQAMGYFDIPVDHVYGQPVILDYLASKTICSDDLVVVSPDVGGVARARAFAKKLSDAPLAIVDKRRHGHNVAEVMNLIGDVRGKVAVMMDDMIDTAGTIAKGAELLHQEGAREVYACCTHAVFSPPAIERLSSGLFQEVIITNTIPLKEDKSFPQLTILSVANLLGETIWRVHDDCSVGHEPYSSLDID

SEQ ID NO: 17786 - protein, 934 aa, Oryza sativa Indica Group
MVITGRLRPAASSERRLRCLDVVGGGRGTPPATRRDGPLSGCAGSPKSPRASSPSSGSGFISIDCGIPEKSSYQDPTSSIIYVSDYGFISTGANHNISSAYIKPSLAQRNYNVRFFPDGTRNCYTLRSLQEGNKYFVRAVFYYANYDSLNKLPVFDLYLGANYWHEVKFSNADAVNWMDIIVVAPADYLQVCLVNKGTGTPFISGLDLRPLKSTLYPEANTTQSLVLINSNRFNMGPTDNSITRYPLDPHDRLWSTYDTIPDWTEISATSVVQNYLTDVYDVPSAVMQSAATVNSSRINFTWDPSDPSVNISSKYFFVLYFSELQSVPSNGLRQFDIIVNNNTWNTQPYTPPFLFADSLSGTVQGLASYSVSLVATKNATLPPILNAMEMYLVKPLTEFATDPRDARAMMEVQQNYDVKKNWMGDPCAPKAFAWEGLNCSYPPADSSKITSLNLSSSGLAGSIATYFGDLKSLQYLDLSHNNLSGPIPNFLGQLPLLMFLDLSSNDLSGPIPYNLLQKSQNGSLSLRVGYNAKLCGNDTECGSGQKKIKGSLLSAIIITIVATVALIVVLFLLLRRMLKAKDKRRAAGPTYESALLENREFSYRELKHITNNFSQQVGKGGFGAVFLGYLENGNPVAVKVRSESSSQGGKEFLAEAQHLTRIHHKNLVSLIGYCKDKNHLALVYEYMPEGNLQDHLRATTNKPLTWEQRLHIALDAAQGLEYLHVACKPALIHRDVKSRNILLTTNLGAKIADFGLTKVFSESRTHMTTEPAGTFGYLDPEYYRNYHISEKSDVYSFGVVLLELITGRPPVIPIDESVSIHIGEFVHQSLDHGSIESIVDARMGGGGGYDINSVWKVADLALHCKREVSRERPTMTEVVAQLKESLELESHGDRKHLVTGDDDVSVSNLGEETALEVEEQSGEISRVSPGPAVR

SEQ ID NO: 17787 - protein, 353 aa, Oryza sativa Indica Group
MDGGMKEQGILLVRKAVEEDDAGNHARALPLYVHALDYLAAHLKYERNPRVRDAITAKLAGYIARAEEIRDALLPAAGDDATPPAAAAEEGKAKCGGEDESDRSDLLFISSSDLLSKWMGESEKLVTNLFQMARENAPSIIFIDEIDSLCGQRGEGNESEASRRVKTEFLVQMQGVGHNDDKVLVLAATNTPYALDQAVRRRFDKRIYIPLPDLKARQHMFKVHLGDTPHSLTKGDFESLARRTDGFSGSDIAVCVKDVLFEPVRKTQDAMFFFGTAEGDGDGGAWTPCGPTRPGAVQITMQELAAKGLAAQITPPPITRTDLDKVLARQKATVSEKDLEVYTRFTREFGEEG

SEQ ID NO: 17788 - protein, 130 aa, Oryza sativa Indica Group
MKTEWDGSFVDSSATRHGGMFIECLSSSDGKEAIAKAANLLYSTCCNSDNKSEIAFTEADMTHALKAVGTGGPEPDLLLVYGPGRFHLGFPAWRLRYTEIMYVGPLESMKYGTIVKALYQFSRKYQNYGK

SEQ ID NO: 17789 - protein, 225 aa, Oryza sativa Indica Group
MQISYSPMILKLILGLLWCLVHLVISFFGSLSHLKNDLECYLISFKLLPKYRNLHLERLAYLGVVVDSREAKNALKVKQLLRWFSTIGINYLILYDIEVADTKASCYRHGGMFMECLSSSDGKEAIAKAANLLYSTCCNSDNKSEIVFTEADMTHALKAVGTGGPEPDLLLVYGPGRFHLGFPAWRLRYTEIMYVGPVESMKYGTIVKALYRFSRKYQNYEENMM

SEQ ID NO: 17790 - protein, 296 aa, Oryza sativa Indica Group
MQEQATSSRPSSSERSSSSGGHHMEIKEGKEAPLRSLPLPFLDFHFTVPLSGMESDEEIGRVPELGLEPGGASTSGRAAGGGGGGAERAQSSTAQASARRRGRSPADKEHKRLKRLLRNRVSAQQARERKKAYLNDLEVKVKDLEKKNSELEERFSTLQNENQMLRQILKNTTVSRRGPVLLKIPKSGLREAAPAGCGGLREAEGDEKFVLNGFTAANLSFDGMATVTPNGLLMLTNGTNQLKGHAFFPAPLQFHRMPNSTAMQSFSTAFVIGIISAFEDQGSGSPAAAGGSGRAA

SEQ ID NO: 17791 - protein, 284 aa, Oryza sativa Indica Group
MGDSGGSVVSIDVERISFGGKEHHIHTNHGPVSVAVYGDHDKPALVTYPDIALNHMSCFQGLLFCPEAASLLLHNFCIYHISPPGHELGAAPISPNAPIPSVDDLADQVADVLDFFGLGSVMCLGVSAGAYILTLFAAKYRDRVLGLILVSPLCKPPTWTEWFYNKVASNLLYYYGMCGLVKEGLLQRYFSKEVRGCSDLPESDIVQACRSVQACGSLITEEQPHAMLIPMEYFFMGYGLYRPSQLDCSPRSPLSPFCISPDLLSPESMGVKLKPIKTRVRLEV

SEQ ID NO: 17792 - protein, 539 aa, Oryza sativa Indica Group
MSGNPSFSQLGAVDAAMNGGYFMAASGNGADVPLFHPAMAPPHDHGGSFGYGDAAAAAMDVGAHFAAANNLVLASLATQLFGAAPAAAAHGHGDYLGATTPPEEEMGGGYDVAVGDSSGGAVSLACLGHGQPGDMAAGWCSTSARKPSCNWSSSNAGVHGGSYYLAGVPEAAGFVSAAEAASELSLSLCSKSSSDSMLNAGGDQCSSAASRSGLTQMSRVVVVEPEPPLVPYYPAANFAVVVARSRYAAVAQQVLNDAVGCVLGGVADAAADSASGVDSGSSRPSSCSVAGGAPSSAVSSNNQLIASSGEHTHGGGDASAQWLRSELLTMLQLMDQKYNQCLDEIQSTTARFNTLTHATARAAGMSSSSICAPFAHRAVSAMYHGLRRRIAGEIMSAAAAAGRPCRGGESSSAVTGGERERSWESAFIQKHWAVQQLRRGEQQCWRPQRGLPEKSVAVLKAWMFENFLRPYPKDSEKEMLAARSGLSRNQVSNWFINARVRLWKPMIEEMCEELKRSSGGGAGNQALAMEHMNSQDVVS

SEQ ID NO: 17793 - protein, 316 aa, Oryza sativa Indica Group
MAQEGTSSNAPPAAASMGSGDGDNKEGTGESGNNQLLLPAIAASADKGKGVVAGTGNVDAKGKTTAMAPAASSTNAPNNQGSGGGGGGRSRERMHIFAERERRRKIKNMFTDLRDLVPSLTNKADKATIVGEAISFIRSLEETVADLERRKRERDSLAARCARLGLGGSSSSSAPPPPPPPAAADDTAAVMPPAPAVPPPDAAAVTAGPEPAPAPAPGTLMVWSGPSVVLNLCGGDQAFINVSVARRPGVLTMIVDVLERHSIDVVTAQIASDQSRSLFTIHTSVDRERGMFMDTATAEEIYQLAVSEIMVWLHSE

SEQ ID NO: 17794 - protein, 135 aa, Oryza sativa Indica Group
MSLEREREKGAPAGCVTCLCPCITFGQIAEIIDRGSSSCGTSGALYALVMLLTGCNCVYSCFYRAKMRSQYGLQEKPCADCPVHFFCEPCALSQEYRELKKRGFDMNLGWHANMERQGHKPAMTMPPHMFPGMTR

SEQ ID NO: 17795 - protein, 145 aa, Oryza sativa Indica Group
MQDQAAPVPWSTDLFDCFDDSSNCFMTWLCPCITFGQIAEIVDRGSSSCGTSGSLYALVFLVTGCSCIYSCIYRSKLRSQYGLQETPCSDCLVHLWCEPCALCQEYRELKERGFDMSLGWHANMEKQGQNPAATMAPEMYPGMTR

SEQ ID NO: 17796 - protein, 107 aa, Oryza sativa Indica Group
MALDKAKEIVASSPVVVFSKTYCPFCARVKRLLAELAASYKAVELDVESDGSELQSALADWTGQRTVPCVFIKGKHIGGCDDTMAMHKGGNLVPLLTEAGAIATPSL

SEQ ID NO: 17797 - protein, 610 aa, Oryza sativa Indica Group
MSGNDGDMKMRVIVVEGDETSNAPKDVCCEYTLDGSVDIKGSPAVKGKSGGWLAGGLILLNQGLATLAFFGVNVNLVLFLTRVLQQSNGDAANNVSKWTGTVYMFSLIGAFLSDSYWGRYKTCAIFQAIFVLGLALLSLSSRLYLIRPVGCGTEHVPCEPHSGAELGIFYIALYMIAFGNGGYQPNVATFGADQFDGEDPAESHSKVSFFSYFYLALNLGSLFSNTFLSFLEDEGNWALGFWVSTAAAATALLLFLGGTLRYRYIRPSGNPVGRIFQVAFAACRNWKAGESPGAVTLYESDEKADSGGRKLLHTEGFRFLDRAAVVGANPKLGTCTQPRDPWKLCTVTQVEEVKSILRLLPIWLCTILYSVVFTQMASLFVVQGAAMRRTTRFPGFSVPPSSMSAFDILTVATTIFLYRRAVCPLVSRLTGRRTGPTELQRMGLGLVLGAMAMATAGTVEHFRKAGATTAMSSDLHIMWQVPQYALIGVSEVMMYVGQLEFFNGEMPDALKSFGSALCMMSMSLGNYFSDVIVSAVTKATAVRGRPGWIPADLNEGHLDKFFFLLAVLAVADFAVYLVCASRYRSGTVDVDRSDGEEEDGVAGRQMAATV

SEQ ID NO: 17798 - protein, 2078 aa, Oryza sativa Indica Group
MEEEEHRGVVLVCSICGFLFAVLGPLSFWILWAVNWRPWRLYSWIYARKWPAYVQGPQLSTLCSFFTLFAWLVVVSPITVLLVWGGILIALLERNIIGLAVIMVGVALLLSFYSIMLWWRTQWQSSKAVAYLLLLAVGLLCAYEFCAVYVTTGASASELNSPSGFFFGVSAISLAINMLFISKILFNGSGFDVDEYVRRLYKFAYSDCVEVAPVSCSPDPPDPNWNLGLCSFRFELLKSRMIALFVAGTSRVFLICFGVHYWYLGHCISYAFVASVLLAAAVSCWLSISNPSVARIDALRSTVIKLREGFRRKGQTSSSNSSDGCGSSVKRSSGSVEAGPHGNATDSMYRSNSQSDGVNWNNVPFDRSNSCQEGQSSDKNIDSGRASLAHRSNSCLSAVAVQDPETAVVSADRHGDPTASLVVCSSSGLESQGCESSGSATASGNQQLLDLNLAAIFQDRLNDPRITSMLKRNGGLGDVELANLLQDKGLDPNFSYMMKDKVMDPRILALLQRSSLDADREHQDDVDVTGTDSDRLDTTIANQISLSEELRRSGLENWLNLSRLMFHQVAGSPIRAFVVFTLIFIIETVTVAVHRPKPIKVINATHEQFEFGFSILLLSPVVCSIMAFIWSLCAEEMTMTSKPRKYGFIAWLLSTCVGLLLSFLSKSSVILGLSLTVPLMVACLSFAIPIWMRNGYRFWIPGGELDSRENIRQAPGKKERALFAISITVFTASVIGLGAIVSAKPLDALGYKGWDADKKSFYSPYATSMYLGWALSSTIAVLATGVIPIVAWFATYRFSPSSAICVGLFATVLVSFCGVSYWGVVNSRQDGVPLKADFLAALLPLLCIPAVFSLFTGMYKWKDDDWKISHGVYLFVGMGVLLLLGAISAVIVTIRPWTVGVACLLVILFLVFAIGVIHYWTSNNFYLTRTQMLLVCSLAFLLALAAFLMGLFQEKPFVGASIGYFSFLFLLTGRALTVLLSPPIVVYSPRVLPVYVYDAHADSAKNVSYAFLILYGIALATEVWGVIASLILNPPFIGAAISAITLVIAFSFAVSRPCLTLKMMEDAVHFLSKDTVVQAMSRSANKTRNAISGTYSAPQRSASSAALLVGDPAITLDRAGNFVLPRADVMKLRDRLRNEEITAGSFFCGVKNCLMIGSPVDVDYRRNMCAHARILALEEAIDTEWVYMWDKFGGYLLLLLGLTAKAEQIQDEVRLRLFLDSIGLSDLSAKEIKKWMPEDRRNFELIQESYIREKEMEEEVLMQRREEEGKGRERRKALLEREERKWKELEISLLSSIPNAGSRDAAAMAAAVRAVGGDSALEDSFARDRVSSIARHIRKAQLARRAEQTGIPDTVCILDDEPRSTGRHCGEIDLCLCESKKVSFSIAVMVQPVSGPVCLFGTEFQKKVCWEILVAGSEQGMEAGQVGLRLVTKGERMTTVAKEWNIGASSIADGRWHLVTVTIDADLGEATSFIDGVYDGYQNALPLPRNNGIWEPGTDIWVGARPPTDLDAFGRSDSEGSDSKMQIMDAFLWGRCLTEDEVDDWESEEANFELYDQEDVEWDGQYSSGRKRHARDSVAIDIDSFARRPRKPRFETREEVNQRMLSVERAVREALIAKGERNFTDQEFPPDDRSLFVDPMNPSLKLQVVSEWMRPSDIAKEVSISSQPCLFSGSVNSSDVCQGRLGDCWFLSAVAVLTEMARISEVIITPEYNEEGIYTVRFCIQGEWVAVVVDDWIPCESPGKPAFATSRKQNELWVSILEKAYAKLHGSYEALEGGLVQDALVDLTGGAGEEIDMRSPQAQIDLASGRLWSQLLHFKQEGFLLGAGSPSGSDAHISSSGIVQGHAYSILQVREVDGHKLVQIRNPWANEVEWNGPWSDSSQEWTERMKHKLKHVPQSKNGVFWMSWQDFQIHFRSIYVCRVYPPEMRYSVHGQWRGYSAGGCQDYDSWHQNPQYRLRVTGRDALYPVHVFITLTQGVGFSRKTNGFRNYQSSHDSSMFYIGMRILKTRGCRAAYNIYMHESVGGTDYVNSREISCELVLEPYPKGYTIVPTTIHPGEEAPFVLSVFTKAPIKLEAV

SEQ ID NO: 17799 - protein, 560 aa, Oryza sativa Indica Group
MAPTAVDSKRISDITEDGSMDRRGNPAVKAKTGNWRSSILLLVNYGLVTCAFFGVGVNLVVFLRRVLHQDNAEAANSISKWTGTVYIFSLIGAFMSDSYWGRYITCAIFQMIYVTGLVILSLASWFLLVKPTGCGAAGEHCDAPSSAGVALFYLSTYMIAFGNGGYQPSIATFGSDQFDETDPREARSKVAFFSYFYLALNVGSLFSNTVLVYYEDEGRWVMGFWVSAAAAAMALVLFLLGTPNYRHFKPTGNPLTRIAQVFVAAFRKWRAEVPRSELLHEVDGDESQIAGIRKILHSDQIRFLDKAATVTEEDYCTPENMQDPWRLCTVTQVEEVKCILKMLPIWLCTIVYSVVFTQMASLFVEQGTTMNTNIGSFHVPAASMSVFDILSGLTELQRMGVGLVVGMAAMVVAGVVEVERLKRVGAPDQPSSLSVLWQVPQYALIGASEVFMYVGQLEFFNGQAPDGVKSFGSSLCMASISLGNYVSIMLVSVVTSLTAGDRRPGWIPGNLNSGHLDRFYFLLAALSLVDLAVYVACAVWYKGIKLDSNEEKANKITVHV

SEQ ID NO: 17800 - protein, 382 aa, Oryza sativa Indica Group
MAEQANHPTVLQKFGGQFHLGSSFSEGVRARNICPSVSSYDRRFTTRSYMTQGLVNGGINVPMMSSSPIFANAPAEKGGKNFMIDFLMGGVSAAVSKTAAAPIERVKLLIQNQDEMIKAGRLSEPYKGIGDCFGRTIKDEGFASLWRGNTANVIRYFPTQALNFAFKDYFKRLFNFKKDKDGYWKWFGGNLASGGAAGASSLFFVYSLDYARTRLANDAKAAKGGGERQFNGLVDVYRKTLKSDGIAGLYRGFNISCVGIIVYRGLYFGMYDSLKPVVLTGSLQDNFFASFALGWLITNGAGLASYPIDTVRRRMMMTSGEAVKYKSSMDAFSQILKNEGAKSLFKGAGANILRAIAGAGVLSGYDQLQILFFGKKYGSGGA

SEQ ID NO: 17801 - protein, 442 aa, Oryza sativa Indica Group
MGGAGEGDGQTEPLLEKLSNSSSSENDKRTGTAWTATAHIITAVIGSGVLSLAWSVAQLGWVGGPAAMVLFAGVTLVQSSLLADCYIFHGPDNGVVRNRSYVDAVRAIQKANCYHREGHDAPCTVGGDGYYMLMFGLAQVVLSQIPGFHDMAWLSVLSAAMSFTYSLIGFGLGVAKVITNGVIKGGIGGIAMVSATQKVWRVSQAIGDIAFAYPFASVLLEIEDTLRSPPPESETMRTASRASIAVTTFFYLCCGCFGYAAFGDATPGNLLTGFGFYEPYWLIDFANLCVAVHLLGGYQARTGFEISVYSQPVFAAVERRMGGAGAGVVEVAVPAAVAWPSRWRRGCRVNVYRLCFRTAYVAATTALAVWFPYFNQVVGLLGAFTFWPLSIHFPVEMYLVQKKVAPWTPRWLAVRAFSAACLATGAFASVGSAVGVFSSKTS

SEQ ID NO: 17802 - protein, 476 aa, Oryza sativa Indica Group
MRLQSNSSGSFHGLYQYTYISPTLTKEWKQTHHYPGRIPLNSTVEQKARKVAVLVALSASGSAPVLYRTMDALCDFCGEQRSMVYCRSDAASLCLSCDRNVHSANALSRRHTRTLLCDRCVGQPAAVRCLEENTSLCQNCDWNGHGAASSAAGHKRQTINCYSGCPSSAELSRIWSFSMDIPTVAAEPNCEEGINMMSINDNDVNNHCGAPEDGRLLDIASTVLMSDLPTGDKFKPLIGSSSGDGMNLLPLNSDQPAEPVSTTPKAPCVTDKDMFNDGSVYGDFCVDDADLTFENYEELFGTSHVQTEQLFDDAGIDSYFEMKDVPADESNEQPKPVQPECSNVASVDSGMSNPAARADSSHCIPGRQAISNISLSFSGLTGESSAGDFQDCGVSSMILMGEPPWHPPGPESSSAGGSRDNALTRYKEKKKRRKFDKKIRYASRKARADVRKRVKGRFVKAGEAYDYDPLSQTRSY

SEQ ID NO: 17803 - protein, 307 aa, Oryza sativa Indica Group
MENQSGWFYVTISKESQKRRRKREAQEFQSIPGLAGRLFGGAAAADIRRAQAQQGPASRCGGIPSPEAVKCPRCESTNTKFCYYNNYNLSQPRHFCKSCRRYWTKGGVLRNVPVGGGCRKTKRSGSSSAASSAPSTPTAATDNAKNQRRASASSPRSSSGGSGNTSPTAAAATTPTTPATPSSNTIAVINHATTTTTTTTNPFPTDVPPPAPIFADQAAALASLFAPPPPPPLPVFSFAAQAKTEDGIASVLLAGQTTAPTAATVADMTPFTSLDAGIFELGDVPPAAYWNAGSCWTDVPDPNVYLP

SEQ ID NO: 17804 - protein, 364 aa, Oryza sativa Indica Group
MASLTDLVNLNLSDTTEKIIAEYIWIGGSGMDLRSKARTLSGPVTDPSKLPKWNYDGSSTGQAPGEDSEVILYPQAIFKDPFRKGNNILCTSISVHPDQHMSIKTVMCDCYTPAGEPIPTNKRHNAAKIFSSPEVASEEPWYGIEQEYTLLQKDINWPLGWPGPYYCGIGADKSFGRDIVDSHYKACLYAGINISGINGEVMPGQWEFQVGPSVGISAGDQVWVARYILERITEIAGVVVSFDPKPIPGDWNGAGAHTNYSTKSMRNDGGYEIIKSAIEKLKLRHKEHISAYGEGNERRLTGRHETADINTFSWGVANRGASVRVGRETEQNGKGYFEDRRPASNMDPYVVTSMIAETTIIWKP

SEQ ID NO: 17805 - protein, 366 aa, Oryza sativa Indica Group
MVAAVAASLRSLAPLSAYRSPSHGIHAVVRDSSAYTTRPPPPPPTADGGGNGGRISPAVLFIIVILAVIFFISGLLHLLVRLLMKKQHRRGGAENAAPSPHSRHVGRDAAMDRQLQQLFHLHDSGLDQAFIDALPVFAYRDIVGGDKEPFDCAVCLCEFDGEDRLRLLPVCGHAFHLHCIDTWLLSNSTCPLCRGTLYVPGLTIESLMFDFDERLEEGRLSEECEDGFQSSRQKKPMDEEQTVTEKRVFPVRLGKFKNVGNTGVGGVDNGNAAEHMEGKILQPQLPVRKECERQWEAILSNKWTSHGRIDGNKTAAIAIASLKLLAGPEVQRARLFPKVSSHSILGSQSLAAGTRHDFRLQSLDWN

SEQ ID NO: 17806 - protein, 640 aa, Oryza sativa Indica Group
MFVNFPPVAAIYRSICPFELAKSQQQRPRAPSLLCNKQPHVPHSWPPSSQQRTTTTTVSSHGLFRLPTTLPPPVLTRGSIPPPPSRRPHPPRAVVDRVRAVLLDTGRGRCRVGGAAGAAGGVARGAVLGAQGEVPGKAEPVGEGEAGEGAHIVVHGGRHQGARQDAHGGDRGRQALQGGHRHGRFMMRLKLPNGVTTSEQTRYLASVIEAYGKDGCADVTTRQNWQIRGVTLPDVPAILDGLNAVGLTSLQSGMDNVRNPVGNPLAGIDPDEIVDTRSYTNLLSYITSNFQGNPTITNLPRKRNVCVIGSHDLYEHPHINDLAYMPAVKDGKFGFNLLVGGFISPKRWEEALPLDAWVPGDDIIPVCKAVLEAYCDLGTRGNRQKTRMMWLIDELGMEVFWSEVEKRMPNGVLERAAPEDLINKKWQRRDYLGVHPQKQEGLSYVGLHVPVGRVQAADMFELARLADEYGSGELRLTVEQNIVIPNVKDEKVEALLAEPLLQKFSPQPSLLLKGLVACTGNQFCGQAIIETKQRALLVTSQVEKLVSVPRAVRMHWTGCPNSCGQVQVADNGFMGCLTKDSAGKIVEAADIFVGGRVGSDSHLAGVYKKSVPCDELAPIVADILVERFGAVRREREENEE

SEQ ID NO: 17807 - protein, 165 aa, Oryza sativa Indica Group
MAAEKRTIGLGMDYSPSSKAAAKWAVDNLVKAGDRIILVHVLPKGADASHKELWKSTGSPLIPLLEFMEMNVQARYGINPDKEVLEILQAESKSKQVEVLAKVYWGDAREKLCEAVDDLKVNTFVLGCRGLGPLKRALLGSVSNYVVNNATCPVTVVRAPTGSNA

SEQ ID NO: 17808 - protein, 275 aa, Oryza sativa Indica Group
MLLPSSSSYSYASKGDSFRRTVDGPMRSALTFDNNHSVVPSQNIDYGQPMACISYPYNDSGSGVWASYSSRSVLYLKQFHPQIVGGGTSPRVPLPSLEIADDGPIYVNPKQYHGILRRRQLRARLEAQNKLVKTRKPYLHESRHRHAMKRARGTGGRFLNTKQLQLQQQSHTTSTKTTTDSQNSSGSVHLRLGGGAIGDQTPFPFKAMDSQANIKRAAASASTFTVTSAAQKDDAFFDRHGHHLSSFSGHFGQASAQGGVGSMHNGSQQRVPAMR

SEQ ID NO: 17809 - protein, 913 aa, Oryza sativa Indica Group
MTTTTTTRLLLAAILLAVAAADDDGQTLLEIKKSFRNVDNVLYDWAGDGAPRRYCSWRGVLCDNVTFAVAALNLSGLNLGGEISPAIGNLKSVESIDLKSNELSGQIPDEIGDCTSLKTLILKNNQLVGMIPSTLSQLPNLKILDLAQNKLNGEIPRLIYWNEVLQYLGLRSNNLEGSLSPEMCQLTGLWYFDVKNNSLTGIIPDTIGNCTSFQVLDLSYNRLTGEIPFNIGFLQVATLSLQGNNFSGPIPSVIGLMQALAVLDLSFNQLSGPIPSILGNLTYTEKLYLQGNRLTGSIPPELGNMSTLHYLNLANNNLEGPIPDNISSCMNLISLNLSSNYLSGAIPIELAKMKNLDTLDLSCNMVAGPIPSAIGSLEHLLRLNFSNNNLVGYIPAEFGNLRSIMEIDLSSNHLGGLIPQEVGMLQNLILLKLESNNITGDVSSLINCFSLNVLNVSYNNLAGIVPTDNNFSRFSPDSFLGNPGLCGYWLGSSCYSTSHVQRSSVSRSAILGIAVAGLVILLMILAAACWPHWAQVPKDVSLSKPDIHALPSSNVPPKLVILHMNMAFLVYEDIMRMTENLSEKYIIGYGASSTVYKCVLKNCKPVAIKKLYAHYPQSLKEFETELETVGSIKHRNLVSLQGYSLSPAGNLLFYDYLENGSLWDVLHGSSKKQKLDWEARLRIALGAAQGLAYLHHDCNPRIIHRDVKSKNILLDKDYEAHLADFGIAKSLCTSKTHTSTYVMGTIGYIDPEYARTSRLNEKSDVYSYGIVLLELLTGKKPVDNECNLHHLILSKAADNTVMEMVDPDIADTCKDLGEVKKVFQLALLCSKRQPSDRPTMHEVVRVLDCLVYPDPPSKPALPPALPQSSTVPSYVNEYVSLRGGSTLSCENSSSASDAELFLKFGEVISQNTE

SEQ ID NO: 17810 - protein, 172 aa, Oryza sativa Indica Group
MTELFDTAVTSLLHLPEVLDRLGAAAGDRRSAGDHAHHAAHGHGQHRISGIGSGAPVDIMETPGEYAFVLDVPGLSKSDIQVTLEEDRVLVMKSSNGAGNGKRKREEEEGECKYIRLERRASPRAFARKFRLPEDADTGGISARCENGVLTVTVKKRPPPEKKTKSVQVTIA

SEQ ID NO: 17811 - protein, 659 aa, Oryza sativa Indica Group
MAAAAALRCNPRPSAAVALRGAAAAPQVGNEAAFELPVGATEPCLRGRRRGAGIRCQRSAAASAVVVEKKSRAVEPAREGANAGHTESELTVVMKFGGSSVASAERMREVADLILSFPEERPVIVLSAMGKTTNKLLMAGEKAVGCGATNVSELDELTFIKELHFGTIDQLGLDRSIVSGSLYQYQLKLEAFHQAMKMAVTLFGRGGGVATASGIRRRQMERRCIRPQKVGYGGRRHGVDSEPVSCWLSCQPPCSDESVDDGRSRGLSDELEQLLKGIAMMKELTLRTRDYLVSFGECMSTRIFAALLNKLGVKARQYDAFEIGFITTDDFTNADILEATYPAIAKRLHGDWVTGPAIPIVTGFLGKGWKTGAITTLGRGGSDLTATTIGKALGLREIQVWKDVDGVLTCDPNIHPNAKPVPYLTFDEAAELAYFGAQVLHPQSMRPAREGDIPVRVKNSYNRRAPGTLITKARDMSKTVLTSIVLKSNITMLDIVSTRMLGQYGFLAKVFSIFEDLGISVDCVATSEVSISLTLDPSKLWSRELIKQELDHVIEELEKIAVVHLLQHRSIISLIGNVQRSSLILEKAFNVLRTNGVNVQMISQGASKVNISLVVHDSEAKQCVQALHSAFFESGFLPEVNDILQDDSVAHSNGTVYRH

SEQ ID NO: 17812 - protein, 326 aa, Oryza sativa Indica Group
MNCLQNLLKEPPIVGSRSMRRPSPLNLASGASTSSAESGAVEAGTEKSDTYSTNMTQAMGAVLTYRHELGMNYNFIRPDLIVGSCLQSPLDVDKLRNIGVKTVFCLQQDPDLEDFDAFDLRLRLPAVISKLHKLVNHNGGVTYIHCTAGLGRAPAVTLAYMFWILGYSLNEGHQLLQSKRACFPKLEAIKLATADILTGLSKNSITLKWESDSCSSVEISGLDVGWGQIIPLTYNKEKRAWYLERELPEGRYEYKYIVDGKWVCNDNEKKTKANADGHVNNYVQVSRDGTSDEERELRERLTGQNPDLTKEERLMIREYLEQYVER

SEQ ID NO: 17813 - protein, 333 aa, Oryza sativa Indica Group
MCGGAILAELIPSAPAARRVTAGHVWPGDANNAKKKGARADDFEAAFRDFDNDSDDEEMMLEEAEEEEATSEHKPFVFRAKKAAAAASSRRRKPAQYRGVRRRPWGKWAAEIRDPVKGIRVWLGTFTNAEAAALAYDDAARAIRGDRAKLNFPSATTPDTRKRGRATAAAAPAVKATPVINLVEEEDEEEEVAAAMASIKYEPETSESSESNALPDFSWQGMSASDEFAVAAAALSLDSDDDLAKKRPRTEPEDTTTTTDSGSGDDTDALFDALLFADQYNYFNGGAYESLDSLFSADAVQTTAAAAAADQGMGLWSFDDGCCLVDVEASLSF

SEQ ID NO: 17814 - protein, 638 aa, Oryza sativa Indica Group
MEPMASEPSVPIGTAFADLLLQGPEHPSLWNDLTGMFRKAFRWRGADKRFTLSVYVMSVLQGLFPILDWWKTYNLKFFRSDLMAGLTLASLSIPQSIGYATLAKLDPQYGLYTSVVPPLVYAVTGSSREIAIGPVAIVSLLLSSMIQKIVDPSVDPAFYRKMVFTVTFLTGVFQFAFGLFRLGFLVDFLSHAAIVGFMGGAAIVIGLQQLKGLLGLSHFTNRTDVVSVTKAVWVSVHETWHPENVFIGCSFFMFILAMRFIGRKYKKLFWVSAIAPVLSVALSTLFVYATRADKHGVKIIQKVNSGINASSVEQIDLKGGYAAECAKIALVCAVIALTEAVAVGRSFSAINGYRLDGNKEMVAMGFMNIAGSLSSCYVATGSFSRTAVNFAAGCKTTVSNIIMAATVMVALELLTKLLYYTPVSILASIILSALPGLINVQEVCFLWKVDKMDFLTCMGSFLGVLFGSVEIGLSVALLVSFAKIIIQSIWPQVEILGRLQGTEIFCNVKQYPVVHETPTVLTVRIETSFLCFVNSSSIKEKIMGWVTDEREAFRSVVLDMSNVVNMDTSGLAALEELHKELACLGIQMAIAKPGWQVIHKMKLARLVDGIGEGWFFLTVGEAVEACLANKAGNALECC

SEQ ID NO: 17815 - protein, 660 aa, Oryza sativa Indica Group
MEDTAAAVETPVTVSTFGVSRHPDTARLVLSSPKPPGVREEFVGVVRKAFRPRASGGGGAGRTPPARWGWALTALQTVFPVLQWGRTYNFKLFRSDVMAGLTLASLGIPQSIGYANLAKLDPQYGLYTSVVPPLIYAVMGTSREIAIGPVAVVSLLLSSMVSKIVDPAVDPVTYRALVFTVTFLAGVFQVSFGLFRLGFLVDFLSHAAIVGFMAGAAIVIGLQQLKGLLGLSHFTNSTDVVSVIKAVCSALRDPWHPGNFLIGCSFLIFILATRFIGRRYKKLFWLSAISPLLSVILSTAAVYATRADKHGVKIIQRVHAGLNPSSASQLRLSGPYTVDCAKTAIICAVIALTEAIAVGRSFASIRGYKLDGNKEMIAMGCSNVAGSLSSCYVATGSFSRTAVNFSAGARSTVSNIVMSITVFIALELLMKSLYYTPIAVLASIILSALPGLIDIKEALSIWKVDKMDFLTCLGAFVGVLFGSVEIGLAVSLAISFAKIIIQSIRPQVEVLGRLQGTNIFCSIRQYPVACRIPSVLTIRIDTSFLCFINSTFIKERIIEWIREEVETSDEKARERVQSVVLDMSNVVNIDTSGISALEEIHKELASLSIQMAIAGPGWQAIQKMKLAGVVDQVGGDWIFLTVGEAVEACVTMQKGTALEC

SEQ ID NO: 17816 - protein, 283 aa, Oryza sativa Indica Group
MGWYIRASRVHPRPGRAAFVANEIPLFMNQSPPHMSRPSVIIKLILGLLWFIVHLAISLFSLWFDLIYSIECYLISFGLIPKYRKFQLDRLKHLAVVVDSREAKNVAKINQLLCWLSNVGVKYVCLYDIDGVLKKTFAPAMNGSRYGNSGKYLDVGANTKALTCCHKEMTIECISGSDGKDGIAKAASLLCSTCVNGNRNTCGNGEIVFTEADMSGALKAIGCGGPEPDLLLVYGPARCHLGFPAWRLRYTEIMHMGPLNSMKYGAIVKAFYKFSKKYQNFGK

SEQ ID NO: 17817 - protein, 747 aa, Oryza sativa Indica Group
MKQQKQLIKEDTMDNNIDKLTPNWCAWKNDNNLCSGTSHEQRNHRLLTKQPPCKLKATEAKRKEMVFQKRSSLEMESGGGSHVAEMPRVPKSARGKRSIRKKESQGQVMCAFDLLATVAGKLLDEGEGSLGNASPKDVRVKQEQCDEEAKHFKNEVMDQDSCNESALVSHIAFQRPVNHHGRKGEDPEGSHAVIEDPKAKSEALDKESSMISCTKAELGCNFAAIADRWSPESVESGAFTGDAAAIAMPATTSGFHKNAPDMYNLLDPMDVDVKPPPLVSSDSTGEMPLYGNKIRRSTSFPRVPKGGAGFTVDRDEDDDDKSSGCTHPSTATNRGFRPNCTAGHSRVKKLLACKHRKVAPARMHKGDLSYSDVDRKPSFRNKKMYYTRQRTQRSTFKRRKMFDRHSAQVSEEYAKANTKFAARDSHAVSLEANKGTNSTAFQKSQESSDCHVKLRIKSFKVPELLIEIPETATVGSLKKTVLEAVNAILGGGLRVGVLHHGKKVRDDNKTLMQAGISHDEVLDNLGFSLEPNCAPHPSQLSPPEDNEFMETVDTTEPLARIAPADSSSKHGEVDASQELALAPLSANYQGSDHDFVHSPGGMSSPDKASTNSRAIVPVTPADSNAGAIVPANKAKRSPEQGQRRIRRPFSVAEVEALVLAVEKLGTGRWRDVKLRAFDNAKHRTYVDLKDKWKTLVHTASISPQQRRGEPVPQELLDRVLAAQAYWSQQQAKLQPKTPPLAEALLLT

SEQ ID NO: 17818 - protein, 590 aa, Oryza sativa Indica Group
MCGILAVLGAADWLKHRGPDWSGLYQCEGNFLAQQRLAIVSPLSGDQPLYNADRTIVVVANGEIYNHKKIRKQFASKHTFSTGSDCEVIIPLYEEYGEDFVDMLDGVFAFVLYDTRTKTYMAARDAIGVNPLYIGRGSDGAVWISSEMKALNEDCVEFEIFPPGHLYSSAAGGLRRWYKPQWFAENVPATPYQPLLLREAFEKAVIKRLMTDVPFGVLLSGGLDSSLVAAVTKRHLIKTEAAEKFGAELHSFVVGLEGSPDLIAAREVADHLGTIHHEFHFTVQDGIDAIEEVIYHDETYDVTTIRASTPMFLMARKIKALGVKMVLSGEGSDELLGGYLYFHFAPNKEEFHKETCRKVKALHQYDCLRANKATSAWGLEVRVPFLDKEFINVAMSMDPEWKMYNADLGRIEKWVMRKAFDDEEHPYLPKHILYRQKEQFSDGVGYNWIDGLKAFTEQQVSDEMMKNAAKVYPHNTPVNKEAYYYRMIFERLFPQESARETVPWGPSIACSTPAAIEWVEQWKASHDPSGRLIASHNSASASANHTNHANANANGNSNGKANGNCAMAANGTNGVGLVVANGTANGKMEA

SEQ ID NO: 17819 - protein, 924 aa, Oryza sativa Indica Group
MASGSRATPTRSPSSARPAAPRHQHHHSQSSGGSTSRAGGGGGGGGGGGGGAAAAESVSKAVAQYTLDARLHAVFEQSGASGRSFDYTQSLRASPTPSSEQQIAAYLSRIQRGGHIQPFGCTLAVADDSSFRLLAYSENTADLLDLSPHHSVPSLDSSAVPPPVSLGADARLLFAPSSAVLLERAFAAREISLLNPLWIHSRVSSKPFYAILHRIDVGVVIDLEPARTEDPALSIAGAVQSQKLAVRAISRLQALPGEVQIKDIIEWLTMCHGDSTGLSTDSLADAGYSGAAALGDAVSGMAVAYITPSDYLFWFRSHTAKEIKWGGAKHHPEDKDDGQRMHPRSSFKAFLEVVKSRSLPWENAEMDAIHSLQLILRDSFRDSAEGTSNSKAIVNGQVQLGELELRGIDELSSVAREMVRLIETATVPIFAVDTDGCINGWNAKVAELTGLSVEEAMGKSLVNDLIFKESEETVNKLLSRALRGDEDKNVEIKLKTFGPEQSKGPIFVIVNACSSRDYTKNIVGVCFVGQDVTGQKVVMDKFINIQGDYKAIVHNPNPLIPPIFASDENTCCSEWNTAMEKLTGWSRGEVVGKLLVGEVFGNCCRLKGPDALTKFMIVLHNAIGGQDCEKFPFSFFDKNGKYVQALLTANTRSRMDGEAIGAFCFLQIASPELQQAFEIQRHHEKKCYARMKELAYIYQEIKNPLNGIRFTNSLLEMTDLKDDQRQFLETSTACEKQMSKIVKDASLQSIEDGSLVLEKGEFSLGSVMNAVVSQVMIQLRERDLQLIRDIPDEIKEASAYGDQYRIQQVLCDFLLSMVRFAPAENGWVEIQVRPNIKQNSDGTDTMLFLFRFACPGEGLPPEIVQDMFSNSRWTTQEGIGLSICRKILKLMGGEVQYIRESERSFFHIVLELPQPQQAASRGTS

SEQ ID NO: 17820 - protein, 326 aa, Oryza sativa Indica Group
MVSSAMAAVAVAFAVVVAATTSSAQLDPHFYDGLCPAALPTIKRIVEEAVAAEPRMGASLLRLHFHDCFVNGCDGSILLDDTPFFTGEKNAAPNMNSVRGFDVIDRIKDAVNAACRRNVVSCADIVAVAARDSIVALGGPSYHVPLGRRDARTASQAAANSSIPAPTLNLDGLVSSFAAQGLSVQDLVLLSGAHTLGFSRCTNFRDRLYNETTTLDASLAASLGGTCPRTAGAGDDNLAPLDPTPARFDAAYYASLLRARGLLHSDQQLFAGGGLGATDGLVRFYAANPDAFRRDFAESMVRMASLSPLVGSQGEVRVNCRKVNYY

SEQ ID NO: 17821 - protein, 331 aa, Oryza sativa Indica Group
MKEKCSSHTNLFLKIYTFLITGPLTISSVFMASVTYIDDSGSEVIDPPKTEVLDVTELAGDPVPHSPKPNVVVSSSVRELLECPVCLSAMYPPIHQCSNGHTLCSGCKPRVHNRCPTCRHELGNIRCLALEKVAASLELPCKYQNFGCVGIYPYYCKLKHESQCQYRPYSCPYAGSECTVAGDIPYLVNHLKDDHKVDMHNGCTFNHRYVKSNPHEVENATWMLTVFSCFGQYFCLHFEAFQLGMAPVYIAFLRFMGDDLEAKNYSYSLEVGGTGRKMIWQGVPRSIRDSHRKVRDSYDGLIIQRNMALFFSGGERKELKLRVTGRIWKEQ

SEQ ID NO: 17822 - protein, 342 aa, Oryza sativa Indica Group
MERYEVMRDIGSGNFGVAKLVRDVATNHLFAVKFIERGLKIDEHVQREIMNHRSLKHPNIIRFKEVVLTPTHLAIVMEYAAGGELFERICNAGRFSEDEARFFFQQLISGVSYCHSMQVCHRDLKLENTLLDGSVAPRLKICDFGYSKSSVLHSQPKSTVGTPAYIAPEVLSRKEYDGKVADVWSCGVTLYVMLVGAYPFEDPDDPRNFRKTITRILSVQYSIPDYVRVSADCTHLLSRIFVGNPEQRITIPEIKNHPWFLKNLPIEMTDEYQRSMQLADMNTPSQSLEEVMAIIQEARKPGDAMKLAGAGQVACLGSMDLDDIDDIDDIDIENSGDFVCAL

SEQ ID NO: 17823 - protein, 310 aa, Oryza sativa Indica Group
MENHPVQCMAKTNYDFLARNNYPMKQLVQRNSDGDSSPTKSGESHQEASAVSDSSLNGQHTSPQSVFVPSDINNNDSCGERDHGTKSVLSLGNTEAAFPPSKFDYNQPFACVSYPYGTDPYYGGVLTGYTSHAFVHPQITGAANSRMPLPVDPSVEEPIFVNAKQYNAILRRRQTRAKLEAQNKAVKGRKPYLHESRHHHAMKRARGSGGRFLTKKELLEQQQQQQQQKPPPASAQSPTGRARTSGGAVVLGKNLCPENSTSCSPSTPTGSEISSISFGGGMLAHQEHISFASADRHPTMNQNHRVPVMR

SEQ ID NO: 17824 - protein, 431 aa, Oryza sativa Indica Group
MADDKSDTVQVSEDTAHQISIDPWYQVGFILTTGVNSAYVLGYSASIMVPLGWIGGTCGLILAAAISMYANALLAHLHEVGGKRHIRYRDLAGHIYGRKMYSLTWALQYVNLFMINTGLIILAGQALKAIYVLFRDDGVLKLPYCIALSGFVCALFAFGIPYLSALRIWLGLSTVFSLIYIMIAFVMSLRDGITTPAKDYTIPGSHSDRIFTTIGAVANLVFAYNTGMLPEIQATIRPPVVKNMEKALWFQFTVGSLPLYAVTFMGYWAYGSSTSSYLLNSVKGPIWIKTVANLSAFLQTVIALHIFASPMYEFLDTRFGSGHGGPFAIHNIMFRVGVRGGYLTVNTLVAAMLPFLGDFMSLTGALSTFPLTFVLANHMYLTVKQNKMSIFRKCWHWLNVVGFSCLSVAAAVAAVRLITVDYSTYHLFADM

SEQ ID NO: 17825 - protein, 258 aa, Oryza sativa Indica Group
MESRPGGTNLVEPRGQGALPSGIPIQQPWWTTSAGVGAVSPAVVAPGSGAGISLSGRDGGGDDAAEESSDDSRRSGETKDGSTGQEKHHATSQMTALASDYLTPFSQLELNQPIASAAYQYPDSYYMGMVGPYGPQAMSAQTHFQLPGLTHSRMPLPLEISEEPVYVNAKQYHGILRRRQSRAKAELEKKVVKSRKPYLHESRHQHAMRRARGTGGRFLNTKKNEDGAPSEKAEPNKGEQNSGYRRIPPDLQLLQKET

SEQ ID NO: 17826 - protein, 370 aa, Oryza sativa Indica Group
MSSSLLTDLVNLDLSESTDKVIAEYIWVGGTGMDVRSKARTLSGPVDDPSKLPKWNFDGSSTGQATGDDSEVILHPQAIFRDPFRKGKNILVMCDCYAPNGEPIPTNNRYNAARIFSHPDVKAEEPWYGIEQEYTLLQKHINWPLGWPLGGYPGPQGPYYCAAGADKSYGRDIVDAHYKACLFAGINISGINAEVMPGQWEFQIGPVVGVSAGDHVWVARYILERITEIAGVVVSFDPKPIPGDWNGAGAHTNYSTKSMRSNGGYEVIKKAIKKLGMRHREHIAAYGDGNERRLTGRHETADINNFVWGVANRGASVRVGRDTEKDDKGYFEDRRPASNMDPYLVTAMIAETTILWEPSHGHGHGQSNGK

SEQ ID NO: 17827 - protein, 886 aa, Oryza sativa Indica Group
MSSSRPTQCSSSSSRTRQSSRARILAQTTLDAELNAEYEEYGDSFDYSKLVEAQRTTGPEQQARSEKVIAYLHHIQRAKLIQPFGCLLALDEKTFNVIALSENAPEMLTTVSHAVPSVDDPPKLRIGTNVWSLFTDPGATALQKALGFADVSLLNPILVQCKTSGKPFYAIVHRATGCLVVDFEPVKPTEFPATAAGALQSYKLAAKAISKIQSLPGGSMENAPTESQIRDIAFWLSDVHRDSTGLSTDSLHDAGYPGAAALGDMICGMAVAKINSKDILFWFRSHTAAEIRWGGAKHDPSDKDDSRRMHPRLSFKAFLEVVKMKSLPWNDYEMDAIHSLQLILRGTLNDDIKPTRAASLDNQVGDLKLDGLAELQAVTSEMVRLMETATVPILAVDSNGLVNGWNQKVAELTGLRVDEAIGRHILTVVEESSVPVVQRMLYLALQGKEEKEVKFEVKTHGSKRDDGPVILVVNACASRDLHDHVVGVCFVAQDMTVHKLVMDKFTRVEGDYKAIIHNPSPLIPPIFGADEFGWCSEWNAAMTKLTGWHRDEVINKMLLGEVFDSTNASCLVKNKDAFVSLCILINSALAGDETEKAPFSFFDRNGKYIECLLSVNRKVNADGVITGVFCFIQVPSHELQHALHVQQASQQNALTKLKAYSYMRHAINNPLSGMLYSRKALKNTGLNEEQMKEVNVADSCHRQLNKILSDLDQDSVMNKSSCLDLEMVEFVLQDVFVAAVSQVLITCQGKGIRVSCNLPERYMKQTVYGDGVRLQQILSDFLFVSVKFSPVGGSVEISCSLTKNSIGENLHLIDLELRIKHQGKGVPADLLSQMYEDDNKEQSDEGMSLAVSRNLLRLMNGDVRHMREAGMSTFILSVELASAPAK

SEQ ID NO: 17828 - protein, 517 aa, Oryza sativa Indica Group
MGWRRREGGGAVAGAASRLRFAPSSNHLLVSSWDSGLRLYDADACELRMEAKSEAALLDCCFQDEAVALTGGSDGSITRYDLHSGAQGTIGQHHEVVSCIEFSQITGQVVTATLDKKLMFWDSQTRNVNPNSIKNLDSDVASLSVCEMYILAAIEREVYIYDMRNLIGPVKVKDSPVEYHLRSLHSSPEWKGYAAGSVDGVVAVKYFDRGTDGDMGYVFRCHPKSRDGRSSMVPINSIGIHPFDKTFVTGDNEGYVIAWDAQSKKKLHEFPIYSGSVASIAFNHNGQIFAVASNSNYQESDKICNHVMGRGAPDIFRNEAALLRRYIVTGDKHAKVGFWGRLEMSDSEEHHFESKADAGASKTYPQQAGTIRKNGHIVIKNRPCKWSGNHASLLVDTKVVEVSTSKTGKHGHAKCHFVAIDIFNGKKLEDIVPSSHNCDVPHVNRTDYQLIDISEDGFVSLLTESGGTKDDLRLPSDEALLTQIKDGFAEGKDLIVTVMSAMGEEQICALKDIGPKN

SEQ ID NO: 17829 - protein, 505 aa, Oryza sativa Indica Group
MPNPSSLLASPSPPHRNSSSSSSISIISTPATIQPDAAHGPCSLLTTSKYALRDTRGSKSSYTRLCCCCTAAPKAEQEEETLQQELLLFGLVQVVNFLGGHKNRGMDGNARSAANQTKQIVTDNELVELLWHNGGVVAQPQAAQARVVSSSGRGQSASVLTGDDTETAAWFPDTLDDALEKDLYTQLWRSVTGDAFPAAAAAGPSSHHAPPPDLPPPAARPPMRSGIGSSWTGDICSAFCGSNHIPETAAQRCRDAGAALPPERPRRSSTHDGAGTSSSGGSGSNFGASGLPSESASAHKRKGREDSDSRSEDAECEATEETKSSSRRYGSKRRTRAAEVHNLSERRRRDRINEKMRALQELIPHCNKTDKASILDEAIEYLKSLQMQVQIMWMTTGMAPMMFPGAHQFMPPMAVGMNSACMPAAQGLSHMSRLPYMNHSMPNHIPLNSSPAMNPMNVANQMQNIQLREASNPFLHPDGWQTVPPQRKRRRRRMMQPGALAEPGQ

SEQ ID NO: 17830 - protein, 504 aa, Oryza sativa Indica Group
MPLLLHPRFPSSHAAACAHRAAAAHRDARPALRLPELHATRRRRNNVACRATRAREAPPQKQNTAAALSKEAHKYFDHAVVTVRAGDGGHGAVLAMPASPSTDAPKSPRRRSDKGKRSGVKKVSYKRNYDGSVALPMGGHGGDVVVYADEAEETLLRFHEKARYCAKRGGNVGATGTLSSRMHNGFAGETLRIPVPVGTVVKRKKGAILADLAHPGDEVIVARGGQGGISLIDVPEYRRRKAMALSPNIMRDVSDRVLIHGQPGEEVSLELILRVVADVGLVGLPNAGKSTLLSAITLARPDIADYPFTTLMPNLGRLGGDPALGALQFSSEATLADLPGLIEGAHLGKGLGRNFLRHLRRTRVIVHVVDAAADDPVDDYKIVREELRMYNPQYLERPYVVVLNKIDLPKAQDRLSSLAFEISSIGCEECDGNNTSEDSLNGNTGEHNTSSETKVEGGEKELRDYPRPQAVVGASVLKHIGIDEMLKEIRAALRKCFDHRLPEP

SEQ ID NO: 17831 - protein, 579 aa, Oryza sativa Indica Group
MVSLAAYSPCSTVAGVPKNKGNGAASSTHKESIMRHVVVQCATSWDTPRTSTTNGSHAEPSAVVKAGTAPLIQALKSTANQDVSCFHFPGHNRGKASPPSLSELIGSRTFLHDLPELPELDDLFSPKGVILDAQKRAAELFGSFKTWFLVNGSTCGIQASVMATCSPGDYLIIPRNCHISVISALVLSGAVPKYIVPEYNSGWDIAGGITPSQVDKVVKELEEDRKKVGAVLVTSPTYHGICSNIQGIVNVCHLRGIPVIVDEAHGAHFRFHRNFPSSATEQGANLVVQSTHKVLCSLTQSSMLHMAGDLVDADKVSQCLQLLQSSSPSYLLLSSLDATRAQLSENAESFDEPVSMALETKHQLRIIPGISVLDLSSFLSDFPAIDPLRITLSASDLQLSGYEADDFLAEEHQIVSELVGTQAVTFAVNLGTRRHDVQRLVHSVKHLSEKYFSENGSSSRKENPASSPLDKFSIKLTPREAFFLKKRRVSIEDSLGEICGELICPYPPGIPVLIPGEIVTQDSLSYLMDVRDNGIAISGAADGELKSIMLSSPERKRKPQSEHSIRYKFAHLHGSPEAC

SEQ ID NO: 17832 - protein, 566 aa, Oryza sativa Indica Group
MAVALRFAAAVARDSPAAAAPPRVGRGEQQYLACAAAARPGGRCSRRRGLVARCQSGAAAVVLNKDDAASVAAVASSATGFTVAMKFGGSSVASAERMREVADLILSFPEETPVVVLSAMGKTTNNLLLAGEKAVSCGAPKASEIPELAVIKELHVRTIDELGLDRSIVSGLLEELEQLLKGVAMMKELTPRTRDYLVSFGECMSTRIFAAYLNKLGKKARQYDAFDIGFITTDDFTNADILEATYPAVAKRLQGDWIDDPAIPIVTGFLGKGWKSCAVTTLGRGGSDLTATTIGKALGLREIQVWKDVDGVLTCDPNICANAIPVPYLTFEEAAELAYFGAQVLHPQSMRPAKEGGIPVRVKNSYNRRAPGTVITKTRDLSKSILTSIVLKSNITMLDIVSTRMLGQYGFLAKVFSIFEDLGISVDCVATSEVSISLTLDPSKLWCRELIQQELDHVVEELEKIAVVHLLQHRSIISLIGNVQRSSLILEKAFNVLRRNGVNVQMISQGASKVNISLVVHDSEAKQCIQALHSAFFENGFLSEVEEEDLQHNGSPVSSNGVIYGN

SEQ ID NO: 17833 - protein, 168 aa, Oryza sativa Indica Group
MAATAAASVAAISPLPGASLPRPVSARVPLLPRASPPTWRLSVGSARARSARCLAAAGGGGLAPEMRATLDKVVGSHKVVLFMKGTKDFPQCGFSHTVVQILRSLDVPFETLDVLANEALRQGLKEYSSWPTFPQLYIDGEFFGGCDITVDAYKSGELQETLEKAMLS

SEQ ID NO: 17834 - protein, 129 aa, Oryza sativa Indica Group
MTIPMAHSSRPTLGFPLGTALLIFVIFSLSGIFSCCYHWDKLRAFLWSRHPDVILQEGQHTVISIASPSKTTSDHKNEKAEKECGLPVIMPGDRIPKFFARPCPHEKCLPAAEEEEAEVQVKCSVPQSS

SEQ ID NO: 17835 - protein, 221 aa, Oryza sativa Indica Group
MSLHPHRRHGDGDVDGSASGSGSARLTAGLINFLESRRAGAMSTTNSSSSVSVPAMDAHGQEEEEEPMQVQQQQAFRGVRKRPWGKFAAEIRDSTRNGVRVWLGTFDSAEEAALAYDQAAFAMRGSAAVLNFPMEQVRRSMDMSLLQEGASPVVALKRRHSMRAAAAGRRRKSAAPAPADQEGGGGVMELEDLGPDYLEELLAASQPIDITCCTSPSHHSI

SEQ ID NO: 17836 - protein, 372 aa, Oryza sativa Indica Group
MASPSGAGKPPAVLLLRPVDQPFAVALRERYRVLDLLSSGQPLPAFLAAAAAAPDPPRAAVVMGGGSIRADAALFDAVPSLRCVVSTAAGVDHIDLAECARRGVVVANSGTVYSGDVADHAVGMVIDVMRRVSAAERYVRRGLWPVQGDYPLGSKVSGKRVGIIGLGNIGSLIAKRLEAFGCVISYNSRNPKRSLPYTYYADVRALAADSDVLVVSCALNSETRHIVGGEVLDALGEGGVVVNVGRGANVDEAALVRALREGRIAGAGLDVFEGEPKVSPELREMENVVLTPHVAVWTAESRSDLRDHTVANLDAFFSGDPLLTPEGLVEGGTLVDGDGCAKGSVLLGDSGGELGTEEVEGGAEHAEVGAAA

SEQ ID NO: 17837 - protein, 333 aa, Oryza sativa Indica Group
MTSAVAAPPATGGKRPVLLLRRINDRLAAELRSRFRVLNFYESGAPLLAFLAAAAAGPDPPLAAVVVAGGAIQVNAAFLDAVPSLGCVVTTGAGVDHIDLAECARRGVAVAGAGTVFSTDVADHAVGLLVDVLRRISASDRYVRRGLWAARGDYPLGSKLSGKHVGIIGLGSIGSLIAKRLQAFGCTISYNSRRPKDSVSYNYFPDVTDLAAASDVLIVACALNDETRHIVDSSVLEALGKDGVVVNIARGGIVDEAELIRALKEGRIAGAGLDVFEKEPDVPAELLSMDNVVLTAHEAVFTTESNWDLADLMIANLEAFFSGGPLLTPVLPK

SEQ ID NO: 17838 - protein, 320 aa, Oryza sativa Indica Group
MAPPATQDGSSSKPIVLLADPFIPEFEQELAPSYRLLPAADADEAAAASARALLTVDLPAVTAAQIDALPALELVVASSAGVDHINLGACRRRGIAVTNAQNAFSADAADYAVGLLVAVLRRVAAADAYVRRGAWAAAAGDYPLASKVSGKRVGIVGLGSIGGLVARRLAAFGCVIAYNSRSPKASAPYKFYPSVRELAAESDVLVLSCALTEETRRMVGREVMEALGKGGVLVNVGRGGLVDEAELVRCLREGVLGGAGLDVYENEPEVPPELWGMDNVVLSDHRAVITPESIQGVVDVVKANLDAFFSGKPLVSQVQL

SEQ ID NO: 17839 - protein, 1860 aa, Oryza sativa Indica Group
MSLILQNYAQISQGPRQQGIPTLLSGVFRLEFDGGVVQITYTKVFILVVSLLGMAILTYIIQRTRLGRICRATQQDRKMASILGINTDRVISLVFVIGAAMAGLAGVLITMNYGTFDFYVGFIIGIKAFTAAVLGGIGSLPGAMLGGLLLGVAEAQFAGMVNSDYKDVACSAGRWSPRFKENAMSQSAINGGLNVKRSLLDAVLAGLIALIVFGPIVGIVLNGYSFNFEPHRLVWIIVAVMAGRLLLSLFLQTAPGRKVLARFDGGNDGVYVRPLGYKSNLRWFLPLMAAIALLFPFVATKYLLTVAILGLIYVLLGLGLNIVVGLAGLLDLGYVAFYAIGAYGLALGYQYLGLGFWAMLPLGALMAALAGALLGFPVLRMHGDYLAIVTLGFGEIIRLVLNNWMSLTGGPNGISVPAPTVFGLEFGRRAKDGGVPIHEFLGIDYNPNLKFIFIYAMLFLVVLLHRLTRMPIGRAWEALREDEIACRSLGLNHVLVKLSAFMLGASTAGLAGVFFATYQGFVNPTSFTFFESALILAIVVLGGMGSTLGVVLAAFVLTVAPELLRSFAEYRVLLFGVLMVAMMIWRPRGLALNDVNLEVERGSITALIGPNGAGKTTVFNCLTGFYRATGGAILLNTHKRPTDVIQVLGQKFRASDWIRPKRLGDSAQRGGDRRLPGRGRRGAGGMSETMLEFREVDVFYGPIQALRQVSLQVNAGETVALIGANGAGKSTLLMSIFGQPRIAGGQILFRGEDISRRSTHFVASSGIAQAPEGRRIFPDMSVEENLLMGTITVGNRYLEEDLPRMFELFPRLKERRNQRAMTMSGGEQQMLAIARALMSRPKLLLLDEPSLGLAPIVVRQIFGVLRELTRSGMTLFLVEQNANHALKLSDRGYVMVNGQIRLTGSGQELLNDPQDDAVSRQEASMKSTNPSINTVLILGAGELGLPVLRAMSRQARLSPSLKISVLLRPEAARAVSGPLRARRDELARLGIAVVEGDLQQNGVEALSALFRSFDAVINCSGFVGGAGTQIKITQAVLQAGVARYFPWQFGVDYDVIVGDRQRLFADLPPLGGKAFGVGEEGRAVEHRLALDAAIVNIAQGKYGPIINRGHHNDLASGNAKGTLRGSSARRVGSRGRAAGKIAHISDTTVAWNFTTLVISRAGVALAHSVFWSITASLAIRVAPSGMKAQALSLLAGGTALAMVLGLPIGRVVGQLLGWRMTFIGIVVCATLVLLLLWRLLPVLKSEHSGSLASVPLLFKRPALVALYMLSIIVVTAHFTAYSYIEPFIQTVAGLSENFTTLMLLLFGAAGIVGSLLFRRYSEHSALVAYECLHSIKKQHCKKPFFALKVDMMKAYDHVEWSFLHGCLLKLGFADPWIQTVMRCVTSVRYAVRINGELTNPVTPSRGLRQGDPISPYLFLLCTEGLSSILQKKESMGVIQGIRNGRLGPPISHLLFADDSIFFARSDLHSVQGLKDALQAYCKASGQKINLQKSSIFFGQNCPEDIKNSVKETLQVSVEILQDTYLGMPTEIGRASTGSFHFLPERVWRRVNSWNDRPMSRAGKETMLKAVAQAIPTYVMSCFKLPVSTCEKMKSCILDHWWGFEDGKKKMHWRSWEWMTTPKSLGGMGFRDLGLFNQAMLARQGWRIVTDLVSLCARVLKGRYFPNSDLWNAPKPTATSFTWRSILFGRDLLRKGVRWGIGNGSSVKILKDHWIPGIKPSMVRPLLPLPEDVTVDFLVNDAIGEWDEDKVFSFFDETTTQQILQIPVSAHGGEDFISWPHDKRGVFSVRSAYNLARSEIFMAAQSENGRGMSSGLQESANRWKELWRINAPGKMLINLWKIVHDCLPSGFQLRRRHIPAY

SEQ ID NO: 17840 - protein, 836 aa, Oryza sativa Indica Group
MSSSLPCLAVAVAVAVAVLSLLALANSNHLPAASVSAAAGLGRSAIPRGHIAAMKFLYAVNDVRHQAGAPPLEWSGAAARHSRERATWLRGPGGCDLQAQKGGDPAPAHGGAVTYFLSDGGSRASPEDAVRLWADERRWYDAGARACAAGKQCGDYEIMVQPASKQLGCAVAVCASRKTIMVCEYYGGGGGGCWSQGGSGPPDPGDGWCRWLQSLHPELLLLFVLLHSGAFAAIPAALAEAIGGSGGREGASVWEVRGGARTLLVPDPTGTSYVVAGDGRRKQAEGEDAEKAGAGRAELAALRRQLERSWRRCATVAVQLLLPDGYPDSVSSDYLQYSLWRGVQGIASQISGVLSTQALLYAVGLGKGAIPTAAAVNWVLKDGLGYLSKILLSKFGRHFDVNPKGWRLFADLLENTAYGLEILTPVFPHLFVPIGAAAGAGRSAAALIQTIFAHFMLENANHMRKVIAKGEAQGMALLYAVGLGKGAIPTAAAVNWVLKDGLGYLSKILLSKFGRHFDVNPKGWRLFADLLENTAYGLEILTPVFPHLFVPIGAAAGAGRSAAALIQAATRSCFYAGFAVQRNFAEVIAKGEAQGMVSKFLGIMLGIALANRIGSSVSLALISFAGVTAVHMYCNLKSYQSIQLRTLNPYRASLVFSEYLLSGQVPSVKEVNDEEPLFLNLSVGTSRKESKILSPQAKDAAEIICRRLQLGSKLSEIIENKEDACALFDLYKNEQYLLTEYKGKFCVILKEGSSPEDMLKSLFHVNYLYWLEKYLGIKPSDVASACRPGGRLEASLDYTQREFSHVKLDGSNGGWVMDGLIARPLPVRIRIGDVPS

SEQ ID NO: 17841 - protein, 398 aa, Oryza sativa Indica Group
MVTSSVLPKVVDDAGEGEANPRRAKWWYATFHSVTAMVGAGVLSLPYAMAHLGWGPGTAALVVSWGMTLYTLRLLIELHECVPGVRFDRYRDLGAHALGPRLGPWLVVPQQLIVQLGCDVVYMVIGGKCLMKFAESVSSWSRAPQLHHQSYWICIFGASQFLLSQLPSLDSITAVSLAAAAIALGQVAFAYAGHGVVLEIQATIPSTPTKPSRGAMWKGAVAAYLVTALCYFPVAIAGYWAFGRDVSDNVLVALRRPPWLVAAANMMVVVHVLGSYQVYAMPIFETLETILITRIRLPPGALLRLVARSAYVAFTLFVAVTFPFFGDLLGFFGGFGFTPTSYFLPCILWLKIKKPPRFSASWFANWGCIVVGVLLMIASTIGGLRSIIQDASTFQFYS

SEQ ID NO: 17842 - protein, 509 aa, Oryza sativa Indica Group
MYGVGGGGGGFNAPYTASARRRNHEDDDDEEEEESGEGRVLEAWERAYADDRSWEALQEDESGLLRPIDTKTLVHAQYRRRLLLRSAASAAARIQKGLIRYLYIVIDLSRAASEMDYRPSRMAVVAKYAEVFIREFFDQNPLSHVGIVTMKDGISHRLTEIGGSPESQIKALMGKLECSGEPSLQNALELVHGYLDQVPSYGHKEVLFLYSALNTCDPGDIMETIAKCKKSKIRCSVIGLAAEIFICKYLCEETGGSYTVALDESHFKELLLEHAPPPPAIAEYAAANLIKMGFPQRGAEDLISICSCHKKIKSGAEGYICPRCKVNIVNLASMFAVQNATNTSALIAIFTSMRACTIAQVARVSVVLHRDAIVVLIFVFLTQEATRCCKLSRTLTLLSGDEQWRSSCIITYTQHIPGSLHSDESVLPVAIMSTLLKRMDDRQRCQCSFSPVARPSCGHDELQAAAPSCAFSTVDHSSPLERNTGETARRQPIDHGLFRALHSVHTLWR

SEQ ID NO: 17843 - protein, 508 aa, Oryza sativa Indica Group
MSSEVTSVPPPPVSAPPSQIQSPAAPASSRASPLRGMGTPNIASPVRKAVASVSGYLGEVGQMTRLADPRDAWLPITESRSGNAYYAAFHSLSSGIGFQALVLPVAFSLLGWTWAIICLTVAFAWQLYTLWLLVKLHEPVAGGTRYSRYMYLATTVFGEKWGKILALLPVMYLSAGTCTALIIVGGGSMKLLFNIACGEVCLARPLTTVEWYLVFVCVAALLSQLPNLNSIAGVSLVGATAAVAYCTMIWVVSVAKGRVAGVSYDPVRATDEEDGAIGILNGLGIIAFAFRGHNLVLEIQATMPSTLKHPSHVPMWKGVKAAYVIIALCLYPVAVGGFWAYGDQIPPNGILSALYKFHSQDVSRVVLGTATLLVIVNCLTTYQIYAMPVFDNMETGYVHKKNRPCPWWMRAGFRALFGAINLLIAVALPFLSELAGLLGGISLPVTLAYPCFMWVAIMRPAKGTAMWYTNWGLGSLGMGLSFVLIVGNLWGLVEKGLHVKFFKPADFQ

SEQ ID NO: 17844 - protein, 325 aa, Oryza sativa Indica Group
MAALLFSAVVSAQLSTDFYDETCPDALDIIESAVRAAVSKESRMGASLLRLHFHDCFVNANIIQKFRVDADGSVKQVGCDGSVLLDDTAAITGEKNAKPNKNSLRGFEVVDDIKSQLEDACEQVVSCADILAVAARDSVVALGGPTWDVELGRRDGTTASLDAANNDLPPPTSDLADLIKSFSDKGLTASDMIALSGAHTIGQARCTNFRGRLYNETNLDATLATSLKPSCPNPTGGDDNTAPLDPATSYVFDNFYYRNLLRNKGLLHSDQQLFSGGSADAQTTAYATDMAGFFDDFRGAMVKMGGIGVVTGSGGQVRVNCRKVN

SEQ ID NO: 17845 - protein, 289 aa, Oryza sativa Indica Group
MAWLHPPKPSPRAAAPPPPPPLAPTTRHRLDTAAATATVAQRLPPSEARAPDAPPPAATATATTSSVCSGNGDRRQLNWRDSHNNQSAEWSASQDELDLDDELAGVHRRSAARSSKRSRTAEVHNLSERRRRDRINEKMRALQELIPNCNKIDKASMLEEAIEYLKTLQLQVQMMSMGTGMFVPPMMLPAAAAAMQHHHMQMQQMAGPMAAAAHFPHLGAAAAMGLAGFGMPDDAQFPCPMFPAAPPMSMFAPPPPPPPFPHAAATAVEQTPSPPGAADAGNAPAVKQA

SEQ ID NO: 17846 - protein, 258 aa, Oryza sativa Indica Group
MRPLLARLFAPTYIAMGFSSSASPPSRRLAHLTRHLLLSSGELSSSVGAPAAAARPAYLAAPKGYAAVLVCLFEDPHGGDPRVILTKRAASLSSHSGEVSLPGGKVEEGDADATATALREAKEEIGLDPALVSIVTVLEPFLSKNGLHVTPVISILSDKALFKPVLNESEVADIFDAPLEMFLKDDNRKTQEANWMGMNIPVQSFEYQSEDKTFVIWGLTAHILTRAAAVVLQREPSFVEFRPRYVNSPSGDTNETKR

SEQ ID NO: 17847 - protein, 584 aa, Oryza sativa Indica Group
MLLHSGFADHSHNRFDILVAQPRITLTTHGATTEVISDDVTIRSQQDPFELLQQQMVAQGWQPAFNPDLPFQGGALGLFGYDLGRRVESLPQLAEADLALPDMAVGIYDWALIADHRLQTLTLLSYGDVEQRWRWLNSQTAPAARPFTLLSDWRANMSRQQYGEKFQRIQHYLRSGDCYQINLAQRFSADYQGDEWQAFCQLSVSNRAPFSAFLRLPHNSVLSVSPERFLWLEQQRIQTRPIKGTLPRLADAEQDAAQARRLADSPKDRAENLMIVDLLRNDIGRVAQPGSVRVPELFVVEPFPAVHHLVSTITATLPDTASATELLRACFPGGSITGAPKVRAMEIIEELEPQRRNAYCGSIGYLSACGTMDTNITIRTLVTENGRIHCSAGGGIVADSQEQAEYQETFDKLPQAAQISLNVRPAAVLIPIVCRAEPTLLLTRRADSLRKHAGQVAFPGGKTDAEDGSAIVTALREAQEEVAIPPQAVTILGQMAPLDSSTGFQVTPIVGLVSPDVQFRANEGEVADVFEMPLREALTLSRYYPLDIHRAGHTHRIYLSWYHSQFIWGLTAAIIRRLAQQVSI

SEQ ID NO: 17848 - protein, 188 aa, Oryza sativa Indica Group
MDPLYLSQIIPDVLDPFISTISLRVTYNSRLLLAGAALKPSAVVSKPQVDVGGNDMRVSYTLVLVDPDAPSPSDPSLREYLHWMVTDIPETTSISFVENFINPKCPNDPAGEELILYEKPEPRSGIHRMVFVLFRQLGRRTVFAPEKRHNFNCRIFARQHHLNIVAATYFNCQREAGWGGRRFAPEGP

SEQ ID NO: 17849 - protein, 308 aa, Oryza sativa Indica Group
MVVEEAVVAAGNEMSLSNMVLGFYEEAELQSSPPGDCAAAAGDDDDGSDDEGSGGAAKCRAFWKEQQSQLYEALAKMSSAESRIQADAEEAMRQMRAAAAGACSCASRGAAAAAAAAGGGGCRSCTLRFLAERLRDAGYNSAICRSKWPRSPEIPSGEHSYVDVVAPTRSGKAVRVVVEPSFRGEFEMARGGAGYRALVASLPEAFVGRADRLRGVVRVMCAAAKQCARESGMHMAPWRKQRYMEAKWLATPERVAPPGNAGGAGDAVAVGSPSSPLSPGMTNRQMQPKFRASMLTLDFGGRTAVEVV

SEQ ID NO: 17850 - protein, 913 aa, Oryza sativa Indica Group
MNPDNFTHKTNEALVAAHEMASEAGHAQLTPLHLTAALAADKGGILRQAISQASGGDAGAPDSFERVVSGALKKLPSQSPPPDSVPASTALIKVIRRAQSAQKKRGDSHLAVDQLLLGLLEDSLISDCLKEAGVSAARVRAELEKLRGGEGRKVESASGDTNFQALKTYGRDLVEQAGKLDPVIGRDEEIRRVVRILSRRTKNNPVLIGEPGVGKTAVVEGLAQRIVRGDVPSNLLDVRLIALDMGALVAGAKYRGEFEERLKAVLKEVEEAEGKVILFIDEIHLVLGAGRTEGSMDAANLFKPMLARGQLRCIGATTLEEYRKYVEKDAAFERRFQQVFVAEPSVPDTISILRGLKEKYEGHHGVRIQDRALVVAAQLSARYIMGRHLPDKAIDLVDEACANVRVQLDSQPEEIDNLERKRIQLEVEHHALEKEKDKASKARLVEVKKELDDLRDKLQPLTMKYRKEKERIDEIRKLKQRREELQFTLQEAERRMDLARVADLKYGALQEIDVAIAKLESETGENLMLTETVGPEQIAEVVSRWTGIPVTRLGQNDKERLVGLADRLHQRVVGQAEAVSAVAEAVLRSRAGLGRPQQPTGSFLFLGPTGVGKTELAKALAEQLFDDENLLVRIDMSEYMEQHSVARLIGAPPGYVGHEEGGQLTEQVRRRPYSVILFDEVEKAHVAVFNTLLQVLDDGRLTDGQGRTVDFRNTVIIMTSNLGAEHLLAGMVGKNSMKVARDLVMQEVRRHFRPELLNRLDEIVIFDPLSHEQLRKVARLQMKDVAVRLAERGVALAVTDAALDVILSLSYDPVYGARPIRRWIEKRVVTQLSKMLIQEEIDENCTVYIDAAPHKDELAYRVDNRGGLVNAETGQKSDILIQVPNGAATGSDAAQAVKKMRIMEDEEDGMDEE

SEQ ID NO: 17851 - protein, 958 aa, Oryza sativa Indica Group
MAARSSLFLLCLATATAGVLQARAQPDSKGFISVDCGLPGKTSYIDDKTKISYASDDGFTDGGKHYNVSPEYIKPAVTARYYNVRSFPDGARNCYTLRSLVAGLKYLIRATFMYGNYDGLNKLPVSFDLHIGVNFWTVVNITDPIQPVNREAIVVVPDDSVQVCLVNTGAGTPFISGLDLRPLMNKLYPQVNATQGLLQLARLNFGPSDETSIRYPDDPHDRVWFPWFDAAKWNEISTTNRVQNIDNDLFEAPTAVMQTAVTPINASNNIDFFWNSQPQPNDPAPGYIAIFHFSELENLPNNASRQFYININGILFDDGFTPSFLYAEASYSSKPFVRHPQYNITINATANSTMPPLINAVEVYSVISTANIGTDSQDVSAIMTIKAKYQVKKNWMGDPCLPRNLAWDNLTCSYAISNPARITSLNLSKIGLSGEISSSFGNLKAIQYLDLSNNNLTGSIPNALSQLSSLTIFTGGEDDDGWLMVDNNDGAAGGRQRQRWRTVEGAARAVEGRRRGEQRDLTGNQLNGTIPPGLLKRIQDGFLNLRYGNNPNICTNGNSCQPPKNKSKLAIYIVVPIVLVLAIVSVMTLLYCLLRRKKQVPFFTYKGSMNNSVKPQNETMRYGPTNNGSRHNSSLRLENRRFTYNELEKITNKFQRVLGQGGFGKVYDGFLEDGTEVAVKVRTESSNQGDKEFLVEAQILTRIHHKNLVSMIGYCKDEKYMALVYEYMSEGTLQEHIAGKGNDGRYLTWKERLRIALESAQGLEYLHKGCNPPLIHRDVKGTNILLNTRLEAKIADFGLSKVFNPENGTHVSTNKLVGTPGYVDPEYQSTMQPTTKSDVYSFGVVLLELVTGKPAILRDPEPISIIHWAQQRLARGNIEGVVDASMHGDYDVNGLWKVADIARKCTALSSAHRPTMTDVVAQLQECLELEDKHQNNSTLEMEQNFGRIPSITGGPAAR

SEQ ID NO: 17852 - protein, 915 aa, Oryza sativa Indica Group
MAAWSWLILLCLVAAATAGVLQARAQPDSKGFISVDCGLPGKTSYVDDKTKISYAADDGFTDGGSFHNISAEYITPALSARYHNVRSFPDGARNCYTLRSLVAGLKYLIRATFMYGNYDGLSKLPIFDVYIGVNFWMMVNISDPSGATLLEAIVVVPDDFVQVCLVNTGTGTPFISGLDLRPLEKKLYPQANDKRGLSLFGRWNFGPISTTEFIRYPDDPHDRIWMPWVSPSYWVEVSTTRPVQHTDEDVFDAPTKVMQTAIAPLNASSNIEFAWVPYTQPKDPAPGYITVMHFSELQLRSSNATRQFYINLNGNMVFSQGYTPAYLYADAIFNSNPFLRYPQYNISINATANSTLPPIINAIEVFSVFSTATVGTDGQDASAMMVIKEKYQVKKNWMGDPCVPKTLAWDKLTCSYDSSKPARITDINLSSGGLSGEISSAFANLKALQNLDLSNNNLTGSIPDALSQLPSLAVLYGNNPNLCTNDNSCQPEKHKSKLAIYVAVPVVLVLVIVSVTILLFCLLGRKKKQGSMNTSVKPQNETTSYVPTNGSHGHGSSMQLENRRFTYNDLEKITNNFQRVLGEGGFGKVYDGFLEDGTQVAVKLRSESSNQGDKEFLAEAQILTRIHHKSLVSMIGYCKDGKYMALVYEYMSEGTLREHISGKRNNGRYLTWRERLRIALESAQGLEYLHKWCNPPLIHRDVKATNILLNARLEAKIADFGLSKTFNLENGTHVSTNTLVGTPGYVDPEYQATMQPTTKSDVYSFGVVLLELVTGKPAVLRDPEPISIIHWAQQRLAQGNIEGVVDARMHGDHDVNGVWKATDIALKCTTQVSAQRPTMTDVVAQLQECLELEEGRCAISNANNNFYTDNNSNSNSSYDMYATDHSIDVSQNSAAFETERNFGRMPSTATGPAAR

SEQ ID NO: 17853 - protein, 524 aa, Oryza sativa Indica Group
MANSEYEYVKREFELDSLLPPSNWIVVRIDGCHFHRILFVRFSKIHTFEKPNDERALRLMNACATSMLEKFPDIVFAYGVSDEYSFVFREETEFYQRRESKILSLCVSYFTSVYVMKWKDFFPNKELKEPPYFDGRVVCYPNLKTIRDYLAWRQVDCHINNQYNTCFWSLVKSGKTEKEAQQALKGTFSKDKNELLSQQFQINYDDEPAIFRKGSCVYRDKVETMVKTDRCGNPIKRTRLVITNANVDIIGPEFWENHPYILREEKCRYENVMKFDINHRLPPCNWTVVRIDICKFEQFSLIHSFDKPNDEAALRLMNASASLMMESFPDIVFGYGFSNEYSFVFQDKTELYQRQESLILSSCTSRFTLFYMMKWKDFFPNKDLVEPPHFEAELLCYPKQKILCDYLSSRQAECHTTNQYSTCFWMLVKSGKSENEAREILKGTLSKDKNELLFQQFHLNYNNEPAVFRKGSCTYRQKVEESADAEGRENTTRERWDVIVAHADMGTEFWRKHPYILRKLDLLG

SEQ ID NO: 17854 - protein, 1249 aa, Oryza sativa Indica Group
MAARGSEGGEAAAQGKVGLHRLFRYADGVDALLMAAGAAGAAASGAAQPLMNLVFGEVVDAFGSGSRDDVLHRVSKAQVACWMITGERQAARIRGLYLEAVLRQDIAFFEKEMTTGQVVERMSGDTILIQDAIGEKVGKFIQLTATFVGGFVVSFTKGWLLSCVMLSSIPPIIIAGATMSWTISKLSTHGQSKYNEAGNVVEQTIGAIRTVASFNGENRAIALYNKYIHSAYVSAVQESTATGLGFGFIMFMLFCTYGLAAWYGAKLIIDKGYEGGQVVTVWMAFMTGAMSLGEATPCMSAFASGQAAGYRMMQTIERMPAINSSGIDGAVLENIKGDIELRNVYFSYPSRPDQLIFDGFSLHVLNGITMAIVGESGSGKSTVINLVDRFYDPQAGEVLIDGVNIKTLRLRWIREKIGLVSQEPLLFATSIRENIVYGREDATTEEIMAATELANAAKFIENLPNGLDTMVGEHGAQLSGGQKQRIAIARAILKNPKILLLDEATSALDMESERVVQEALNRIMQDKTTIVVAHRLSTIKDADIISVVQHGRVVEQGTHTELLKDLNGAYSQLIQLQGATEELHKSGVYYQRSISTVQSVMSISKSRGRNASFKRSLSRGTSFGSTSVHLTTAAGMIVPESMHTEVPSKVLDDNEEHKKVPLCRLISLNKPEIPVLLLGTAAAVVAGVLFPMLGLLISSSIKSFYEPPHQLKKDARFWTLMYVAAGIVSLISLPMENFLFGVAGGKLVERIRSLSFKRIVHQEVSWFDNPSNASGTIGARLSVDASNIRRLVGDSLALFVRSSVTIIAGFIIAMVANWRLALVATVVLPLGGLQGFFQIKFLEGFSADAKIKYEEATQVAHDAVSSIRTVASFCAENRIMKAYYKKCEAPVRQGIRQGIVSGLGFGISFFVLYSTYALCFYVGAKFMLDGKATFTEIFRVFFALLMATIGVSQTSAMGSDSAKAKASATSIFAMIDRESKIDSSSDDGMVLANVAGELELHHVCFSYPSRPDIQIFRNLSLRIPSGKMVALVGESGCGKSTVIALLERFYDPDSGTVTLDGVDIKNLKVGFLRQQMGLVSQEPVLFNDTVRANIAYGKEGDATEEEIVAAARAANAHQFISALPGGYDTCAGERGVQLSGGQKQRVAIARAILKDPRILLLDEATSALDAESERAVQAALESVMVGRTTVVVAHRLSTIRGADVIAVLKDGEVVATGGHEELMAKKDGVYASLVELRMSSERAGDSKPS

SEQ ID NO: 17855 - protein, 758 aa, Oryza sativa Indica Group
MASSHQEDREEEEEHSHGDDEITAPFLRPSTSRGSPELEEEENSPIEQVALTVPVSDEPETPVLTFRMWVLGTASCAVLSFLNQFFWYRKEPLTITAISAQIAVVPLGRLMAAALPERAFFRGRPWEFTLNPGPFNVKEHVLITIFANSGAGTVYAIHVITAVRVFYGKHISFFVSLLVVLTTQVLGFGWAGIFRRYLVEPAAMWWPSNLVQVSLFRALHEKEARSKGGLTRNQFFLVAFICSFAYYIFPGYLFQMLTSLSWICWVFPHSVLAQQLGSGLSGLGIGAIGLDWSTVSSYLGSPLASPWFATANVAAGFFFIMYIITPIAYWFNFYKAQNFPIFSDGLFTSTGQKYNISSIVDSHFHFDTKAYEKNGPLYLSTFFAVTYGVGFASLTATIVHVLLFHGSEIWQLSKSAFQEKRMDIHTKLMRRYKQVPEWWFVCILIANIAVTIFACEYYIEQLQLPWWGVLLACAIAFFFTLPIGIITATTNQTPGLNIITEYIMGYLYPGRPVANMCFKVYGYISMSQALTFLQDFKLGHYMKIPPRTMFMAQVVGTLIAAFVYIGTAWWLMETIPNICNTELLPSDSPWTCPGDHVFYDASVIWGLISPRRIFGDLGTYSAVNWFFLGGAIAPVLVWFAHKAFPNQNWILLINMPVLIGATGQMPPATAVNYTTWILVGFLSGYVVYRYRRDWWERHNYLLSGALDAGLAFMAVLIYLCLGLENISLNWWGNDLDGCPLASCPTAKGVVVDGCPVYT

SEQ ID NO: 17856 - protein, 1184 aa, Oryza sativa Indica Group
MTLKIALKMISGSEDVEVQTIWIVGAGGLGKTTLAKKVYESSNITSMFPCRAWITVSQSFDVMDLLKDMIKQLLGKESLDNLFTKYKEVKIKENNLTDHLKGWLRNKRYFLVLDDLWSTKAWDCLKPTLWGNNREGSRLVVTTRNRDLAEGSSSPLVYPLQTLHREDATKLLLAKTNKSLCDINKDGMNETFEKILKKCGGLPLAIITIGGLLAAKDVKEWDGLYAQIPSELENNPSFEVMRQVLALSYKYLPSHLKPCFLYLSIFPEDFEIQRKRLVYRWIAEGFIRARDGFNATIKSEYGRKYQELSSPRYHTRYHMISISREEKFVCRIDDKETCLMEENIRHVAFYNSNSSEIAMDLNQVRSLTVFGERPKELTPLLCSPQVRMLRVLDFQGVRFGMTQKEMDHIWSVLHLKYMNIRCDYNLPNSSGYSKIYRIPRSIGKLQDLRVLDISNTCITSLPTEICELRSLNILRCARKEYYEFFDPSKPIQCLFALSCIPVTMALADSDQRHEITAELHMACSTRWFSTCGVRCLPVAAIGKFSLVGRSSYGADDEGMEMIKGDSKQLASMYMKEEMIKGERQLGTHEDRLKDEVIKDGDKISDGNFFKSLQNISSTKEEVCSPGPIERSCMDSSLLNMKAQNKGQDDKLESTRAEMGEVREENERLKTLLSRISHDYRSLQTHFYDVLQQGRAKKLPDSPATDIEEPEFVSLRLGTSTSKCKKEDKSTTSSEVKGSTEDFLKIKGGLSLGLSDCRVDANNSEKVQPDVMTLSPEGSFEDARDDTAETTEQWPPSKMLKNLRSVGAEAEDDIAPQPQVKKARVSVRARCDAPTMNDGCQWRKYGQKIAKGNPCPRAYYRCTVAAGCPVRKQVQRCADDMSILITTYEGTHNHPLSVSATAMASTTSAAASMLISGSSSTSLAAYPAAAASPALAFDASSKPPLIGGRPFFLPTAAAAAITSTPSYPTITLDLTSPAAAATSSHAAFSLSNRFSHTRYPSTGFTFSGSGPSSAPWPGYLSYGASLSAHPYNAGGGKSSSSFEAALSSINGSRQQGGGGGGGSAPPLYQMQQKAAAAAPPPPSVITDTIAKAITADPSFHTALAAAITSYVGKKGSPPASGGEDSKVGLKWGEHLGLGLTHSSLSTAAAAAASSSSQMFLQPSLGLSGSTTSASTSPVANREQAH

SEQ ID NO: 17857 - protein, 878 aa, Oryza sativa Indica Group
MGDRPDMGAGVALRFSHNDWTLEEDSKALHFLQPDLVLFTGDYGNENVQLVKSISDLQLPKAAILGNHDCWHTYQFSEKKVDRVQLQLESLGEQHVGYKCLDFPTIKLSVVGGRPFSCGGNRIFRPKLLSKWYGVNDMAESAKRIYDAATNAPKEHAVILLAHNGPTGLGSRMEDICGRDWVAGGGDHGDPDLEQAISDLQRETGVSIPLVVFGHMHKSLAYGRGLRKMIAFGANRTIYLNGAVVPRVNHAQSSRQPAISTSEKTGLEGLTGLMVPTSRAFTIVDLFEGAVEKISEVWVTVGDARTELEQELVLYKQPHKSVPSNIAIWSTMGWLTKFFRGSTHKISEGQYHSKPAEETIWNGPSNSAVVTMVYPLESTFGQLDLLLLATDLRQLVIDDVDCCKLRQQAQPVLHLMYSQLQLLQTSHAHQHGDVPSEFDNEDIARAISLSLLEEEQRKAKAIEKDMHLEEDEQLARAIQESLNVESPPRARENGNANGGNMYQPLPFMFSSGFRTCAGCHSEIGHGRFLSCMGAVWHPECFRCHACNQPIYDYEFSMSGNHPYHKTCYKERFHPKCDVCKQFIPTNMNGLIEYRAHPFWLQKYCPSHEVDGTPRCCSCERMEPRESRYVLLDDGRKLCLECLDSAVMDTSECQPLYLEIQEFYEGLNMKVEQQVPLLLVERQALNEAMEGEKTGHHHLPETRGLCLSEEQTVSTILRRPRMAGNKVMEMITEPYRLTRRCEVTAILILYGLPRLLTGSILAHEMMHAWLRLKGYRTLSPDVEEGICQVLAHMWIESEIIAGSGSNGASTSSSSSASTSSKKGGRSQFERKLGDFFKHQIESDTSMAYGDGFRAGNRAVLQYGLKRTLEHIRLTGTFPF

SEQ ID NO: 17858 - protein, 410 aa, Oryza sativa Indica Group
MSLFARINEDGKLTLVNHLGIDLGVTPEQILSKLDDDRVKDEDVQHDGRHAHDHDYITRVRDIEADTPARYNADPDRLFESSGCAGKLAVFAVRLDTFPAEKKQQVFYIGTNQPEVLTEIRRHILGEFTHLPVAGEYMHRDIYDIAERYGKDTFLMIDKLGTDKMPFFFTMKGRTDAMLEKVSLFKPHFTDRFMQKLGNVFPAHLPERMKTWRDKYEHHLLLKMAGDGIAEAQAWLTDFFKTAEGDFFACTPEEGSKAFLHRFAAAGAAIRYQAVHSDEVEDILALDIALRRNDTEWFEHLPPEIDSKLVHKLYYGHFMCYVFHQDYIVKKGVDAHELKEQMLALLHERGAQYPAEHNVGHLYKAPDALKQFYRENDPTNSMNPGIGKTTRKKYWKESPDAEQHSTQASD

SEQ ID NO: 17859 - protein, 930 aa, Oryza sativa Indica Group
MTPAPAAASYRALVALLLVAVAVADDGSTLLEIKKSFRNVDNVLYDWAGGDYCSWRGVLCDNVTFAVAALNLSGLNLGGEISPAVGRLKGIVSIDLKSNGLSGQIPDEIGDCSSLKTLDLSFNSLDGDIPFSVSKLKHIESLILKNNQLIGVIPSTLSQLPNLKILDLAQNKLSGEIPRLIYWNEVLQYLGLRGNNLEGSISPDICQLTGLWYLDLSYNKLSGSIPFNIGFLQVATLSLQGNMFTGPIPSVIGLMQALAVLDLSYNQLSGPIPSILGNLTYTEKLYMQGNKLTGPIPPELGNMSTLHYLELNDNQLSGFIPPEFGKLTGLFDLNLANNNFEGPIPDNISSCVNLNSFNAYGNRLNGTIPPSLHKLESMTYLNLSSNFLSGSIPIELSRINNLDTFNLSNNGLVGFIPAEIGNLRSIMEIDMSNNHLGGLIPQELGMLQNLMLLNLKNNNITGDVSSLMNCFSLNILNVSYNNLAGVVPTDNNFSRFSPDSFLGNPGLCGYWLGSSCRSSGHQQKPLISKAAILGIAVGGLVILLMILVAVCRPHSPPVFKDVSVSKPVSNVPPKLVILHMNLSLLVYEDIMTMTENLSEKYIIGYGASSTVYKCVSKNRKPVAVKKLYAHYPQSFKEFETELETVGSIKHRNLVSLQGYSLSPVGNLLFYDYMENGSLWDVLHEGPTKKKKLDWETRLRIALGAAQGLAYLHHDCSPRIIHRDVKSKNILLDKDYEAHLTDFGIAKSLCVSKTHTSTYVMGTIGYIDPEYARTSRLNEKSDVYSYGIVLLELLTGKKPVDNECNLHHLILSKTANNAVMETVDPDIADTCKDLGEVKKVFQLALLCTKRQPSDRPTMHEVVRVLDCLVRPDPPPKSAQQLAMPQRPAVPSYINEYVSLRGTSVLSCANSSCTSDAELFLKFGEVISQNTE

SEQ ID NO: 17860 - protein, 1863 aa, Oryza sativa Indica Group
MAAAAWGGTTQKCDSCGRTVYPVEELAADGRVYHRPCFRCTHCKTTLQFSNYSSVEGVLYCKPHYDQILKSTGSLEKSFEGTSKSAKAEKSNGNKGQPNRFSSMFVGTQDKCVVCNKTVYPLEKVNLNGSSYHKSCFRCTHGGCTLSPSNNVTHEGKLYCKTHHSQLFMVKGNFSNFEDNTPNAKVDIEKQPEHEDATKNPGGPGQGDGLTEKPLESELTPEKPSQDDIVAEKQSQSSIDVPKQSESTTTVQRSEEGERVSKGESNSHVVNKKPLESIVEKPLQSSAVNLQPSGSSAAVRKPWQRNLPTDKPLLSNTTAEKSTPSSAAIEESLPSNGVDAKQPESSTSSTVVKRPWQRRVASENLPQSISPSDKPSSASADDAKPSESSKLIRKPWQRAVAAEAQIQNSGPTEKPSFTNDTKPSESTTSIKRPWERKVVNEKPLQNNIDTEKPLQNNTDTEKSSSSAIDVKLAETSTTPTVPQEHSGITEKPSQTSADDVKPSESTAAVVKKQWQRNIGFQKQPQSSVTDAKTPESRGIGKRLWQRNVPTEKQSQSGASVVTPSQVSVADTNPLQSSVVVKKPWQRSVSREKEPEKDISSNKPLQNRVLAEEAQKTNVTADNKSQIIQDKKNNGATAENASQISESSKILPRTANKLQADTSTEKLSESDILALASSHITEPSKKPSENTAENEKPSQTDIATEKLPLTQSVEAMSEPSPSDAAHQEISEREILTEKLPESAMAVEKLSQTATLTEKPSKKDAAEKLPQTNEPSEQPQESEETAEKPLQNEANAESTTKQSDLCLEKPPQVDANVGNPTEPESDATSGVNSSDAQIRPTAEQLVEPQGIVSAEKTSDQILEANTDPAADQSSESQDVAPAKVATEQPLENQKAAASEQPLEPQHEAYEENPQEHNSDATAKESSEPERDTASDQLAEQPSESRTAGEKATLRESDVVTEDPAEPQIDVASERSAEVLSESQTGVETPVLHQSDRTNEVPSEPQTDEASDKSTEQPLEPENDASVEDEKPPQDDSASVEPSENTITLEKVPEEDEGSVKPSEDNAALEKTLEDDEASAKLPEDSVTLEKPSEEDDAGTKQSEDAVTLEKEPEEDKGSVEPTQDNAGLEKPLEEDEASAKPSEDSVALDKLSVEDDDSAKPSEDSMDLEKPEAHKPSEEEEDSAAKSSPEDAAVEEAPLQVSEEGRRREFSMAPKRKPPARAAAAAKSDPDGMFRGVSAFVVWKQRLAQMGGRVVQEKLAAKGGGGAVTHVLAADAKALLRELDAAWLHRFRGSVVSFEWLEECLKSGERLPEHKFAINYEEEFKPKKEGGAAGSGVLQSAKRSKISSDGPESRKETAGGNRESRDAIAHPNEDSDVVKGPNTYTSSQSASGDSKETIASQNAFKAESVVSFEWLEECLKSGERLPEHKFAINYEEEFKPKKEGGAAGSGVLQSAKRSKISSDGPESRKETAGGNRESRDAIAHPNEDSDVVKGPNTYTSSQSASGDSKETIASQNAFKAEEASSGESSTYAPPDLNRNITEIFGKLINIYRALGDDRRSFSYYKAIPVIEKLPFKIESADQVKDLPAIGKSLKDHINEIVNTGKLSKLEHFENDEKVRTVSLFGEVWGVGPATALKLYDKGHRTLDDLQKDDSLTSAQRIGLKFFDDIKQRIPRHEVSEMEKLLQEVGTDILPGVIIVCGGSYRRGKSSCGDMDIIITHPDGESHVGFLPKFVQRLKDINFLREDLIFSIHSIEGTDCGVDTYFGLCTYPGRELRHRIDLKVYPRNRHAFGLLAWTGNDVLNRRLRILADSKGYILDDTGLYLATPGSGGKRGGRSDAIINCDTEKDVFDTLGFPWLEPHERNL

SEQ ID NO: 17861 - protein, 1376 aa, Oryza sativa Indica Group
MASGKVVSFVGADELGVSLAASFVRSGVIVRCFVAPGGDGSATALAELGGVRCASPAEAARDAELVIVLSDTDGVDELFFGPEGIVKGLCSGAVVLIRSTMLPSHLEKLNQKLADEKKNALLDGYIFSGLSDELKQKIVVVASGRHDVTERTGQFFSGLDTAVYFVEGEFGSSSKIKLVNDLLESIHFIASIEAMFLGVRAGIHPSIIYDIISNAAGSSRIFVEIVPKLLREDSLLIDYLESSKTNAGYVMDMAKAVIFPLPLVAVSYQQLIHGCSSANGDALVSPLKVWEQSFGVNIIDAASQQIYDASKLADQLVMACKTAKTIGFIGLGAMGFGMASHLLKSGFSVIAYDVYKPTLARFTDLGGLTKDSPEEVSKDVEILVIMVANEVQAENVLYGNAGAVSVMAAGTSIILSSTVSPGFVIKLKERLEAECRDIKLVDAPVSGGVKRAAEGTLTIIASGTDEALQCTGSVLSALSEKLYVIKGGCGAASSVKMVNQLLAGVHIASAAEAMAFGARLNLRTRRLFEIIQHARGYSWMFGNRVPHMLDNDYTPYSAVDIFVKDLGIVSHESSNARIPLHVSSIAHQLFLSGSASGWGRFDDAAVVKVYETLTGLKVEGRPPMLNKEDVLSSLPAEWPEDPMDDLVSSASHNSKKILVVLDDDPTGTQTVHDIEVLTEWPVEALSEQFQKLPACFFILTNSRSMTAEKATLLVKDICRNLEAAAKSVPGVSYTVVLRGDSTLRGHFPEEADAVVSVLGEMDAWIICPFFLQGGRYTIDDIHYVADSDRLIPAGETEFAKDAAFGYKSSNLRQWVEEKTKGRISENQVSTISVNLLRKEGPNAVCQHLCSLKKGSACIVNAASERDMSVFAAGMIQAELKGKRFLCRTAASFVSARIAIKPKPPIRPTDLGLKRALTGGLIVVGSYVPKTTKQVDELRSLCEQSLRIIEVSVEMISMKSAEDRDHEISRVIELGNAYIQSRKDTLVVTSRQLITGKTPEESLEINYKVSSALVEIVRGIGSRPRYILAKGGITSSDLATKALEARRAKVMGQALAGVPLWQLGPESRHPGVPYIVFPGNVGDNSALAKVVQNWACPSRSSAKELLLNAENGGYAIGAFNVYNLEGIDAVVSAAEAEKSPAILQVHPSALKQGGVPLVSCCIAAAEHASVPITVHYDHGTSKSDLLQALEMGFDSIMVDGSHLPLGKNILYTRSISSLAHSKGMLVEAELGRLSGTEDGLTVEEYEARFTDVAQALEFIDETGIDSLAVCIGNVHGKYPPSGPNLRFDLLEDLRALTMKKGVSLVLHGASGLPHELVKECVALGVRKFNVNTEVRNSYLESLKRPEKDLIHVMASAKEAMKAVVAEKMRLFGSSGKA

SEQ ID NO: 17862 - protein, 625 aa, Oryza sativa Indica Group
MAATIPASPATLQPCKKNVSGSMLIRSPPRTWRRRLPQHVVIADASSSSRGPKAATGGRLETSTDAAAVAGEDGDVIRRLQNGPDVRGVALEGENGRAVDLTPLAVEVIAESFGEWLREELQQLESGRDGGEVRVSVGRDPRLSGARLGAALFAGLARAGCSVFDVGLATTPACFMSTKLPRFSYDASIMMTASHLPYTRNGLKLFMKRGGLTSGEVEGVCDRAARKYVARKMGLGGGRGMPPVVMRVDLMSAYAQHLRNIIKERVAHPTHYDTPLKGFKVIVNAGNGCGGFFTWDVLEKLGADTTGSLHLEPDGKFPHHMPNPEDTTAMSLTRDAVLDHGADLGVVFDTDVDRSGVVDATGAAINGDRLIALMSAIVLDEHPGTTVVTDARTSDGLTRFIQARGGHHCLYRVGYRNVIDKGVQLNADGVETHLMMETTGHGALKENNFLDDGAYIVVKIIIEMVRMRLVGLEGSVGTLIMDLEEPAESKLMRMNILGEAKYAKQRGTQAVETFRNHIQEGKLNGWVLDDCGDCSVSQGCLVDTNDDPFDVDAYMYRAKFFDEYKGELGWVHIRQSVHNPNIAINMQSSIPGGCKSMAKDLLDRYLLTSGVNEFVDITEVQKFVK

SEQ ID NO: 17863 - protein, 376 aa, Oryza sativa Indica Group
MAMWRAAAGHLLGRALGSRAAHTSAGSKKIVGVFYKGGEYADKNPNFVGCVEGALGIREWLESKGHHYIVTDDKEGLNSELEKHIEDMHVLITTPFHPAYVSAERIKKAKNLELLLTAGIGSDHIDLPAAAAAGLTVAEVTGSNTVSVAEDELMRILILLRNFLPGYQQVVQGEWNVAGIAYRAYDLEGKTVGTVGAGRIGRLLLQRLKPFNCNLLYHDRLKIDPELEKEIGAKYEEDLDAMLPKCDVIVINTPLTEKTRGMFNKERIAKMKKGVIIVNNARGAIMDTQAVADACSSGQVAGYGGDVWFPQPAPKDHPWRYMPNHAMTPHISGTTIDAQLRYAAGVKDMLDRYFKGEDFPVQNYIVKEGQLASQYQ

SEQ ID NO: 17864 - protein, 474 aa, Oryza sativa Indica Group
MGGGTNGNGGGAASAMDVYLPRTQGDVDDDGKERRTGTVWTATAHIITAVIGSGVLSLAWAMAQLGWVAGPITLLLFAAITFYTCGLLSDCYRVGDPATGKRNYTYTDAVKSYLGGWHVWFCGFCQYVNMFGTGIGYTITASISAAAINKSNCYHWRGHGTDCSQNTSAYIIGFGVLQALFCQLPNFHQLWWLSIIAAVMSFSYAAIAVGLSLAQTIMDPLGRTTLTGTVVGVDVDATQKVWLTFQALGNVAFAYSYAIILIEIQDTLRSPPPENATMRRATAAGISTTTGFYLLCGCLGYSAFGNAAPGNILTGFGFYEPYWLVDVANACIVVHLVGGFQVFCQPLFAAVEGGVARRCPGLLGGGAGRASGVNVFRLVWRTAFVAVITLLAILMPFFNSILGILGSIAFWPLTVFFPVEMYIRQRQLPRFSAKWVALQSLSLVCFLVTVAACAASIQGVLDSLKTYVPFKTRS

SEQ ID NO: 17865 - protein, 615 aa, Oryza sativa Indica Group
MSTSSNPSYHQLGLDAISCCFVAGGGGAEAAAPFFGFGFGDVDGEFLVASPVAAVGDELACAVPLRRPQGSVSEEEVNAAAVAAAAAGGAESCSTVHSVLGSVEFGCGTSSGVTIAQASRMGRLAGEAPCGDAGGGGWIYGGSGIAPLHGAYYLSGFSSGAGAGFLSPFAASSVAAAAPAASELSLRLGATKCSSPSSMANASSEVSCSGLTHVSSGGGLGYHQAAAAGAGAALFHPTHGDDAAAAAAGELRQAYHSRAPPHFSQVVSRSAVLAHVAQELLNGFVACLLQDVAADAASGVDGGEASQALSSGFSARITTAPTEDASPGSGGARWAAEAQRLRKLLQLVDEKCNQCVEEMQSTAARFNSMVRSTGGGGGGLTAAFAGRAVAAAYRRVRRRVMGQLVAAATARSSSSAAAAALEEKERSWESSFIQKHWAMQQLRRGDQQSWRPQRGLPEKSVAVLKAWMFENFLRPYPKDSEKDMLAARSGLSRSQVSNWFINARVRLWKPMIEDMYEELKKTSGGSDGAAEIEHLSSKDVLSLERSKKPSHLAVQCDGKHHDRFAVTQMEGVFEEKGIEEIGKIRKTRSHACMCMDVDSSGYTRNKGWIGTPFIS

SEQ ID NO: 17866 - protein, 193 aa, Oryza sativa Indica Group
MQRDHPRSSPPAAASSSERSSDSAPNTDDGKEGTHTLDLSSSWVDSDDEEIVGRVPEFGLALPGTSTSGRGSVRVARDAAVTAAGTSSSSPAAQAGVAGSSSSGRRRGRSPADKEHRRLKRLLRNRVSAQQARERKKAYMSELEARVKDLERSNSELEERLSTLQNENQMLRQVLKNTTANRRGPDSSAGGDS

SEQ ID NO: 17867 - protein, 447 aa, Oryza sativa Indica Group
MAAGRKKRVGRYEVGRTIGQGTFAKVKFAVDADTGAAVAMKVLDKDTILNHRMLHQIKREISIMKIVRHPNIVRLNEVLAGKTKIYIILELITGGELFDKIARQGKLRENEARKYFQQLIDAIDYCHSKGVYHRDLKPENLLLDSRGNLKVSDFGLSTLAQKGVGLLHTTCGTPNYVAPEVLSNNGYDGSAADVWSCGVILYVLMAGYLPFEEDDLPTLYDKITAGQFSCPYWFSPGATSLIHRILDPNPKTRITIEQIREDTWFKKTYVAIKRGEDENVDLDDVQAVFDNIEDKYVSEQVTHNDGGPLVMNAFEMITLSQGLDLSALFDRQQEFVKRQTRFVSRKPAKTIVATIEVVAETMGLKVHSQNYKLRLEGVSSNRMSPFAVVLQVFEVAPSLFMVDVRKVAGDTLEYHRFYKNLCNKMESIIWRPIEVSAKSALLRTATC

SEQ ID NO: 17868 - protein, 289 aa, Oryza sativa Indica Group
MSGADVDKVQNLIHCCLQLYMDKKEVVDALSREAKIEPSVTQHVWQKLEENNREFFKAYYLRLMLKNQITAFNKLLEDQLRIINKDYHPGPSSMPLPNGSNSNLLKQNPCFLSESTPMPAMPDDVMCNGNSSGIVDCTQSSDQLIYAGKDIQGLHSSMDASNLLPVQNANSVLFGVENGTTIKTESGYSSNGNFGFCGNAFLESCQSIGDASGGSFSSSELNGQPLDDSILDIESSSFGFLSQLPRNFFSDLPEDFSQSTEILDNYGKSPFLPSEQNNFSDSTGGEHTG

SEQ ID NO: 17869 - protein, 196 aa, Oryza sativa Indica Group
MSRSSLAMALLLAAFAAAATAKGGAAPAASDFIRKSCRATQYPAVCVQSLASYGGAGAPPPRSPRELARAALSVSVDKARSASTYVGHICGRGGAVGAGPVRDCLENMADSVGHLRDAAQELGGNMGHAGSPGFKWHLSNVQTWCSAALTDENTCLDGLSRGVDAATRSAIRGKIVEVAQVTSNALALVNRVAPAN

SEQ ID NO: 17870 - protein, 485 aa, Oryza sativa Indica Group
MERPQEKVATTTTAAFNLAESGYADRPDLDDDGREKRTGTLVTASAHIITAVIGSGVLSLAWAIAQLGWVIGPAVLVAFSVITWFCSSLLADCYRSPDPVHGKRNYTYGQAVRANLGVAKYRLCSVAQYVNLVGVTIGYTITTAISMGAIKRSNCFHRNGHDAACLASDTTNMIIFAGIQILLSQLPNFHKIWWLSIVAAVMSLAYSTIGLGLSIAKIAGGAHPEATLTGVTVGVDVSASEKIWRTFQSLGDIAFAYSYSNVLIEIQDTLRSSPAENEVMKKASFIGVSTTTTFYMLCGVLGYAAFGNRAPGNFLTGFGFYEPFWLVDVGNVCIVVHLVGAYQVFCQPIYQFAEAWARSRWPDSAFVNGERVLRLPLGAGDFPVSALRLVWRTAYVVLTAVAAMAFPFFNDFLGLIGAVSFWPLTVYFPVQMYMSQAKVRRFSPTWTWMNVLSLACLVVSLLAAAGSIQGLIKSVAHYKPFSVSS

SEQ ID NO: 17871 - protein, 301 aa, Oryza sativa Indica Group
MPEGVSSYRKSHLSIPNHAFVAAAGCRRRPLPRWAPTTAARRRSCGRAGTSRRSAGTGRPSRSTSPRTARRSSSAAACGAHVLEFLRYLDRFGKTRVHEPPCPSYGGRSPSAAGPVAAAAAACQCPLRQAWGSLDALVGRLRAAYDERHGRAGEPDAVAGAGAVATDSTSSSSAAAANPFAARAVRLYLRDVRDAQAMARGISYHKKKKRRGGNMNGARGGGGGGARAGVNDGDATAPPVAVTPGLPLPPLPPCLNGVPFEYCDFGSVLGGAHGAHGGHGGGGGGFYGAGVYLPFLYNTFS

SEQ ID NO: 17872 - protein, 92 aa, Oryza sativa Indica Group
MEYKLIFVSLLTRSGNNKDDLRLPTYDNLLGQIKTGFGEGKDVVVTVMSAMGRSRSDFTDKGLMPVFEDRTSPTKEIEISILLMALRAVSIH

SEQ ID NO: 17873 - protein, 451 aa, Oryza sativa Indica Group
MGKAAAMEVSASAAAEAGMMVGHGEWRDDDGRARRTGTAWTASAHIITAVIGSGVLSLAWAIAQLGWVAGPAVMLLFAFVIYYTSTLLAECYRSGDPCTGKRNYTYMDAVRANLGGAKVRLCGVIQYANLFGVAIGYTIAASISMLAIKRADCFHEKGHKNPCRSSSNPYMILFGVVQIVFSQIPDFDQIWWLSIVAAIMSFTYSTIGLSLGIAQTVANGGFMGSLTGISVGAGVTSMQKDTIKAPPPSEAKVMKRATMVSVATTTVFYMLCGCMGYAAFGDRSPDNLLTGFGFYEPFWLLDVANAAIVVHLVGAYQVFVQPIFAFVERWAAARWPDGGFISRELRVGPFSLSVFRLTWRTAFVCATTVVSMLLPFFGDVVGLLGAVSFWPLTVYFPVEMYIAQRGVRRGSARWLCLKVLSAACLVVSVVAAAGSIADVVDALKVYRPFSG

SEQ ID NO: 17874 - protein, 839 aa, Oryza sativa Indica Group
MGAITSAELNFLIFRYLQESGFIHAAFTLGYEAGIHKGGIDGNLVPPGALITIVQKGLQYIELEANTDENDEDLAKDFALLEPLEIITKNVEELQQIVKKRKREKTQSDRDKDKGKEKERMEEHERRPGGERERERHDQEKELEKEKDRAERDRDQDKEKEKLHTERIDKVKAEEDSLAGGGPTPMDVSTTAHEISSADVTVLEGHSSEVFACAWSPAGSLLASGWGGFHAGFSWKPNVSKRVQFPCMSGWSGDSTARIWTIPDGPCGSITQSSPPGVHVLKHFKGRTNEKSKDVTTLDWNGEGTLLATGSYDGQARIWNSDGELKQTLFKHKGPIFSLKWNKKGDFLLSGSVDKTAIVWDTKTWECKQQFEFHSAPTLDVDWRNNNSFATCSTDNMIYVCKIGDQRPVKSFSGHQSEVNAIKWDPTGSLLASCSDDWTAKKPPLPNNRFWNPGPLDKLQDTMVDVLASISLLASKIDMVDLSRSVAVATSRITALEQFQVASSTSTSNNAPWLPTRQPTPATIELWRTAGLQHGDDGGNVPRFYKLEFPKFDGKDDSLKTIASSSSRAKRPTTVTVSGWQLTISSVRRKTGTSTTSSSRDRRIGTRSRSSVMVNSVLPYAIILSGLRFVVANGDRLVSPGLCRNLTLNIDDEAFSVDCFALDLCAVDIILGMQWLQTLGPILWDFKNMRMAIWRSTRKIWSMKQDKCVYDFKEHTKEIYTIRWSPTGPGTNNPNQQLLLASASFDSTIKLWEVEQGRLLYSLAGHRQPVYSVAFSPGGEYLASGSLDQCLHIWSVKEGRILKTYRGSGGIFEVCWNKEGSKIAACFSNNTVCLMDFRM

SEQ ID NO: 17875 - protein, 628 aa, Oryza sativa Indica Group
MATPAPDVSAIGAALRSPAATVGEADVEKLRLIEELTSDVDAVQERVLSEILGRNAGAEYLTRCGLDAGDTGRATFRAKVPVVSYDDLKPYIQRVADGDCSPVLSTHPITEFLTSTGTSAGECKLIPVAMDDSGRRQALHGLIGPVLKLYVPGLEKGKGLNFMFVKSETKTRGGLTAWFALTSVYKSKQFKSMANAYTSPTAAILCEDAFQSMYAQMVCGLCQRHDVVRVGAVFAAALVRAIRFLQLNWGQLAADIEAGELGPHVADPSVREAVSGILRPDAELAEFVRIECSKGDWAGIITRIWPNTKYVDAIVTGAMAQYIRTLQYYSGGLPIVSTSYASSECFFGINLRPMCDPSEVSYTIMPNMAYFEFLPVGEVVDATNLVDLARVEVGREYEVVITTYAGLSRYRVGDVLRVTGFHNVAPQFRFVRRQSVLLSIEADKTDEAELHRAVERASSALLRPRGVSVADYTSRACTERIPGHYVVYWELLTESPVGAGDGETVDGETLGRCCLEMEEALSAVYRQGRVADGSIGPLEIRVVRPGTFEEVMDLAVSRGTSIGQYKATTRQVDIDCIHGTTTSKRAAGKDKAAMPECHASPPPANYFKNKADYNAAAASASAGAINYK

SEQ ID NO: 17876 - protein, 173 aa, Oryza sativa Indica Group
MAWFEREGLAKIAMSDSEEHHFESKADAGASKTYPQQAGTIRKNGYIVIKNRPCKVVEVSTSKTGKHGHAKCHFVAIDIFNGKKLEDIVPSSHNCDVPHVNRTEYQLIDISEDGFVSLLTESGNTKDDLRLPTDDSLLGQIKTGFGEGKDLVVTVMSAMGEEQICALKDIGPK

SEQ ID NO: 17877 - protein, 297 aa, Oryza sativa Indica Group
MEDHRSHTTPNYDFFSGDYQMKQLGHKMYDQDSPSSDSGQSHQEESAMNDSSPNERHTSTQSDNNDGHQMPDQDKTKSVSSLGNPGALPPKLDYSQSFACIPYTADAYYGGVLTGYSSHAIVHPQQNGTANSRVPLPVEPAAEEPIFVNAKQYHAILRRRQIRAKLEAQNKLVKGRKPYLHESRHRHAMKRARGSGGRFLNTKQLEEQKQQQEEEAASGGASSGNRTCLQNGTGSAPSASSPSEIASVSTSREFLGNHEQSHFPSAGFLPTMSFRAQNGGDGKLVANAIHQRVSMMR

SEQ ID NO: 17878 - protein, 265 aa, Oryza sativa Indica Group
MVPRDRVNAAAAGGGGEGRLVQSGIVNKKCDKKAPKRIHKSEREKLKRDKQNDLFNELGNLLEPDRQNNGKACVLGETTRILKDLLSQVESLRKENSSLKNESHYVALERNELHDDNSMLRTEILELQNELRTRMEGNPVWSHVNTRPALRVPYPTTGVFPVQHLPHLPVTTTAAFPQQQPVIIEQHYAATPRELQLFPESASSEDSEPSQEHGISDHVTRPQARYPTPTATLPVNLFPVFPGRQDQQCSSGTSGTNEEDRIGRS

SEQ ID NO: 17879 - protein, 1615 aa, Oryza sativa Indica Group
MATLPRASAAAAPSPAAALLPLPRAAPLLAGRAAARSAARRLRARGTRAPPLAAARRGWGGVSPRAVLDLPRRREAAEKPAQKAADLNEILSERGACGVGFVANLKNEPSFNIVRDALVALGCMEHRGGCGADNDSGDGSGLMSGIPWDLFNDWANKQGLAPLDRTNTGVGMVFLPQDENSMEEAKAVVAKVFTDEGLEVLGWRTVPFNVSVVGRYAKETMPNIQQIFVKVAKEDNADDIERELYICRKLIERATKSASWADELYFCSLSSRTIVYKGMLRSEILGQFYLDLQNELYKSPFAIYHRRYSTNTSPRWPLAQPMRLLGHNGEINTIQGNLNWMRSREATLQSPVWRGREHEIRPFGDPKASDSANLDSTAELLLRSGRSPAEAMMILVPEAYKNHPTLSIKYPEVIDFYDYYKGQMEAWDGPALLLFSDGRTVGACLDRNGLRPARYWRTSDDFVYVASEVGVIPMDESKVVMKGRLGPGMMITVDLQTGQVLENTEVKKSVASANPYGSWLQQSTRSIKPVNFQSSVAMDNETVLRHQQAFGYSSEDVQMVIETMASQGKEPTFCMGDDIPLAVLSQKPHMLFDYFKQRFAQVTNPAIDPLREGLVMSLEVNIGKRRNILEVGPENADQVTLSSPVLNEGELESLLNDSKLKPKVLSTYFDIRKGLDGSLDKAIKVLCDEADAAVRNGSQLLVLSDRSEALEPTRPAIPILLAVGAIHQHLIQNGLRMSASIVADTAQCFSTHQFACLIGYGASAVCPYLALETCRQWRLSNKTVNLMRNGKMPTVTIEQAQRNFIKAVKSGLLKILSKMGISLLSSYCGAQIFEIYGLGQEVVDLAFCGSVSKIGGLTLDELGRETLSFWVKAFSEDTAKRLENFGFIQSRPGGEYHANNPEMSKLLHKAVREKSDNAYTVYQQHLASRPVNVLRDLLELKSDRAPIPIGKVEPATSIVERFCTGGMSLGAISRETHEAIAIAMNRIGGKSNSGEGGEDPIRWSPLADVEDGYSPTLPHLKGLQNGDTATSAIKQVASGRFGVTPTFLVNAEQIEIKIAQGAKPGEGGQLPGKKVSAYIARLRNSKPGVPLISPPPHHDIYSIEDLAQLIYDLHQINPKAKVSVKLVAEAGIGTVASGVSKGNADIIQISGHDGGTGASPISSIKHAGGPWELGLSETHQTLIQNGLRERVVLRVDGGFRSGLDVLMAAAMGADEYGFGSVAMIATGCVMARICHTNNCPVGVASQREELRARFPGVPGDLVNYFLFVAEEVRATLAQLGFEKLDDIIGRTDLLKAKHVSLVKTQHIDLKYLLSSAGLPKWSSSQIRSQDVHSNGPVLDETILADPDISDAIENEKEVSKTFPIYNVDRAVCGRVAGVIAKKYGDTGFAGQLNITFTGSAGQSFGCFLTPGMNIRLIGEANDYVGKGMAGGELVVVPVEKTGFVPEDAAIVGNTCLYGATGGQVFVRGKTGERFAVRNSLGQAVVEGTGDHCCEYMTGGCVVVLGKVGRNVAAGMTGGLAYILDEDDTLVPKVNKEIVKMQRVNAPAGQMQLKGLIEAYVEKTGSEKGATILREWEAYLPLFWQLVPPSEEDSPEACAEFERVLAKQATTVQSAK

SEQ ID NO: 17880 - protein, 318 aa, Oryza sativa Indica Group
MASCLSVLLLLCLALAGSVSGQQLSATFYSRSCPRALAIIRAGVRAAVAQEPRMGASLLRLHFHDCFVQGCDASVLLNDTANFTGEQGANPNVGSIRGFNVVDNIKAQVEAACKQTVSCADILAVAARDSVVALGGPSWRVLLGRRDSTTASLALANSDLPPPSFDVANLTAAFAAKGLSQADMVALSGAHTVGQAQCQNFRDRLYNETNIDAAFAAALKASCPRPTGSGDGNLAPLDTTTPTAFDNAYYTNLLSNKGLLHSDQVLFNGGAVDGQVRSYASGPSRFRRDFAAAMVKMGNIAPLTGTQGQIRLVCSKVN

SEQ ID NO: 17881 - protein, 313 aa, Oryza sativa Indica Group
MASSLSVAVLLCLAAAAAAQLSPTFYDTSCPRALATIKSAVTAAVNNEPRMGASLLRLHFHDCFGCDASVLLADTATFTGEQNALPNKNSLRGFNVVDSIKTQLEGICSQTVSCADILAVAARDSVVALGGPSWTVGLGRRDSTTASMDSANNDLPPPFFDLENLIKAFGDKGFSVTDMVALSGAHTIGQAQCTNFRGRIYNETNIDAGYAASLRANCPPTAGTGDSNLAALDTTTPYSFDTAYYSNLLSNKGLLHSDQVLFNGNSTDNTVRNFASNRAAFSSAFSSAMVKMANLGPLIGSQGQIRLSCSKVN

SEQ ID NO: 17882 - protein, 309 aa, Oryza sativa Indica Group
MAKATCISLLVVVALATAASAQLSATFYDTSCPRAMSIIKSAVTAAVNSEPRMGASLLRLHFHDCFGCDASVLLSGNEQDAPPNKDSLRGYGVIDSIKAQIETVCNQTVSCADILTVAARDSVVALGGPTWTVPLGRRDSTGASAALAISDLPPFTASLQELVDAFAKKGLSVTDMVALSGAHTIGQAQCSTFRGRIYNETNIDSAFATQRQANCPRTSGDMNLAPLDTTTANAFDNAYYTNLLSNKGLLHSDQVLFNNGSTDNTVRNFASNAAAFSSAFATAMVNMGNIAPKTGTNGQIRLSCSKVNS

SEQ ID NO: 17883 - protein, 329 aa, Oryza sativa Indica Group
MERENRVETISRLAQWRIDTFGPSSYRRSDSFKIGIWNWYLSVEKARYVYVRLFPEPGRVAKERPPLARFLLRACWSGPPRRSCVSPVHEHLLRSSEDFFWQLDTMYAGRFTIDVEFLDLKIASNNAAESSTSIWPNESIAVQNIASKSSLGCLSRMLTESIHADVTINTTDGVLKAHKAILASCSPVFESMFLHDLKEKESSTININDMCLESCSALIGFIYGTIKLDQFWKHRLSLLAAANKYSISDIKDCCEESLLEDINSSNVLERLHVAWLYQLQKLKKGCLTYLFVFGKIYDVREEINSFFQHADRELMLEMFQEVITAWKPI

SEQ ID NO: 17884 - protein, 862 aa, Oryza sativa Indica Group
MVSKSYSNLFEMSCGDGVDFRQPFKSLPRVVTSPGIISDPDWDTRIDGDSVGSASSVERKIIVANFLPLNCTKDEAGQWSFSRDDDALLMQLKDGFSNETDVIYVGSLKVQVDPSEQDQVAQKLLRDYRCIPTFLPPDLQQQFYHGFCKQQLWPLFHYMLPICLDKGELFDRSLFQAYVRANKLFADKVMEAINTDDDHVWVHDYHLMLLPTFLRKRLHRIKLGFFLHSPFPSSEIYRSLPVRDEILKSLLNADLIGFQTFDYARHFLSCCSRLLGLHYESKRGYIGIDYFGRTVSLKILSVGVHVGRLESILKLHATVKKVQEIEQRYKGKMLMLGVDDMDIFKGISLKLLGLELLLDRNPKLRGKVVLVQIVNPARSTGKDVEEAITESVSVAERINLKYGSVDYKPVVLIDHSIPFYEKIAFYAASDCCIVNAVRDGMNLVPYEYTVCRQGNEEIDNARGSDTNCHHTSTLIVSEFVGCSPSLSGAFRVNPWSVDDVADALHHATDLTESEKRLRHEKHYRYVRSHSVAYWAHSFAQDLERACKDHYSRRCWAIGFGLNFRVIALSPGFRKLSLEHFASSYNKATRRAIFLDYDGTLVPQSSINKAPSDELITILNSLCDDPKNDVFIVSGRARSLLDEWFAPCQKLGIAAEHGYFVRWNKAAEWESSYPNHDFEWKHIAEPVMQVYTETTDGSSIEPKESALVWHYLDADHDFGSCQAKELLGHLERVLSNEPVVVKCGHYIVEVKPQGVSKGLVVDKVIHRLMNNGKTPDFVVCIGNDQSDEDMFKSIDSMTSSSAFPAVPEVFACSVGQKPSKAKYYVDDVGEVVRLLKNVAGISSHREAVSHGRVTFRDVMDYVD

SEQ ID NO: 17885 - protein, 395 aa, Oryza sativa Indica Group
MAPPPAFSLPTAVLAWGSGEDGQLGMGGYEEEDWARGVAALDALAVSAVVAGSRNSLAICADGRLFTWGWNQRGTLGHPPETKTESSPAPVDALAGVSIVQAAIGGWHCLAVDDKGRAYAWGGNEYGQCGEEAERKEDGTRALRRDIPIPQRCAPKLKVRQVAAGGTHSVVLTQDGHVWTWGQPWPPGDIKQISTPVRVQGLENVKVIAVGAFHNLALTEDGILWAWGNNEYGQLGTGDTQPRSQPIRVEGLSDLSLVDIAAGGWHSTALTKEGEVYAWGRGEHGRLGFGDDKSSHMVPQKVELLAGEDIIQVSCGGTHSVALTRDGRMFSYGRGDHGRLGYGRKVTTGHPMEVPIDLPPPGTSGGDSGGQWQARYVACGGRHTLAIATWTEADE

SEQ ID NO: 17886 - protein, 298 aa, Oryza sativa Indica Group
MSSQQQQQHAGEAPASAAAAARARLRWTGQLHERFVLAVAELGGADRATPKSVLRAMAVPGLTLYHLKSHLQKYRQAVSRGGNGGGGGSGSLNDRSSSSERQPADHDGDSAADEPRTIAYDGDSDGDAKEALRDSSRSMVQMQREVQRKLQEQIEVKRHLQLRMEAQGRYLQSVLRRAQQVLADHSLASSPEAATTELSELASAVDIECMSSSSPPRHHRQSAATDSCVTTTSSSEAESKAAGSKRLHTSDCTVEQPVQGKRTFNFLQRHTQADQEEEQEEEYAGAEDGSSSEIDLNR

SEQ ID NO: 17887 - protein, 461 aa, Oryza sativa Indica Group
MPSGSATQFRYTQTPSKVLHLRNMPWECTEEELVELCKPFGRVVNTMCNVGANRNQAFVEFADQNQAISMVSYYASSSEPAQVRGKTVYIQYSNRQEITNNKGTGDSSGNVLLVTFEGVQPNDISIDVIHLVFSAFGFVHKIATFEKAAGFQALIQYTDAPTALEAKNSLDGRSIPRYLLPEHVPTCHLRITFSAHKDLNIKFQSHRSRDYTNPYLPVNPTAIEGIAQPTLGPDGKIKEPESNVLLASIENMQYAVTVDVLHTVFSAFGTVQKIAMFEKNGGMQALIQYPDITTAAVAKQALEGHCIYDGGYCKLHLSYSRHTDLNVKAHDERSRDYTVSSDPSAQMQAAAQAPGPSTPGVAWQNTAPSASFYGSTAAATPVGQVPAWNPNMQAGAFGSASSAYTTQPMMPGSVPHYPGIGSSSGALPVSFQASHQMPQYGVPPAAPHHAPPAGQPMYFPK

SEQ ID NO: 17888 - protein, 352 aa, Oryza sativa Indica Group
MELGLSLGDAVTVADGGRLELVLGLGVGVGAGVRRGEEEERGRREDVVGAARWAAMAAASPEPSVRLSLVSSLGLHWPSETGRSEAAARGFDVNRAPSVAAGAPGMEDDEEGPGAAPALSSSPNDSGGSFPLDLSGHGLRGHAEAAAQGGGGGGERSSSRASDDDEGASARKKLRLSKEQSAFLEESFKEHSTLNPKQKVALAKQLNLRPRQVEVWFQNRRARTKLKQTEVDCEYLKRCCETLTEENRRLHKELAELRALKTARPFYMHLPATTLSMCPSCERVASNPATASTSAPAAATSPAAAPTAAARTAVASPEPHRPSSFAALFAAPLGFPLTAAQPRPPPPASNCL

SEQ ID NO: 17889 - protein, 415 aa, Oryza sativa Indica Group
MEWDLKMPPAASWELADELENSGGGGVPAAVSSSSAAVGGGVNAGGGGRQECSVDLQLGGLGEFGGGGAQPRVAVAGELAQGKGPAAAATGAAAAASSAPAKRPRGKGLCSPTTSSPFTPLFLRFHLLQEFDEAKRSCRKRLDGHNRRRRKPQPDPMNSASYLASQQGARFSPFATPRPEASWTGMIKTEESPYYTHHQIPLGISSRQQHFVGSTSDGGRRFPFLQEGEISFGNGAGAGGVPMDQAAAAAAASVCQPLLKTVAPPPPPHGGGGSGGGKMFSDGGLTQVLDSDCALSLLSAPANSTAIDVGGGRVVVQPTEHIPIAQPLISGLQFGGGGGSSAWFAARPHHQAATGAAATAVVVSTAGFSCPVVESEQLNTVLSSNDNEMNYNGMFHVGGEGSSDGTSSSLPFSWQ

SEQ ID NO: 17890 - protein, 869 aa, Oryza sativa Indica Group
MAARSCLHLLIVLAVAVAGGLLQAARGQPDSNGFISIDCGLSGKAGYVDNATKLSYSPDAAFTDAGTNNNISAEYLSPANSRIFDNVRSFPAGAAPRSCYTLRSLVPGLKYLVRASFMYGNYDGLRRPPVFDLYAGVNFWRTVNITDAAASITAEAIIVVPEDSMQVCLLNTGAGTPFISSLDLRPLKNSLYPQANATQGLVMVSRVNFGPTDTFIRYPDDPRDRGWRPWIDTMRYVEVSTTKTVQNVEKDLFEAPSAVMQTAITPRNASDSIELYWTADPSAAAGDPPPGYIAIMHFSELQLVQGNAVRAFNISLNDQWLDIGMTPDYLYADASFNTVPFRGSSRYNLTFRATANSTLPPIINALEIFSVIPTTNVPTDGKDVSGITAIKKQYQVKQNWMGDPCVPKTLAWDWLTCSYAISSPPTITGVNLSYNLLTGSIPKALSQLSSLTVLYDNNPDLCINDTCPSPNGKPKLAIYISVPVVAVTVILVLVLFCLLRRKTKGSANNTINPHNEPTSHSHGSGSYGHGSMQFENRRFTYKDLQMITNNFEQVLGKGGFGYVYYGILEEGTQVAVKLRSQSSNQGVKEFLTEAQILTRIHHKNLVSMIGYCKDGEYMALVYEYMSEGTLEEHIAGRDHNKRNLTWTERLRIALESAQGLEYLHKGCSPPVVHRDVKATNILLNTNLEAKIADFGLSKAFNRDSDTHVSTSILVGTPGYIDPEYHATMMPTTKSDVYGFGVVLLELVTGKSPILRTPEPISLIHWAQQRMQCGNIEGVVDARMHGVYDVNSVWKVAEIGLMCTAQASAHRPMMTDVVAKLQECQDLEHGRAGSVAEPSIDHVSKTNTIFEIDRLERIPLPTMSSGPSAR

SEQ ID NO: 17891 - protein, 844 aa, Oryza sativa Indica Group
MPPLPLSLLASTPEADQGEGFLSIDCGLDQDYNTDYLVGGITYVSDGAYVDAGENRRVTTVYKDDWKGPRYQTLYTLRSFPTSVTGERSCYSLPTKKGDKYNVRLEFLYGNYDGLDSASLTFNLTLGVNHWDTVILDTAIHYGYKAYAAVFVAWAMSAPVCLVNTGGGTPFVSTVELRPFESLAYPTDNQSLSLYERKSMRSGADVDIIRFPDDQYDRYWYAWELTGNDPYSNISTQSAIELNTTFMVPLRVLQTAFVPDNKTREFTVSIDSGVQSRPISPPYLKGWSIINWSSDSEDLSIKLVATAASALPPILNAYEVYSRIIHEYPMTFSQDFDAIMAIKHEYGIRKNWMGDPCYPSNSVWDGVECTNPGDDKTMRIISLDLSNSELQGQISYNFTLFSALKYLNLSCNQLTGTIPDYLRKSNGSIVFRLPSGSAFGVAANLRYESDGDMCKKPITSSSRNRAATLAVYVAAPVLVVAMLVVAYLIWRAKRKPHFSTDDSPTVPEQISPPGHWTNHWDHLQKPENRRFTYEELAKFTDSFKCLIGHGGFGNVYYGCLEDNTEVAVKMRSESSSHGLDEFLAEVQSLTKVNHRNLVSLIGYCWEKDHLALVYEYMSSGNLSDYLRGKTSMGGTMNWATRVRVMLEAAQGLDYLHKGCNLPIIHGDVKTNNILLGGNLKAKIADFGLSKTYHSDSQTHISAIAAGSMGYIDPEYYITGRLTESSDVYSFGVVLLEVTSGEPTIIPGNGHIVERVKQKMVTGNISSVADARLGGSYNVNSMWKVLDAAMMCTADIAAQRPMMSAVVMQLKESLELEEAHGDMGDMENIARDNKFSMSMLGPSAR

SEQ ID NO: 17892 - protein, 853 aa, Oryza sativa Indica Group
MDADGFLSIDCGLEGDKNGYTDNSNGIVYTPDGAPYVDTGVTNNVSAQYVNTWDRALNTLRSFPLTLFGERNCYALPTVPGAIYLVRLRFAYGNYDNMNSESVQFSLLLGVNHWDEVYIANEGKDYSSEAMFVAWASWASVCLVNTNQGTPFVNTVELRQLDSMLHFRKIMGNSSIYLYERRNMGPSSRDNPIIRYPNDTYDRFWYPWGSEDDPTYSNLSAPSTLIIPPSPSYAVPSLVLETAVVPADNNKSVLSIIQTNDKEIHEYLVLVHFADFQSTLRRRFQAYSNGDPIEGGPYVADYSGQTVGTVDWISAETSGKYNITLAATDSSQLPPIVNAFEVYGRIPLDNPSTFPKDFDAIMTIKFEYGIKKNWTNDPCFPSNLVWNGVRCSTGSDNTMRIISLDLSNSNLHGSISNNFTLLTALEYLNLSGNQLSGTIPSSLCENNAGSFVFRYVSDEDMCNTAGTPVQSKKRSAILALAVVIPVLVAAILILAYLTWRARRKPNNFVHLDSTYGPEFLNAPGSTKNHWDHMQKTENRRFTYEELEKYTDNFERLIGHGGFGQVYYGCLEENIEVAVKMRSESSQHGLDEFLAEVQSLTKVHHRNLVSLVGYCWENEHLALVYEYMSGGNLCDHLRGKISVGESLNWATRLRILLEAGQGLDYLHKGCNLPIIHGDVKTNNILLGQNLKAKIADFGLSKTYHSDTQTHISATAAGSVGYIDPEYYNTGRLMESSDVYSFGVVLLEVVTGEPPIIPGHGHIVQRVKQKIVTGNISSIADARLDAYNVSSMWKVVDTAMMCTADVAAQRPVMATVVAQLKEGLALEEAHEERVDLENIASDIVSSVSTFGPSPR

SEQ ID NO: 17893 - protein, 872 aa, Oryza sativa Indica Group
MILHKTLTIPKHDTFTKPLTQLPNHHKTLVISPRNIGAIFMIPSSGSSYLDEKTGLNYTSDNGYIYTGENHNISAKYNGQELFKTGLNLRSFPTGGRNCYTLSPTTTGHKYLVRAMFMHGNYNGKGNDLVSSPLVFDVYMGLYFWDRISVNNSAKTYFAEVIVVAKANSISVCLIDIGDGTPFISSLEMRLMKSSLYPAAMANQSIALQERNSMGTNSLLRYPDDIYDRLWWPLKASSGLLNISTNRTIKNYPGNIFEVPARVLQTAVTSTNTSIPISFSWTAPTDWPATAAVPAYFYNTHFTDYQNQRVREFNTYTNGDLSTSDPSRPAYLISDYTYSSSQYNIDTGFYNVCIISTNTSELPPVLSAYETFYLVQHDGTMTSPEDVDAMMTIRTEYQVKKNWMGDPCLPENYRWTGLICQSDGVTSGVISLDLSHSDLQGAVSGKFSLLKSLQHLDLSGNPLISTIPEALCTKRSLTLRYDTTNGDPCNEKSPKKKKTVVLFVAIVVPILMVAVLVSTLLLCYFCRKQAQRPEVPDTASKEEYEDHIHISDGREFTYKELMEMTNNFSVCIGEGGFGPVFHGQLKEGTQVAVKMQSPTSTIGKGTTEFLAEVENLTTVHHRYLVFLVGYCSNKNHLALIYEYMPNGSLYDHIRGKNAIVQTLRWCDRARIALEAAQGLDYLHTGCVLPIVHSDLKSHNILLGHDMVAKISDFGLSKSYLNAAQSHISVTAAGTLGYIDPEYCLSGRLTISSDVFSFGVVLLEIVTGEPPIIPTTVHIVQRVKEKVAAGNIEAIVDPRFGGEYDTNSVWKVVDIALLCTKEASHERPTMSTVVAELKVALALENARASGSISDISQGGANFELSINSLLSAR

SEQ ID NO: 17894 - protein, 447 aa, Oryza sativa Indica Group
MPLNPSSSASFLLSSLRRSLVASLRKASPAAAAALSPMASASTVAAENGAAKAAAEKQQQQPVQVAKRLEKFKTTIFTQMSMLAIKHGAINLGQGFPNFDGPDFVKEAAIQAINAGKNQYARGYGVPELNSAIAERFLKDSGLQIDPEKEVTVTSGCTEAIAATILGLINPGDEVILFAPFYDSYEATLSMAGANVKAITLRPPDFSVPLEELKAAVSKNTRAIMINTPHNPTGKMFTREELEFIATLCKENDVLLFADEVYDKLAFEADHISMASIPGMYERTVTMNSLGKTFSLTGWKIGWAIAPPHLTWGVRQAHSFLTFATCTPMQAAAAAALRAPDSYYEELRRDYGAKKALLVNGLKDAGFIVYPSSGTYFVMVDHTPFGFDNDIEFCEYLIREVGVVAIPPSVFYLNPEDGKNLVRFTFCKDDETLRAAVERMKTKLRKK

SEQ ID NO: 17895 - protein, 492 aa, Oryza sativa Indica Group
MDWDLKMPVSWDLAELEHNAVPNMAAAASAAEPGIAAVAASRGAPGRPECSVDLKLGGLGEFGAADALKEPAAAAKAPVSSAAAAASVAKVPPSTSTLKRPRGGGGGGGGQCPSCAVDGCKGRPEQAPRLPPAAQSVRAALQDARRRRRRPRDALLPAVQQLQNLRVKMEFQHIRFHLLGEFDEAKRSCRKRLDGHNRRRRKPQADSMSSGSFMTSQQGTRFASFTPPRPEPSWPGIIKSEETPYYSHHHHPHPVMTSRQPHFVGSPSSATTAAFSPKEGRRFPFLHEGDQISFGGGGGAAAAATLEISVCQTTVVAPPPPESSSSNKMFSSDGLTMATTTTTTAHHHHHHHQVLDSDCALSLLSSPANSSSVDVSRMVQPSTAAAAGAEHHHHHHHHHHHQIPMAQPLVPNLQQQFGGSSPWFASSPAAAAVAGGGFACPSMDSEQQQQQQLNAVLVPGSNENEMNYHGMFHVGGEGSSDGTSPSLPFSWQ

SEQ ID NO: 17896 - protein, 128 aa, Oryza sativa Indica Group
MGEESPAAGKPSGTALPRRGKSCKGCLYYSSMLRSRGFNPVCVGIPRSIPQGYWLASSTYKVEVGPHLCNLKNGCYCGRRLVEKKSPNNEPATASYRKEEMNIEQQSALVQRHEEERFDWSTRDGVVL

SEQ ID NO: 17897 - protein, 871 aa, Oryza sativa Indica Group
MESPISTPPLIPSMRLCSHQCDSEGNLTCMEEGDPQPSISLARTPSEGAAAAVDLDLLEQLLSADNAWLEVAANTSRSPNFFATPSNCLTDASVATTTPANSWWIQPSGASTSVRERFDQALAYIRETQRDADVLVQLWVPVKGNDGQLVLTTSGQPFTLDQRSNSLIQFREVSTKYQFSADVASGSSPGLPGRVFIGRLPEWSPDVRYFTSYEYPRISHAQYLDVHGTMGLPVFERGNYSCLGVIELIMTKQKLNFTSELNTICSALQAVNLTSTEVSSIPRTKLNSASYKDALPEILEVLRAACITHKLPLAQTWVTCAQQGKRGSRHSDENYKYCISTIDAACYVNEPRMQSFHEACSEHHLLRGQGVAGKAFTTNQPCFLPDIGSSTKLEYPLSHHAKIFNLKGAVAIRLRCTRTGIADFVLEFFLPTDCEVLEEQKAVLDSLSGTMRSVCQTLRVVTDKEMEDEAMREMNELNSFSPRGKNKVEELSFGDNTRGDREEASWTTLVGTSQKGSDLAELHTHGMLSHGGHGSSQAGDQTSKEGSKVKRRTKTEKTVSLQVLRQYFAGSLKDAAKSLGVCPTTLKRICRQHGINRWPSRKIKKVDHSLRKLQQIIDSVHGAETAFQLNTLYKDLTNTSVSSDNNLSGSVTVPLANQNNLDFEMHQHHRLSSNIPSTSLSHSSCSQSSDSSPSCSGGATKHSPQVGADQVRSGCLPQHSPVQTLQTEAASINEHFSGQEAPIDLLQDVAEKANGEQHMSQSPSSPKQTANVGMRVKVTFGSEKVRFRLKPECDFQELKQEISKRLSIADMNSLIVKYLDDDSEWVLMTCDADLHECFHVYKLADIQTIKISVHLAASPTTRITIGHTGFS

SEQ ID NO: 17898 - protein, 319 aa, Cyanothece sp. PCC 8801
MTWRILITCPPMLASIESCQERFKTENLEVVTPEIVQQLSEDELCQIIAEFDGVIAGDDPFTAKVLEIGQKGQLKVLAKWGIGVDAIDLEAAKNLGIYTSNTPNVFGDEVADVALGYTLLLARQLHKIDSAIRQGNWLKIQGTSLRNKVAGIIGVGSIGAAIARRFKVMGMNLLGYDVRTIDPKLCQETQLKQVELHQLFQASDCIVLACNLTPENYHLLDEKAFNQMKNGTWIVNVARGPIIDEKALINALDSGRIAGAALDVFESEPITTENPLVKYEQVIMGSHNSSNTREAVLRVNQIAIDNLVRDLKRASGENQ

SEQ ID NO: 17899 - protein, 373 aa, Cyanothece sp. PCC 8801
MQPKTASLSSSTHTTLTSLFVSPTQVLKGEAILLQAGNAIARLGERPLVVGGQQTLKVISPHLDPIFKKFKLQSAQAPYTPDCSESSLEALETALKQHQGDFIIGVGGGKALDTAKLLAHQHQLPIITIPTSAATCAAWTALSNIYSDEGAFQYDVPLVKCPDLVILDYEIVKKAPKRTLVAGIGDAIAKWYEASVSSGTSTATLTIAAVQQARVLRDLLFQKSVAALETPGGEEWREVVDACVLLAGVIGGLGGANCRTVAAHAVHNGLTHIPAAHGTLHGEKVAYGILVQLRLEEMIQGNQLAVSSRQQLLKFYEQIGLPKTLEGLGLSKATLAELRQAAEITCQPKSDIHRLPFAVSPDQLLAAMVSTTV

SEQ ID NO: 17900 - protein, 377 aa, Cyanothece sp. PCC 8801
MTQLVAISGYIVFLATSAGLYAIFALGLNLQWGFTGLINFGVVAFMTMGAYTTALLTLKGTPIIIAVLIGAILSAILGLGIGLSTLRLREDYLAIVTIGVSELIRLIANNEEWLTGGTFGVRSYSLPLDIEPNFLIKFLLIIALTFLAIYAEWVLCRSLSEQWRQHKQIQGKSYQPRKPISLITWGIIGTILILLVYIPGIVALSNYTYKAGLMVLILAVLAIIYAGLEFLVHSPWGRILKAIREDEDVAKALGKNVLLYKLQSFMLGGAIAGIAGSFFAWQLTTIYPKSFEPLLTFNAWIIVVLGGAGSNAGTLLGAIIFWSYDSITRFLLPYFGIFDQSQAAAFRVMIIGLILMVLMVWRPQGILGKKEELTLGK

SEQ ID NO: 17901 - protein, 256 aa, Cyanothece sp. PCC 8801
MSETILLVKNLTANVEGTPILKGVNLEIKSGEVHAIMGRNGSGKSTLSKILAGHPDYEITGGEILYKGENILDKEPDERAKMGIFLAFQYPLEIPGVSNFDFLRVSYNARRQYLGLEEMDTFDFEDLVEQKLEVVKMNPSFLERSLNEGFSGGEKKRNEILQMALLEPTLSILDEIDSGLDIDALKIVANGVNQLTNPDNALLVITHYQRLLDYIEPHYVHVMHDGKIVTTGSKELALELEASGYDFVEEKLLTNA

SEQ ID NO: 17902 - protein, 758 aa, Cyanothece sp. PCC 8801
MPSLPEDALKYHRYERPGKLEVNPTKPFLTQRDLSLAYTPGVAEPCRQIYQDPEQVYHYTIKGNLVAVASNGSAVLGLGNIGPLAGKPVMEGKAVLFKRFADIDVFDLEIDASDPDQFITIIKSLEPTFGGINLEDIKAPDSFYIEEKLKKQMQIPVFHDDQHGTAIITGAALLNALKVANKAIENVKVVYCGAGAAAIACAKLHLTLGVRPENVMMCDRQGVIYQGRTADINPYKAQFAAKTSARTLADALDNADVFIGLSVKGALSVPMLNSMAACPIVFALANPDPEIEYKTAKNARSDVIIATGRSDYPNQVNNVLGFPFIFRGALDVRAREINEAMKIAAVNALVKLTHEEVPHSVLRAYGLKTLSFGADYLIPKPFDHRVLFWVAPAVAQAAIETGVAQVSFNLEDYPEVLEKRMGLSSEIIRHSLQKAKTDPKRIVFPEGEHDKILGACQILLEEGIAYPILIGSEAKIHQRIADLGLTLPNIPIEDPRTSPKTALYVQELFRLRQRKGMTLEQAKKSILNPNIFASLMVHLGDADGVVAGISQSYPETLRPSLQIIGTHPEVTSVSGLYLMLFKHRMYFLADTTVNIEPSAEVLANIALESAKFAQRLDIVPRVALLSFSNFGSVKHHLCDRVKEAVRLVKERDPNLIIDGEMQADTAVNPILAKEHYPFSAIQGNANILIFPDLQSGNIAYKLLQELGGGEALGPILLGMAKSVQVLGRGCAIDSIVNMTAIAVLDAQEKEVEGINSPS

SEQ ID NO: 17903 - protein, 628 aa, Cyanothece sp. PCC 8801
MKISWKTLLLWSLPLLVVGFFLWQGTFSPSVANMGDNTANTRMTYGRFLEYLDSGRILSVDLYEGGRTAIVKAVDPELEERVQRSRVDLPLNSPDLIAKLRASNVTLESHPIRNEGALWGFLGNLLFPILLIGALFFLFRRSNNLPGGPGQAMNFGKSRARFQMEAKTDIMFDDVAGIDEAKEELQEVVTFLKQPERFTAVGARIPKGVLLVGPPGTGKTLLAKAIAGEAGVPFFSISGSEFVEMFVGVGASRVRDLFKKAKENAPCLIFIDEIDAVGRQRGAGIGGGNDEREQTLNQLLTEMDGFEGNTGIIIIAATNRPDVLDSALMRPGRFDRQVIVDAPDFKGRIEILEVHARNKKLDPDVSIEAIARRTPGFSGADLANLLNEAAILTARRRKPAITLLEIDDAVDRVVAGMEGTPLVDSKSKRLIAYHEVGHAIVGTLLKDHDPVQKVTLIPRGQAQGLTWFTPDEEQGLTTKAQLMARIAGALGGRAAEEEVFGYDEVTTGAGGDLQQVSEMARQMVTRFGMSELGPLSLESSSGEVFLGGGLMNRSEYSEQVAMRIDQQVRTLAEQGHQLARKIVRDNREVIDRLVELLIEKETIDGQEFRQIVAEYTQVPEKEQFVPQL

SEQ ID NO: 17904 - protein, 619 aa, Cyanothece sp. PCC 8801
MVSSIEKITSSLPATPQRRTGAFALMDSLVRHGVKHIFGYPGGAILPIYDELYRSEARGELQHFLVRHEQAAAHAADGYARATGKVGVCFGTSGPGATNLVTGIATAHMDSIPMVIITGQVGRSAIGSDAFQETDIFGITLPLVKHSYVVRQAQDMARIVAEAFHIASTGRPGPVLIDIPKDVGLEECDYVPVEPGDVNLPGYRPTVKGNPRQINAALHLIEESYRPLLYIGGGAIAANAHAQVQELAERFQIPVTTTLMGIGAFDEHHPLSVAMLGMHGTAYANFAVSECDLLIAVGARFDDRVTGKLDEFASHAKVIHIDIDPAEVGKNRTPDVPIVGDVRRVLEQLLQRAREIDCPTHAEKTQPWLSRINRWREQYPLVIPHYDHSISPQEVIAEVGRQAPHAYYSTDVGQHQMWAAQFLNNGPRRWISSGGLGTMGYGMPAALGAKVAVPDQEVICISGDASFQMNLQELATLAQYGINVKTVIVNNGWQGMVRQWQQAFYGERYSSSNMQAGMPDFELLAQAFGVKGITVREHSELSGAIAEMLAHPGPVLMDVHVTRDENCYPMVAPGKSNAQMIGLPERKSLGEAIELIYCTHCGAKNPTTNHFCPECGTKL

SEQ ID NO: 17905 - protein, 388 aa, Cyanothece sp. PCC 8801
MLHRPIYLDCHSTTPMDERVLEAMLPYFTEQFGNPSSITHLYGWEAEAAVKKSREILANAIDCSPEEIVFTSGATEANNLAIKGVAEAYFNQGQHIITLETEHRAVLDPCHYLEGLGFEVTLLPVQKDGLINPDELEKAIRPETILVSIMAANNEIGVLQPLKEIGEICHKHQVLFHSDAAQAIGKIPLNVQEMKIDLMSLTAHKVYGPKGIGALYVRRRDPRVRLAAQLHGGGQERGMRSGTLYTPQIVGFAKAVELGIGEMESEGKRQKELRDRLWEQFSQLEGIHLNGHPTQRLSGNLNVSIEKVDGSALLLGLQSVVAVSSGSACSSTETKPSHVLKALGHNDDLAYASLRFGLGRFTTTQEIEQVAQATLATIRSLRQAIVSL

SEQ ID NO: 17906 - protein, 255 aa, Cyanothece sp. PCC 8801
MRKILSSLLISGLIAALISPAWSAELEEILKRGQLIVAVKDNVRPLGFSDQNGELQGLEIDLARRLAEELLGDPQAVIFQPVSNQKRLQMVIDQEVDLAIARVSVTPSRNRLVDFSPYYYLDGTGLVTKQSYLGGVAGLAKGKIAVLRVSSTIAVIRAEFPQAELVGVNSYEEALRLLENETVDAFAGDNSILAGWVQDYPSYRQWPVRLSGEALGVVMPKGLQYASLRDRVNRAIVRWQKSGWLRERAAFWGLP

SEQ ID NO: 17907 - protein, 599 aa, Cyanothece sp. PCC 8801
MALIVQKYGGTSVGSVERIQTVAQRIQKTAQNGNKVVVVVSAMGKTTDTLVNLAKEITPNPCRREMDMLLSTGEQVSIALMSMALQQLGQSAISLTGAQVGIVTEAEHSRARILSIKPHRIQRHLDRGEVVVVAGFQGITNADDLEITTLGRGGSDTSAVAIAAALKASCCEIYTDVPGILTTDPRIVPDAQLMGEITCDEMLELASLGAKVLHPRAVEIARNYGIPLVVRSSWSDAPGTRVTSPIPKPRSLEGLELTKAVDGVQFDPDQAKIALLRVPDRPGVAARLFGEIAHQQVDVDLIIQSIHEGNSNDIAFTVVKNVLTKAEAVAEAIAPALRSHSANSDEAEVLVETGVAKIAISGAGMIGRPGIAAKMFKILAQEGINIEMISTSEVKVSCVIRQEDGDRAIKALCQGFEVELSPTAIPESVVAVLPPVRGVALDEKQAQIALIHVQDRPGMAASIFGVLADHNISIDTIIQSQRCRIVEGIPTRDIAFTVAQIDVESAQNALKTLASAFSEMIVDSDVAKVSIVGAGMAGQPGVAAKFFDALARHQINIKMIATSEIKISCVVSKDQGIKALKAVHEAFQLAGEERVEVPA

SEQ ID NO: 17908 - protein, 388 aa, Cyanothece sp. PCC 8801
MTPFPSRMTAVQSPMIPIVGQLIRENPGTISLGQGVVYYPPPPEAIAAITDFINTPDSHKYQAVQGIIPLINIITQKLQQDNNINLNNHQKIVVTAGGNMAFINALLAITQAGDEIILNTPYYFNHEMAITMANCQPILVPTDENYQLQPNAIKQAITDKTRAIVTISPNNPTGVVYSESALKEVNQICQENELYHISDEAYEYFTYNGVKHFSPGAIPDSENHTISLYSLSKAYGFASWRIGYMVIPNHLLNAVKKIQDTILICPPVISQYAAVGALKQGKNYCQQYLPEIATVREFLLKSLGDLQDICTVISAEGAFYIFLKINREINDFELVKQLIKTYRVAVLPGTTFGMTKGCYLRIAYGSLKEATAKEGIERLQRGLKEILT

SEQ ID NO: 17909 - protein, 515 aa, Cyanothece sp. PCC 8801
MRSTQTIKEVTKPEPSLWDDPFWEPLRMITRSFSPYWIACIPLTAIIVIVWHTAVAAQDPTVTEITVESVNTNVATLQGTLNAIWVLVATILVVFMNAGFAMLETGFCRQKNAVNILAKNLIVFALATIAYWVIGYSLMFGNPENPFIGGGGWFLSSKDPATYGLSPFPEGLPIPLAFLFQSAFAGTAATIVSGAVAERIKFTDFLIFSLLLVGISYPITGHWVWSSSAWLFNLQGENGGFRDFAGSTVVHSVGGWAALMGAWILGPRMGKYVDGRPQAIPGHNMSIATLGCLILWIGWFGFNPGSQLKADEMVPYIAVTTNLAGAAGGVTATFVSWYKDKKPDLSMIINGILAGLVGVTAGCDGVSYWGAVIIGIVSGVLVVYAVGFFDSVAKIDDPVGAISVHLVNGIWGTLAVGLFNTTTGLFYGGGLGQLINQIIGIVAVGLFTIVFSGVAWIALKATLGIRVSPEEEIKGLDIGEHGMEAYHGFVTEPDTFTGGQAAGISGADIHTGSGV

SEQ ID NO: 17910 - protein, 299 aa, Cyanothece sp. PCC 8801
MVNNQLQKAAFLGLGLMGSAMSANLARQGFSVKGWNRTSDRPGITIAKEAGVRIVSSLKEAVESADFIFTCVGDVPDVEEVILGEKGVINYAQSGALIVDFSTIGSEAARHIGSKLKAHHLRFLDAPISGGDIGAKQGTLTIMVGGEIADFEACLPYFQAMGKTIRHCGPVGSGQAVKMCNQALCSVHMVALCEAILMAQKQGIDPNLMIEVCSTGAAGSWALSNLGSKIINQEYDPGFAIKHILKDLRLLQQTINNSGEQLPGVELASHLFKLVSEMDNGEGKEQGTQAMIRQYIKEN

SEQ ID NO: 17911 - protein, 302 aa, Cyanothece sp. PCC 8801
MLKKLSLACLTLLLVLGEAKTSLSETVIEKVARTGVLTAGSRLNLIPYSYFNDKEELDGYSLAVLNLIREDLEKQLGKPIKLEIIEAQDISERIPKLMSGDIDISCDTVFTWERDKFVDFSLSYGVSGVRLLVPKNSTLGTPESLEGKRVAIIPHTVIGDTIKLVQPKATLIPVNNFTEGIEALKAGKVDAIAGDSIILDGERQRLKSDNYQLVPEDPYARYGIACMVPEGNSTFLNLVNYSIAKLMQGYLIGDPKYQEIINRWIGPEGVVTIVKPEAIKDFFEYTIITREQVPLSPETNQK

SEQ ID NO: 17912 - protein, 363 aa, Cyanothece sp. PCC 8801
MEIGVPKEIKDQEFRVGLSPSSVRVLCDRGHQVFVETDAGMGAGFNDSDYQQAGAIIVETALAAWSRELVIKVKEPLKEEYPYLEKPKLLFTYLHLAADRTLTEALMQSGITAIAYETVELSDGRLPLLTPMSIIAGRLSVQFGARYLEKQQGGRGVLLGGIPGVSSGRVAILGGGIVGTEAAKIAVGMGAQVQILDINVDRLAYLETLFGSRVELLYSNVSNIETIVPQADLLIGAVLVPGKRAPILVSQELVSKMRPGSVIIDVAVDQGGCIETLRPTSHSYPTYIKEGVVHFGVPNMPGAVPWTATQALNHSTLPYIIKLADQGLNALDKDVALAKGLNIKDRKIVHPAVVEVFPDLGSV

SEQ ID NO: 17913 - protein, 401 aa, Cyanothece sp. PCC 8801
MKDCIYLDNNATTQVDEEVLGAMLPYLTLYYGNPSSMHTFGGQVGSAIKTAREQVAALLGAEPSEIVFTSCGTEGDNAAIRAALAAQPNKRHIITTEVEHPAILNLCKNLERQGYTVTYLSVNNQGQLDLSELEASLTGNTAVVSIMYANNETGVIFPVEQVGQMAKEYGALFHVDAVQAVGKVPLNMAESTIDMLTLSGHKIHAPKGIGALYVRRNTRFRPLLIGGHQERGRRAGTENVPGIVALGKAAELAAYHLQYGTSERELRDYLEQTILTIIPDTVLNGHPVQRLPNTSNIGFKFIEGEAILLSLNQYGICASSGSACTSGSLEPSHILRAMGLPYSVLHGSIRFSLSRFTTQEQIQKVLEVLPGIIDRLRALSPFNSDEAGWLVEQEKAALAKS

SEQ ID NO: 17914 - protein, 132 aa, Cyanothece sp. PCC 8801
MKRTFLNSKIHRATVTGSELNYVGSMAIDAELMKAANILPFERIEIVNVNNGQRWATYVIEAEPGSGIMEVRGAAARLAEVGDIVIIFTYIEIEEPIPVPWHPRVVMVNEKNQISEIRHIAADKPSELLFSL

SEQ ID NO: 17915 - protein, 640 aa, Cyanothece sp. PCC 8801
MSNKISHSQSIHQANRRQPTSRKWGHLVTSWMLIQSLLVATPSWGQTLIPSGKESKPEGISYSQLLKQIESGKVRKVEIDPKLQKAKVTLKNQSEQDPPQEVPLFKSNLNNELIAKLRDNNVPVDIQPSVDNSAAISLVVNLIVLFLLFSIFIAIIRRSANASGQAMNFGKSRARFQMEAKTGISFEDVAGIDEAKEELQEVVTFLKQPEKFTAIGAKIPKGVLLVGPPGTGKTLLAKAIAGEAGVPFFSISGSEFVEMFVGVGASRVRDLFKKAKENAPCLIFIDEIDAVGRQRGVGYGGGNDEREQTLNQLLTEMDGFEGNRGIIVIAATNRPDVLDKALLRPGRFDRQVVVDYPDLKGRQGILEVHARNKKVDQEVSLEAIARRTPGFTGADLANVLNEAAIFTARRRKEAITMTEINDAIDRVVAGMEGTPLVDSKSKRLIAYHEIGHAVVGSLHEGHDAVEKVTLIPRGQAKGLTWFMPDEEYGLVTRNQLLARIAGLLGGRAAEEVIFGEDEVTTGAGNDIEKVTYLARQMVTRFGMSELGLVALESDNDDSYVGLDGSRRSDYSDEIATKIDHQVRSIVDDCHNYAQKIIQENRIAIDRLVDILIEQETIEGEQFRQLLEEFRLKVDKTLLKV

SEQ ID NO: 17916 - protein, 225 aa, Cyanothece sp. PCC 8801
MEVSVPQDKPLAAVFRRIGGGSYPPVVEAFERGKTIFFPGDPAERVYFLLKGAVKLSRVYEAGEEITVALLRENSVFGVLSLITGQRSDRFYHAVAFTPVELLSAPIDQVELALKNNPDLSILMLQGLSSRILQTEMMIETLAHRDMGSRLVSFLLILCRDFGVPTSDGIRIDLKLSHQAIAEAIGSTRVTVTRLLGDLRQEGMISIHKKKITVHNPVALSQQFT

SEQ ID NO: 17917 - protein, 363 aa, Cyanothece sp. PCC 8801
MFNRTWSMTKQPFLVLATLLLLSPLTACGGGQPTTETTPAQESSSKVSGSRLATIKERGTLICGVNGEVPGFSFVDEQGQYSGLDVDMCRAIAAALFDDPSKVEYRKLSAQERLTAVQSGEVDVLNRNTTWTMSRDTAVGMEFAPTVFYDGQGIMATKASGANTLKDLTGKSICVLAGTTTEQNLADQMRKEGVTDYNPVVSDDVDALYAAYQEGRCEAVTSDRSQLVARRSIFPKKDDHVILDVVMSKEPLGPVVADGDSTWYDAVKWITFAVIQAEEFGITSQNLATFESTEDPNIKRFLGIDDKLGEDMGLPNDFAARIIKHVGNYGEIYERNIGKPLGLERGQNQLWTNGGLLYSPPFR

SEQ ID NO: 17918 - protein, 552 aa, Cyanothece sp. PCC 8801
MMTIGEYLFQRLKELGVDHVFGVPGDYVLGLMDVLIKSPLELICTCNELNAGYAADAYARIRGLGVVCITYGVGGFSLVNAVVGAYAERVPLVVISGAPNSAVRKNHLLLHHTTGDYNLQLSIMEKVTVASVILTQASQAAKQIDEVLSACLHYKRPVYIEIPLDVVNQPCTFSESSLNAIPQLTELTDNDALKEAITEASELLKKAQNPIILAGVEIDRFQLKEPLIKLLETTGYPIATTILGKSCLPEVHPQFIGNYVGALSRDYVRQRVENADCILCLGAIMSDMNLGIYTAQLDTQKLINANSEKVKIKHHFYQPIYLGDFIAGLIPNLSYQESNPLNIQPAIKRLSKTFEFKTEDKLTSGRFYEAINHFLDNDLLVISDTGDSIIASIDLLMHKGSDFIGQAFYLSIGYSIPACLGASFAAPDKRIIVLVGDGAFQMTAQELSTIIRHQLNPIIFLINNDGYTIERVIHDGIYNDLQAWKYHELPHIFGESWSCEVSTEGELQKALLYAKMNTHCVCFIEVHLDRFDCSPGLIRLGKAIEKMQKLSN

SEQ ID NO: 17919 - protein, 569 aa, Cyanothece sp. PCC 8801
MNSSRDDHHNHRLRQYIPILEWLPKYQLSWLKADLIAGLTSWAVMVPEAMAYGGIAGVPPLIGLYTVPLPLFVYALLGTSRTMVIGPDSATALISSVIIGGLAARGSHEYLTLTATLAMIVGLLFLGFGLLKMGWVANFIPIPVMQGFIQGLVWVTIIGQVPTIWGITGISGNFWQKLVKILHQLPQAHLTTSIMGLSSLALLLILKKFFPKIPGALVGIILSSLIVTILGLRENTLELVGEITTGLPSLTIPSVSFDQLQNLVPGGLAIVLLGYSQSLGAAKTAGEKIGGDIDPNQELISHGTANLGSALSSGFIVVGSLSKTSVAIEAGAKTQVSSLINGVLVILTLLFLMPLFHNLPHATLAAIVIEAMLGLANFSYLKNLRHLSPVEFMVSMVAFFGVLFLGVLQGISLGIILSLMLLIQRVSHPGTAVLGKLPNEEMYRDILRHPEAITIPGLLIFRISSDLIFPNANYFASQLKKAIKQSNSSVKQVLIDGESINFIDTTALEMLTKLNRELQQQGIIVSFARVRDYIRDRMRRSGLEQEIRTIYFYERISDGVKTFIEGENP

SEQ ID NO: 17920 - protein, 243 aa, Cyanothece sp. PCC 8801
METHKEKILVVDDEASIRRILETRLSMIGYDVVTAADGEEALDTFHKADPDLVVLDVMMPKLDGYGVCQELRKESDIPIIMLTALGDVADRITGLELGADDYVVKPFSPKELEARIRSVLRRVEKNGVPGIPSSGVLQIASIRIDTNKRQVYKGDERIRLTGMEFSLLELLVSRSGEPFSRSEILQEVWGYTPERHVDTRVVDVHISRLRAKLEDDPSNPELILTARGTGYLFQRILEPGEEP

SEQ ID NO: 17921 - protein, 189 aa, Cyanothece sp. PCC 8801
MVDFSVATSHTQLNKALFLDRDGVVIDYIPYLSQPEQVRLPHGAGEALKTWQDAGYLLILITNQAGVGRGYYTLEDVEAVHTYIRQEYGKLGVSFEDIFVCPHHPEDNCLCRKPSPEMLIQASKKHQISLSQSFFVGDAPSDLQAAIEADCQPVLVLTGRGEETIKNIAQYSTEIKVFAKLSDTVQLID

SEQ ID NO: 17922 - protein, 388 aa, Cyanothece sp. PCC 8801
MIKLATRVQSVPPSITLSIAAKAKAMKAQGIDVCSLSAGEPDFDTPQHIKDAAKLALDQGKTKYGAAAGEPKLRQAIAKKLQIDNQLTYAPENVIVTNGGKHSLFNLMLAMIEPGDEVIIPAPYWLSYPEMVKLASGTPVIVNTTEATEYKITPEQLREKITPKTKLFVLNSPSNPTGTVYTPPEIKALAEVILDSDVWVVSDEIYEKILYDGAQHLSIGAVSPEMFNRTIISNGFAKSYSMTGWRIGYLAGPVELIKACSIIQGHSTSNVCTFAQYGAIAALEQSQDCVQQMLDAFAERRRFILDRVRAIPKLSCPTPMGAFYVFIDISQTGMTSMEFCDKLLEYQQVAAIPGIAFGADSCIRLSYATDLTSIDKGMTRLANFVNSL

SEQ ID NO: 17923 - protein, 491 aa, Cyanothece sp. PCC 8801
MKLTEDSGLLSQYRVPLIEALTNSIKQQNSAFYAPGHKRGEGIAPSLATLLGKTVFQADLPELPDLDNLFAPSGVIQKAQELAAEVYGADQTWFLVNGSTCGIISAILATCRPGDKIIVPRNIHQSAIAGLILSGAVPIFINPEYDPIWDLAYSITPEALERALIENSEVKAVMVVYPTYHGICGDLQAIAKITHGYNIPLLVDEAHGAHFTFHPNLPFSALSLGADLVVQSTHKVLGAMTQASMLHQQGNRIDPQRISQALQLTQSTSPSYLLLASLDGARQQMALQGQDLLSQTIELSQKVREEISQIKGLQILNLEQPCPGFKQLDITRLTVNVSGLGLTGFEVDEILHQQLGVTAELPMLRHLAFIISIGNKTEDINQLIKAFKTLTANLSPSPRHPVTPSPPPLLSSCYISPREAFFSATKMVNIEDSIGGISGELICPYPPGIPLLMPGEKITAQAIEYLQKVLDLGGSITGCSDPSLKQLKIIS

SEQ ID NO: 17924 - protein, 525 aa, Cyanothece sp. PCC 8801
MAKVLVSDTIDQVGIDILSQVAQVDVKTGLPDEELIKIIPDYDALMLRSGTRVTQEIIEAGTQLKIIGRAGVGVDNIDVKAATRQGIIVVNSPEGNTIAAAEHALAMMLSLSRHIPAANESVKANKWDRKRFMGAEVYKKTLGVVGLGKIGSHVANVAKAMGMKLLAFDPFISQDRAEQLGCTLVDLDLLFSESDYITLHVPKTPETAHLINAEALAKMKPTTRIINCARGGIIDENALADAIASGQIAGAALDVFEEEPLGESKLRGLENVILTPHLGASTAEAQVNVAIDVAEQIRDVLLGLPARSAVNIPGLTPDVMEKLRPYLQLAETLGNLVGQLAGGRIERLTVRLQGELATNKSQPLVVASIKGLLSQALRERVNYVNAAIEAQERGIRVIETRDAAQRDYSGSIHLSAQGSMGEHSVTGVLLGDGEIRITDVDGFPINVPPSNYMLFTVHRDMPGIIGKIGSLLGGFNVNIASMQVGRKIVRGDAVMALSLDDPLPEGLLSEITKVAGIRDAYTVKL

SEQ ID NO: 17925 - protein, 513 aa, Cyanothece sp. PCC 8801
MVQATEINQPVSLNKFEKFKAEKDGLAVKDQLDHFAQIGWEAMDKTDLEHRLKWLGIFYRPVTPGKFMLRMRTPNGILTSEQLKVLGQIIQRYGDDGNADITTRQNLQLRGIRLEDIPDIFRRLKAVSMTSMQSGMDNVRNITGSPMAGLDGNELIDTRDLVQKVQDMITNHGEGNYQFTNLPRKFNIAIEGGRDNSVHAEINDIAFVPAYKDGQLGFNVLVGGFFSAKRCEAAIELDVWVPPNDDVVELCRAILTVYRNHGPRANRQKSRLMWLIDEWGIEEFRAKVAAEFGRPLATAAEKDEIDWEKRDHIGVFAQKQPGLNYVGLHIPVGRLYAEDMIDLARLAEVYGGGEIRLTVEQNVIIPNIPDENLNPFFAEPLLQKFSINPPSLERSLVSCTGAQFCNFALVETKNRALALSRELDKVLDIPQPVRIHWTGCPNSCGQPQVADIGLMGTKVRKNGKTVEGVDLYLGGKVGKDAQLGTCVQKGIACEDLLPVLQQLLIDNFGAKLK

SEQ ID NO: 17926 - protein, 406 aa, Cyanothece sp. PCC 8801
MYSPSVGVTSTQTTEYGNRLFVYEVVGLSQNTDNDNLDYPIRRSGSVFITVPYKRMNQEMRRINRMGGRIVSIKPLNADTPLQVSSNPPKPQVVEPPQSNKQPTSKSMTETKEKATIPVNIYRPNNPYIGKCVENYPLVAEGGSGIVQHLTFDISGGDLHYVEGQSIGIIPPGTDDNGKPHKLRLYSIASTRHGDMKDDKTVSLCVRQLEYQHPESGETVYGVCSTYLCHLEAGADVAITGPVGKEMLLPDDEDATIIMLATGTGIAPFRAFLWRMFKEQHSDYKFKGLAWLIFGVPYTANILYKDDLEKMVEDYPENFRLTYAISREQQNKDGGRMYIQHRVAEHAAELWEKLQDPKTHLYMCGLKGMESGIEEGLSPFAQEQGVEWSDFVRKLKKEHRWHVEVY

SEQ ID NO: 17927 - protein, 314 aa, Cyanothece sp. PCC 8801
MTEQINQLSLSSIPIAPEGFKSGFVGIIGRPNVGKSTLMNQLVGQKIAITSPVSQTTRNRLRGILTTEEAQIIFVDTPGIHKPHHQLGKILVQNAEAAINAVDIILVVVDSSIEAGGGDRYIVELLENTETPVILGLNKSDQQPQNYQPIDESYLVLAQAHNWPVIKFSALTGEGLDNLQKTLINLLEPGPYYYPPDLVTDQPERFIMGELIREQILQQTRQEIPHSVAIVIEKVEETPTLTRVFAAINVERDSQKGIIIGKKGAMLKAIGTAAREQMQKLITGEVYLQLFVKVEPQWRQSSLRLSEFGYQIET

SEQ ID NO: 17928 - protein, 318 aa, Cyanothece sp. PCC 8801
MPSLSDNNRLSLFSGSANLPLAQEVARYLGMDVGPMIRKKFADGELYIQIQESIRGCDVYLIQPCCHPVNDHLMELLIMVDACRRASARQITAVIPYYAYGRADRKTAGRESITAKLVANLITEAGAHRVLAMDLHSAQIQGYFDIPFDHVYGSPVLLDYLASKQLEDLVVVSPDVGGVARARAFAKKLNGAPLAIIDKRRQAHNVAEVLNLIGDVQGKTAVLVDDMIDTAGTILEGARLLREHGARQVYACATHAVFSGPAISRLSSGMLEEVIVTNTIPVPEEHRFEQLTVISVANLIGEAIWRIHEDTSVSSMFR

SEQ ID NO: 17929 - protein, 279 aa, Cyanothece sp. PCC 8801
MANPIIKPFLKWAGGKRQLIPEITQNMPKTYNNYYEVFIGGGALFFSLQPSQAVINDSNRELINCYQVIRDHPDALIEDLKKHQNNEDYFYQIRGLDRNKKKYNQLSDVEKASRIIYLNKTCYNGLFRVNSQGQFNVPFGRYKNPDILNEAVIKAVSNYLKKNQINILNGDFATALSSAKKGDFVYLDPPYDPISDTASFTGYDINGFNQQEQKRLKQVVDELHDRGCKILLSNSYTDFICELYNDDYYKQVKISAIRAINSQGNKRGKVDEILVKNYD

SEQ ID NO: 17930 - protein, 329 aa, Cyanothece sp. PCC 8801
MKDPEVKLFSLNTTRPLGQKISEKLGILLSDHEEREFEDGEHKIRPLINVRGCDVFVLDSLYSEPKATVNDKLCNLLFFIGALKDAAAHRVTAIVPYLCYSRKDRKSKPRDPVTTRYVASLFEAVGCDRIVTLDVHNLAAFQNAFRCATEHLEGTNLFVEYFAPLVADGNVVVVSPDIGGIKRAEQFRQSLSRRLSKEISQAFVEKYRTGGVISGEKLVGDVSGRVAIIIDDLISSGTTLARAASTCRQHGATKVYAVATHGVFAQASNEVLATPDLEQVVITNTIIPFRLTADIVKDKLTILDTSSLLASAIDRIHHGGSLVELLELT

SEQ ID NO: 17931 - protein, 385 aa, Cyanothece sp. PCC 8801
MIKIAVPKESELGELRVALVPDTVSRFIKLGFEVLVQSGAGLGAHFTDGDYQAAGAQIISSADQLWTEADLLLKVAPPGEQNGQQEMDWLKPGAVLISFLDPLGNPEKIQALAQRQITAFSMELIPRTSRAQSMDALSSQASIAGYKAALLAAASLPRMFPMMTTAAGTIPPAKVLVIGAGVAGLQAIATAKRLGAVVEAFDVRPAVKEEVQSLGAKFVEIPIEEDTATKGGYAKEVSQNTQERIRQVLTEHVKKSNVVITTAQVQGKRAPIIVTEEMVAEMDSGSVIVDIAADRGGNCACTEPGKDICYNGVHVIGPLNLPATLPVDASQVYAKNLLTLVKYLVKDGEFQLNFEDDIISEACVTYDGQLRNARVKEALSRLVNA

SEQ ID NO: 17932 - protein, 297 aa, Cyanothece sp. PCC 8801
MTEKMNIGVLGTGLMGKPLAQRLLQANLSVTVYNRTFSQVVELQSMGANLAKTPLEAIQLSNVLILMLTDANAIREVILSTESASALQNRTVIQMGTIAPDESRTIQQEVQARGGDYLEAPVLGSIPEAKAGTLLVMVGARKSQFEEWKGLLQHFGEQPQHIGEVGTASALKLALNQLIAALTSGFALSLGLIERQGVDVDKFMAILRESALYAPTFDKKLDRMKQRNFDNPNFPTKHLLKDVDLFLSQAEENGLNTQGLKGVRGLIQKTIALGLSDSDYSALFSAIHQEEHDNIIH

SEQ ID NO: 17933 - protein, 322 aa, Cyanothece sp. PCC 8801
MSKPKVFITRHIPREGLDLLKEQVDLEIWDKSEPPPYSILLEKVQEIEGLLCLLTDQIDQRLINHAPHLKVISQMAVGYDNIDVQAATNREIPVGHTPGVLTEATADLTWALLMAITRRVTEAEDYIKQGKWTTWQPMGLLGSDFVGATLGIIGLGRIGRAVARRARGFNLNILYSQPHRLEVGLEQELGVNYVPFEQLLKESDFISLHTPLTEKTYHLIGKNELKLMKETAFLVNTARGGIIDQKALYDTLKQGEIAGAALDVTEPEPLPKDHQLLTLSNVIVTPHIGSASYQTRSKMAIMAAQNLLAGLQGQPLPNCVNY

SEQ ID NO: 17934 - protein, 123 aa, Cyanothece sp. PCC 8801
MSYAIIEAGGQQLKVEPGRFYDINYLGVDPDSDYTIDKVLLINHEDDITVGQPYVEGATVEGTIVEHRRGRKIIVYKMRPKKKTRKKRGHRQELSRLMITSIKVNGSVIVDDSAVMTETSEEE

SEQ ID NO: 17935 - protein, 107 aa, Cyanothece sp. PCC 8801
MTPEVKERIDNLIKSHKIFVFMKGVKLMPQCGFSNNVVQILNILGVPYETFDVLSDPEIREGIKAYSNWPTIPQVYINGEFIGGCDIMIEMYQSGELQQMVEVALAS

SEQ ID NO: 17936 - protein, 707 aa, Cyanothece sp. PCC 8801
MTNSLYIATTEGKTGKSLISLGIMELLLRKTTRVGFFRPIIQDPIDHQPDQHLNLILSHFNLPQSYEESYGLPYSEVSNLMGHQNLDEILEIIITKYKKLEETCDFILCEGSDYLKESSAFEFDINAKIAKNLGCSILILGNGYQKSVEEAIAPIEIAVDTYREKQCPIIGIIINKADQSQLKPLKNVLEKDYKNTNYLLSIIPYDKKLGSPRIREIAQQLNAQILYGRDRLDNLVFNYLVAAMQMQHAISQFDENCLVVTPSDRGDVIIGTLQAHQSTNYPNLAGILLTTEYQLEQSIAQLISGLTDPLPILWVNSYTYPTVSDLKAVYSSLIPEDTEKIDWSIDLFDQFVNLMTLEKQISTIEVKGITPKMFTYNLIQQAKTQKRHIVLPEGNEPRILKAAEVLLSKNIVDLTLLGQKKEIERIVKTNNIQLDIQQLTIINPIESAKFDDYVQTFYDLRKHKGATLETAHDCIMDVSYFGTMMVYKGDADGMVSGAIHTTSHTIRPALQIIKTQPDISLVSSVFFMCLNHNVLVYGDCAVNPNPTAEELAEIAITSAETAKTFDITPKVALLSYSSGESGQGEEVEKVRKAAQISQKRRQDLAIEGPIQYDAAIDPQVAAQKMPNSRVAGQATVFIFPDLNTGNNTYKAVQRATGAIAIGPILQGLKKPVNDLSRGCTVGDIINTVVITAIQSQIHLTGRMGNGQ

SEQ ID NO: 17937 - protein, 193 aa, Cyanothece sp. PCC 8801
MSSFQFSPENEPEEIDSVTLTDDEGRTLECYVENALEAEDGTYLLLMPVDIPVVILAWDDQAEEEEEDSNAILLEDKSEIEGIFPDAKAVLAELDLTLKFTAFTLTVQGELPPIEDDGILTLELDTDDKPLDSEELQFLASFYHQDQKYSIYTPLAPLLFLAKYNLLGEVSLVSPDDARMQPILEELLFDEME

SEQ ID NO: 17938 - protein, 1554 aa, Cyanothece sp. PCC 8801
MKKTNHPQSNPQSSPLSPYQGQKWLVEERDACGVGFIADVKGKGSHKLVQQALIALGCMEHRGGCSADNDSGDGSGVMTAIPREVLAPWFASQNLTMPPAEQLGVGMVFLPQDSNERAAEKAHVEQVVKAENLTVLGWREVPVKPEVLGVQARGNQPHIEQIMVISPEGLSGDALDRVLYIARSRIGKRLADNFYICSFSCRTIVYKGMVRSVVLGRFYADLQNPNYISQFAVYHRRFSTNTMPKWPLAQPMRLLGHNGEINTLIGNINSMATREVHLQVPGWTSDELEALTPIVNTANSDSYNLDSALELLVRTGRSPLEAAMILVPEAYNNQPDLQQYPEITDFYDYYSGLQEPWDGPALLVFSDGKMVGACLDRNGLRPARYCITKDDYVVVGSEAGVVDIPESEIVEKGRLGPGQSIAVDLTTQEILKNWDIKQRIAQQHPYGEWLQSYRQELTPQPFSDKILLQQPGQLLQHQTAFGYTAEDVDMVIVPMASQGKEPTFCMGDDIPLAVLSDKPHLLYDYFKQRFAQVTNPPIDPLRESLVMSLTMLLGEKGNLLDPKPEDAKLLKIDSPVLNETELAAIKNSGFKTAELSTLFDLTTGPGGLKTALDRLCIEATEAVKNGTKIIVLCDRPSGHSINETTSYIPPLLAVGTVHQHLIKQGLRLQASLVIDTAQCWSTHHFACLIGYGASAVCPYLTLETIRQWWNDEKTQKLMGNGKLETITLEKALDRYRHSVEAGLLKILSKMGISLLSSYHGAQIFEAIGLGMELIETAFEGTTSRVGGLSLQELADEIIAVHSQAFPSLTDKKLKNFGFINYRPGGEYHMNSPEMAKSLHKAVEAYKAGGNGANKEAYDHYEMYRKYLEERPITALRDLLEFKVSNTPVPIEEVEPVEAIVKRFCTGGMSLGALSREAHETLAIAMNRLGGKSNSGEGGEDPTRFIPLSDVDSNGNSATFPHLKGLQNGDTASSAIKQVASGRFGVTPEYLMNGQQLEIKMAQGAKPGEGGQLPGPKVSPYIAMLRRSKPGVTLISPPPHHDIYSIEDLAQLIFDLHQINPVAKVSVKLVAEIGIGTIAAGVAKANADIIQISGHDGGTGASPLSSIKHAGCPWELGVTEVHRMLLENKLRGRVILRADGGLKTGWDVMMAALMGAEEFGFGSIAMIAEGCIMARICHTNNCPVGVATQQERLRQRFSGVPAHVVNFFYFVAEEVRSILAKLGYRSLDEVIGRSDLLKVRETAKLSKTKALNLDCLLKLPDVTRDRAWLSHEEVHSNGEVLDDRILADIAVQSAIENQGSVTQNLKIVNTDRTVGARIAGVIAKKYGNTGFEGEIKLNFTGAAGQSFGAFNLPGMMLHLQGEANDYVGKGMHGGEIVIIPPQDANYDPADNVIVGNTCLYGATGGVLYANGRAGERFGVRNSLAKAVIEGAGDHCCEYMTGGIIVVLGSVGRNVGAGMTGGLAYFLDEEGTFPAKVNPEIVEIQRICTEAGEAQLKELITAHVAKTGSQKGQLILNNWKEYVSKFWQAVPPSEANSPETNPNPVMVAEKTLTPVK

SEQ ID NO: 17939 - protein, 404 aa, Cyanothece sp. PCC 8801
MKILILNAGSSSQKSCLYDFKEKNFLDNPVEPIWKADIDWTLATGQGILTVKANGIKQKITLNSDDHHHGIAKMLGTLVEGKTKVIQHLSDISIVGHRVVHGGTDYSEATLITPDVKATIARLIPLAPTHNPSHLEGIEAIEQVLGNIPQVAVFDTAFHSQMPLEASVYPIPYEWLDKGIRRYGFHGTSHKYCAEKASQLLNKPLTHLKLITCHLGNGCSLAAIKNGISIDTTMGFTPLEGLMMGTRSGSIDPAILIYLMREYDFTFEQLNEMLNQESGLKGVSGISADLRAIFEAINQGNDRAQLALDMYLHRLRSQIGSMLASLGGLDALIFTAGIGENAAIVREKACQGFSFLGLKLDLEKNANSPVNIDISTPDSTVRILVIHTQEDWAIAQECCHWLNK

SEQ ID NO: 17940 - protein, 376 aa, Cyanothece sp. PCC 8801
MRKIIIIGGGIGGTATALALNQAGFEPVVYERTQVLREVGAGIALWANATHILKKLGLLETAIQVGCLTTNYQFNSQRGKELVNIDLDGFELPVVAIHRAELHQLLWRNVPGEKFHLGETFERFEHQHDRVHAYFVSGLEVEGDGLIGADGLRSRVRATLLGDTPPTYRNFKTWRGLTDYVPSNYRPGYIQEFLGGGKGFGFMMLGKGKMYWYAAATAPEAQPDAVFGRKQELETMYQDWFSAIPELIAATDEANILTTDLYDRPPTQPWSKGNITLLGDAAHPMLPTMGQGACTALEDAYVVAKCLEENSDPIAAFQRYEDLRFPRTKAIVEQSLRSRKMGELKNPFAVSLRNTSMKIMGSAISSSFKSLHAYRA

SEQ ID NO: 17941 - protein, 393 aa, Cyanothece sp. PCC 8801
MQIYLDYSATTPPRSEAITQVEAILKQQWGNPSSLHNWGQQAATILETARWQVANLINAPSADSIIFTSGGTEADNHALLGIARSYSKPQHLIISSVEHSAISETAQILAQSGWQVTILPVNRQGRVTPLELKAAIRPNTSLISIIYGQSEIGTIQPIEELAKIAQAEGVLFHTDAVQVAGRLPLDVQRLGVDLLSLSAHKIYGVQGAGALYVRPGVEIAPLLAGGGQERRLRSGTQAVPAIAAFGIAAEWAATEIATETPRLRGLRDRLFDLMADCPYLIPTGDRLYRLPHHVSFIVTDPFNQKVSERITGKTIVRQLNLAGIGISAGSACHSGKLSPSPILLAMGYSENEALGGIRLTLGRETTLEDIEWTAMVLKQVLGRLMPQLECVGC

SEQ ID NO: 17942 - protein, 635 aa, Cyanothece sp. PCC 8801
MGKVVGIDLGTTNSCVAVMEGGKPTVIANAEGFRTTPSVVAYAKNGDRLVGQIAKRQAVMNPENTFYSVKRFIGRKYHEVNIETTEVSYHVGKDGNGNVKLDCPSQGKQFAPEEISAQVLRKLVDDASKYLGETVTEAVITVPAYFNDSQRQATKDAGKIAGIEVKRIINEPTAASLAYGLDKKSNETILVFDLGGGTFDVSILEVGDGVFEVLATSGDTHLGGDDFDKKIVDYLAQDFNKNEGIDLRKDKQALQRLTEAAEKAKIELSSVSQAEINLPFITATQEGPKHLDMTLTRAKFEELCSDLIDRCAVPVENAMRDAKVSNSNIDEVVLVGGSTRIPAVQELVKKILGKEPNQGVNPDEVVAVGAAIQGGVLAGEVKDILLLDVTPLSLGVETLGGVMTKIIPRNTTIPTKKSEVFSTAQDGQANVEIIVLQGEREMSRDNKSLGTFRLDGIPPAPRGVPQIEVIFDINADGILNVTAKDKGTGKEQSISITGASTLPDMEVDRMVKEAEANAAADKERREKIDRKNEADSLVYQADKQLKELGDKVSAADKSKADELISKLREAIGKEDDETIKTTLPELQQLLYSIGTSVYQQAGGPTPPDGAAPGGDAGTSSGGGDDVIDAEFSETK

SEQ ID NO: 17943 - protein, 550 aa, Cyanothece sp. PCC 8801
MGELTTAELLVQCLENEGVEYIFGLPGEENLHILQALKHSSIKFITTRHEQGAAFMADVYGRLTGKAGVCLSTLGPGATNLMTGVADANLDGAPLVAITGQVGTDRMHIESHQYLDLVAMFAPVTKWNKQIVRPSITPEVARKAFKLAQSEKPGAVHIDLPENIAAMPVEGQPLKRDSQEKTYASYRSLNAAAMAISKAQNPLILVGNGTIRANASESLTEFATALNIPVANTFMGKGVVPYTHPLALWTLGLQQRDIITCAFEGCDLVIAVGYDLIEYSPKKWNPDGKTPIIHIGMAPAEIDSSYIPLVEVVGDISDSLMDILKRADRHGKSTAIASGLRAQIVEDYERYAQDEGFPVKPQKIIYDLRQVMGPEDIVISDVGAHKMWMARHYHCDCPNTCLISNGFAAMGIAIPGAIAAKLVHPDKKVVAVTGDGGFMMNCQELETALRVGTPFVTLIFNDNGYGLIEWKQLNQFGESAFIRFGNPDFVKFAESMGLKGYRVESASDLIPTLKMALAQDVPAVIDCPVDYGENIRLSQKSGDLSCQIWE

SEQ ID NO: 17944 - protein, 210 aa, Cyanothece sp. PCC 8801
MIYLDSAIIAEAEIVRSWGWVKGITTNPTLLAKSELSAEDTLKQLRLLTSGELYYQLTATTFEDMVLEGRKAYKLIGEQTVLKIPATNVGFQVTAKLSQEIPCAVTAIYSGAQTAIAVEAGAKYAIAYVNRATRLLGDGLALVREMAQLVAHSDTKILAASLKSPQEAADALQAGAHHLTLPLEGLEAMTTHELSQQTVQEFNEKGRGIV

SEQ ID NO: 17945 - protein, 606 aa, Cyanothece sp. PCC 8801
MLKIKLFNSRQPIVSQEFELAENHLNNGGCTVGSSSTCQVILPSTKVKDIHGKFFLENDHYYFRDLTKVANYQFNDEAVKIDYPYALETDDIIRIGEFVLIVDGPPRKRNPKTRPRKSKTAKSETDKASSKRSAKGSMPSLKSLGRKNRRNQRTSTDSSIVSYDQPREISQNGSSNGSSSTSNGGVATDIPLPKSATSTLPLPTVKSAPLSALQVGPAPNGVKWWTKGDLTVRCIEIIEDTSDVKTFRFVGTTPTLFNYKPGQFVTLNLTIDGKPVKRSYSISSSPSRPHSLEITVKRVPSPPDVPDAPPGLVSNWLHDNVTVGSEIKLSGPSGKFTCVDRSETKLLFISAGSGITPMMSMSRWALDTGAPRDIIFFHSARSPQDLIYRRELEAMDAQHSNFHLAFSITRSSVGEPWWGFTGRLTDILVQAIAPDYKERLIFVCGPDGFMKGVKSLVESMGFPMENYHQESFGGAKKGASKSSSSQTNGASSSSAVADVDTAPATVEDSSNGSNNSTSHPYTVVFVKSEKQVTTEGKTPLLEIAEEQMVEVNSGCRSGVCGNCKVKKLAGTVRYDGEPDGLDESDEEKGYILTCIAHPAGRVVLDV

SEQ ID NO: 17946 - protein, 485 aa, Cyanothece sp. PCC 8801
MTISFQSLGLSETRANQLEAIGFTSPTEIQQKAIPLLLEGHDILGQSQTGTGKTAAYSLPILEQVDVKNPNVQALILTPTRELAQQVALALKDFSTERRLYILTVYGGQSIERQIRSLERGVQIVVGTPGRVIDLLDRKKLSFEGLRWAVLDEADEMLSMGFIDDVKKILKQTPDTRSTACFSATMPREIRELVNQFLKSPVTVAVEQPQAAPSKIEQHLYNVPRGWSKLKALQPILELEAPESAIIFVRTKQTAAELTCKLQEAGQSVDEYHGNLSQSQRERLVYRFREGKIKLVVATDIAARGLDVENLSHVINYDLPDNAETYIHRIGRTGRAGKTGTAISLVEPIDRRMIKQIERKLRQQLEICQIPSRSQVESKRLEKLQRQIQESLAGERMASFLPIVRELSAEYDPQAIAAAALQMVYDQDCPNWMKTDWEVPEASVPKPVIKRKPSPNNNGGKYNRRSQAPQRSGGSDRKVVTHNHN

SEQ ID NO: 17947 - protein, 399 aa, Cyanothece sp. PCC 8801
MGRADKVVLAYSGGVDTSVCIPYLKNEWGVKEVITLAADLGQGDELGPIQAKALRCGAVESLVTNAQEEFVTEYAFRAIKANALYENRYPLSTALARPLIAKLLVEAAEKYGADAVAHGCTAKGNDQVRFDLGILALNPNLKVLAPAREWNMSREETIAYGERCGVESPVKKSSPFSIDRNLLGRSIEAGPLEDPMTEPPEEIYLMTKAIADTPDTPEYVDIGFEKGIPVSLNGQTLDPVSLISQLNEKVGNHGVGRLDMIENRVVGIKSREIYEAPALLVLIDAHRDLESLTLTADVTQYKHGVGDTYSQLIYRGLWYSPLKTALDALIDQTQERVTGMVRVKLFKGNAVIVGRQSENSIYSANLSTYGSDDAFDHKAAEGFIYIWGLPTRVWAQKTK

SEQ ID NO: 17948 - protein, 329 aa, Cyanothece sp. PCC 8801
MQFIDYAEIEVEGGKGGDGIVAFRREKYVPAGGPAGGNGGWGGSVIFVANSNLQTLLDFRYARRFKADDGKRGGPNNCTGANGKDCLVEVPCGTMVYNLETEEILGDLVENGQTLCVAAGGKGGLGNKHFLSNQNRAPDYALPGLEGEHRWLRLELKLLAEVGIIGLPNAGKSTLMASLSAARPKIADYPFTTLVPNLGVVRKPTGDGTVFADIPGLIEGAHEGIGLGHEFLRHIERTRLLLHLVDITSPDPVKDYQIIQQELEAYGRGLSDRPQIIALNKMDAADEETFLLIKNELTHLSSSPIIGISGVSRTGLEDLLQIVWQLLDS

SEQ ID NO: 17949 - protein, 444 aa, Cyanothece sp. PCC 8801
MSKLSRRQFIVTAGAAAAGTVIIHGCSSGSENNTTQSGSTPQPQASPVTNLSPEEMPEVTTAKLGFIALTDSTPLIIAKEKGLFDKYGMTGVEVLKQASWPVTRDNLELGSEGGGIDGAHILTPMPYLMTLGKITKQPVPMYILARLNVNGQGISVSKDYLDLKVSLDSSKMKEVFSKAKANKKELNAAMTFPGGTHDLWLRYWLAAGGIDPEKDISVIPVPPPQMVANMKIGAMETFCVGEPWNAQLVNQKQGYTALVTGELWKDHPEKSFALRADWVDKNPKAAKALLKAVLEAQQWCDKPENHQEMCEIVAQDKWFKVPVEDIIGRIHGTIDYGDGRKVENPDIAMKFWKDNASYPYKSHDLWFLTEDMRWGYIPADTDTKTLVDKVNRSDLWKEAAKAIKVADAEIPTSDSRGVETFFDGVKFDPANPKAYLDSLKIKKA

SEQ ID NO: 17950 - protein, 299 aa, Cyanothece sp. PCC 8801
MGKKVTLFILTLVLATTGQASSWAGQVLEKIKQTGVINAGTRKDAIPFGYINEQGKWVGYSLDVLEIIRKDVEKQLGKPIKLNLVEVTTQDRFNKIKDGSIDIECASTTFTWERNKTVDFTVSYFASGTKVLVKKDRGIGSVETLAGLKVGVIPKTTNEQAIKIQHPAAQLVMVKDRKEGLQKLEAGTIDAFASDGILLEGLKKESSNPNNLEVVPEFPYAYESYACMIPQDQSQWRNMVNYSLVKFMEGIVSDQPEPVAIYEKWFGEENGVTPYPRDSINDYFQGIVDSHEWIPLVNY

SEQ ID NO: 17951 - protein, 400 aa, Cyanothece sp. PCC 8801
MKDCIYLDNNATTQVDEEVLGAMLPYLTLYYGNPSSMHTFGGQVGSAIRTAREQVAALLGAEPSEIVFTSCGTEGDNAAIRAALAAQPNKRHIITTEVEHPAILNLCKNLERQGYTVTYLSVNNQGQLDLSELEASLTGNTAVVSIMYANNETGVIFPVEQVGQMAKEYGALFHVDAVQAVGKVPLNMAESTIDMLTYPAIKFMPPKGLVHICRRNTRFRPLLIGGHQERGRRAGTENVPGIVALGKAAELAAYHLQYGTSERELRDYLEQTILTIIPDTVLNGHPVQRLPNTSNIGFKFIEGEAILLSLNQYGICASSGSACTSGSLEPSHILRAMGLPYSVLHGSIRFSLSRFTTQEQIQKVLEVLPGIIDRLRALSPFNSDEAGWLVEQEKAALAKS

SEQ ID NO: 17952 - protein, 389 aa, Cyanothece sp. PCC 7424
MSKRPIYLDCHATTPMDKRVLEAMMPYFVEHFGNPSSTHLYGWEAEAGVKQARVTLAQAIGANPEEIIFTSGGTEANNLAIKGVAEAYFSKGRHIITVQTEHRAVLDPCQYLESLGFEVTYLPVQGDGLIDLDHLENALRSDTILVSVMVANNEIGVIQPIAEIGKICHNHQVLFHTDAAQALGKIPLNVHQQHIDLMSMTAHKIYGPKGIGALYIRRRNPRVHLASQIQGGGQEKGLRSGTLFTPQIVGFAKAVEIALLEMESQTKQIEMLRDRLWKQLSHLEGIHLNGHKTQRLAGNLNISVEGVDGNALLLGMQPTVAVSSGSACSSTSTAPSHVLTALGHRDSLAYASLRFGIGKFNTPEEIDQVATATITTIESLRSRLHQPIK

SEQ ID NO: 17953 - protein, 447 aa, Cyanothece sp. PCC 7424
MTQIDSVTHEGETPSANSSRLITLFTATCIVIANMIGTGVFTSLGFQVVDIQSGFALLFLWFIGGIFALCGALCYGELSATMPRSGGEYHFLSRIYHPVIGFLSGWVSVTVGFAAPIALAGMALGKYLSSVLPGINATFVAVAVVIGVSIIHSINVKVGSSFQQIFTLLKIGLIVVLIVFGLGLATPQAISFTPSAEDFPVIFSSPFAISLFYVTYSYSGWNAAVYLASEVKHPEKNLPRSLFWGTLLVMGLYLLLNFIFLYSTPIDKLAGQLEIGYIVANQIFGQSGGKLMALLISLGLISSISSMVWAGPRVTQAIGEDIPVFKLLAKKNRHGVPAYAIWFQLAIILILLISSSFEKVVTYLEFTLILSSFITVLGVFVSRFRFPELSRPYKTWGYPITPLIFLGISAWMLYFCFQDKPVESLAGLGTIFLGLPVYYLTSQQKFR

SEQ ID NO: 17954 - protein, 261 aa, Cyanothece sp. PCC 7424
MVKLGNLFPFSIALVLVTTSLISSSSILAAPLDEIMRRGKLIVGIKDNVKPLGFKNEQGDLQGFEIDIAQRLAQEILGSPDALVLRPVNNLERLEVVIEGTVDITIARVTITPSRSRVVDMSHYYYLDGTGLVTKNPSMRSLSDVTSARIALLKNSSTIVAIKSELPNAQLIGVNSYQEALTLLETNQADVFAADNSILAGWVQDYPQYRLLPVRLSGAALSIVMPKGLQYKSLHNRVNEAIARWQESGWLQERATYWGLP

SEQ ID NO: 17955 - protein, 433 aa, Cyanothece sp. PCC 7424
MRVKIGLLGLGTVGTGTAQILLDPWGRNPILKDIEIKRVGVRSPSKSRQVQVSPEVITTDLEQIVIDPEIDIVVELLGGLEPARSLILQAIAHKKHIVTANKAVIARYGDEIYEAANQAGVYVLLEAAVGGGIPIIKPLKQSLGANRIKSIVGIVNGTTNYILTQMTAAGADFGEVLAEAQKLGYAEADPTADVDGWDAADKIAILASIGFAGRVKREDIYCEGIRQISAADITYADKLGFVIKLLAIAEGSKGDDSETLQVRVHPTLVAKDHPLASINGVYNAILVTGEPLGQVMFFGPGAGAGPTASAVVSDIMNIVGILKSSGGQPQGLDPLLSVTHQHYCSLTAVEDLKTRFYARFLCQDVPGVIGHLGTCFGRHNVSLESVVQIGYQDQLAEIVVVTHEVREGNFRQALGEIEQSEAISSIPSVLRVL

SEQ ID NO: 17956 - protein, 401 aa, Cyanothece sp. PCC 7424
MGRANKVVLAYSGGVDTSVCIPYLIKEWGVQEVITLAADLGQGDELGPIKEKALKCGAVESLVVDAKEEFVKEYAFASIKANALYENRYPLSTALARPLITKLLVEAAEKYGADAVAHGCTGKGNDQVRFDVGIMALNPTLKVLAPAREWGMSREETIAYGEKFGVESPVKKSSPFSIDRNLLGRSIEAGPLEDPMTEPPEEIYLMTKAIADTPNEPEYIEIGFEKGIPVSLNGQTLDPVSLIVQLNEKVGKHGIGRIDMVENRVVGIKSREIYEAPALLVLIDAHRDLESITLTGDVTHYKRGIEETYSHLIYQGLWYSPLKEALDAFIDKTQERVTGMVRIKLFKGKATIVGRKSAYSIYSPDLATYGAEDQFDHKAAEGFIYIWGLPTRVWSQKTKGL

SEQ ID NO: 17957 - protein, 225 aa, Cyanothece sp. PCC 7424
MDLSLTQDKPLAAVFRRIGGGNYPPVVESYERGKTIFFPGDPAERVYFLLKGAVKLSRVYEAGEEITVALLRENSVFGVLSLITGERSDRFYHAVAFTPVELLSAPIDQVELALKNNPDLSMLMLQGLSSRILQTEMMIETLAHRDMGSRLVSFLLILCRDFGVPTPDGIRIDLKLSHQAIAEAIGSTRVTVTRLLGDLRQEGMISIHKKKITVHNPVALSQQFT

SEQ ID NO: 17958 - protein, 381 aa, Cyanothece sp. PCC 7424
METVQSPIIPVIGQLIRENPGTISLGQGVVSYGPPEKAIAAIPEFFLNLENHKYKTVIGISPLREIIAEKLSQENGISITPNNAVVVTAGGNMGFMNAILAITSPGDEIIINTPYYFNHEMAIMMADCRPILVNTDDTYQLRPEAIEAAITAKTKAVVTISPNNPTGAVYPEETLRRVNEICRHHNIYHIHDEAYEYFTYNGISHFSPASIPESEPYTISLYSLSKAYGFASWRIGYMVIPDHLLEPINKIQDTILICPPVISQYAALGALKTGKSYCQEHLPNIIAVRDIVLTSLQELQDRCTLAPADGAFYCFLKVHTNLEDFELVKTLIQTYKVAVLPGMTFGTQNGCYLRLAYGALKKDTAKEGIGRLVEGIKTIVK

SEQ ID NO: 17959 - protein, 396 aa, Cyanothece sp. PCC 7424
MQEAYIVSAIRTPIGRFGGSLSGMSPAELGAHAMKAALERANVAPEALDLYIFGNVLGAGHGQLVPRQAALKAGIPATVDGYRVDMVCSSGMLSLINAARTIRAGDADVVLAGGIESMSQTGFYLSHRARWGYKFLLGSPEQLVDLLLNDGLTDATTNEGMGDQVDRLCSDRGVSRELLDQIAAESQNRAETATEKGWFKNEIAAVEIQVKKETQILDTDEGIRAGTTPESLAKLRPAFKKDGVLTAGNSSQISDGAAALVIASQKAIDQYGLKPLAKILGGSWAGGQTWRFPEYPVHAVKKLLEAHKMHISDFDLFENNEAFALNNILFEKDLDVPHDKQNVFGGAIALGHPIGASGARVVVTLLNALTVQDKTLGLAAICHGTGGGTALAIERL

SEQ ID NO: 17960 - protein, 525 aa, Cyanothece sp. PCC 7424
MPRQIITQPKHTTRNRSSSPNNWARTPEKTSYLEPFRVIARLFSPYWLACIPLAALIVIVWHGAVAAQDTVEITVEGVSENVATVQGYLNMIWVLIAAILVIFMNAGFCMLEAGLCRQKNAVNILAKNLIVFALASIAYWIIGYSFMFGQGNPFIGGGGWFLSGSPETYGLSPFPAGLPVPVHFLFQVAFAGTAATIVSGAVAERIKFLDFLIFSLFLTGISYPITGHWAWNAGGWLYTLGFRDFAGSTVVHLVGGCAALMGAAILGPRLGKYNDGRINAIPGHNLSIATLGCLILWIGWFGFNPGSQLAVDQAVPYIAVTTNLAGAAGGISATATSWIKDGKPDLSMIINGILAGLVAVTAGCNVVSYWGATVIGLIGGIIVVYAVSFFDSIKIDDPVGALSVHLVNGAWGTLAVGIFADPNIPIAPEENAAAGLLYGNGGLIVTQIIGIVSVGLFTLILSSAAWMVLKATMGIRVTPEEEMEGLDVGEHGMEAYSGFVKEADVLGGTRPGTLSQIDMQTGSEV

SEQ ID NO: 17961 - protein, 550 aa, Cyanothece sp. PCC 7424
MGELNTAELLIKCLENEGVEYVFGLPGEENLHLLEALKHSPIQFITTRHEQGAAFMADVYGRLTGKAGVCLSTLGPGATNLMTGVADANLDGAPLVAITGQVGTDRMHIESHQYLDLVAMFAPVTKWNKQIVRPSITPEVVRKAFKVAQSEKPGAVHIDLPENIAAMRVQGEPLKIDSQEKTYASYRSLNMAATAISKASNPLILAGNGAIRSNASEALTEFATALNIPVANTFMGKGAIPYTHPLALWTVGLQQRDIITCAFERSDLIIAVGYDLIEYSPKRWNPDGSKQIIHIGISPAEIDSSYIPLVEAVGDISDSLLDILKRADRQGKENRVATGLRAEIRTEYEYYANDEGFPIKPQKLIYDLRQVMGPEDVVISDVGAHKMWMARHYHCDSPNTCLISNGFAAMGIAIPGAIAAKLVYPNKKIVAVTGDGGFMMNCQELETALRVGTPFVTLIFNDNGYGLIEWKQMNQFGESAFIKFTNPDFVKFAESMGLKGYRVESAADLIPILEDALKQDVPAVIDCPVDYGENLRFSQKAGDLSCQIWE

SEQ ID NO: 17962 - protein, 377 aa, Cyanothece sp. PCC 7424
MLRFLGILLLGTTPLTLMPIEPTLAGTLTGEPPIVIGHRGASGYRPEHTLAAYELAIIMGANYIEPDLVSTKDGILIARHENEISGTTDVASRPEFADRYTTKIIDGVEVSGWFTEDFTLEELKTLRAIERIPAIRPDNVQYNGLFQVPTLQEVIDLAKQKSAELGRIIGIYPETKHPSYFDSIGLSLEEPLVAILTANGYVDETAPVYIQSFEVGNLQDLNLLTDVSLVQLLSSSGQPYDFTLSGDPRTYLDLATPDGLSFIATYADGIGANKNLIIPRDAQGNLLSPTSLVDDAHDLGLIVHAWTFRNEDVFLPTNLQGQPKQEYKIFYSTGLDGVFSDHPDTAVSAIPEPLTILGTATALGFGAAFKRKLKEKQ

SEQ ID NO: 17963 - protein, 362 aa, Cyanothece sp. PCC 7424
MREETLFMTQWRFLLVAAMLLVTPLTACGGGNNTAGDTTAQTSTSGGTSRLDTVKARGTVICGINGEVPGFSFVDEQGQYSGLDVDMCRAVAAALFDDPTKVEFRKLTADQRFTAVQSGEVDILNRNTTWTISRDTSVGMDFAPTTFYDGQGIMVTKASGITKLEDLKGKSVCVLSGTTTEQNLADQMRKRGIEDYTPIASDDVDQLYAAYQEGRCEGVTSDRSQLVARRSVLPKPEDHVVLDVVLSKEPLGPVVADGDSQWSDTIKWITYATIEAEELGINSQNIGEFEKSEDPNVKRFLGSEGTLGEDMGLNNDFATRVIKHVGNYEEIYDRNIGKPLGLERGPNQLWTNGGLLYSPPFR

SEQ ID NO: 17964 - protein, 381 aa, Cyanothece sp. PCC 7424
MDFGVGFISTNIMLPILDFFYRIVPSYGFAIIALTLVIRFALYPLSAGQIRNMRKMRITQPLMKERQEEIQKRYKNDPQKQQEEMGKLMQEFGNPLAGCLPLLVQMPILFALFATLRGSPFADINYTVDVQILPREQIERVQPQTFATKPQNIYVNDGVHYPIAALLPGGNKLGVGDSTAVELQTAEGKPLSQVVADVPDTQLKPRYTVTKGSERLQINEDGTITALEPGDATLQVTIPGLAANTGFLFIEALGRVGAVSDDGKIHWDILGMVLFFGISIYINQELSGSKSGGANAQQQQAVNKITPVIFSGMFLFFPLPAGVLMYIVVANIFQTIQTVILMREPLPENLQKLLEQQEKTEKGREALPFEKRSKKKEKTSG

SEQ ID NO: 17965 - protein, 385 aa, Cyanothece sp. PCC 7424
MTQKTSQTSHQTSTFLPPLMISPTQILRGNNILSEAGKAIARLGQRPLIVGGNHTLTLVQPRLKGIFDRHNLVGSQGNYTPDCSENSLKSLTRLVEEHQADFIIGVGGGKALDISKLLADQCELPIVTIPTSGATCAAWSALSNIYSDEGAFLYDVPLSRCPDLLILDYDLIKTAPIRTLIAGIGDALAKWYEASVSSGSSTATLIISAVQQARILRDILLQKSASALQNPGGEDWREIVDATVLVAGVIGGLGGANCRTVAAHAVHNGLTHIPAAHDALHGEKVAYGILVQLRLEEMIQGNQLAVSARQQLLKFYEEIGLPKSLEDLGLKHITLSELRHAAEVACHPKSDIHRLPFPVIPEQLMAAMVSTTVLLESRYPQDIKS

SEQ ID NO: 17966 - protein, 532 aa, Cyanothece sp. PCC 7424
MTIAVPKEATVTEESVAPQKKPRKIGVPKETYPNESRVAVTPDTAKKLQKLGFEILIESGAGERANFSNQVYQQANCQIVDSSDDLWTQGDIILKVRPPSLEEAQKLPEGKTLISFIWPAQNGDLLEALASRQATVLAIDAIPRISRAQKMDALSSMANIAGYRAVVEAANHFGRFFTGQITAAGKVPPAKVLIIGAGVAGLAAVGAAKGLGAIVRAFDTRPVVKEQVESMGAEFLELDFAEDGSGQGGYAKVMSEEFIKAEMALFAQQAKEVDIIITTALIPGKPAPRLITEEMVSTMKEGSVIVDLAAEQGGNCEVTKPNQIYVYKGVTIVGLTDLPSRMANQASQLYGNNLWHLLKDMGGAQKYQVNLEDEVIRGALVLHEGQVTWPPPKPSQPTPQPHPPTPAKKPPVIIEDSHKNRASWLGLIGAILALLGIGIVAPASFLSHFTVFVLACFVGWQVIWSVTPALHTPLMSVTNAISGIIIIGGMLQISGPINSPTTILGAIAILVGTINISGGFLVTQRMLKMFRK

SEQ ID NO: 17967 - protein, 1551 aa, Cyanothece sp. PCC 7424
MNNNHSHNSIATQFSDNPYWGPRWLTEERDACGVGFIADLESGGSHRLIEQALAALGCLEHRGGCSADNDSGDGSGIMTAIPRAILEPWFVEHGMEMPPFAQLGVGMIFLPQDPQRREEAIAYVEEVVKGENLKILGWRDVPVRPELLGRQARENQPYITQLLVSSSEGLSGAQLDRVLYVARSRIGKRLADDFYVCSFSCRTIVYKGMVRGVILGEFYEDLKNPAYSSQFAVYHRRFSTNTMPKWPFAQPMRLLGHNGEINTLLGNINWMAAQEGDLGISGWSESQKEALTPIVNPDNSDSYNLDSTMELLVRTGRNPCEAAMILVPEAYSNQPELKDHPEIVDFYEFYSGLQEPWDGPALLVFSDGVTVGALLDRNGLRPARYCITKDSYVVVGSEAGVVPLDEADIVEKGRLGPGQMLAVDLEKGEILKNWEIKGRVAAAQPYGEWLRECRQEIGLESEPEAGLVSDGVSLLQYQTAFGYTAEDVEMILVPMAASGKEPTFCMGDDTPLAVLSDKPRVLYDYFKQRFAQVTNPPIDPLRESLVMSLTMFLGERGNLIAPDPAHIHQIKLETPILSSPQLEGLKKSGLKTVELSTLFAVLDGPEGLETAINQLCVTAADEVKAGAKVIILSDRAGGMISEETSYIPPLLAVGAVHHHLIREGLRLKASLVVDTAQCWSTHHLACLIGYGASAVCPYLAMKSIIAWWHDPKTQKLMENGKIEQVSLEGALSNFRKALEAGLLKILSKMGISLLSSYHGAQIFEAIGLGADLIKLGFRGTTSRVGGLSVVEVAQEVINVHKRAFPNLTAKKLENLGFVNYRPGGEYHMNSPEMAKNLHKAVELYERDGNGAPQEAFDYYELYRKYLSERPVTALRDLLEFNGDRSPINVDEVEPVEEIVKRFCTGGMSLGALSREAHETLAIAMNRIGGKSNSGEGGEDPTRFITLDDVNSEGKSAYFPHLNGLHNGDTASSAIKQVASGRFGVTPEYLINAQQLEIKMAQGAKPGEGGQLPGKKVSAYIAQLRRSKPGVTLISPPPHHDIYSIEDLAQLIFDLHQINPVAKVSVKLVAEIGIGTIAAGVAKANADIIQISGHDGGTGASPLSSIKHAGSPWELGLTEVHRVLLQNQLRDRVILRADGGLKTGWDVVMAAVMGAEEFGFGSIAMIAEGCIMARICHTNNCPVGVATQQERLRQRFSGTPAHVVNFFYFVAAEVRSILAALGYRSLDEVIGRSDLLQARSGVKVTKTSGLTVECLLNLPEVKTDRSWLNHEEVHSNGDVLDDEILGDPDIIQAIEQQKTVELEVAVLNTHRTVGARIAGVIAKKYGNDGFTGELTLKFKGAAGQSFGAFNLPGMKLFLEGEANDYVGKGMYGGEIVIVPPSDATYNPSDNSIVGNTCLYGATGGYLFVYGRAGERFGVRNSFATAVVEGTGDHCCEYMTGGVIVVLGSVGRNVGAGMTGGLAYFLDEDGSFPEKVNSDIKIQRIGTPVGEAQLKGLIERHGERTGSAKAKMILENWESYIGKFWQAVPPSEAQSPEVNRDAIAQSEKTLTSV

SEQ ID NO: 17968 - protein, 293 aa, Cyanothece sp. PCC 7424
MSQQLAFLGLGVMGAPMTANLVRHGYSVKAWNRTPNRPGVEIAENAGAIIVSSIQEAVETADLVFTCVGDVPDVEEVILGEQGVINYAKPNTLIVDFSTIGSKAAIKIGETLKQHNLRFMDAPISGGDIGAQKGTLTIMVGGNEPDFQECKPYLEAMGKTIRLCGSVGSGQAVKLCNQALVSLYMVGLCEAVEMAKQQGIDPNLMIEVCSTGAAGSWALTNLAPKITASDYNPGFMIKHILKDLRLVKETLNGSSDIIPGVDLADRLFKIVAEMDNGQGENQGTQAMIRAYQN

SEQ ID NO: 17969 - protein, 516 aa, Cyanothece sp. PCC 7424
MTVATNPTLKVNKIEKAKAEKDGLAVKDELENFIKIGWEEMDKTDLEMRLKWLGIFYRPVTPGKFMLRLRTPNGNLDSKKMRVLAEIIQRYGDDGSADITTRQNIQLRGVRLEDIPEIFRKLETVGMTSIQSGMDNVRNITGSPVAGIDADELIDTRELVKKVEDMITNNGQGNYAFTNLPRKFNIAIEGGRDNSIHAEINDIAFVPAYKQGELGFNVLVGGYLSAQRCAEAVKMDVWVAPNDDVVELCRAILTVYTENGLNEGLRTNRQKARLMWLIDKWGMEKFRSEVEKEFGKPLMRAALEDEITQDKKDYIGIYPQKQAGYSYVGLHVPVGRLDASAMFEIARLAEVYGNGEIRATVEQNFIIPFLKNEHLEAFLAEPLLQQFPVNPTPLTRSLISCTGNRYCNFAMIETKHRGLQLAQELDRELEIPQRVRIHWTGCPNSCGQVQAADIGLMGTKTRKNGEAVEGVDLYMGGKVGKDAKLGDLQQKGIPCEDLKPILRNLLIEQFGAKLKE

SEQ ID NO: 17970 - protein, 401 aa, Cyanothece sp. PCC 7424
MRDCIYLDNNATTKVDEEVLEAMLPYLTQYYGNPSSMHTFGGQVAKAVKTAREQVASLLGALDSEIVWTSCGTEGDNAAIRAALAAQPNKRHIITTAVEHPAVLNLCKLLEKQGYSVTYLSVNGEGLVDLAELEASITGNTALVSVMYANNETGVLFPIERIGSLAKERGALFHVDAVQAVGKISLDMKTSTIDLLTLSGHKIHAPKGIGALYVRKGTLFRPFMIGGHQERGRRAGTENVPGIVALGKAAALAESHLGNVGREQQLRDYLEQTILAIIPDTVVNGHPLQRLPNTSNIGFKYIEGEAILLSLDKHGICASSGSACTSGSLEPSHVLRSMGLPYSVLHGSIRFSLSRYTTQGEIDRVLEVLPTIIDRLRALSPFSSDNAQWLLEQEKALLVNS

SEQ ID NO: 17971 - protein, 394 aa, Cyanothece sp. PCC 7424
MQIYLDYSATTPPRPEVIEVMQQVLSQGWGNPSSLHSWGQRAATLIETARVQVGSLINAPNPESIIFTSGGTEANNLALLGVAQNYSTPRHIIISSVEHSAIAEPSRLLEQWGWEVTRLKVDRHGRIKPSDLKAAIQDNTVLISIIYGQSEVGTLQPIEELGLIARAYGIPFHTDAVQVAGRLPIDVQRLPVDLLSLSSHKFYGPQGAGALYVRQGINLHPFSRGGGQERGLRSGTQAVPNLAGFGLAAELAAQEMMTEIPRLISLRDRLFDQLADCPYLIPTGDRLHRLPHHVSYCLTHNLKGENTKILSGKTLVRQLNLAGIGISSGAACHSGKVSPSPILLAMGYSDTQALGGIRFSLGKETNEADIDWTAMVVKQILDRLIPPLAIIRSC

SEQ ID NO: 17972 - protein, 305 aa, Cyanothece sp. PCC 7424
MLLDSTPAVQQFLGSEQITPYSSAKVVILPIPYEATTTYRKGCENGPGAVLEASQQLEAYDEELEQETCIDVGIYTHSPIADTRYQFFSAEEMLHLTKETVSHLINDNKFVVAVGGEHAITTGVVQAYLETLKEPFTVIQIDAHGDMRSSFEGSIHNHACVMRRVLEMGLPTLPVGIRSICSEEAQLIKEKQIPVIWGRDIATGPDWIETAIARIPTEKVFITIDVDGIDPALIPGVGTPEPGGMGWYETLNFLKRVCQTHQVIGCDVMELAPVADSVVSEFTTAKLIYKLIGYVANSQNWQQTN

SEQ ID NO: 17973 - protein, 248 aa, Cyanothece sp. PCC 7424
MNPKILEIKNLTVNFDGFKALNSLNFSMETGELRVIIGPNGAGKTTFLDVITGKVQPTIGQVLFKGRNLQNLSEHQIARLGIGRKFQTPRVYQNLTVRENLDLACNKNKNVFSTLFSRPPAVEYRQVGGLLETIGLIPKADLAAALLSHGEKQRLEIGMLVAQSPDLLLVDEPVAGLTDEETENVGNLLLALAESHSIIVIEHDMEFVRQIARRVTVLHQGSVLCEGTMDEVQNDPRVIEVYLGCPTH

SEQ ID NO: 17974 - protein, 298 aa, Cyanothece sp. PCC 7424
MYKQFAITAITLLLTVTSQAPSWAGRVLDRIRQTGVITAGARTDAIPFGYKNEKGEWVGYSLDILELIRQETEKQLGKPIKLQLVEVTPENRFTKIKDQSIDIECGSTTVTWAREKEVDFSVSYFASGTKLLVKKGSQLETVESLAGMRIGVIPNTTNEKAIKFQQPAAQLVTVKDRLEGLQKLEKGEIDGFASDGIILEGLKQTASNSNALEIVPEYPYMYESYACVIPQDESQWRDLVNYSLIQYMGGIVSDQQSAVSIYERWFGFNGKVPYSRENINSYFQGIIDTYEWIPLIDY

SEQ ID NO: 17975 - protein, 638 aa, Cyanothece sp. PCC 7424
MGKVVGIDLGTTNSCVAVMEGGKPTVIANAEGFRTTPSVVAYAKNGDRLVGQIAKRQGVMNPQNTFYSVKRFIGRKFDEVTTETTEVSYKVLRDSNGNVKLDCPAQGKQFAPEEISAQVLRKLVDDASKYLGEQVTEAVITVPAYFNDSQRQATKDAGKIAGIEVKRIINEPTAAALAYGLDKKSNETILVFDLGGGTFDVSILEVGDGVFEVLATSGDTHLGGDDFDKKIVDYLADEFKKAEGIDLRQDKQALQRLTEAAEKAKIELSSVTQTEINLPFITATQEGPKHLDTTLTRAKFEELCSDLIDRCRIPVENAIRDAKIDKSALNEVVLVGGSTRIPAVQELVKKLLNKEPNQGVNPDEVVAVGAAIQGGVLSGEVKDILLLDVTPLSLGVETLGGVMTKIIPRNTTIPTKKSEVFSTAVDGQTNVEIHVLQGEREMSRDNKSLGTFRLDGIPPAPRGVPQIEVTFDIDANGILNVTAKDKGTGKEQSISITGASTLPQNEVDRMVREAESNAAADKERREKIDRKNQADSLVYQAEKQLSELGDKVPAADKTKAEGLIKDLKEAVQKEDDERIKTLMPELQQVLYSIGTSVYQQAGGAAGAPGGEPGAGGDGSTGTSGGGDDVIDAEFSETK

SEQ ID NO: 17976 - protein, 557 aa, Cyanothece sp. PCC 7424
MSNLLFSLLTQIALRTKEGFVRQTGHLEATQTQFLLTLLKTYQNTVLGQHWKFEEIKTVEQFRERVPVLSYGFYHPYVDQIAQGQANILTSEPVVYLNLSSGTTGKHKLIPVTKRSRKNRQIINQVAQGFLAEAVQKRQISLGKMLLTSSLQLTGYTEAGIPCGPVSVGDLRLSNFLYKQIFVHPYEALKPSDDLARHYVCLLFALQYPNLGIFGANFPVLALRLADYLEKNALELIQDLEKGTIAEWLTLEPELRGILTKQLTPQPGRAAHLREILHSEGRLTPQLVWPSIGCLVTARGGTSDFYFQRFSDYFGNTPIFGGIYAASEGAFGVYHDLDNDGAILAINTGFYEFIPSDQWDVEQPKTLLPQDLKVGEQYRILVSNYNGLYRYDVGDVVEVVGFYHQTPMITFKYRYKGLLSSTTEKTTEYHVIQVMGQLQQEFSLPLENFCITLSEKEIPPHYLVNIELRSGHFLPNPQQFVTQFDYKLREIHTSYAVKRNNSQVPPPRLRILAPGSFAKLRQHLLDKGMPESQLKFPHISEDRQFLTGLNVEKEVHP

SEQ ID NO: 17977 - protein, 200 aa, Cyanothece sp. PCC 7424
MSSSPYNPDNELDDDPIVTLTDESGRSLDCYIENALETADVAYFLLRPIDTPVVILAWDAEADEEDLSETFLVEDEPEIEKIFADAKAVLAELDLTLKHTAYTLTVSGELPPLDDEGILTLELNSDEQDRLEPEELQFLVSFYHLDQKYSIYTPLTPLLFLATYDNLGKIELVSPDDEDIQPILEELLFDEEELLFDEMD

SEQ ID NO: 17978 - protein, 601 aa, Cyanothece sp. PCC 7424
MALIVQKYGGTSVGSVDRIQAVAGRVKKTVDGGNTVVVVVSAMGKTTDGLVNLAKEISSNPSRREMDMLLSTGEQVSIALMSMALQELGQAAISMTGAQVGIVTEAEHSRARILEIKPDRIQSHLNGGKVVVVAGFQGISNSDELEITTLGRGGSDTSAVALAAALKADSCEIYTDVPGILTTDPRLVPEAQLMDEITCDEMLELASLGAKVLHPRAVEIARNYGVPLVVRSSWSEQPGTKVTSPVPKPRSLVGLELTKAVDGVEFDSDQAKVALLRVPDRPGIAARLFGEIAHQQVDVDLIIQSVHEGNTNDIAFTVIGGVLTKAEAVAEAIAPALRTHPTHTEEAEVLVEKRIAKIAIAGAGMIGRPGIAAKMFTTLAEAGVNIEMISTSEVKVSCVIDQKDTDKAIEALCEAFEVSSSPVETEKSSPESAPPVRGVALDRNQARIAIRHIPDRPGMAAKIFSVLAEKNISVDMIIQSQRCRIVEGVPRRDIAFTVAVGDALIAKKVLDDVSMAIGAGEVTVDSDIAKVSIVGAGMVGQPGVAARFFAALAQEKVNIQMIATSEIKISCVVAKNEGERALKAVHAAFELGGKDRVEVPA

SEQ ID NO: 17979 - protein, 295 aa, Cyanothece sp. PCC 7424
MKKLTLALLSLAFTLALPLKSGAETVLERVARTGVLTVGTPTDIVPLAYVNEQQELVGYSVDFLNLLKDQIQTQLGREIALQFVEITPSDGIPKLMSEEVDIICNAGFSWERDKFVDFSLSMGISGTQILVKQNTNLGSIDSLKGKRVAAIPKTIAEQVIRVSQPDATVVTVESMQQGFEAVEQGKVDAFAADGIILEGYQQTVSQPNAYKVVPEQPYNRQGIACMVPENNSKFLDTINFTIVRLMQGYLAQEPSSVEIIERWFGSQGIITVEPELIRNYFQDVINSREQIFIQQ

SEQ ID NO: 17980 - protein, 628 aa, Cyanothece sp. PCC 7424
MKISWRTILLWTIPLLVVGFFLWQGTFTPASSMIGNNTASTRMTYGRFLEYVEAGRVLSVDLYEGGRTAIVQAVDPLIENQVQRLRVDLPSNSPELISKLTERGVSLDVHPIRNDGALWGFLGNLLFPILLIAALFFLFRRSSNIPGGPGQAMSFGKSRARFQMEAKTGIMFDDVAGIDEAKEELQEIVTFLKQPEKFTAVGARIPKGVLLVGPPGTGKTLLAKAIAGEAGVPFFSISGSEFVEMFVGVGASRVRDLFKKAKENAPCLIFIDEIDAVGRQRGAGIGGGNDEREQTLNQLLTEMDGFEGNTGIIIIAATNRPDVLDSALMRPGRFDRQVIVDAPDVKGRLAILEVHARNKKLAPEVVLDAIARRTPGFSGADLANLLNEAAILTARRRKEAITMLEIDDAIDRVIAGMEGTPLVDSKSKRLIAYHEVGHAIVGTLLKDHDPVQKVTLIPRGQAQGLTWFTPNEEQGLITKAQIMARIAGAMGGRAAEEEIFGYDEVTTGAGGDLQQVTEMARQMVTRFGMSDLGPLSLESQNGEVFLGAGLMTRAEYSEKVATRIDDQVRAIIEHGHQMARQIIRDNREVIDRMVDLLIEKETIDGKEFRQIVCEYTNVPEKEQLLPLL

SEQ ID NO: 17981 - protein, 276 aa, Cyanothece sp. PCC 7424
MNKNKITLFFLSLICLTNYSLKVYAETVLEKIQRTGELNAGARIDAIPFGYKTDKGEWTGYSVELLRLIHQDLEKKLNKPIKLNLKEVTIDNRFQTVEKQQVDIVCGATTITQQRLEKVDFSIPFFMTGSQFLVKLEDATNFDINGTLKDKAIAYLPNTTTDQIIRQIYPFAKWQTVTNRDEGVRKLKAGEVTAVVSDGILLVGEIVRQGNNPRDFALMPNVPMTTELYACILPKNNPQWKEFVDQTIGSENNTQLQEQWFNLEKSPFPYIIRTNP

SEQ ID NO: 17982 - protein, 490 aa, Cyanothece sp. PCC 7424
MKSLDSFFKSQSQTPIIETLASLINKPDAAFYTPGHKRGQGSGQNLVNLLGSSVFRADLPELPELDHLFAPEGVIHKAQSLAAEAFGSAQTWFLVNGSTCGIMAAILATCQKGDKIILPRNIHQSAIAGLIVSGAVPIFVNPAYNPIDDLTYSITPEGLETALQENPDTKAVMIVYPTYQGICGDLEALISLTHRHNIPFLVDEAHGGHFAFHSLLPPSALSLGADLTIQSTHKVLGSFTQSSMLHLQGDLVNPQRITKALQLLQSSSPSYLLLASLDGARQQMALEGHQILTKTLQLAEIAREQLSQISGLSVLTLDNPRPEFRWLDITRLTVNVAQLGLTGYEVDEMLRQQMGVTAELPLLKHLTFIITFGNTQEDITKLVQGFAAIASSSSFNPLRVSVPFPLSDTPMGISPRDAFFRPTETLDIDQSVGYISAELVCPYPPGIPVLMPGEKITPQAVAYLQQVLSLGAMITGCSDPTLKTLNVVRF

SEQ ID NO: 17983 - protein, 405 aa, Cyanothece sp. PCC 7424
MKILVLNAGSSTQKSCLYDLTGDTLPQAPPKPIWKGDIDWTIATDHGLLEIKANGVEKKLNLSADDHLKGMSQMLDSLVQGETKVIDDLSEIEIVGHRVVHGGLNYTQATLITQEVKQTIADLIPLAPTHNPAHLEGIETVEKLLGNVPQLAVFDTAFHSTLPLEVAAYPLPYEWLEKGLRRYGFHGISHQYCVHRAAELLGKPLNSLKLINCHLGNGCSLAAVKDGISINTTMGFTPLEGLMMGSRSGSIDPEIPIFLIRDHGFTPEDVITVLNKKSGLKGVSGVSSDLRAIQKAIQEGNEKAQLAFKMYIHRLRFYIGAMLASLGGLDALIFTAGVGENSSEVREQACEAFGFLGLKLDQAKNESRPVDEDIATPDSKVRVLVIHTEEDWAIAKECWHQLTQK

SEQ ID NO: 17984 - protein, 442 aa, Cyanothece sp. PCC 7424
MTRLSRRKFILTAGATAAGTLIIHGCSSSTSETATSSSPSPNASPVAASGTGPEVTTAKLGFIALTDAAPLIIAKEKGLFDKYGMTGVEVLKQASWPVTRDNLELGSQGGGIDGAHILTPMPYLMTLGTITKTKQPVPMYILARLNLNGQAISVSNNYQDLKVGTDSKALKEVFTKAKSSGKEMKAAMTFPGGTHDLWLRYWLAAGGIDPNTDISVVPVPPPQMVANMKVGNMEAFCVGEPWNAQLVNQKLGYSALVTGQLWKDHPEKALTLRKDWADQNPKAAKAILMAVMEAQQWCDKAENKEEMCQIISQDKWLKVPATDIIARSKGEIDFGTGEVKKDFPQLMKFWSDNASYPYKSHDLWFLTEEIRWGYIPADTDTKKLVDEVNREDLWREAALELNVPETEIPKSPSRGVETFFDGVTFDPEKPEDYLKSLKIKKV

SEQ ID NO: 17985 - protein, 279 aa, Cyanothece sp. PCC 7424
MSNYLVKPFLKWAGGKRQLIKEIKNYIPKYTTYYEPFLGGGAILFALQPKQAVINDSNEELINCYRVIKDSVEALIEDLRKHKNESEYYYDIRQWDRNYDYEKKSSVERASRLIFLNKTCYNGLFRVNSQGQFNVPFGKYKNPNILEESLLISIHHYLNNNKIEILNTDFKEAVKTAKQGDFVYFDPPYDPLSDTAYFTAYDINCFNQDEQKRLKLTVDDLTRRKCQVLLSNADTPFIRELYKDYKIVTVSASRFINSNKFKRGKVNEVLVINDHYTNS

SEQ ID NO: 17986 - protein, 247 aa, Cyanothece sp. PCC 7424
MVETLETHKEKILVVDDEASIRRILETRLSMIGYDVVTAADGEEALETFRQTSPDLVVLDVMMPKLDGYGVCQELRKESDIPIIMLTALGDVADRITGLELGADDYVVKPFSPKELEARIRSVLRRVEKNGAPGIPSSGVIHVGSIKIDTNKRQVYKGDERIRLTGMEFSLLELLVSRSGEPFSRSEILQEVWGYTPERHVDTRVVDVHISRLRAKLEDDPSNPELILTARGTGYLFQRILEPGEEL

SEQ ID NO: 17987 - protein, 388 aa, Cyanothece sp. PCC 7424
MKIAVPREKEIGEMRVALVPDIVSRLTKKGFQVLVETGAGEAAHFHDQNYIDAGAEIITDTKQLWQEADILVKVAPPGEFDGEAEINSLRPGSILISFLDPLRNPENILKIAQRQITAFSMELIPRTSRAQSMDALSSQANIAGHKATLLAAAHLPRMFPMMTTAAGTIPPAKVLVLGAGVAGLQAIATARRLGAVVEAFDIRPTVKEEVQSVGAKFIDIPLQEETNAGGGYAKEVSNNTQEVIRQVLTEHIKKADVVITTAQVQGKKAPLLVTEDMIAQMKRGSVIVDLAAEQGGNCAHTEAGKDVQYHGVTIIGPVNLPASLPIDSSQMYSKNLQTLVQYLVKDGEIELNFDDDIIDSACVTHAGEIRNSRIKDLLPSQESSVISY

SEQ ID NO: 17988 - protein, 362 aa, Cyanothece sp. PCC 7424
MEIGVPKEIKDQEFRVGLSPGSVRVLSESGHTVFIETQAGLGAGFTDLDYQQAGAKIVNTPTEAWHKEMVVKVKEPLPSEYNYIQKEQLLFTYLHLAADRTLTESLIESGVTGIAYETVELPNKTLPLLTPMSIIAGRLSVQFGARYLEKQQGGRGVLLGGVPGVRPGKVVILGGGVVGTEAAKIAIGMGAQVQILDVSVDRLSYLETLFGSRVELLYSNSTQIERVVPDADLLIGAVLVTGRRAPILVPRQLVSKMRPGSVIIDVAVDQGGCIETLRPTSHSHPTYIEENVVHVGIPNMPGAVPWTATQALNNSTLPYVVKLANEGLNALQTDAALAKGLNVKNHCLIHPAVCEVFPDLAR

SEQ ID NO: 17989 - protein, 506 aa, Cyanothece sp. PCC 7424
MFQKKLNNVKSINKLFTSHRQVSILLGGIILLIWVEAALAQSSSFTRIDQVKQELQVGLDTFWVIFAGCLVFFMNAGFAMLESGFCRQKNVVNILAKNLIVFTLATIAFWSVGFGIMFGDGTPFLGLNGFFLSGIDNSPATGENYQGVFKALANVGIPLKAKFFFQLMFAGTAATIVSGAVAERIKFLGFFLFSLVLVGFCYPITGHWIWGGGWLQRLEFYDFAGSTVVHSVGGWAALVGAVILGPRIGKYEGGKSFALPGHNLTLSTLGCFILWLGWFGFNAGSTLKADAGVISHILLTTNMAAAVGGLAATITTWVYFGKPDLSVIINGILGGLVGITASCRFVSTGGAALVGLIAGVLIVFAVDLFDKLQIDDPAGAISVHLVGGIWGTLAVALLAVGPNSELYTIGPAQGLFLGGGLDGIKQLFIQLLGIASVSLFTVLISWGVWSLIEVTIGLRVPPEAELKGLDISEHGLQAYTGFMLKSDVSPMVAGIISKLNKKHKSM

SEQ ID NO: 17990 - protein, 156 aa, Cyanothece sp. PCC 7424
MGKIRLMHAKLHRVRVTEANVGYIGSITIDPQLLDRVGILPLEEVDIVNLNNGKRFSTYVFPGEAGTGEVCPNGGAALLCQPGDLLIIYAYEERDRSEVLQQGHHARVIVADENNQIKQFFHQTLIPTEEGKGVSFHSDEIILNGQPKNNPILSEN

SEQ ID NO: 17991 - protein, 114 aa, Cyanothece sp. PCC 7424
MTPENQTLTPEVKARIDKLVKDNKILVFMKGNKLMPQCGFSNNVVQILSVLGVPFETVDVLADFEIRQGIKEYSNWPTIPQVYINGEFVGGSDIMIELYQSGELQEMVEVALAS

SEQ ID NO: 17992 - protein, 211 aa, Cyanothece sp. PCC 7424
MIYLDSALITEAEIALKFGWVKGITTNPTLLAKSDLSPQETLKKLAAISPGELYYQLTATNFEEMIAEGQQAFQLIGSKTVLKVPATEVGFQVVASLSKNIPCSVTAIYSAAQAAVAYQAGAKYAIAYVNRATRLLGDGLQLVREMAAVLQGTGVEILAASLKSPQEAADALQAGADHLTVPLTLLQAMTTHELSQKTVEDFNQQGRGILS

SEQ ID NO: 17993 - protein, 318 aa, Cyanothece sp. PCC 7424
MNHDDIIPQPSNIYSIPIAPEGFKSGFVAIIGRPNVGKSTLMNQLVGQKIAITSPVAQTTRNRLQGILTTSEAQIIFVDTPGIHKPHHELGKVLVKNAQMAINAVDLVLLVADSSIEAGGGDRYIIDLLEETKTPVILGLNKSDQQPANFDPLDESYRQLAQFHQWPMVKFSALTGSGLDLLQSLLVEHLDPGPYYYPPDLVTDQPERFIMGELIREQILLLTRQEVPHSVAVVVENVEETPKLTRVFAAINVERNSQKGIIIGKNGSMLKAIGSAARQAIQKLIEGEVYLNLFVKVEPKWRQSRLRLAEFGYRVEET

SEQ ID NO: 17994 - protein, 330 aa, Cyanothece sp. PCC 7424
MSYSATLTLQPIVQSLSESNRLRLFSGSANVPLAQEVARYLGMDVGPMIRKQFADGEIYVQIQESIRGCDVYLIQPCCNPVNANLMELLIMIDACRRASARQITAVIPYYCYARADRKTAGRESIAAKLVANLITEAGANRVLAMDLHSAQIQGYFDIPFDHVYGSPVIIDYLLSKELPDLVVVSPDVGGVARARAFAKKLNDAPLAIIDKRRQTHNVAEVMNLIGDVKGKTAVLVDDMIDTAGTITEGAKLLREKGARQIYACATHAVFSGPAVSRLSSGSIQEVIVTNTIPVLEDKHFEQLTVLTVANVLGEAIWRIHEDSSVSSMFR

SEQ ID NO: 17995 - protein, 256 aa, Cyanothece sp. PCC 7424
MSDVILSVRNLTANVDGSPILKGVNLEIKAGEVHAIMGRNGSGKSTLSKVLTGHPSYEVTGGEVLYKGESLLDKEPDERALNGIFLAFQYPLEIPGVSNIDFLRVAYNARQKHLGLEEIDTFDFEDLVEEKLEVVKMNSSFLERSLNEGFSGGEKKRNEILQMALLEPTLAILDEIDSGLDIDALKIVANGVNQLAKPDNAFLLITHYQRLLNYIEPDFIHVMYDGRIVKSGTKELALELEEKGYDFLDEKILTEV

SEQ ID NO: 17996 - protein, 527 aa, Cyanothece sp. PCC 7424
MAKVLVSDPIDQVGIDILSQVAQVDVQTKLSPEELIKIIPEYDALMLRSQTKVTKEVVEAGTQLKIIGRAGVGVDNIDVPAATRQGIVVVNSPEGNTIAAAEHALAMMLSLSRHIPDANQSVKENKWDRKRFMGTEVYKKTLGVVGLGKIGSHVAGVGKSLGMKLLAYDPFISKERADQIGCTLVDLDLLFSEADYITLHIPKTPDTTHLINQEALAKMKPNVRIINCARGGVIDEDALAEFLQEHPDAGAALDVFEQEPLGESKLRGLPNVILTPHLGASTAEAQVNVAIDVAEQIRDVLLGLPARSAVNIPGLTPDVMEKLRPYLQLAETLGNLVAQLAGGRIEQLTVRLQGDLAANETQPIVVAAIKGLLSEALRERVNYVNAAIEAKERGIRVIETRDASIRDYSGSLHLEAKGSMGEHSVTGALLSNGEIRITDLDEFPINVPPSNYMLFTLHRDMPGIIGKIGSLLGSFNVNIASMQVGRKIVRGDAVMALSLDDPLPEGILSEITKVAGIRDAYTVKLSI

SEQ ID NO: 17997 - protein, 387 aa, Cyanothece sp. PCC 7424
MKLATRVGKVTPSLTLTISAKAKAMKGQGIDVCSFSAGEPDFDTPTHIKEAAKQALDQGKTKYGPAAGEPKLREAIAKKLYQDNHLNYAPENVMVTNGGKHSLFNLMLALIEPGDEVIIPAPYWLSYPEMVTLAGGTSVIVPTTPESDYKITPEQLEEAITPQTKLFVLNSPSNPTGTVYTPQEIAELAQVIVEHDLLVVSDEIYEKILYDGAEHKSIASFGDDIFQRSIISNGFAKSYSMTGWRIGYMAGPKELIKAMTTIQSHSTSNVCTFAQYGAIAALESSQECVEQMCRAFAERRQVMLERVNQINKLSCPVPNGAFYVYVDISQTGMTSLDFSDKLLESHQVALIPGIAFGNDTTVRLSYATDMATIEKGMDRIAEFMSSL

SEQ ID NO: 17998 - protein, 701 aa, Cyanothece sp. PCC 7424
MTSSLYISITEPNSGKSIITLGILELILRKTFKVGFFRPIIQEESQRKKDRHIDCLINHFQLPQSYQESYGVTYAEVNQLMGQKKIDDILEKIIVKYKKLEQKCEFILCEGSDYLGESSAFEFDLNIEIAKNLGCPILILGNAYQNSLDDALAPIQVAVNAYREQHCQIVGIIINKVTKSLVQLLKKNLEQEYKDSGYLLAVIPYSKRLASPRVREVVALLQAQVLYGHSQLDNLVFGYLVAAMQMQHAIPQFRVNDLIVTPSDRGDIIIGAIQAHQSTNYPNLAGIVLTTEYPLDTSIRTLIEGLGETLPILWVSSYTYETASRLQSMNSSISAGDKEKINWSIELFEKYVDWTELEKQISTIRVQGMTPKRFTYNLVQQAKWQKKHIVLPEGKEPRILAASAVLLSREIVDITLLGRPSDIEKTIRNNGINLDINNLKIINPVESENFEYYAQSLYEVRKHKGMTLDAAKDLLADVSYFGTMMVYQGDADGMVSGAVHTTQHTIRPALQIIKTEPDCSIVSSVFFMCLSDEVLVYGDCAVNPNPNAEQLAEIAISSALTAKRFGIDPRIALLSYSSGESGVGVEVEKVRQATQIAKQRRPDLKLEGPIQYDAAVDKAVGAQKMPGSEVAGQANVFIFPDLNTGNNTYKAVQRETGAIAIGPILQGLRKPVNDLSRGCTVEDIINTVVITAIQAQSLNCD

SEQ ID NO: 17999 - protein, 546 aa, Cyanothece sp. PCC 7424
MNTVGKYLCDRLKSLGVDHVFGVPGDYVLDLMDVLGENSLELVGTCNELNAGYAADAYARVKGLGAVCITYGVGGFSLVNAVVGAYAERVPLVVISGAPNSSVRNSRNHLLLHHTTGDYNLQYSIMEKATVASVILTNATQAPSQIDKAFAACLHHKRPVYIEIPQDLVNQPCKPCEPLEIPPPNFTDTEALKEAVQEAADLLEAAQRPVILAGVEFHRFGLEEKLLNLLETTGYPIATTLLGKSCISEAHPQFIGTYVGALSRENVTGRIETADCVLCLGAIMSDMNLGGNTAKLDQNKLINANSDKVKIKHHFYDPVFLGDFIDELTSKLTHKEYESLDIKPAYYLRIKEFTPQPEQKITNLRFYERLNHFINDGFMVISDTGDAIVATIDLLMTKGTDFIGQAFYLSIGYSIPACLGAGLASNSRPMVFVGDGAFQMTAQELSTIIRHNLNPIIFLINNDGYTIERVIKDGTYNDLQPWKYHQLPRIFGKSWSCEVRTEGELEEALTQAKANTDCVSFIEVHLDRFDCAQGLIRLGRALRGKS

SEQ ID NO: 18000 - protein, 377 aa, Cyanothece sp. PCC 7424
MVQYLVSLITSVAIYALFALGLNLQWGFTGLINFGHVAFMTLGAYATAQLSLLGVPVIIAVGVGLFFAALLGLLIGTSTLRLREDYLAIVTIGVSELLRLVVNNEQWLNQYGQWREGSFGIQGYPLPLNFQPSPFISIVMIAILTLLAIWSEWQLWQAVSKQWKEGKEIKDKSYQPNQPISIIIWGIIATSFIVFVYVNGIIALSNYTYQAGLMLLSLLILGVIYGLLEFLVRSPWGRILKAIREDEEIPRALGKNVFWYKLQAFMLGGAIAGLAGTFFAWQITTIYPTNFEPLLTFYAWIIVVLGGAGNNAGTILGAIIFWAYDSLTRFILPQVALLDSTQIGAFRIMVIGLILMVLMVWRPQGILGKKEELTLNR

SEQ ID NO: 18001 - protein, 472 aa, Cyanothece sp. PCC 7424
MVDQLIIAGTFILFLLLFIIVGVYSSTHKQNTTTDYLLASRNVNPWLTALSAMSTGQSALLFTGQIGFTYTVGISSIWLVIGWAIGDYIAWWLVFKRLREVSEATNSETVSAFLGQEKSGSRWIIILSALITLAFVGSYAAAQLVAGSKALFAVFGWDYYWGIIVGAVVVAVYCFSGGIRASIWTDAIQSIIMIGSLLLLLFVALNYCGGIGELWTKLSNIDPSLVSFKPSNIPLGIIPFFIGWVGAGFGVVGQPHILIRAMAINSAKKIGFARNIKVIAALITSFSATGIGLAARVIMPSLGTSGDPELALLYLSIELLPLVLVGLMLAGLFSATISTADSQILSCSAALTQDIFPQASNSYRWVKLGTLTVTMIVMAIALSGEKNVFFLITFSWSALASGLGPLLVLRVWQLPVNSLVAIAMMIVGISTALIWNLVFKLSGIMYEVLPGMVASTLVYLIARFFTPQKVTQ

SEQ ID NO: 18002 - protein, 619 aa, Cyanothece sp. PCC 7424
MVSSIPKTTLPLTFIAQKQTGAYALMDSLKRHGVKHIFGYPGGAILPIYDELYRFEARGDIQHILVRHEQGAAHAADGYARATGKVGVCFGTSGPGATNLVTGIATAHMDSIPMVIITGQVSRPAIGSDAFQETDIFGITLPIVKHSYVVRQASDMARIVAEAFHIASTGRPGPVLIDVPKDVGLEECDYIPVEPGDVKLTGYRPTVKGNPRQINAALHLIETAERPLLYVGGGAIAANAHAQIHELAERFGIPVTTTLMGLGAFDEHHPLSVGMLGMHGTAYANFAVTECDLLIAVGARFDDRVTGKLEEFASRAKVVHIDIDPAEVGKVRAPDVPIVGDVRQVLEQMLQRVREMDYPTVPERTKDWLERINRWREDYPLMVPTYPDSIAPQQVIVELDRQAPRAYYTTDVGQHQMWAAQFLKNGPRRWISSAGLGTMGFGMPAAMGAKVAVSDEEVICISGDASFQMNSQELATLAQYNIKVKTVIINNGWQGMVRQWQQTFYGERYSSSNMQPGMPNFELLAQAYGVKGMTVTDPAQLPDAIAEMLAHDGPVLMDVHVRRDENCYPMVAPGKSNAQMIGLPERQASNGAVEVIQCTNCGTESPKHNNFCPQCGTKL

SEQ ID NO: 18003 - protein, 403 aa, Cyanothece sp. PCC 7424
MYSPSLVANSGGSSNNDNRLFVYEVVGLAKNGNTDNLNYPVRQGGSVFITVPYGRMNQEMRRLTRMGAKIVSIKPLNGEIPLQMTASQPTQQATKETEKGKSMTQAKAKAKGDIPVNIYRPNSPFIGKCVENYPLVGEGGSGIVQHLTFDLSGGDLHYVEGQSIGIIPPGTDDKGKPHKLRLYSIASTRHGDKKDDKTVSLCVRQLEYEHPETKETVYGVCSTYLCHLEVGADVAITGPVGKEMLLPEDEDANIIMLATGTGIAPFRAFLWRMFKEQHEDYKFKGLAWLIFGVPYSANILYKEDLEEIEKTYPDNFRLTYAISREQKNAEGGRMYIQHRVGEYAEELWKLMQNPKTHTYMCGLKGMEDGIDQALGAMAAQNGADWSEFQKQMKKEHRWHVETY

SEQ ID NO: 18004 - protein, 396 aa, Cyanothece sp. PCC 7424
MSSNNFQPPNSQFNGHSSEAQRALEKEAKLPLTGWQQEVNQGLEYGLEAAESINDRSIPTFSRGELPHYAGINTFLKAPYLEDVRQVGNYDVAIVGVPHDSGTTYRPGTRFGPQGIRRISALYTPYNFELGVDLREQITLCDVGDIFTIPANNEKSFDQISKGIAHIFSSGAFPIVLGGDHSIGFPTVRGVCRHLGDKKIGIIHFDRHVDTQETDLDERMHTCPWFHATNIKNAPAKNLVQLGIGGWQVPRQGVKVCRERATNILTVTDITEMGLDAAVDYAVERATDGTDCVWISFDIDCIDAGFVPGTGWPEPGGLLPREALYLLGKIVQRVPVCGLEVVEVSPPYDISDITSLMATRVICDTMAHLVLSGQLPRQEKPAYIHPEAQTEATPWS

SEQ ID NO: 18005 - protein, 338 aa, Cyanothece sp. PCC 7424
MQFIDQAEIEVQAGKGGDGIVAFRREKYVPAGGPSGGNGGRGGSVILVAVEHLQTLLDFRYSRHFKAEDGKRGGPNNCTGANGSDRIIEVPRGTMIYDADTEEIIGDLVDNEQRLCIAQGGKGGLGNQHFLSNKNRAPEYALPGLEGEHRRIRLELKLLAEVGIIGLPNAGKSTLISALSSARPKIADYPFTTLIPNLGVVRKPTGDGTVFADIPGLIEGAHEGVGLGYDFLRHIERTRLLLHLVDLTAEDPIKDYQIIQQELEAYGRGLIDRPQIIGLNKLDAVDETVVTQIENDLSQITSDPIFKISAVARIGLDQMLQATWEQLDSNPSEVNISH

SEQ ID NO: 18006 - protein, 627 aa, Cyanothece sp. PCC 7424
MCGIAGIYNYSESFSLDEIRKNICQMTDALTHRGPDDHGVWCQENIALGHRRLSILDLSPLGGQPMFSNDRNIVTVFNGEIYNFQELKRELEKDYSFQSQTDTEVIIAAYKKWGEACVEKFSGMFAFALWDISKNSLFLARDHLGIKPLYYYQTNGLLLFASEIRSLLATSLIKRSIDPISLKLLLSYQTVPAPRSILQDVQILLPGNALIIKNGQVKQWCYWKPNHYVINKPIIDYEKSIQIQVAERLQTAVKNHLVSDVPLGVFLSGGIDSSTLVGLARQASLEDIHTVSIIFDEPEYNELSYISQVAERFQTQHTNVHLSSTDLLKQLPKFLEDLDRPTGDGVNSYVVSQAARDVGLTVVLSGTGGDELFGGYPSFSRIAKFRQWFFLQRLLPKWLRKQSAYTAQFLSVPINLYKLFAFLGTDGSIAELHPITREVFNNYQINQLLSDGLRENFYINELRNAYSQNMAQEDIFNQISYAELITYLRDLLLIDIDQTSMAHGLEVRVPFLDKNFVEFVLGLPGYLKAQGNSPKSLLTCSFPHLLPSQIQKRNKQGFTLPFEIWMKGSLKHFCEERLAELNQLNFSQDKVWQFWKKFQQGDKSLSWSRLWLLVVLSDWCNRHKITI

SEQ ID NO: 18007 - protein, 565 aa, Cyanothece sp. PCC 7424
MTNHPKNISALMPGLKRLKSYQKAWVWADVLAGVTVAAYLIPQCMAYGELAGLEPVVGLWAILPPMILYTLFGSSPQLSVGPESTTAVMTAAAISSLTLTQGSNYASLATVLAGVVGLVCIIGYGFRLGFLASLLSKPILIGYMAGVAIIMISRQLSKISGIPLESGTPLGEVTEFCAKISQLHWPTFILSLLVLVFLFAVARYSPKSPGPLLAVLLATATVATFKLDRYGVALVGPIPAGLPHLALPIIPLEQFLPLIASAIGIAIVGYSDNVLTARAFASRNHYQVDANQELLALGIANLGNGLMQGFPISSSGSRTTIGDSLGSKSQVFSLVALIVVIFVLLFLRPVLALFPKPALGAIVIYAATKLIEIPEFIRLKKFRRTELALALSTTVGVLLTDILVGVAIAVSLSILDLLARISHPHDAVLGEVRGMPGLHDIADWSETKTIPGLVIYRYDAPLCFANVEDFKRRAMDAIEAEWVPVEWFVLNTEAIVELDLTAVDALREFYNELKVRNITLAMARVKQDLYVQLEGSGLLTLMGSDHVYFTLHTAIAAFFERHEDD

SEQ ID NO: 18008 - protein, 159 aa, Phalaenopsis hybrid cultivar
MSDEEHHFESKADAGASKTYPQQAGTIRKNGYIVIKGRPCKVVEVSTSKTGKHGHAKCHFVAIDIFNQKKLEDIVPSSHNCDVPHVNRTDYQLIDIAEDGFLSLLTENGNTKDDLKLPTDDNLLTQIKDGFAEGKDLVVTVMSAMGEEQICALKDIGPK

SEQ ID NO: 18009 - protein, 350 aa, uncultured bacterium
KPVGAAISIWPNGVKCLNWLGMKAPLRALGGPMHYMAYHDYLHGQIMTRFSISPLVESVGERPYPVARAELQAMLLDTYGRDAVQFGKRVTHIEESDSGVTAWFDDGTEARGDLLIAADGTHSVIRQHVLGYQTERRYAGYVNWNGLVEIDPSIAPADQWTTFVGEGKRVSLMPVSGNRFYFFFDVPLPKGLPEDRTTLRADLQRYFAGWAAPVQKLIASINPETTNRIEIHDIEPFMQLVKGRVALLGDAGHSTTPDIGQGGCAAMEDAIVLATALQTNSLGIEDALLRYQEKRAWRVKDLVLKARKRCDVTHGKEMAITEQWYQELKQETGERILSGMCETILGGPLE

SEQ ID NO: 18010 - protein, 319 aa, Streptomyces aureofaciens
MSETGQMLLFSGRAHPELAEAIAAELGTTLVPTKAIDFANGEIYIRYHASVRGADCFVVQSHTAPINKSIMEQLIMIDALKRASARSITVILPFYGYARQDRKHSGREPISARLVADLLKTAGADRILTVDLHADQIQGFFDGPVDHLFAMPVLADYIGSKVDREDLTVVSPDAGRVRVADGWCDRLGAPLAIVHKRRDKDVAHQVTAHEVVGDVRDRVCVLVDDMIDTGGTICAAADALFAQGAKDVIVAATHGVLSGPAADRLKNSRVSEFVFTDTLPVPGALGLDKVTVLSIAPLIAGASREVFENGSVTRLLQSR

SEQ ID NO: 18011 - protein, 265 aa, Debaryomyces hansenii
MAKSRFEYVKQFERENFLLPDTYLIVRVDGKGFHKFSEEYEFSKPNDIRALKVMNNAAKNLMAQFPDIMMAYGDSDEYSFLLRRKCSLFERREMKLVSTFASFISVNYLYEWNLEFPEKQIRLERLPTFDARIVVYPTIKHIRDYFSWRQVDCHINNLYNTTFWTLVIKGGMTGREAENKLLGTVSSDKNEMLFKEFGINYNNESEIFKKGTILVREYDYTREGDDLSKRQQQRVEKQRKKASIEEYHLDIIGDTFWNERPWLLE

SEQ ID NO: 18012 - protein, 557 aa, Debaryomyces hansenii
MRSDIPETLQNFVSTKTVHQTWAKTFFCKPQAIFQPRTVDEIRELVDQARINGKTIMTVGSGHSPSDMTMTKEWLCNLDRFNQVLKKEEFSGPTRNGEGEEVKFVDLTVQAGCRIYELNRYLKENELAIQNLGSISDQSMAGVISTGTHGSTQYHGLVSQQVVSIEIMNSAGKLITCSSMENTQLFKAAMLSLGKIGIITHVTLRTIPKYTIKSKQEIIKFDTLLKNWDTVWLDSEFIRVWWFPYSGNCVCWRASKSSEPLSKPRDSWYGTWFGRKFYESLLWISVHICPHLTPLIEKFVFKNQYGDVETLGHGDVAVQNSVEGLNMDCLFSQFVNEWSTPLSSGQDVLIKLNDVIQTAREQNRFYVHAPIEVRCSNLTYSEKPFVDENDEPSLYPNKKWLAKRDRLSPGPIPGNNLRPYLDNSSNLRYDGDGANVTNDQLTLFINATMYRPFHTNVNSQEWYQLFEDIMTNASGRPHWAKNFIGVNGAHRTDQDLRKQLEFGGKTSYSMKGFNPILKKWFGENLVEYNKVRESMDPDNVFLSGKDWAVRNGILIDV

SEQ ID NO: 18013 - protein, 316 aa, Debaryomyces hansenii
MNAASDTSSGRENHLKKGSKVSPYEALIAGSLSGAIARGIIAPLDTIKIRLQLQIQGYDTYKGASKTFVSICKNEGVKALWKGNVPAEILYILYGAIQFTSYSALSKALSEFEKNNRNLFTISNSTHSLIAGSGSGLASTFFTYPFDLLRTRLAANSEAHFLSMSSTIKSIYEMHGIGGFCKGLTPGLLSVASSTGLMFWSYELAREFSNNYKDVIPFLEGFCGFIAGATAKGLTFPLDTLRKRIQMLSKTRDIDQNSIKAIQLCKTILKNEGIFGFYKGFSISILKSAPTSAISLFTYEYSLSAIKEFTSKHKKL

SEQ ID NO: 18014 - protein, 776 aa, Schizosaccharomyces pombe
MIGSINESPIEEHMNDSPSTKEKADSVDISDYIVSHSDDSLSKDIKKDTKSFLDVEHGEISTVDEFEEDSPYPEVRAAVPPTDDPSMPCNTIRMWTIGLIYSTVGAAVNMFFSLRNPTVTLSVLISELLAYPALQIWDLIFPDREFRIGRLKFNFKPGPFNVKEHALIVVMSSVSFGNAYSTDIILAQRVHYKQRFGFGYEICLTLATQLIGYGLAGLSRRLLVRPASMLWPVNLVQCTLIKTLHRKDLRNAVANGWRISPFRFFLYVFIASFIWNWFPSYIFQALSLFAWVTWIRPNSPTVNQIFGESTGISILPMTFDWNQISAYILSPLMAPADALMNILLGVILFFWIVTPALNFTNTWYGDYLPISSSGIIDHFGNSYNVTRILTKDATFDLDAYQNYSPIFMSTTYALAFGLSFASITSVIFHVILYHGKEIYDRLRDPPAPDIHEKLMKAYDEVPFYWYLSVFLAFFGMMMGTIYGWKTETPWWVIIVGVIFSAVWFIPIGIVQAITNIQLGLNVFTEFIVGYMYPGRPLAMMIFKTVGYITMTQGLAFAADLKFGHYMKLPPRIMFYTQMIATIWSCFVQIGVLDWALGNIDNVCQADQPDNYTCPNATVFFNSSVIWGVIGPKRMFSGKNTYTGLQYFWLAGVLGTILFWALWKKWPQKWWGQLNGPLIFGGTGYIPPATPVNYLAWSGIGLFFNYYLKKIFADWWQKYNFTLSALDTGTQLSVIILFFCLQLPMVNFPDWWGNDGAFNTLDATGAAVRKLVNESAR

SEQ ID NO: 18015 - protein, 296 aa, Salvia officinalis
MEAIGVLMMCPMNNYLDEELDKRFKLLRYWTQPKQSEFLAQQADSIRAVVGNASAGADAALIDALPKLEIVSNFSVGLDKVDLVKCKEKGVRVTNTPDVLTDDVADLAIGLMLAVLRRICECDKYVRRGAWKLGDFKLTTKFSGKRVGIIGLGRIGLAVAERAEAFDCPINYYSRSKKANTNYTYYGSVVELASNSDILVVACALTPETTHIVNREVIDALGPKGVLINIGRGPHVDEAELVSALVEGRLGGAGLDVFEKEPEVPEQLFGLENVVLLPHVGSGTVETRKAMADLSR

SEQ ID NO: 18016 - protein, 400 aa, Campylobacter jejuni subsp. jejuni NCTC 11168
MLIVQKYGGTSVGTLERIEAVANRVIQSAQQGNQLVVVVSAMSGVTNTLIEQAEYFSKTPNGKDMDMLLSSGERVTSALLSIALNEKGCPAISFSGRKAGIITDSVFTKARIHHIDTKAIKSELQNGKIVVIAGFQGVDEEGNVTTLGRGGSDLSAVAVAGALNADLCEIYTDVDGVYTTDPRIEPKAKKLDKISYEEMLELASLGAKVLQNRSVELAKKLNVNLVTRSSFNNNEGTMITKEDGMEQALVSGIALDKNQARVTLRNIEDKPGIAAEIFSVLANENINVDMIIQNVGVDGATNLGFTVPQNELELAKNAMQKILSSKTTIESDSAVLKVSIVGVGMKSHSGVASKAFKALADEGINIGMISTSEIKISMIVHEKYGELAVRALHECYGLDK

SEQ ID NO: 18017 - protein, 501 aa, Campylobacter jejuni subsp. jejuni NCTC 11168
MMANLYLMRSRSDELNTIISTNLLKNYSKIYKNIAIYCPVIYIHRVPVLQGWLEEFNINQTVKSAYGFTFREAMEEFSKDPHNFFNVILEEYEELKRKYDFVLVNSFCEFGILDGFDLSIKLAKNLNTPIAAIINDEDKLIAQKYFDHALDGRNYVLINENFNFEEVQKLKEYDFITPHRFKYELIKQSIKNKKTVVLPESNDERILKAAEILLKSKVVDLILLGDEEKIKQDATRLSLDLSAMQIMNPLNSEYNQKFTSILYEARKSKGMSLEEAKMLVQDKTYFGTLLIHTGKADAMVSGASTTTAETIRPALQLIKTKEGISSVSGIFFMGLEDQVLAFADCAVNPSPTAEQLATSAYVSAMTAKSFGLEPRIALLSYSSGDSGKGESVDLVKEALKIAKEKYPELNIDGPMQFDCAYDPKTAAKKMPNSKIAGHANVYIFPDLNAANICYKAVQRTANALAIGPILQGLKKPVNDLSRGCLVDDIVDTVILSAIQAQ

SEQ ID NO: 18018 - protein, 396 aa, Campylobacter jejuni subsp. jejuni NCTC 11168
MKILVLNSGSSSIKFKFFDNKVVKASGLVEKIGEQNSKVVLKNTLNNESFERELTINNHEEGLSIVNELFKESGILADLNALDGCGHRIVHGGRNLSEHCLVDDYVLKEIDRVSIFAPLHNPAHLAGIKTMIKAAPSVANAAIFDTAFHRTMPDFAYMYALPYDFYDKHNIRRYGFHGTSHAYVSSRAAKFLQKDQNELNVISAHLGNGASVCAIEKGKSVDTSMGFTPLEGLVMGTRCGDLDPAILPFISHLKGLTIEEIDTLMNKKSGVYGICGYNDFRDIEREIEQGNDKARLALDMFCYRLVKYIGSYFAVLPKTDAIIFTGGIGENDSLVRQKVCERLAHLGIELDFELNKQRISGERMINHANSKVKVLVIPTDEELEIARITEELIGKN

SEQ ID NO: 18019 - protein, 495 aa, Campylobacter jejuni subsp. jejuni NCTC 11168
MIKERLMEVVQINTPIAVMFVVYALLMLYIGFYFYKQNKNSEDYFLGGRTMGPVISALSAGASDMSGWLLMGLPGALYVSGFIDSYIAIGLTIGASLNWIFVAKRLRIYTSVIANSLTIPDYFETRFDDDKHILRIVCAVVILIFFTFYVSSGLVSGAKLFESTFGIRYDYALTTGTIIIVAYTFLGGYKAVCWTDMIQGLLMMMALIIVPLVMLYHLGGFGEAMNIVREIKPQALSMGEGVGIVSIISALAWGLGYFGQPHILVRFMSIRSTKDIPMATFIGIAWMAVCLLSACMIGILGIAYVHKFELSLQDPEKIFIVMSQLLFNPWIAGILLSAILAAIMSTASSQLLVSSSTIAEDFYKKIFREDAPSHIVLNLGKLGVLLVAVIAFLISTDKNSSVLSIVSYAWAGFGASFGSVMLFSLFWSRMTRVGAILGMITGAATVVLWKNFANSGLYEIVPGFLVASVVIIIASLFTNVRSGTKAAYEKMLKEF

SEQ ID NO: 18020 - protein, 412 aa, Debaryomyces hansenii
MYCRVFTHFSLYRLYTLSDNININKTNHNKSIGLHQHRVNYMPRSMTASSSQLKRIETRIESLSESLSKSNARKPLGKFQLNTFDNNKITKLQNEKVRPSKSSHIPVKSPIRKKGHSPAQVLQNERMDTKLLLQKLPSASRHMTLDDFEIGKVLGKGKLGKVYCVKHKTSGYIAALKVMAKKDLIDLKLEKNFRREIEIQSNLIHPKISRLYGFFYDHKNVYLILEYSIHGELYHHLKVQRRFNDATASHYIYQVALALDYLHTKHIIHRDIKPENILLSTDNCIKLSDFGWSVKSSPSSSTKRLTICGTLDYLPPEMIESNEHDYTVDIWSLGILCYEFLVGKPPFEEIDKNSTYKRIAKVDLKIPSFLSSEATDLILRLLQKSPKKRITLAEVMNHPWIMNNQQYWPNEN

SEQ ID NO: 18021 - protein, 220 aa, Hordeum vulgare subsp. vulgare
MDKHQLFDSSNVDTTFFAANGTHDAARARARRRRRRSARCGGGDGDGGEMDGGGDPKKRRLTDEQAEILELSFREDRKLETARKVYLAAELGLDPKQVAVWFQNRRARHKNKTLEEEFARLKHAHDAAILHKCHLENELLRLKERLGATEQEVRRLRSAAGSHGASVDGGHAAGAVGVCGGSPSSSFSTGTCQQQPGFSGADVLGRDDDLMMCVPEWFLA

SEQ ID NO: 18022 - protein, 394 aa, Acidithiobacillus ferrooxidans ATCC 23270
MAAIRHILCLNSGSSSIKFAVFALGPAGEEKLAEGAAERIGQSIGRLWLQRGQDPITDRQLVLSHHQNALEAVFAALTEARYATPDGVGHRIVSGGPRHQAHCLVDTQVLGDLRASLRFAPLHLPAEIAAIEAVQAVWPGIPQVACFDTAFHQSIPEVAARLPLPRNLWHEGVRKYGFHGLSYEYIVSRLPNHAAGKTIIAHLGNGASMAAVHNGQCRDTTMGLTPTGGLVMGTRSGDLDPGVLLYLMEEKGYNAAQLERLLNHLSGLLGISACSGDMQTLLGLRNDDAHAAQAIEMFAYSARKAIGGLMAVLGGLDRLVFTGGIGEHAAAIRWAICRPLRGLGLEIDPIANEGPEPCISVAHSPVEILVVPTNEDLMIARHCHRLLPTREQHR

SEQ ID NO: 18023 - protein, 229 aa, Acidithiobacillus ferrooxidans ATCC 23270
MGNSKEALLLRLHHTPLFSAWPNDMIAPLLAQSQPLTLESGEILFAEGSPARSFYFLAVGRINLIAAAATGQEKIVEIIQPDDLFAEAVAFLGGRYPVTAQADATTTVLEIPLDLFVATLEQRPLLMRQMLARLSMRLHFLVKELRHLSVESAEQRLASYLLELCPVVNSPAAIELPAKKAAVAARLGLTPETLSRVLSRMRKAGLIEVEQRTISIPDPLALRRWAGGR

SEQ ID NO: 18024 - protein, 632 aa, Acidithiobacillus ferrooxidans ATCC 23270
MCGLVGWIGSDASTRAGAVAYARDLMVSRGPDDAGIWHDDHACMGFRRLSILDLSIAGHQPMLSVDSRLTLVFNGEIYNFRELRKLLENEYTFRSHTDTEVLLHGYRAWGWEGLLDRIDGMFAIALWDANMQQLHLARHRFGKKPLFYAQTNLGFAFASTLEALRSLAGLNEVDLAAVDAFLVYQAVPAPLTFFRGASALLPAHALTYSLETRDLSVERYWDVAVRPLERIDESEAIDHVDHLLRTAVRRRLIADVPVGAFLSGGIDSGLVTSMMAQEGTVETVTLGFAEAAFDERVYARQVAARWGLRTHETVLNVETLVEQLPRILSQVGQPHADVSLVATDAVAAAAHEHFTVVLNGDGGDEVFGGYARPVVARAAAQVRRIVPGPLRATFRRFPCGGPGPMRKLGLLLRAASQPPESTAIYTRGLRGVRAQAYAPAFWDTVAQIDPDALYRKAWAHLDQAEDAERALYLDLTTYLPDQLLSKMDTATMAHSLEARSPLLDRALVEFGMRLPITLKLKHYRTKYLLKRLAERYLPHDVIYRRKQGFVIPLAAWLRGRLLPYVEAAFRHQSFVSREWLLADFLSELLTRFKAGDDAVAGTLWTVFVLAIWAALLDGELNASDSLDALLTG

SEQ ID NO: 18025 - protein, 402 aa, Acidithiobacillus ferrooxidans ATCC 23270
MSSAYMDNNATTRVDPQVLETILPYFSEYYGNPSSMHSFGGDVGKRLEEARASVQALLGVEHDSEIIFTSCGTESDNTAILSALAIQPSRREIITSVVEHPAILSLCDHLERHEGYKVHYIPVDRLGRISMEAYAAALSEQVAVVSMMYANNETGTIFPVESMARMAKEKGALFHTDAVQAVGKIALNMQESAIDMLSLSGHKLHAPKGVGALYVRRGTRYRPMLRGGHQERGRRAGTENTTGIIALGLAADMALEHMEYENTVVRALRDRLEAGILAQVPYAFVNGDPEHRLPNTSSISFEYIEGEAILMLLSRVGIAASSGSACTSGSLEPSHVLRAMDIPYTAAHGTIRFSLSRETTEAEVDWVIAQTPPIVEQLRRLSPYWGANGPILTDNAFAPVYA

SEQ ID NO: 18026 - protein, 407 aa, Acidithiobacillus ferrooxidans ATCC 23270
MRIDPDRPIYLDYQATTPVDPIVLEQMLPFLTHDFGNAASRSHPYGWTAEKAVEKARQQVADTIHADPREIVWTSGATEATNLALKGAAHFYSGKGRHLVTLRTEHKATLDTCRQLEREGFEVTYLEVQEDGLVDLQVFEAALRPDTIMASVLYVNNEIGVIQPMEEIGRILRAHKILFHVDAVQALGKIPVDVEAIQADMMSLSGHKIYGPKGIGALYVRRKPRVRVEAQIHGGGHERGMRSGTLPTHQIVGMGAAAELAVQSMESDGKRIRQLRDRLLEGIRERVEETYINGNMEHRVPHNLNISFAFVEGESLIMALKEIAVSSGSACTSASLEPSYVLRALGKSDELAHSSIRFGIGRYTTEEEIDATIGLIAAKVDKLRELSPLWEMHQEGIDIHSIQWAAH

SEQ ID NO: 18027 - protein, 327 aa, Acidithiobacillus ferrooxidans ATCC 23270
MEYEICLEPSGIRFMADEHQNIVEAAKQHGISIKHGCASGSCGDCKGTILSGASEQGPFMPLLLLPTERAAGMAILCKLYPRSDLRLHAEVVRKDTWKTEITQLTPLAWNVLELRLRPERPYPYRTGQYARIAIPGRPDQWRSYSMATPPGTTGELVFHIRELPGGIFSQWLFHTAQRGDALILGAAQGEFALSPDNDRDMLCIAAGTGLAPIEAMIQESIALGRTRPIHLFYGARKRADFYHLEELTRWSQQYPHITITSTLSDRQDASWTGAHRLLPTVAASGHWKDHEVYLCGSPGMIEAAIDLLLSHDVRHDHIHFDAFAPNG

SEQ ID NO: 18028 - protein, 652 aa, Capparis frondosa
ILHRIDVGIVIDLEPARTEDSALSIAGAVQSQKLAVRAISQLQSLPGGDIKLLCGTVVESVRELIGYDRVMVYKFHEDEHGEVVAESKRDDLEPYIGLHYPATDIPQASRFLFKQNRVRMIVDCHATPVRLVQDDELMQPLCLVGSTLRAPHECHAQYMANMGSLASLAMAVIINGSDEEGTNVNSGRSSMRLWGLVVCHHTSARCIPFPLRYACEFLMQAFGLQLNMELQLASQVSEKRVLRTQTLLCDMLLRDSPTGIVTQSPSIMDLVKCDGAAFLYQGKYYPLGVTPTEAQIKDIVEWLLAYHGDSTGLTTDSLADAGYPSAAALGDAVCGMVVAYITKRDFLFWFRSHTAKEIKWGGAKHHPQDKDDGQRMHPRSSFKAFLEVVKSRSLPWENAEMDAIHSLQLILRDSIKESEATNSKAVVQTHQPGGDMAVQGLDELSTIAREMVRLIETATVPIFAVDVDGHINGWNAKIAELTGLSVEEAMGKSLVHDLICKEYEEAVDKFLSHALRGVEDKNVEIKLKTFGPELHKRALFVVVNACSSKDYLDNIVGVCFVGQDVTGQKIVMDKFIHIQGDYKAIIHSPSPLIPPIFAADENTCCLEWNTAMEKLTGWSREEIIGRTLVGEVFGSCCRLKGPDTLTNFMIVL

SEQ ID NO: 18029 - protein, 652 aa, Capparis frondosa
ILHRIDVGIVIDLEPARTEDSALSIAGAVQSQKLAVRAISQLQSLPGGDIKLLCDTVVESVRELTGYDRVMVYKFHEDEHGEVVAESKRDDLEPYIGLHYPATDIPQASRFLFKQNRVRMIVDCHATTVRLVQDDELMQPLCLVGSTLRAPHECHAQYMANMGSLASLAMAVIINGSDEEGTNVNSGRSSMRLWGLVVCHHTSARCIPFPLRYACEFLMQAFGLQLNMELQLASQVSEKRVLRTQTLLCDMLLRDSPTGIVTQSPSIMDLVKCDGAAFLYQGKYYPVGVTPTEAQIKDIVEWLLAYHGDSTGLSTDSLADAGYPSAAALGDAVCGMVVAYITKRDFLFWFRSHTAKEIKWGGAKHHPQDKDDGQRMHPRSSFKAFLEVVKSRSLPWENAEMDAVHSLQLILRDSIKESEATNSKAVVQTHQPGGDMAVQGLDELSTIAREMVRLIETATVPIFAVDVDGHINGWNAKIAELTGLSVEEAMGKSLVHDLICKEYEEAVDKFLSHALRGVEDKNVEIKLKTFGPELHKRALFVVVNACSSKDYLDNIVGVCFVGQDVTGQKIVMDKFIHIQGDYKAIIHSPSPLIPPIFAADENTCCLEWNTAMEKLTGWSREEIIGRTLVGEVFGSCCRLKGPDTLTNFMIVP

SEQ ID NO: 18030 - protein, 652 aa, Isomeris arborea
ILHRIDVGIVIDLEPARTEDPALSIAGAVQSQKLAVRAISQLQSLPGGDIKLLCDTVVESVRDLTGYDRVMVYKFHEDEHGEVVAESKRADLEPYIGLHYPATDIPQASRFLFKQNRVRMIVDCHAMPIHVIQDERLTQPLCLVGSTLRAPHGCHAQYMANMGTMASLAMAVIINGSEEDGSNVTGGRNSMRLWGLVVCHHTSPRCIPFPLRYACEFLMQAFGLQLNMELQLALQMSEKRVLRTQTLLCDMLLRDSPSGIVMQSPSIMDLVKCDGAAFLYHGKYYPLGVAPSEAQIKDIVEWLLANHGDSTGLSTDSLGDAGYPGAATLGDAVCGMAVAYITRKDFIFWFRSHTAKEIKWGGAKHHPEDKDDSQRMHPRSSFKAFLEVVKSRSLPWENAEMDVIHSLQLILRDSLKESEAINAKAAVRADQPGGSNAVQGLDELSAVAREMVRLIETATVPIFAVDVDGHINGWNAKIAELTGLSVEEAMGKSLVHDLIYKEYEEPTAKLLSCALKGDEGKNVEIKLKTFSQELEGKAVFVIVNACSSKDYLNNIVGVCFVGQDVTGQKIVMDKFIHIQGDYKAIVHSPSPLIPPIFAADENTCCLEWNTAMENLSGWSRSEVIGKMLVGEVFGSCCRLKGPDALTKLMIVL

SEQ ID NO: 18031 - protein, 632 aa, Polanisia dodecandra
  misc_feature (19)..(19): Xaa can be any naturally occurring amino acid
  unsure (1)..(632): unsure at all Xaa locations
PALSIAGAVQSQKLAVRAXSQLQSLPGGDIKLLCDTVVQSVRDLTGYDRVMVYKFHEDEHGEVVAESKRGDLEPYIGLHYPATDIPQASRFLFKQNRVRMIVDCHATPVRVIQDERFKQPLCLVGSTLRAPHGCHAQYMANMGTMASLAMAVIINGNEEDTNSVAGGRNSMRLWGLVVCHHTSARCIPFPLRYACEFLMQAFGLQLNMELQLALQMSEKRVLRTQTLLCDMLLRDSPAGIVTQSPSIMDLVKCDGAAFLYQGKYYPLGVAPSEAQIKDIVQWLLANHADSTGLSTDSLADAGYPGAAALGDAVCGMAVAYITRRDFLFWFRSHTAKEIKWGGAKHHPEDKDDGQRMHPRSSFKAFLEVVKSRSMPWENAEMDAIHSLQLILRDSFKESEAINAKAAVRADQPGGAMTVQGLDELSAVAREMVRLIETATVPIFAVDVDGRINGWNAKIAELTGLSVEEAMGKSLVHELIYEEYEETVEKLLSRALRGDEDKNVEVKLKTFNRELEGKAVFVVVSACSSKDYLNNIVGVCFVGQDVTGQKIVMDKFIHIQGDYKAIVHSPNPLIPPIFAADENTCCLEWNTAMEKLTGWSGAEVIGKMLVGEVFGSCCQLKGPDALTKFMIVL

SEQ ID NO: 18032 - protein, 632 aa, Cleome hassleriana
PALSIAGAVQSQKLAVRAISQLQSLPGGDIKLLCDTVVESVRDLTGYDRVMVYKFHEDEHGEVVAESKRADLEPYIGLHYPATDIPQASRFLFKQNRVRMIVDCHATPVCVIQDERLTQPLCLVGSTLRAPHGCHAQYMANMGSLASLAMAVIINGNEEEAGSVAGGRNSMRLWGLVVCHHTSARCIPFPLRYACEFLMQAFGLQLNMELQLALQMSEKRVLRTQTLLCDMLLRDSPTGIVTQKPSIMDLVKCDGAAFLYQGRYYPLGVAPSEAQIKDIVEWLLANHGDSTGLSTDSLADAGYPGAATLGDAVCGMAVAYITRKDFLFWFRSHTAKEIKWGGAKHHPEDKDDSQRMHPRSSFKAFLEVVKSRSLPWENAEMDAIHSLQLILRDSFKESETVNTRVAVRADQPGGDMAVQGLDELSAVAREMVRLIETATVPILAVDVEGRINGWNGKIAELTGLSVEEAMGKSLVRDLIYKEYEETVEKLLSHALRGEEDKNVEIKMKTFSRELEGQAVFVVVNACSSKDYLNNIVGVCFVGQDVTGQKIVMDKFIHIQGDYKAIVHSPNPLIPPIFAADENTCCLEWNTAMEKLTGWSRAEVIGKMLVGEVFGSCCRLKGPDTLTKFMIVL

SEQ ID NO: 18033 - protein, 383 aa, Aethionema saxatile
PALSIAGAVQSQKLAVRAISQLQSLPGGDIKLLCDTVVESVRDLTGYDRVMVYKFHEDEHGEVVAESKRDDLEPYIGLHYPATDIPQASRFLFKQNRVRMIVDCHTTPVLVIQDERLTQSMCLVGSTLRAPHGCHSQYMANMGSIASLAMAVIINGNEEDGNNGRNSMRLWGLVVCHHTSARCIPFPLRYACEFLMQAFGLQLNMELQLAMQMSEKRVLRTQTLLCDMLLRDSPAGIVTQSPSIMDLVKCDGAAFLYNGKYYPLGVAPSEAQIKDIVEWLLANHADSTGLSTDSLGDAGYPGAVALGDAVCGMAVAYITNKDFLFWFRSHTGKEIKWGGAKHHPEDKDDGQRMHPRSSFKAFLEVVKSRSQPWETAEMDAIHS

SEQ ID NO: 18034 - protein, 654 aa, Arabidopsis halleri
ILHRIDVGVVIDLEPARTEDPALSIAGAVQSQKLAVRAISQLQSLPGGDIKLLCDTVVESVRDLTGYDRVMVYKFHEDEHGEVVAESKRDDLEPYIGLHYPATDIPQASRFLFKQNRVRMIVDCNAKPVLVVQDDRLTQSMCLVGSTLRAPHGCHSQYMANMGSIASLAMAVIINGNEEDGSNVASGRSSMRLWGLVVCHHTSSRCIPFPLRYACEFLMQAFGLQLNMELQLALQMSEKRVLRTQTLLCDMLLRDSPAGIVTQSPSIMDLVKCDGAAFLYHGKYYPLGVAPSEVQIKDVVEWLLANHADSTGLSTDSLGDAGYPDAAALGDAVCGMAVAYITKRDFLFWFRSHTAKEIKWGGAKHHPEDKDDGQRMHPRLSFQAFLEVVKSRSQPWETAEMDAIHSLQLILRDSFKESEAAMNSKAVDGAVQPCRDMAGEQGIDELGAVAREMVRLIETATVPIFAVDAGGCINGWNAKIAELTGLSVEEAMGKSLVSDLIYKENEETVNKLLSRALRGDEERNVEVKLKTFSPELQGKAVFVVVNACFSKDYLNNIVGVCFVGQDVTGQKIVMDKFINIQGDYKAIVHSPNPLIPPIFAADENTCCLEWNMAMEKLTGWSRSEVIGKMLVGEVFGSCCMLKGPDALTKFMIVL

SEQ ID NO: 18035 - protein, 634 aa, Arabidopsis lyrata
  misc_feature (521)..(521): Xaa can be any naturally occurring amino acid
  unsure (1)..(634): unsure at all Xaa locations
PALSIAGAVQSQKLAVRAISQLQSLPGGDIKLLCDTVVESVRDLTGYDRVMVYKFHEDEHGEVVAESKRDDLEPYIGLHYPATDIPQASRFLFKQNRVRMIVDCNAKPVLVVQDDRLTQSMCLVGSTLRAPHGCHSQYMANMGSTASLAMAVIINGNEEDGSNAASGRSSMRLWGLVVCHHTSSRRIPFPLRYACEFLMQAFGLQLNMELQLALQMSEKRVLRTQTLLCDMLLRDSPAGIVTQSPSIMDLVKCDGAAFLYHGKYYPLGVAPSEVQIKDVVEWLLANHADSTGLSTDSLGDAGYPDAAALGDAVCGMAVAYITKRDFLFWFRSHTAKEIKWGGAKHHPEDEDDGQRMHPRLSFQAFLGVVKSRSQPWETAEMDAIHSLQLILRDSFKESEAAMNSKAVDGAVQPCRDMAGEQGIDELGAVAREMVRLIETATVPIFAVDAGGCINGWNATIAELTGLSVEEAMGKSLVSDLIYKGNEETVNKLLSRALRGDEEKNVEVKLKTFSPELQGKAXFVVVNACFSKDYLNNIVGVCFVGQDVTGQKLVMDKFINIQGDYKAIVHSPNPLIPPIFAADENTCCLEWNMAMEKLTGWSRSEVIGKMLVGEVFGSCCMLKGPDALTKFMIVL

SEQ ID NO: 18036 - protein, 654 aa, Barbarea vulgaris
ILHRIDVGVVIDLEPARTEDPALSIAGAVQSQKLAVRAISQLQSLPGGDIKLLCDTVVESVRDLTGYDRVMVYKFHEDEHGEVVAESKRDDLEPYIGLHYPATDIPQASRFLFKQNRVRMIVDCHATPVLVVQDDRLTQSMCLVGSTLRAPHGCHSQYMANMGSIASLAMAVIINGNEEEGNNVGGGRSSMRLWGLVVCHHTSSRCIPFPLRYACEFLMQAFGLQLNMELQLALQMSEKRVLRTQTLLCDMLLRDSPAGIVTQSPSIMNLVKCDGAAFLYHGKYYPLGVAPTEAQIKDIVEWLLANHADSTGLSTDSLGDAGYPGAAALGDAVCGMAVAYITKRDFLFWFRSHTAKEIKWGGAKHHPEDKDDGQRMHPRSSFQAFLEVVKSRSQPWETAEMDAIHSLQLILRDSFKESEAAMNSKSVDGAVQPCRDMSGEQGLDELGAVAREMVRLIETATVPIFAVDTGGCINGWNAKIAELTGLSVEEAMGKSLVSDLIYKENEETVNKLLSRALRGDEEKNVEVKLKTFSPELQEKAIFMVVNACSSKDYLNNIVGVCFVGQDVTGQKIVMDKFINIQGDYKAIVHSPNLLIPPIFAADENTCCLEWNTAMEKLTGWSRGEMIGKMLVGEVFGNCCRLKGPDALTRFMIVL

SEQ ID NO: 18037 - protein, 653 aa, Brassica oleracea
ILHRIDVGVVIDLEPARSEDPALSIAGAVQSQKLAVRAISQLQSLPGGDIKLLCDTVVESVRDLTGYDRVMVYKFHEDEHGEVVAESRREDLEPYIGLHYPATDIPQASRFLFKQNRVRMIVDCHATPVLVVQDDRLTQSMCLVGSTLRAPHGCHSQYMANMGSIASLAMAVIINGSEEDGSSVAGGRSSMRLWGLVVCHHTSSRCIPFPSRYACEFLMQAFGLQLNMELQLALQMSEKRVLRTQTLLCDMLLRDSPAGIVTQSPSIMDLVKCDGAAFLYHGNYYPLGVAPTEAQTKDVVEWLLANHADSTGLSTDSLGDAGYPGAAALGDAVCGMAVAYITKRDFLFWFRSHTAKEIKWGGAKHHPEDKDDGQRMHPRSSFKAFLEVVKSRSQPWETAEMDAIHSLQLILRDSFKESEAAMNSKTADGAVQPYSMAGEQGIDELGAVAREMVRLIETATVPIFAVDAGGCINGWNAKIAELSGLSVEEAMGKSLVSDLIYKENEETVDKLISRALRGDEDRNVEIKLKTFSPELQGKAVFVVVNACSSKDYSNNIVGVCFVGQDVTGQKIVMDKFINIQGDYKAIVHSPNPLIPPIFAADENTCCLEWNTALEKLTGWSRSEVIGKMLVGEVFGSYCRLKGPDALTKFMIVL

SEQ ID NO: 18038 - protein, 634 aa, Camelina microcarpa
PALSIAGAVQSQKLAVRAISQLQSLPGGDIKLLCDTVVESVRDLTGYDRVMVYKFHEDEHGEVLAESKRDDLEPYIGLHYPATDIPQASRFLFKQNRVRMIVDCHATPVLVVQDDRLTQSMCLVGSTLRAPHGCHSQYMANMGSIASLAMAVIINGNDEDGSNVASGRSSMRLWGLVVCHHTSSRCIPFPLRYACEFLMQAFGLQLNMELQLALQMSEKRVLRTQTLLCDMLLRDSPAGIVTQSPSIMDLVKCDGASFLYHGKYYALGVAPSEVQIRDVVEWLLANHADSTGLSTDSFGDAGYPGAAALGDAVCGMAVAYITKRDFLFWFRSHTAKEIKWGGAKHHPEDKDDGQRMHSRSSFKAFLEVVKSRSQPWETAEMDAIHSLQLILRDSFRESEAAMNSKTVDGAVQPYKYMAGEQGIDELGAVAREMVRLIETATVPIFAVDAGGCINGWNAKIAELTGLSVEEAMGKSLVSDLIYKENEETVSKLLSRALRGDEDKNVEVKLKTFSPELQGKAVFVVVSACSSKDYLNNIVGVCFVAQDVTGRKIVMDKFINIQGDYKAIVHSPNPLIPPIFAADENTCCLEWNTAMEKLTGLSRSEVIGKMLVGEVFGSSCRLKGPDALTKFMIVL

SEQ ID NO: 18039 - protein, 634 aa, Camelina microcarpa
PALSIAGAVQSQKLAVRAISQLQSLPGGDIKLLCDTVVESVRDLTGYDRVMVYKFHEDEHGEVVAESKRDDLEPYIGLHYPATDIPQASRFLFKQNRVRMIVDCHATPVLVVQDDRLTQSMCLVGSTLRAPHGCHSQYMANMGSIASLAMAVIINGNDEDGSNVASGRSSMRLWGLVVCHHTSSRCIPFPLRYACEFLMQAFGLQLNMELQLALQMSEERVLRTQTLLCDMLLRDSPAGIVTQSPSIMDLVKCDGAAFLYHGKYYPLGVAPSEAQIRDVVEWLLANHADSTGLSTDSLGDAGYPGAAALGDAVCGMAVAYITKRDFLFWFRSHTAKEIKWGGAKHHPEDKDDGQRMHPRSSFKAFLEVVKSRSQPWETAEMDAIHSLQLILRDSFKESEAAMNSKTVDGAVQPYKDMSGEQGIDELGAVAREMVRLIETATVPIFAVDAGGCINGWNAKIAELTGLSVEEAMGKSLVSDLIYKENEETVSKLLSRALRGDEEKNVEVKLKTFSSELQGKAVFVVVNACSSKDYLNNIVGVCFVAQDVTGQKIVMDKFINIQGDYKAIVHSPNPLIPPIFAADENTCCLEWNTAMEKLTGWSRSEVIGKMLVGEVFGSCCRLKGPDALTKFMIVL

SEQ ID NO: 18040 - protein, 654 aa, Capsella bursa-pastoris
ILHRIDVGVVIDLEPARTEDPALSIAGAVQSQKLAVRAISQLQALPGGDIKLLCDTVVESVRDLTGYDRVMVYKFHEDEHGEVVAESKRDDLEPYIGLHYPATDIPQASRFLFKQNRVRMIVDCHATPVLVVQDDRLTQSMCLVGSTLRAPHGCHSQYMANMGSIASLAMAVIINGNEEDGSNVASGRSSMRLWGLVVCHHTSSRCIPFPLRYACEFLMQAFGLQLNMELQPALQMSEKRVLRTQTLLCDMLLRDSPAGIVTQSPSIMDLVKCDGAAFLYHGKYYPLGVAPSEVQIKDVVEWLLANHADSTGLSTDSLGDAGYPGAAALGDAVCSMAVAYITKRDFLFWFRSHTAKEIKWGGAKHHPEDKDDGQRMHPRSSFKAFLEVVKSRSQPWETAEMDAIHSLQLILRDSFKESEAAMNSKTGDGVVQPYRDMAGEQGIDELGAVAREMVRLIETATVPIFAVDTGGCINGWNAKIAELTGLSVEEAMGKSLVSDLIYKENEETVNKLLSRALRGDEDKNVEVKLKTFTPELQGKAVFVVVNACSSKDYLNNIVGVCFVGQDVTGQKIVMDKFINIQGDYKAIVHSPNPLIPPIFAADENTCCLEWNTAMEKLTGWSLSEVVGKMLVGEVFGSCCKLKGPDALTKFMIVL

SEQ ID NO: 18041 - protein, 654 aa, Capsella bursa-pastoris
ILHRIDVGVVIDLEPARTEDPALSIAGAVQSQKLAVRAISQLQALPGGDIKLLCDTVVESVRDLTGYDRVMVYKFHEDEHGEVVAESKRDDLEPYIGLHYPATDIPQASRFLFKQNRVRMIVDCHATPVLVVQDDRLTQSMCLVGSTLRAPHGCHSQYMANMGSIASLAMAVIINGNEEDGSNVASGRSSMRLWGLVVCHHTSSRCIPFPLRYACEFLMQAFGLQLNMELQLALQMSEKRVLRTQTLLCDMLLRDSPAGIVTQSPSIMDLVKCDGAAFLYHGKYYPLGVAPSEVQIKDVVEWLLANHADSTGLSTDSLGDAGYPGAAALGDAVCGMAVAYITKRDFLFWFRSHTAKEIKWGGAKHHPEDKDDGQRMHPRSSFKAFLEVVKSRSQPWETAEMDAIHSLQLILRDSFKESGAAMNSKTGDGVVQPYRDMAGEQGIDELGAVAREMVRLIETATVPIFAVDAGGCINGWNAKIAELTGLSVEEAMGKSLVSDLIYKENEETVNKLLSRALRGDEDKNVEVKLKTFTPELQGKAVFVIVNACSSKDYLNNIVGVCFVGQDVTGQKIVMDKFINIQGDYKAIVHSPNPLIPPIFAADENTCCLEWNTAMEKLTGLSRSEVVGKMLVGEVFGSCCKLKGPDALTKFMIVL

SEQ ID NO: 18042 - protein, 544 aa, Cardamine concatenata
ILHRIDVGVVIDLEPARTEDPALSIAGAVQSQKLAVRAISQLQSLPGGDIKLLCDTVVESVRDLTGYDRVMVYKFHEDEHGEVVAESKRDDLQPYFGLHYPATDIPQASRFLFKQNRVRMIVDCHATPVLLVQDDRLTQSMCLVGSTLRAPHGCHSQYMANMGSIASLAMAVIINGNEEEGNNVGGGRNSMRLWGLVVCHHTSSRCIPFPLRYACEFLMQAFGLQLNMELQLALQMSEKRVLRTQTLLCDMLLRDSPAGIVTQSPSIMNLVKCDGAAFLYHGKYYLLGISPTEAQIKDVVEWLLANHADSTGLSTDSLGDAGYPGAAALGDAVCGMAVAYITNRDFLFWFRSHTEKEIKWGGAKHHPEDKDDGQRMHPRLSFQAFLEVVKSRSQPWETAEMDAIHSLQLILRDSFKESEAAMNSKAAYGAVQPCRDMSGEQGLDELGAVAREMVRLIETATVPIFAVDAGGYINGWNAKIAELTGLSVEEAMGKSLVSDLIYKENEEIVIKLLSRALRGDEDKNVEVKLKTFRPELHGKAVFMV

SEQ ID NO: 18043 - protein, 415 aa, Cardamine bulbosa
PALSIAGAVQSQKLAVRAISQLQSLPGGDINLLCDTVVESVRDLTGYDRVMVYKFHEDEHGEVVAESKREDLEPYIGLHYPATDIPQASRFLFKQNRVRMIVDCHATPVLVVQDDRLTQSMCLVGSTLRAPHGCHSQYMANMGFIASLAMAVIINGNEGEGNNGRNSMRLWGLVVCHHTSSRCIPFPLRYACEFLMQAFGLQLNMELQLALQMSEKRVLRTQTLLCDMLLRDSPTGIVTQSPSIMDLVKCDGAAFLYHGKYYPLGVAPTEVQIKDIVEWLLANHADSTGLSTDSLGDAGYPGAAALGDAVCGMAVAYITERDFLFWFRSHAAKEIKWGGAKHHPEDKDDGQRMHPRSSFQAFLEVVKSRSQPWETAEMDAIHSLQLILRDSFKESEQGLDELGTVAREMVRLIET

SEQ ID NO: 18044 - protein, 634 aa, Iberis oppositifolia
PALSIAGAVQSQKLAVRAISQLQSLPGGDIKLLCDTVVESVRDLTGYDRVMVYKFHEDEHGEVVAESRRDDLEPYIGLHYPATDIPQASRFLFKQNRVRMIVDCHATPVLVVQDDRLTQSMCLVGSTLRAPHGCHSQYMANMGSIASLAMAVIINGNEDDGSNVAGGRNSMRLWGLVVCHHTSSRCIPFPLRYACEFLMQAFGLQLNMELQLALQMSEKRVLRTQTLLCDMLLRDSPAGIVTQSPSIMDLVKCDGAAFLYHGKYYPLGVAPTEVQIKDVVEWLLANHADSTGLSTDSLGDAGYPGAAALGDAVCGMAVAYITKRDFLFWFRSHTAKEIKWGGAKHHPEDKDDGQRMHPRSSFKAFLEVVKSRSQPWETAEMDAIHSLQLILRDSFKESEAAMNSRTADGAVQPCRDVGGEQGIDELGAVAREMVRLIETATVPIFAVDAGGCVNGWNAKIAELTGLSVEEAMGKSLVSDLIYKENEETVDKLISRALRGDEDKNVEVKLKTFSPEPEGKAVFVVVNACSSKDYLNNIVGVCFVGQDVTGQKIVMDKFINIQGDYKAIVHSPNPLIPPIFAADENTCCLEWNTAMEKLTGWSRGEAIGKMLVGEVFGSCCKLKGPDALTKFMIVL

SEQ ID NO: 18045 - protein, 651 aa, Ionopsidium acaule
ILHRIDVGVVIDLEPARTDDPALSIAGAVQSQKLAVRAISQLQSLPGGDIKLLCDTIVESVRDLTGYDRVMVYKFHEDEHGEVVAESRRQDLEPYIGLHYPATDIPQASRFLFKQNRVRMIVDCHATPVLVVQDDRLAQSMCLVGSTLRAPHGCHSQYMANMGSIASLAMAVIINANEDDGSNVPGGRNSMRLWGLVVCHHTSSRCIPFPLRYACEFLMQAFGLQLNMELQLALQMSEKRVLRTQTLLCDMLLRDSPAGIVTQSPSIMDLVKCDGAAFLYHGKYYPLGVAPSESQIKDVVEWLLENHADSTGLSTDSLGDAGYPGAASLGDAVCGMAVACITKRDFLFWFRSHTAKEIKWGGAKHHPEDKDDGQRMHPRSSFKAFLEVVKSRSQPWETAEMDAIHSLQLILRDSFKESEAAAADGAVQPCNKDMAGEQGIDELGAVAREMVRLIETATVPIFAVDSGGCINGWNAKIAELTGLSVEEAMGKSLISDLIYKENQETVDKLISSALRGDEDKNVEVKLKTFSSELQGKAVFVVVNACSSKDYLNNIVGVCFVGQDVTNQKIVMDKFINIQGDYKAIVHSPNPLIPPIFAADENTCCLEWNTAMEKLTGWSRGEVIGKMLVGEVFGSCCKLKGADALTKFMIAL

SEQ ID NO: 18046 - protein, 654 aa, Pachycladon novaezelandiae
ILHRIDVGVVIDLEPARTEGPALSIAGAVQSQKLAVRAISQLQSLPGGDIKLLCDTVVESVRDLTGYDRVMVYKFHEDEHGEVVAESKRDDLEPYIGLHYPATDIPQASRFLFKQNRVRMIVDCYATPVLVVQEDGLTQSMCLVGSTLRAPHGCHSQYMANMGSIASLAMAVIINGNEEDGSNVASGRSSMRLWGLVVCHHTSSRCIPFPLRYACEFLMQAFGLQLNMELQLALQMSEKRVLRTQTLLCDMLLRDSPAGIVTQSPSIMDLVKCDGAAFLYHGKYYPLGVAPSEVQIKDVVEWLLANHADSTGLSTDSLGDAGYPGAAALEDAVCGMAVAYITKRDFLFWFRSHTGKEIKWGGAKHHPEDKDDGQRMHPRSSFKAFLEVVKSRSQPWETAEMDAIHSLQLILRDSFKESEAAMNSKTVDGAVQPYRDMAGEQGIDELGAVAREMVRLIETATVPIFAVDSGGCINGWNAKIAELTGLSVEEAMGKSLVSDLIYKENEETVNKLLSRALRGDEDKNVEVKLKTFSPELQGKAVFVVVNACSSKDYLNNIVGVCFVGQDVTGQKIVMDKFINIQGDYKAIVHSPNPLIPPIFAADENTCCLEWNTAMEKLMGWSRSEVIGKMLVGEVFGNCCRLKGPDALTKFMIVL

SEQ ID NO: 18047 - protein, 634 aa, Thlaspi perfoliatum
PALSIAGAVQSQKLAVRAISQLQSLPGGDIKLLCDTVVESVRDLTGYDRVMVYKFHEDEHGEVVAESGRDDLEPYIGLHYPATDIPQAPRFLFKQNRVRMIVDCHATPVLVVQDDRLTQSMCLVGSTLRAPHGCHSQYMANMGSIASLTMAVIINGNEDDGSNVAGGRNSMRLWGLVVCHHTSSRCIPFPLRYACEFLMQAFGLQLNMELQLALQMSEKRVLRTQTLLCDMLLRDSPAGIVTQSPSIMDLVKCDGAAFLYHGKYYPLGVAPTEVQIKDVVEWLLANHADSTGLSTDSLGDAGYPGAAALGDAVCGMAVAYITKRDFLFWFRSHTAKEIKWGGAKHHPEDKDDGQRMHPRSSFKAFLEVVKSRSQPWETAEMDAIHSLQLILRDSFKESEAAMNSKTADGAVQPCRDMAGEQGIDELGAVAREMVRLIETATVPIFAVDAGGCINGWNAKIAELTGLSVEEAMGKSLVSDLIYKENEETVDKLISRALGGDEDKNVEVKLKTFSPELRGKAVFVVVNACSSKDYLNNIVGVCFVGQDVTGQKIVMDKFINIQGDYKAIVHSPNPLIPPIFAADENTSCLEWNTAMERLTGWSRGEVIGKMLVGEVFGSCCRLKGPDALTKFMIVL

SEQ ID NO: 18048 - protein, 634 aa, Thlaspi perfoliatum
PALSIAGAVQSQKLAVRAISQLQSLPGGDIKLLCDTVVESVRDLTGYDRVMVYKFHEDEHGEVVAESRRDDLEPYIGLHYPATDIPQASRFLSKQNRVRMIVDCHATPVLVVQDDRLTQSMCLVGSTLRAPHGCHSQYMANMGSIASLAMAVIINGNKDDGSNVAGGRNSMRLWGLVVCHHTSSRCIPFPLRYACEFLMQAFGLQLNMELQLALQMSEKRVLRTQTLLCDMLLRDSPAGIVTQSPSIMDLVKCDGAAFLYHGKYYPLGVAPTEVQIKDVVGWLLANHADSTGLSTDSLGDAGYPGAAALGDAVCGMAVAYITKRDFLFWFRSHTAKEIKWGGAKHHPEDKDDGQRMHPRSSFKAFLEVVKSRSQPWETAEMDAIHSLQLILRDSFKESEAAMNSKTADGAVQPCRDMAGEQGIDELGAVAREMVRLIETATVPIFAVDAGGCINGWNAKIAELTGLSVEEAMGRSLVSDLIYKENEETVDKLISRALGGDEDKNVEVKLKTFSPELQGKAVFVVVNACSSKDYLNNIVGVCFVGQDVTGQKIVMDKFISIQGDYKAIVHSPNPLIPPIFAADENTSCLEWNTAMEKLTGWSRGEVIGKMLVGEVFGSCCRLKGPDALTKFMVVL

SEQ ID NO: 18049 - protein, 633 aa, Sisymbrium altissimum
PALSIAGAVQSQKLAVRAISQLQSLPGGDIKLLCDTVVESVRDLTGYDRVMVYKFHEDEHGEVVAESRREDLEPYIGLHYPATDIPQASRFLFKQNRVRMIVDCHATPVLVVQDDRLTQSMCLVGSTLRAPHGCHSQYMANMGSIASLAMAVIINGNEDDGTNVAGGRSSMRLWGLVVCHHTSSRCIPFPLRYACEFLMQAFGLQLNMELQLALRMSEKRVLRTQTLLCDMLLRDSPAGIVTQSPSIMDLVKCNGAAFLYHGKYYPLGVAPTEAQIKEIVEWLLANHADSTGLSTDSLGDAGYPGAAALGDAVCGMAVAYITKKDFLFWFRSHTAKEIKWGGAKHHPEDKDDGQRMHPRSSFKAFLGVVKSRSQPWETAEMDAIHSLQLILRDSFKESEAAMNSKTADGAVQPLGMAGEQGIDELGAVARGMVRLIETATVPIFAVDAGGCINGWNAKIAELTGLSVEEAMGKSLVSDLIYKENEETVDKLIARALRGDEDKNVEIKLKTFTPELQGKAVFVVVNACSSKDYSNNIVGVCFVGQDVTGQKIVMDKFINIQGDYKAIVHSPNPLIPPIFAADENTCCLEWNTAMEKLTGWSRSEVIGKMLVGEVFGSCCRLKGPDALTKFMIVL

SEQ ID NO: 18050 - protein, 633 aa, Stanleya pinnata
PALSIAGAVQSQKLAVRAISQLQSLPGGDIKLLCDTVVESVRDLTGYDRVMVYKFHEDEHGEVVAESRRDDLEPYLGLHYPATDIPQASRFLFKQNRVRMIVDCHATPVLVVQDDRLTQSMCLVGSTLRAPHGCHSQYMANMGSIASLAMAVIINGNEEDGSNVAGGRSSMRLWGLVVCHHTSSRCIPFPLRYACEFLMQAFGLQLNMELQLALQMSEKRVLRTQTLLCDMLLRDSPAGIVTQSPSIMDLVKCDGAAFLYHGKYYPLGVAPTEAQIKDVVEWLLANHADSTGLSTDSLGDAGYPGAAALGDAVCGMAVAYITKRDFLFWFRSHTAKEIKWGGAKHHPEDKDDGQRMHPRSSFKAFLEVVKSRSQPWETAEMDAIHSLQLILRDSFKESEAAMNSKTADGAIQPCSMAGEQGIDELGAVAREMVRLIETATVPIFAVDAGGCINGWNAKIAELTGLSVEEAMGKSLVSDLIYKENEETVDKLIARALKGDEDKNVEIKLKTFSPELQGKAVFVVVNACSSKDYSNNIVGVCFVGQDVTGQKIVMDKFINIQGDYKAIVHSPNPLIPPIFAADENTCCLEWNTAMEKLTGWSRSEVIGKMLVGEVFGSCCRLKGPDALTKFMIVL

SEQ ID NO: 18051 - protein, 414 aa, Aethionema saxatile
PALSIAGAVQSQKLAVRAISHLQSLPGGDIKLLCDTVVERVRDLTGYDRVMVYKFHEDEHGEVIAESKRDDLEAYFGLHYPATDIPQASRFLFKQNRVRMIVDCHATPVRVVQDDRLTQSICLVGSTLRAPHGCHAQYMANMGSIASLAMAVIINGNEEDGNGGRNSMRLWGLVVCHHTSARCIPFPVRYACEFLMQAFGLQLNMELQLALQVSEKRVLRMQTLLCDMLLRDSPAGIVTQRPSIMDLVKCNGAAFLYQGKYYPLGVAPSEAQILNIVEWLLANHTDSTGLSTDSLGDAGYPRASALGDAVCGMAVAYITEKDFLFWFRSHTEKEIKWGGAKHHPEDKDDGQRMHPRSSFKAFLEVVKSRCQPWEPAEIDAIHSLQLILRDSFKESEQEMDELGSVAREMVRLIE

SEQ ID NO: 18052 - protein, 635 aa, Arabidopsis halleri
PALSIAGAVQSQKLAVRAISQLQSLPGGDIKLLCDTVVESVRDLTGYDRVMVYKFHEDEHGEVVAESKRDDLEPYIGLHYPATDIPQASRFLFKQNRVRMIVDCYASPVRVVQDDRLTQSICLVGSTLRAPHGCHAQYMTNMGSIASLAMAVIINGNEEDGNGVNTGGRNSMRLWGLVVCHHTSARCIPFPLRCACEFLMQAFGLQLNMELQLALQVSEKRVLRMQTLLCDMLLRDSPTGIVTQRPSIMDLVKCNGAAFLYQGKYYSLGVAPTEAQINDIVEWLLANHSDSTGLSTDSLGDAGYPRAAALGDAVCGMAVACITKRDFLFWFRSHTEKEIRWGGAKHHPEDKDDGQRMHPRASFQAFLEVVKSRCQPWETAEMDAIHSLQLILRDSFKESEAMDSKASAPGGVQPHGDDMAEQGLQEIGTVAREMIRLIETATVPIFAVDIDGCINGWNAKIAELTGLSVEEAMGKSLVRDLIYKEYEETADRLLSCALKGDEGKNVEVKLKTFAPELQGKAVFVVVNACSSKDYLNNIVGVCFVGQDVTGHKIVMDKFINIQGDYKAIIHSPNPLIPPIFAADENTCCIEWNTAMEKLTGWPRSEVIGKLLVREVFGSCCRLKGPDALTKFMIVL

SEQ ID NO: 18053 - protein, 608 aa, Arabidopsis halleri
PALSIAGAVQSQKLAVRAISHLQSLPGGDIKLLCDTVVDSVRDLTGYDRVMVYKFHEDEHGEVVAESKRDDLEPYIGLHYPATDIPQASRFLFKQNRVRMIVDCYASPVRVVQDDRLTQSICLVGSTLRAPHGCHAQYMTNMGSIASLAMAIIINGNEEDGNGVNTGGRNSMRLWGLVVCHHTSARCIPFPLRCACEFLMQAFGLQLNMELQLALQVSEKRVLRMQTLLCDMLLRDSPTGIVTQRPSIMDLVKCNGAAFLYQGKYYSLGVAPTEAQINDIGEWLLANHSDSTGLSTDSLGDAGYPRAAALGDAVCGMAVACITKRDFLFWFRSHTEKEIKWGGAKHHPEDKDDGQRMHPRASFQAFLEVVKSRCQPWETAEMDAIHSLQLILRDSFKESEAMDSKASAPGGVQPHGDDMAEQGLQEIGTVAREMIRLIETATVPIFAVDIDGCINGWNAKIAELTGLSVEEAMGKSLVRDLIYKEYEETADRLLSCALKGDEGKNVEVKLKTFAPELQGKAVFVVVNACSSKDYLNNIVGVCFVGQDVIGHKIVMDKFINIQGDYKAIIHSPNPLIPPIFAADENTCCIEWNTAMEKLTGWPRSEVIG

SEQ ID NO: 18054 - protein, 636 aa, Arabidopsis lyrata
PALSIAGAVQSQKLAVCAISHLQSLPGGDIKLLCDTVVDSVRDLTGYDRVMVYKFHEDEHGEVVAESKRDDLEPYIGLHYPATDIPQASRFLFKQNRVRMIVDCYASPVRVVQDDRLTQSICLVGSTLRAPHGCHAQYMTNMGSIASLAMAVIINGNEEDGNGGLNTGGRNSMRLWGLVVCHHTSARCIPFPLRYACEFLMQAFGLQLNMELQLALQVSEKRVLRMQTLLCDMLLRDSPTGIVTQRPSIMDLVKCNGAAFLYQGKYYSLGVAPTEAQINDIVEWLLANHSDSTGLSTDSLGDAGYPRAAALGDAVCGMAVACITKRDFLFWFRSHTEKEIKWGGAKHHPEDKDDGQRMHPRSSFQAFLEVVKSQCQPWETAEMDAIHSLQLILRDSFKESEAMDSKASAPGGVQPHGDDMAEQGMQEIGAVAREMIRLIETATVPIFAVDIDGCINGWNAKIAELTGLSVEEAMGKSLVRDLIYKEYKETADRLLSCALKGDEGKNVEVKLRTFGPELQGKAVFVVVNACSSKDYLNNIVGVCFVGQDVTGHKFVMDKFINIQGDYKAIIHSPNPLIPPIFAADENTCCIEWNTAMEKLTGWPRSEVIGKLLVREVFGSCCRLKGPDALTKFMIVL

SEQ ID NO: 18055 - protein, 655 aa, Arabidopsis lyrata subsp. kamchatica
ILHRVDVGIVIDLEPARTEDPALSIAGAVQSQKLAVRAISHLQSLPGGDIKLLCDTLVESVRDLTGYDRVMVYKFHEDEHGEVVAESKRDDLEPYIGLHYPATDIPQASRFLFKQNRVRMIVDCHASPVRVVQDERLTQSICLVGSTLRAPHGCHAQYMANMGSIASLGMAVIINGNEEDGNGVNVGGRNSMRLWGLVVCHHTSARCIPFPLRYACEFLMQAFGLQLNMELQLALQVSEKRVLRMQTLLCDMLLRDSPAGIVTQNPSIMDLVKCNGAAFLYHGKYYSLGVAPTEAQINYIVEWLLANHSDSTGLSTDSLGDAGYPQAAALGNAVCGMAVAYITKRDFLFWFRSHSEKEIKWGGAKHHPDDKDDGQRMHPRSSFKAFLEVVKSRCQPWETAEMDAIHSLQLILRDSFKEAEAMDSKAAAAGEVQPHGQDMAEQGMEEIGAVAREMVRLIETATVPILAVDRDGCINGWNAKIAELTGLSVEEAMGKSLVRDLIHKEYEETVDRLLSSALKGDEDKNVEVKLKTFGSELQGKAVFLVVNACSSKVQLNNVVGVCFVGQDVTGEKIVMDKFVDIQGDYKAIIHSPNPLIPPIFAADENTCCLEWNTAMEKLTGWPRSEVIGKLLVREVFGSCCRLKGPDALTKFMIVL

SEQ ID NO: 18056 - protein, 631 aa, Camelina microcarpa
PALSIAGAVQSQKLAVRAISHLQSLPGGDIKLLCDTVVESVRDLTGYDRVMVYKFHEDEHGEVVAESKRNDLEPYIGLHYPATDIPQASRFLFKQNRVRMIVDCHASPVRVVQDDRLTQPICLVGSTLRAPHGCHAQYMANMGSIASLAMAVIINGNEEDGVNTSGRHSMRLWGLVVCHHTSARCIPFPLRYACEFLMQAFGLQLNMELQLALQVSEKRVLRMQTLLCDMLLRDSRAGIVMQRPSIMDLVKCNGAAFLYQGRYYPLGVAPTEAQINDIVKWLLANHSDSTGLSTDSLSDAGYPGAAALGDAVCGMAVAYITKRDFLFWFRSHTEKEIKWGGAKHHPEDKDDGQRMHPRSSFQAFLEVVKGRCQPWETAEMDAIHSLQLILRDSFKESETMDSKAAAAVQPHKDDMADQGMQEIGAVAREMVRLIETATVPIFAVDIDGCINGWNDKIAELTGLSVEEAMGKSLVRDLIYKEYAETVDRLLSCALKGDEGKNVEVKLKNFSPELQGKAVFVVVNSCSSKDYSNNIVGVCFVGQDVTGHKIVMDKFINIQGDYKAIIHSPNPLIPPIFAADENTCCLEWNTAMEKLTGWPRSEVIGKMLVKEVFGSCCRLKGPDALTKFMIVL

SEQ ID NO: 18057 - protein, 658 aa, Capsella bursa-pastoris
AILHRVDVGILIDLEPARTEDPALSIAGAVQSQKLAVRAISHLQSLPGGDIKLLCDTVVDSVRDLTGYDRVMVYKFHEDEHGEVVAESKRDDLEPYIGLHYPATGIPQASRFLFKQNRVRMIVDCHASPVRVVQDDRLTQSICLVGSTLRAPHGCHAQYMANMGSIASLAMAVIINGNEEDGNGVNSNTGGRNSMRLWGLVVCHHTSARCIPFPLRYACEFLMQAFGLQLNMELQLALQVSEKRVLRMQTLLCDMLLRDSPAGIVTQKPSIMDLVKCNGAAFLYQGKYYSLGVAPTEAQINDIVKWVLGNHSDSTGLSTDSLGDAGYPGAAALGDAVCGMAVAYITKRDFLFWFRSHTEKEIKWGGAKHHPEDKDDGQRMHPRSSFQAFLEVVKSRCQPWETAEMDAIHSLQLILRDSFKESEAMNSKAAAAGALQPHGEAMAEQGMQEIGAVAREMVRLIETATVPIFAVDIDGCINGWNAKIAELTGLSAEEAMGKSLVRDLIYKEYEETVDRLLSCALKGGESKNVEVKLQTFGLELQGKAVFVVVNPCSSKDYLNNIVGVCFVGQDVTGHKIVMDKFVNIQGDYKAIIHSPNPLIPPIFAADENICCLEWNTAMEKLTGWPRSEVIGKLLVREVFGSCCRLKGPDALTKFMIVL

SEQ ID NO: 18058 - protein, 655 aa, Draba altaica
ILHRVDVGIVIDLEPARTEDPALSIAGAVQSQKLAVRAISHLQSLPGGDIKLLCDTVVESVRDLTGYDRVMVYKFHEDEHGEVVAESKRDDLEPYIGLHYPATDIPQASRFLFKQNRVRMIVDCHASPVRVVKGDRLTQSICLVGSTLRSPHGCHAQYMANMGSIASLAMAVIINGNEEDGNGVNTGGRNSMRLWGLVVCHHTSARCIPFPLRYACEFLMQAFGLQLNMELQLALQVSEKRVLRMQTLLCDMLLRDSPAGIVTQSPSIMDLVKCNGAAFLYQGKYYSLGVAPSEAQINDIVEWLLANHSDSTGLSTDSLVDAGYPKAAALGNAVCGMAVAYITKRDFLFWFRSHTEKEIKWGGAKHHPEDKDDGQRMHPRSSFKAFLEVVKSRCQPWETAEMDAIHSLQLILRDSFKESEAMDSKSAAAGAVQPHDQEMAEQGLKEVGAVAREMVRLIETATVPIFAVDMDGCVNGWNAKIAELTGLSVEDAMGKSLVRDLIHKEYEETVDRLLSRALKGDEGKNVEVKLKTFGSELQAKAVFVVVNACSSKDYLNNIVGVCFVGQDVTGQKIVMDKFINIQRDYKAIIHSPNPLIPPIFAADENTCCLEWNAAMEKLTGWPRSEVIGKLLVGEVFGSCCKLKGPDAITKFMIVL

SEQ ID NO: 18059 - protein, 635 aa, Erysimum capitatum
PAISIAGAVQSQKLAVRAISHLQSLPGGDIKLLCDTVVDSVRDLTGYDRVMVYKFHEDEHGEVIAESKRDDLEPYIGLHYPATDIPQAPRFLFKQNRVRMIVDCHASPVRVVQDDRLTQAICLVGSTLRAPHGCHAQYMANMGSIASLAMAVIINGNEEDGNAVNTGGRNSMRLWGLVVCHHTSARCIPFPLRYACEFLMQAFGLQLNMELQLAFQVAEKRVLRMQTLLCDMLLRDSPAGIVTQSPSIMDLVKCNGAAFLYRGKYYSLGVAPTEAQISDIVEWLLANHSDSTGLSTDSLGDAGYPRAAALGDVVCGMAVAYITKRDFLFWFRSHTEKEIKWGGAKHHPEDKDDGQRMHPRSSFQAFLVVVKSRCQPWETAEMDAIHSLQLILRDSFKESEAIDSKAAAAGAVQPHGEDMANQGMQEIGAVAREMVRLIETATVPIFAVDIDGCINGWNAKIAELTGLSVDEAMGKSLVRDLIYKEYEETVDRLLSCALKGDEGKNVEVKLKTFGPELQGKAVFVTVNTCSSKDYLNNIVGVCFVGQDVTGHKVVMDKFINIQGDYKAIMHSPNPLIPPIFAADENTHCLEWNTAMENLTGWPRSEVIGKLLVKEVFGSCCRLKGPDALTKFMIVL

SEQ ID NO: 18060 - protein, 635 aa, Erysimum capitatum
PAISIAGAVQSQKLAVRAISHLQSLPGGDIKLLCDTVVESVRDLTGYDRVMVYKFHEDEHGEVIAESKRDDLEPYIGLHYPATDIPHASRFLFKQNRVRMIVDCHASPVRVVQDDRLTQSICLVGSTLRAPHGCHAQYMANMGSIASLAMAVIINGNEEDGNAVNTGGRNSMRLWGLVVCHHTSARCIPFPLRYACEFLMQAFGLQLSMELQLAFQVAEKRVLRMQTLLCDMLLRDSPAGIVTQSPSIMDLVKCNGAAFLYKGKYYSLGVVPTEAQISDIVEWLLANHSDSTGLSTDSLGDAGYPRAAALGDAVCGMAVAYITKRDFLFWFRSHTEKEIKWGGAKHHPEDKDDGQRMHPRSSFQAFLEVVKSRCQPWETAEMDAIHSLQLILRDSFKESEAMDSKAAAAGAVQPHGEDMADQGMQEIGAVAREMVRLIETATVPIFAVDIDGCINGWNAKITELTSLSVDEAMGKSLVCDLIYKEYEVIVDRLLSCALKGDEGKNVEVKLKTFGPELQGKAVFVVVNTCSSKDYLNNIVGVSFVGQDVTGHKVVMDKFINIQGDYKAIMHSPNPLIPPIFAADENTHCLEWNTAMENLTGWPRSEVIGKLLVKEVFGSCCRLKGPDALTKLMIVL

SEQ ID NO: 18061 - protein, 634 aa, Iberis oppositifolia
PALSIAGAVHSQKLAVRAISHLQSLPGGDIKLLCDTVVERVRDLTGYDRVMVYKFHEDEHGEVVAESKRDDLEPYIGLHYPATDIPQASRFLFKQNRVRMIVDCHASPVRVVQDDRLTQSICLVGSTLRAPHGCHAQYMANMGSIASLGMAVIINGNEEDGNSSGGGRNSLRLWGLVVCHHTSARCIPFPLRYACEFLMQAFGLQLNMELQLALQVSEKRVLRMQTLLCDMLLRDSPAGIVTQSPSIMDLVKCNGAAFLYHGRYYSLGVAPSEAQINDIVEWLLANHSDSTGLSTDSLGDAGYPRAPALGDAVCGMAVAFITKRDFLFWFRSQTEKEIKWGGAKHHPEDKDDGQRMHPRSSFKAFLEVVKSRSQPWEAAEMDAIHSLQLILRDSFKESEAMDSKAIAATSVQPHGENLTEQGMEEIGAVAREMVRLIETAAVPIFAVDIDGCINGWNAKIAEMTGLSVGEAMGKSLVCDLIYKEYEQAVDMLLSRALKGDEGKNVEVKLKTFGPGLQGKAVFVVVNACSSKDYLKNIVGVGFVGQDVTSQKIVMDKFINIQGDYKAIINSPNPLIPPIFAADENTCCIEWNTAMEKLTGWPRSEVIGKLLVKEVFGSCCRLRGPDELTKFMIVL

SEQ ID NO: 18062 - protein, 630 aa, Malcolmia africana
PALSIAGAVQSQKLAVRAISHLQSLPGGDIKLLCDTVVDSVRDLTGYDRVMVYKFHEDEHGEVIAESKREDLEPYIGLHYPATDILQASRFLFKQNRVRMIVDCSASPVRVVQDDRLAQSICLVGSTLRAPHGCHAQYMANMGTVASLAMAVIINANEEDGTGGRNSMRLWGLVVCHHTSASRCIPFPLRYACEFLMQAFGLQLNMELQLALQVSEKRVLRMQTLLCDMLLRDSPAGIVTQSPSIMDLVKCNGAAFLYQGKYYSLGVAPSEAQIHEIVEWLLAKHSDSTGLSTDSLSDAGYPKAAALGDAVCGMAVAYITKRDFLFWFRSHTEKEIKWGGAKHHPEDKDDGQRMHPRSSFKAFLEVVKSRCQPWETAEMDAIHSLQLILRDSFKEAAAAAAAGVAIQPHGEDMTEKGMDEIGAVAREMVRLIETATVPIFAVDIDGCINGWNAKIAELTCLSVEEAMGKSLVRDLIYKEYEETVDKLLSNALKGEEGKNVEVKLKTFGAMVQGKEAVFVVVNACSSKDYLNNIVGVCFVGKDVTSEKFVMDKFINIQGDYKAIIHSPNPLIPPIFAADENTCCLEWNTAMEKLTGWPRSEVIGKLLVKEVFGSCCRLKGPDALTKFMIVL

SEQ ID NO: 18063 - protein, 633 aa, Malcolmia africana
  misc_feature (156)..(156): Xaa can be any naturally occurring amino acid
  misc_feature (159)..(159): Xaa can be any naturally occurring amino acid
  misc_feature (163)..(163): Xaa can be any naturally occurring amino acid
  misc_feature (166)..(166): Xaa can be any naturally occurring amino acid
  unsure (1)..(633): unsure at all Xaa locations
PALSIAGAVQSQKLAVRAISHLQSLPGGDIKLLCDTVVDSVRGLTGYDRVMVYKFHEDEHGEVIAESKREDLEPYIGLHYPATDIPQASRFLFKQNRVRMVVDCSASPVRVVQDDRLAQSICLVGSTLRAPHGCHAQYMANMGTTASLAMAVIINXNEXDGSXGAXGRNSMRLWGLVVCHHTSASRCIPFPLRYACEFLMQAFGLQLNMELQLALQVSEKRVLRMQTLLCDMLLRDSPAGIVTQSPSIMDLVKCNGAAFLYQGKYYSLGVAPSEAQIHEIVEWLLAKHSDSTGLSTDSLSDAGYPEAAALGDAVCGMAVAYITKRDFLFWFRSHTEKEIKWGGAKHHPEDKDDGQRMHPRSSFKAFLEVVKSRCQPWETAEMDAIHSLQLILRDSFKEAAAAAAAGVAIQPHGEDMTEQGMDEVGAVAREMVRLIETATVPIFAVDIDGCINGWNAKIAELTCLSVEEAMGKSLVRDLIYKEYEETVDKLLSNALKGEEGKNVEVKLKTFGAMVQGKEAVFVVVNACSSKDYLNNIIGVCFVGKDVTSEKFVMDKFINIQGDYKAIIHSPNPLIPPIFAADENTCCLEWNTAMEKLTGWPRSEVIGKLLVKEVFGSCCRLKGPDALTKFMIVL

SEQ ID NO: 18064 - protein, 632 aa, Malcolmia africana
PALSIAGAVQSQKLAVRAISHLQSLPGGDIKLLCDTVVESVRDLTGYDRVMVYKFHEDEHGEVIAESKREDLEPYIGLHYPATDIPQASRFLFKQNRVRMIVDCSASPVRVVQDDRLAQSICLVGSTLRAPHGCHAQYMANMGTTASLAMAVIINANEEDGTGGRNSMRLWGLVVCHHTSASRCIPFPLRYACEFLMQAFGLQLNMELQLALQVSEKRVLRMQTLLCDMLLRDSPAGIVTQSPSIMDLVKCNGAAFLYQGKYYSLGVAPSEAQIHEIVEWLLAKHSDSTGLSTDSLSDAGYPKAAALGDAVCGMAVAYITKRDFLFWFRSHTEKEIKWGGAKHHPEDKDDGQRMHPRSSFKAFLEVVKSRCQPWETAEMDAIHSLQLILRDSFKESEAAMNSKSADGAVQPCKDMAGEQGIDELGAVAREMVRLIETATVPIFAVDAGGCINGWNAKIAELTGLSVEEATGKSLVSDLIHKENEETVSQLLSRALRGDEEKNVEVKLKTFGSELEGKAVFVVVNACSSKDYLNNIVGVCFVGQDITSQKTVMDKFINIQGDYKAIVHSPNPLIPPIFAADENTCCLEWNTAMEKLTGWSRSEVIGKMLVGEVFGSCCRLKGADALTKFMIVL

SEQ ID NO: 18065 - protein, 650 aa, Pachycladon novaezelandiae
ILHRVDVGIVIDLEPARTEDPALSIAGAVQSQKLAVRAISHLQSLPGGDIKLLCDTVVESVRDLTGYDRVMVYKFHEDEHGEVVAESKRDDLEPYIGLHYPATDIPQASRFLFKQNRVRIIVDCHASPVRVVQDDRLTQSICLVGSTLRAPHGCHAQYMANMASIASLAMAVIINGSEEDGNCVNTGGRNSMRLWGLVVCHHTSARGIPFPLRYACEFLMQAFGLQLNMELQLALQVSEKRVLRMQTLLCDMLLRDSPAGIVTQRPSIMDLVKCNGAAFLYQGKYYPLGVAPTEAQINDIVKWLLANHSDSTGLSTDSLGDASYPGTAALGDAVCGMAVAYITKRDFLFWFRSHTEKEIKWGGAKHHPEDKDDGQRMHPRSSFQAFLEVVKSRCQPWETAEMDAIHSLQLILRDSFKESEAAAAGAVQTHGEDIAEQGMQEIGAVAREMVRLIETATVPIFAVDFDGCINGWNAKIAELTGLSVEEAMGKSLVRDLIYKEYEETVDRLLSCALKGDEGKDVEVKLKIFGPELQGKAVFVVINACSSKDYLNNIVGVCFVGQDVTGHKIVMDKFINIQGDYKAIIHSPNPLIPPIFAADENTCCLEWNTAMEKLTGWPRSEVIGKLLVREVFGSCRRLKGPDALTKFMIVL

SEQ ID NO: 18066 - protein, 631 aa, Thlaspi perfoliatum
PALSIAGAVHSQKLAVRAISHLQSLPGGDIKLLCDTVVESVRDLTGYDRVMVYKFHEDEHGEVIAESKRDDLEPYIGLHYPATDIPQASRFLFRQSRVRMIVDCHASPVRVVQEDRLTQSICLVGSTLRAPHGCHAQYMANMGSIASLGMAVIINGNEEDGNGVNNGGGRNSMRLWGLIVCHHTSARCIPFPLRYACEFLMQAFGLQLNMELQLALQLAEKRVLRMQTLLCDMLLRDSPAGIVTQSPSIMDLVKCNGAAFLYQGKYYSLGVAPSEAQINEIVEWLLANHSDSTGLGTDSLGDAGYPRASVLGDAVCGMAVAYITKRDFLFWFRSHTEKEIKWGGAKHHPEDKDDGQRMHPRSSFKAFLEVVKSRSQPWEAAEMDAIHSLQLILRDSFKESEARDSIAIAAERENMTEQGMEEIGAVAREMVRLIETARVPIFAVDIDGCINGWNAKIAELTGLSVEEAMGKSVIRDLIYKDCEEAVDMLLSRALKGDEGENVEVKLKTFGPELQGKAVFVVVNACSSKDYSSNIVGVCFVGQDVTSQKIVMDKFINIQGDYKAIIHSPNPLIPPIFAADENTCCIEWNTAMEKLTSWSRSQVIGKLLVKEVFGSCCRLRGPDELTKFMIVL

SEQ ID NO: 18067 - protein, 616 aa, Thlaspi perfoliatum
AVRAISHLQSLPRGDIKLLCDTVVESVRDLTGYDRVMVDKFHEDEHGEVIAESKRDDLEPYIGLHYPATDIPQASRFLFKQSRVRMIVDCHASPVRVVQEDRLTQSICLVGSTLRAPHGCHAQYMANMGSIASLGMAVIINGNEEDGNGVNNGGGRNSMRLWGLVVCHHTSARCIPFPLRYACEFLMQAFGLQLNMELQLALQVAEKRVLRMQTLLCDMLLRDSPAGIVTQSPSIMDLVKCNGEAFLYQGKYYSLGVAPSEAQINDIVEWLLANHSDSTGLRTDSLGDAGYPRASVLGDDVCGMAVAYITKRDFLFWFRSHTEKEIKWGGAKHHPEDKDDGQRMHPRSSFKAFLEVVKSRSQPWEAAEMDATHSLQLILRDSFKESEARDSIVAAERENMTEQGMEEIGAVAREMVRLIETAKVPIFAVDMDGCINGWNAKIAEMTGLSVEEAMGKSVVRDLIYRECEEAVDMLLSRALKGDEGKNVEVKLKTFGPELQGKAVFVVVNACSSKDHLSNIVGVCFVGQDVTSQKIVMDKFINIQGDYKAIIHTPNPLIPPIFAADENTCCTEWNTAMEKLTGWSRGQVIGKLLVKEVFGSCCRLRGPDELTKFMIVL

SEQ ID NO: 18068 - protein, 632 aa, Sisymbrium altissimum
PALSIAGAVQSQKLAVRAISHLQSLPGGDIKLLCDTVVESVRDLTGYDRVMVYKFHEDEHGEVIAESKRNDLEPYIGLHYPATDIPQASRFLFKQNRVRMIVDCHASPVRVVQDDRLTQSICLVGSTLRAPHGCHAQYMANMGSIASLGMAVIINGNENDGNGGGRNSMKLWGLVVCHHTSARCIPFPLRYACEFLMQAFGLQLNMELQLALQVSEKRVLRMQTLSCDMLLRDSPAGIVTQSPSIMDLVKCNGAAFLYQGKYYSLGVAPTEAQISDIVEWLLANHSDSTGLSTDSLGDAGYPRAAALGDAVCGMAVAYITKGDFLFWFRSHTEKEIKWGGAKHHPEDKDDGQRMHPRSSFKAFLEVVKSRSQPWETAEMDAIHSLQLILRDSFKESEVMDSKVNAAGAVQPLGENMTEQGMEEIGAVAREMVRLIETATVPIFAVDIDGCINGWNAKIAELTGLSVEESMGKSLVRDLIYKENEETVDRLLSGALRGDEGKNVEVKLKTFDPQLQGKAVFIVVNACSSKDYLNNIVGVCFMGQDVTSQKIVMDKFINIKGDYKAIIHSPNPLIPPIFAADENTCCLEWNTAMEKLTGWPRSEVIGKLLVKEVFGSCCRLKDPDTLTKFMIVL

SEQ ID NO: 18069 - protein, 652 aa, Stanleya pinnata
ILHRIDVGILIDLEPAKTDDPALSIAGAVQSQKLAVRAISHLQSLPGGDIKLLCDTVVESVRDLTGYDRVMVYKFHEDEHGEVIAESKRDDLEPYIGLHYPATDIPQASRFLFKQNRVRMIVDCHASPLPVVQDDKLTQSICLVGSTLRAPHGCHAQYMANMGSIASLGMAVIINGNEEDGNGGGRNSMRLWGLIVCHHTSARCIPFPLRYACEFLMQAFGLQLNMELQLALQVSEKRVLRMQTLLCDMLLRDSPAGIVTQSPSIMDLVKCNGAAFLYQGKYYPLGVAPTEAQINDIVEWLLANHSDSTGLSTDSLGDAGYPRAAALGDAVCGMAVACITKRNFLFWFRSHTEKEIKWGGAKHHPEDKDDGQRMHPRSSFKAFLEVVKSRCQPWETPEMDAIHSLQLILRDSFKESEAMDSKANAAEAVQPHGENMSEQGVEEIGAVAREMVRLIETATVPIFAVDIDGCINGWNAKIAELTGLSVDEAMGKSLVQDLIYKEYEETVDRLLSGALRGDEVKNVEVKLKTFGPDLQGKAVFVVVNACSSKDYLNNIVGVCFVGHDVTCQKTVKDKFINIQRDYKAIIHSPNPLIPPIFAVDENTCCLEWNTAMEKLTGWPRSEVIGKLLVREVFGSCCRLKGADTLTKFMIVL

SEQ ID NO: 18070 - protein, 380 aa, Olea europaea
MLKEKSRGVHGGNTSSHWARICDTCQSAVCTMYCRADSAYLCTGCDSRIHRTSPEASRHQRMWVCEACERAPAAFLCKADAASLCITCDSDIHSAQPLARRHQRVPILPIPGMLCGTPSAPYPSGLVMGPTGVAAKIEFLTQDEDQTIHEEEDEDEAASWPLFNHVKNICNQSNNIGRFFGGEVDEYLDLDEYNSYQDNQFSNQDNNQLQPYDVSQKSYGSDNVVPIQYGKSKDQIHNHGFQLGREYEASKNVYDNPASISHTVSFSSLDVGVVPESTTSEVSVPHPRPPKGTIDLFSSPPIPMPTQLSPMDREARVLRYREKKKARKFEKTIRYASRKAYAETRPRIKGRFAKRTDVRANQMFSSTLIEEGGYGIVPSF

SEQ ID NO: 18071 - protein, 455 aa, Bacillus methanolicus
MKVAKFGGSSLASGEQFEKVFNIVMSDPKRKIVVVSAPGKRFASDIKVTDLLIECAEKCLKNEAADDLVEAVIERYASIARELGLSSRVSNMIRNDLLTVLSGDKSNPERFIDAVKATGEDNNAKLMAAYFQHKGVEARYVNPKDAGLIVSDEPGNAQVLPESYERLFELRNLPGIIIFPGFFGFTKKGEVVTFSRSGSDITGSILANGTKAELYENFTDVDAVYSVNPNIVEKPKEIRELTYREMRELSYAGFTVLHDEALIPAFRAGIPVNIKNTNNPSAPGTKIVHERTTSNGPVIGIASDKGFCSIYVSKYLMNREIGFGRKILQILEEYGLSYEHIPSGIDDISIILRKNQLNPALEEEIVTRIKTELEADEVKIERNLALIMIVGEGMRQNVGTMARASKALADAGVNIEMINQGSSEVSMMFGVKAEDEQRAVIALYKEFFAPVPVNV

SEQ ID NO: 18072 - protein, 317 aa, Neisseria meningitidis Z2491
MNHKKIVVLDADTLPGRVFHFDFPHELAVYGTTGADETAERVRDAHIVITNKVMISADIIAANPQLELIAVSATGVNNVDIGAAKAAGVAVCNVRAYGNESVAEHAFMLMIALMRNLPAYQRDVAAGLWEKSPFFCHYGAPIRDLNGKTLAVFGRGNIGRTLARYAQAFGMRVVFAEHKHAHAVREGYVSFEDAVQTADVLSLHCPLNAQTENMIGENELRQMKPGAVLINCGRGGLVDENALLAALKYGQIGGAGVDVLTEEPPRGGNPLLNARLPNLIVTPHTAWASREALDRLFDILLANIHSFVKGEAQNRVV

SEQ ID NO: 18073 - protein, 447 aa, Neisseria meningitidis Z2491
MNQNHTILQNLPVGQKVGIAFSGGLDTSAALLWMKLKGALPYAYTANLGQPDEDDYNAIPKKAMEYGAENARLIDCRAQLAHEGIAAIQCGAFHVSTGGIAYFNTTPLGRAVTGTMLVSAMKEDDVNIWGDGSTYKGNDIERFYRYGLLTNPALKIYKPWLDQQFIDELGGRHEMSEFLIANGFNYKMSVEKAYSTDSNMLGATHEAKDLEFLNSGIKIVKPIMGIAFWDENVEIKPEEVSVRFEEGVPVALNGKEYADPVELFLEANRIGGRHGLGMSDQIENRIIEAKSRGIYEAPGMALFHIAYERLVTGIHNEDTIEQYRINGLRLGRLLYQGRWFDSQALMLRETAQRWVAKAITGEVTLELRRGNDYSILNTESPNLTYQPERLSMEKVEDAAFTPLDRIGQLTMRNLDITDTRAKLGIYSQSGLLALGEGSVLPQLGNKQ

SEQ ID NO: 18074 - protein, 384 aa, Neisseria meningitidis Z2491
MKFIDEAKIEVAAGKGGNGATSFRREKFVPRGGPDGGDGGKGGSVWAEADENTNTLVEYRFVKRYQAKNGEKGHGSDRYGAGADDIVLKMPVGTLIRDLDTGENVADLTYHGQRVCLAKGGKGGLGNIHFKSSVNRAPKQSTPGEEGEARSLQLELKVLADVGLLGMPNAGKSTLITAVSAARPKIANYPFTTLHPNLGVVRIDENHSFVMADIPGLIEGAAEGAGLGHRFLKHLSRTGLLLHVVDLAPFDETVNPAEEALAIINELRKYDEELYGKPRWLVLNKLDMLDEEEARARTAAFLEAVGWDYPKPDDRFQFDMETPRLFQISALTHQGTQELVHQINQYLIEKKRIEAEKAEAERAATNVEIAEQQPKTDTGVFKPE

SEQ ID NO: 18075 - protein, 187 aa, Neisseria meningitidis Z2491
MKLIILDRDGVINQDRDDFVKSVDEWIPVEGSMDAVAFLTQAGYTVAVATNQSGIGRKYFTVQNLTEMHAKMHRLVRQAGGEINGIWFCPHTDADNCNCRKPKPGMIEDIIGRFNAQASETWLVGDSLRDLQAIDAVGGKPALVLTGKGKKTLSQHGHELPEHTQVFDTLLDFSQYIMQENAAPQAD

SEQ ID NO: 18076 - protein, 545 aa, Neisseria meningitidis Z2491
MDFKRLTAFFAIALVIMIGWEKMFPTPKPVPAPQQTAQQQAVTASAEAALAPATPITVTTDTVQAVIDEKSGDLRRLTLLKYKATGDENKPFILFGDGKEYTYVAQSELLDAQGNNILKGIGFSAPKKQYSLEGDKVEVRLSAPETRGLKIDKVYTFTKGSYLVNVRFDIANGSGQTANLSADYRIVRDHSEPEGQGYFTHSYVGPVVYTPEGNFQKVSFSDLDDDAKSGKSEAEYIRKTPTGWLGMIEHHFMSTWILQPKGGQSVCAAGDCRIDIKRRNDKLYSTSVSVPLAAIQNGAKSEASINLYAGPQTTSVIANIADNLQLAKDYGKVHWFASPLFWLLNQLHNIIGNWGWAIIVLTIIVKAVLYPLTNASYRSMAKMRAAAPKLQAIKEKYGDDRMAQQQAMMQLYTDEKINPLGGCLPMLLQIPVFIGLYWALFASVELRQAPWLGWITDLSRADPYYILPIIMAATMFAQTYLNPPPTDPMQAKMMKIMPLVFSVMFFFFPAGLVLYWVINNLLTIAQQWHINRSIEKQRAQGEVVS

SEQ ID NO: 18077 - protein, 642 aa, Neisseria meningitidis Z2491
MAKVIGIDLGTTNSCLAISENGQTKVIENAEGARTTPSVIAYLDGGEILVGAPAKRQAVTNAKNTIYAAKRLIGHKFEDKEVQRDIESMPFEIIKANNGDAWVKAQGKELSPPQISAEVLRKMKEAAEAYLGEKVTEAVITVPAYFNDSQRQATKDAGRIAGLDVKRIINEPTAAALAFGMDKGDNKDRKVAVYDLGGGTFDISIIEIANLDGDKQFEVLATNGDTFLGGEDFDQRLIDYIIDEFKKEQGIDLKQDVMALQRLKEAAEKAKIELSSGQQTEINLPYITMDATGPKHLAMKITRAKFESLVEDLIARSIEPCRTALKDAGLSTGDIDDVILVGGQSRMPKVQEAVRDFFGKEPRKDVNPDEAVAVGAAIQGEVLSGGRSDVLLLDVTPLSLGIETMGGVMTKLIQKNTTIPTKASQVFSTAEDNQSAVTIHVLQGERERASANKSLGQFNLGDIAPAPRGMPQIEVTFDIDANGILHVSAKDKGTGKAANITIQGSSGLSEEEIERMVKDAEANAEEDKKLTELVASRNQAEALIHSVKKSLADYGDKLDAAEKEKIEAALKEAEEAVKGDDKTAIDAKAEALGTASQKLGEMVYAQAQAEAQAGEGAQAESSAKKDDDIVDADFEEVKDDKK

SEQ ID NO: 18078 - protein, 500 aa, Neisseria meningitidis Z2491
MAKVLIVPVSAGLDASAVAQAFAKALDAQIFQAVDATAETLLAQGKSDDWFDALVGKVAALDAANLVIEGIAPDADKIYLAGKNVELALSLDAAAVFAVRSDNADADELANRLNLAKQFFAAAPGVLEGFVVDGAAASVAEAAAEKTGLTFFGSSDALKDVSVLAGREAKRLSPAQFRYNLIDFARQADKRIVLPEGAEPRTVQAAAICHEKGIARCVLLAKREEVEAVAKERGISLPDSLEIIDPASLVEQYVEPMCELRKSKGLTPEDARKQLQDTVVLGTMMMAQNDVDGLVSGAVHTTANTIRPALQLIKTAPGASLVSSVFFMLLPNQVLVFGDCAVNPNPTAQQLADIAIQSADSAKAFGIDPKVAMISYSTVNSGSGPDVDTVIEATKLAQEKRPDLAIDGPLQYDAATVPGVGKSKAPGSPVAGQATVLVFPDLNTGNCTYKAVQRSANVLSVGPLLQGLRKPVNDLSRGALVEDIVFTIALTAVQAKQMEG

SEQ ID NO: 18079 - protein, 307 aa, Neisseria meningitidis Z2491
MDIETFLAGERAADGYRCGFVAIVGRPNVGKSTLMNHLIGQKISITSKKAQTTRNRVTGIYTDDTAQFVFVDTPGFQTDHRNALNDRLNQNVTEALGGVDVVVFVVEAMRFTDADRVVLKQLPKHTPVILVVNKIDKDKAKDRYALEAFVAQVRAEFEFAAAEAVSAKHGLRIANLLELIKPYLPESVPMYPEDMVTDKSARFLAMEIVREKLFRYLGEELPYAMNVEVEQFEEEDGLNRIYIAVLVDKESQKAILIGKGGERLKKISTEARLDMEKLFDTKVFLKVWVKVKSGWADDIRFLRELGL

SEQ ID NO: 18080 - protein, 655 aa, Neisseria meningitidis Z2491
MGNTFKSILVWVALGIGLMAAFNALDGKKEDNGQIEYSQFIQQVNNGEVSGVNIEGSVVSGYLIKGERTDKSTFFTNAPLDDNLIKTLLDKNVRVKVTPEEKPSALAALFYSLLPVLLLIGAWFYFMRMQTGGGGKGGAFSFGKSRARLLDKDANKVTFADVAGCDEAKEEVQEIVDYLKAPNRYQSLGGRVPRGILLAGSPGTGKTLLAKAIAGEAGVPFFSISGSDFVEMFVGVGASRVRDMFEQAKKNAPCIIFIDEIDAVGRQRGAGLGGGNDEREQTLNQLLVEMDGFESNQTVIVIAATNRPDVLDPALQRPGRFDRQVVVPLPDIRGREQILNVHSKKVPLDKSVDLLSLARGTPGFSGADLANLVNEAALFAGRRNKVKVDQSDFEDAKDKIYMGPERRSMVMHEDEKRATAYHESGHAIVAESLPFTDPVHKVTIMPRGRALGLTWQLPERDRISMYKDQMLSQLSILFGGRIAEDIFVGRISTGASNDFERATQMAREMVTRYGMSDKMGVMVYAENEGEVFLGRSVTRSQNISEKTQQDIDAEIRRILDEQYQVAYKILDENRDKMETMCKALMEWETIDRDQVLEIMAGKQPSPPKDYSHNLRENADAAEDNAPHAPTREETEAPAPADTASTESEQQPENKA

SEQ ID NO: 18081 - protein, 67 aa, Neisseria meningitidis Z2491
MATGIVKWFNDAKGFGFITPDEGGEDLFAHFSAINMDGFKTLKEGQRVSFDVTTGPKGKQAANIQAA

SEQ ID NO: 18082 - protein, 513 aa, Neisseria meningitidis Z2491
MKIGIPRESLSGETRVACTPATVALLGKLGFETVVESGAGLAASLDDAAYQAAGATVADKAAVWAYPLIYKVNAPSEDELPLLKEGQTIVSFLWPRQNEALVEALRAKKVNALAMDMVPRISRAQALDALSSMANISGYRAVIEAANAFGRFFTGQITAAGKVPPAQVLVIGAGVAGLAAIGTANSLGAVVRAFDTRLEVAEQIESMGGKFLKLDFPQESGGSGDGYAKVMSDEFIAAEMKLFAEQAKEVDIIITTAAIPGKPAPKLITKEMVESMKPGSVIVDLAAATGGNCELTKQGELFVTGNGVKIIGYTDMANRLAGQSSQLYATNLVNLTKLLSPNKDGEITLDFEDVIIRNMTVTRDGEITFPPPPIQVSAQPQQTPSEKAAPAAKPEPKPVPLWKKLAPAVIAAVLVLWVGAVAPAAFLNHFIVFVLACVIGYYVVWNVSHSLHTPLMSVTNAISGIIVVGALLQIGQGNGFVSLLSFVAILIASINIFGGFFVTRRMLNMFRKG

SEQ ID NO: 18083 - protein, 563 aa, Neisseria meningitidis Z2491
MSASQLLSRLTQTVGEKYIITDPAKTEQYRQGYRFGEGRALAVVRPGTILEMWKILQACVEADVIVITQAANTGLTGGSTPDGNDYDRDIVIVNTMRMNIIQTINNNEQVVCLPGSTLNQLELLLKPLGREPHSVIGSSCIGASVLGGVCNNSGGALVQRGPAYTEMALFAQINEEGRLELVNHLGIDLGDTPEEILTNLQGHHYQNKDIKQDAGKGHDHAYCEHVRQVDEPTAARFNADPARHYEASGCAGKLMVFAVRLDTFPQEKQTAVFYIGTNDINELTDIRRAALGEFESLPVSGEYIHRHAFDIADVYGKDTFYVIKKFGTHQLPKLFDLKARVDRFGKKASFLPKHFSDKAMQFVSKYLPDHLPKSMRDYRDKYEHHLILKIGGKGVDEARAFLKEYFAHHSGAFFECNAEETQAAMLHRFAVASAAIRYRAVHDDEVEDLVALDIALRRDDRDWFEKLPSEIDNKIIHKLYYGHFMCHVFHQDYIIKKGNDCMALEHEMLHLLDQRGAQYPAEHNVGHLYEAKPALKQFYRKLDPTNSFNPGVGKTSKKKNWAE

SEQ ID NO: 18084 - protein, 660 aa, Neisseria meningitidis Z2491
MVILTTLFFVCVLVVLVLTVPDQVQMWLDRAKEVIFTEFSWFYVLTFSIFLGFLLILSVSSLGNIRLGRDEDVPEFGFLSWLAMLFAAGMGVGLMFFGVAEPLMHYFSDITAGTPEHRQQQALLHTVFHWGVHAWSVYGTIALALAYFGFRYKLPLALRSCFYPLLKEKISGRFGDAIDIMALLATFFGIITTLGFGASQLGAGLQEIGWIAENSFSVQVLIIAAVMSLAVVSAISGVGKGVKVLSELNLGLAFLLLFFVLAAGPTVYLLSAFGDNIGNYLGNLVRLSFKTYAYEREHKPWFESWTVLYWAWWCSWAPFVGLFIARISKGRTIREFVFGVLLIPGLFGVLWFTVFGNTAIWLNDGVAGGVLEKMTSSPETLLFKFFNYLPLPELTSIVSLLVISLFFVTSADSGIYVLNNITSRDKGLSAPRWQAVMWGVLMSAVAVLLMRSGGLGNLQSMTLIVSLPFALLMLIMCFSLWKGLSADKKYFETRVNPTSVFWTGGKWKERLVQIMSQTQEQDILKFLKHTASPAMHELQRELSEEYGLSVRVDKMFHQDEPAIEFVIRKETMRDFMYGIKSVGQDVSDQLINDGKLPHIRHQTTYKPYAYFFDGRVGYDVQYMNKDELIADILKNYERYLMLLDDVGQELMAHEQVELAE

SEQ ID NO: 18085 - protein, 127 aa, Neisseria meningitidis Z2491
MFRTMLGGKIHRATVTEADLNYVGSITVDQDLLDAAGIYPNEKVAIVNNNNGERFETYTIAGKRGSGVICLNGAAARLVQKSDIVIIMSYVQLSEPEIAAHEPKVVLVDGNNKIRDIISYEPPHTVL

SEQ ID NO: 18086 - protein, 462 aa, Neisseria meningitidis Z2491
MSIKFADLNLDKNILSAVSSEGYESPTPIQAQAIPFALEGRDIMASAQTGSGKTAAFLLPTLQRLTKRSEKPGKGPRALVLTPTRELAAQVEKNALAYAKNMRWFRTVSIVGGASFGYQTRALSKPVDLIVATPGRLMDLMQSGKVDFARLEVLILDEADRMLDMGFIDDIETIVEATPEDRQTLLFSATWDGAVGKLARKLTKDPEIIEVERVDDQGKIEEQLLYCDDMRHKNRLLDHILRDADIDQCVIFTSTKAMTEVIADELYEKGFAANCLHGDMPQGWRNRTLMDLRKGRCKILVATDVAARGIDVPTITHVINYDLPKQAEDYVHRIGRTGRAGRTGIAITFAEVNEYVKVHKIEKYINRKLPELTIEGMEPTRKRKSAGGKPKGKGGWGDRKSGGWRGDHKPSKEGFGGKTRGEGFKKEGFKRDGFKKTGEGFKGKRKAGDSFAGKGERRYKDR

SEQ ID NO: 18087 - protein, 404 aa, Neisseria meningitidis Z2491
MTVKTPVYLDYAATTTVDKRVAEKMIPYLTETFGNPASNSHAFGWEAEEAVEKARADIAALINADPKEIVFTSGATESDNLAIKGAANFYKTKGKHLITVKTEHKAVLDTMRELERQGFEVTYLGVQENGLIDLEELKAAIRDDTILVSVMWANNEIGVVQDIPAIGEICRERKIVFHVDAAQACGKVPVDVEAAKIDLLSMSAHKVYGPKGIGALYVRRKPRVRLEAQMHGGGHERGFRSGTLPTHQIVGMGEAFRIAKEELEQDMAHYRKLRDIFLKGIEGIEEVYINGDLEHRVPNNLNVSFNFVEGESLIMAVKELAVSSGSACTSASLEPSYVLRALGRNDELAHSSLRITFGRMTTEEEVQFAAELIKSKIGKLRELSPLWEMFKDGIDLNSIEWAAH

SEQ ID NO: 18088 - protein, 859 aa, Neisseria meningitidis Z2491
MRYDKLTAKFQQALAEAQSLALAADSSYLEAGFVLKALLDDQNSGAAALLAHAGVNVPQVKQRLQQHLNSLPKVSGQGGDILPSRELQAVLNLMDKAATKRGDAYIASELFLLALVQQNDAAGKILKEAGATEQNINAAIDAVRGGQNVNDANAEDQRDALKKYTLDLTQRARDGKLDPVIGRDDEIRRAIQVLQRRTKNNPVLIGEPGVGKTAIVEGLAQRIVNGEVPESLRNKRLLVLDLAALIAGAKYRGEFEERLKGVLNDLAKDDGNTLIFIDEIHTLVGAGKTDGAMDAGNMLKPALARGELHCIGATTLDEYRQYIEKDAALERRFQKVLVGEPSVEDTIAILRGLQERYEIHHGIDITDPAIVAAAELSDRYITDRFLPDKAIDLIDEAASRVKMEKETKPEAMDKIDRRLIQLRMEKAHVEKEKDDASKKRLELIDEEINGLQKEYADLDEIWKAEKAISDGAANIKKQIDEVKIKIEQAKRQGDLALASKLMYEDLEHLEKQRAAAERADTDSTKPANKLLRNNVGAEEIAEVVSRMTGIPVSKMMEGERDKLLKMEEVLHRRVVGQDEAVRAVSDAIRRSRSGLADPNKPYGSFLFLGPTGVGKTELCKALAGFLFDSEDHLIRIDMSEYMEKHAVARLIGAPPGYVGYEEGGYLTEQVRRKPYSVILLDEVEKAHPDVFNILLQVLDDGRLTDGQGRTVDFKNTVIVMTSNIGSQHIQQMGIQDYEAVKEVVMEDVKEHFRPEMINRIDEVVVFHGLDQANIRSIAKIQLKGLEKRLEKQNLRLAVSDAALDIIAKAGFDPIYGARPLKRAIQSEIENPLAKALLAGNYAPESEIRVEADGDRLKFA

SEQ ID NO: 18089 - protein, 405 aa, Neisseria meningitidis Z2491
MALIVHKYGGTSVGSPERIKNVAKRVAKARAEGHDIVVVVSAMSGETNRLVALAHEMQEHPDPRELDVVLSTGEQVTIGLLAMALKDIGVDAKSYTGWQVALKTDTAHTKARIESIDDEKMRADLTAGKVVIVAGFQGISSEGDISTLGRGGSDTSAVALAAALKADECQIYTDVDGVYTTDPRVVPEARRMDTVTFEEMIELASLGSKVLQIRSVEFAGKYKVRLRVLSSLQDGGNGTLITFEEDDNMERAAVTGIAFDKNQARINVRGVPDKPGVAYQILGAVADANIEVDMIIQNVGSEGTTDFSFTVPRGDYKQTLEILSERQDSIGAASIDGDDTVCKVSAVGLGMRSHVGVAAKIFRTLAEEGINIQMISTSEIKVSVLIDEKYMELATRVLHKAFNLG

SEQ ID NO: 18090 - protein, 408 aa, Neisseria meningitidis Z2491
MPSETFRSKKMSQKLILVLNCGSSSLKGAVLDNGSGEVLLSCLAEKLNLPDAYITFKVNGEKHKVDLSAHPDHTGAVEALMEELKAHGLDSRIGAIGHRVVSGGELYSESILVDDEVIAGIEKCIPLAPLHNPAHLLGLRAAQSIFKDLPNVVVFDTSFHQTMPEVAYKYAVPQELYEKYGLRRYGAHGTSYRFVADETARFLGKDKKDLRMVIAHLGNGASITAVANGESRDTSMGLTPLEGLVMGTRSGDIDPSVFGFLAENANMTIAQITEMLNKKSGLLGISGLSNDCRTIEEEAAKGHKGAKLALDMFIYRLAKYIGSMAVAAGGLDALVFTGGIGENSDIIRERVIGYLGFLGLNIDQEANLKARFGNAGVITTADSKAVAVVIPTNEELMIAHDTARLSGL

SEQ ID NO: 18091 - protein, 573 aa, Neisseria meningitidis Z2491
MPSEAICSKKTMLNKDQFADNHFIRTIIEDDLKSGKHEAVQTRFPPEPNGYLHIGHAKSICLNFGLAYIYDGLCNLRFDDTNPEKENDEYVNAIKEDVEWLGFHWAGEPRFASNYFDQLYDYAVGLIKDGKAYVDDLTPEEMREYRGTLTEAGKNSPYRDRSVEENLDLFTRMKNGEFPDGSKTLRLKIDMASGNINMRDPVIYRIRRAHHHNTGDKWCIYPMYDYTHCISDAIEGITHSLCTLEFEAHRPLYDWVLDNIHAPHATRPRQYEFSRLELLYTITSKRKLNQLVVEKHVSGWDDPRMPTISGMRRRGYTPEGLRLFAKRAGISKSENIVDMSVLEGAIREELENSAPRLMAVLNPLKVTLTNFEAGRTQSRRAAFHPNHEEMGEREVPISQTIYIEADDFAENPPKGFKRLIPGGEVRLRHGYVIKCDEVVKDEAGNVVELKCSIDHDTLGKNPEGRKVKGVIHWVSAEHAAEIKVRLYDRLFTIERPDAVRGEDGEYLPFTDFLNPESVKEITAYAEPAAKDLPAESRWQFERIGYFVTDRKDHGKDTPVFNRTVTLKDSWQPK

SEQ ID NO: 18092 - protein, 575 aa, Neisseria meningitidis Z2491
MQLSGAQIIVQSLKAEGVEYVFGYPGGAVIEIYDALFQLNKFKHILTRHEQAAVHAADAYARVSGKVGVALVTSGPGVTNALTGIATAYTDSIPMVVISGQVGNSLIGTDAFQEVDTVGITRPCVKHNFLVTDINELAETIKKAFQIAASGRPGPVVVDVPKDVTQAMAKFSYPQEDIFIRSYQPVVQGHIGQIKKAVQMLASAKRPVVYFGGGVVLGNASEELTRFVRMTGAPCTGTLMGLGAYPSGDRQFLGMLGMHGTYEANLAMQNADVVLAVGARFDDRVVSVPSKFFEKAKKVIHIDVDPSSIAKRVKADIPIVGDVKNVLSEMVALWQKQESVPSEDALGKWWKTIEEWRSRDCLWFDNGSEIIKPQYVIQKLAEITGNSAIITSDVGQHQMFAAQYYPFERPRQWLNSGGLGTMGVGLPYAIGAKLAAPDQDVFCITGDGSIQMNIQELSTCFQYRIPVNVITLNNGYLGMVRQWQEIYYGGRESETYFDSLPDFVKLAEAYGHIGIRVDKKSDVEGALLEALNQKDRLVFIDFLTDQKQNVMPMVGNGKGLDEMVLPPHMRADGKA

SEQ ID NO: 18093 - protein, 399 aa, Neisseria meningitidis Z2491
MSDQLILVLNCGSSSLKGAVIDRKSGSVVLSCLGERLTTPEAVITFSKDGNKRQVPLSGRNCHAGAVGMLLNELEKHELHDRIQAVGHRIAHGGEKYSESVLIDQAVMDELNACIPLAPLHNPANISGILAAQEHFPGLPNVGVMDTSFHQTMPERAYTYAVPRELRKKYAFRRYGFHGTSMRYVAPEAACILGKPLEDIRMIIAHLGNGASITAIKNGKSVDTSMGFTPIEGLVMGTRCGDIDPGVYSYLTSHAGLDVAQVDEMLNKKSGLLGISELSNDCRTLEIAADEGHEGARLALEVMTYRLAKYIASMAVGCGGVDALVFTGGIGENSRNIRAKTVSYLDFLGLHIDTKANMEKRYGNSGIISPTDSSPAVLVVPTNEELMIACDTAELVGIL

SEQ ID NO: 18094 - protein, 324 aa, Neisseria meningitidis Z2491
MAGNEKYLDWAREVLHTEAEGLREIAADLDENFALAADALLHCKGRVVITGMGKSGHIGRKMAATMASTGTPAFFVHPAEAAHGDLGMIVDNDVVVAISNSGESDEIAAIIPALKRKDITLVCITARPDSTMARHADIHITASVSKEACPLGLAPTTSTTAVMALGDALAVVLLRARAFTPDDFALSHPAGSLGKRLLLRVADIMHKGGGLPAVRLGTPLKEAIVSMSEKGLGMLAVTDGQGRLKGVFTDGDLRRLFQECDNFTGLSIDEVMHTHPKTISAERLATEALKVMQANHVNGLLVTDADGVLIGALNMHDLLAARIV

SEQ ID NO: 18095 - protein, 390 aa, Pseudomonas fluorescens
MAQPYSARSRAIEPFHVMALLARANELQAAGHDVIHLEIGEPDFTTAEPIIQAGQAALANGKTRYTAARGLPELREAISGFYQQRYGLSIDPERILITPGGSGALLLASSLLVDPGKHWLLADPGYPCNRHFLRLVEGAAQLVPVGPEVRYQLTADLVERYWDQDSVGALVASPANPTGTILTRDELAGLSSAIKARNGHLVVDEIYHGLTYGTDAASVLEVDDEAFVLNSFSKYFGMTGWRLGWLVAPPAAVGELEKLAQNLYISAPSMAQHAALACFTPQTLAILEERRAEFGRRRDFLLPALRELGFGIAVEPEGAFYLYADISAFGGDAFAFCRHFLETEHVAFTPGLDFGRFQAGHHVRFAYTQNLDRLQEAVERIARGLRSWQG

SEQ ID NO: 18096 - protein, 572 aa, Desulfovibrio vulgaris str. 'Miyazaki F'
MNITEALLHALKERGAREVWGIPGDFALPYFKIIEQTGILPLVTLTHEPGLGFAADAAARIRRGLSVAAVTYGAGAINMLNAVAQAFAEKSPLVVVSGAPGTAERARGLLLHHQVKTVGSQFRMYQEVTCDQGILDDPATAPAIIERVLRNCLEHSRPVYLEIPRDMPAVACGPVAPHMPTPCDAEAVAACAAEVLARLRAASRPVLMVGVEVRRYGLEDRVAELADRLGVPVVTSFMGRGLLAGKACLQGTYMGVAGDAAITQAVEGSDGLLLLGVIMSDTNFGVSASHIDRRRLMHAEDRQVRMGFHTYHDIPLESLVDALLAALPEGGQACAVPAGLDGDGGALGRNVVYRRGFVADDAPVTPDDIAVLLNDFYDGVLNGPAVSAEPDPFPWPFGGRPLPWPLACDIGDCLFTALSVRPVPMVGPGYYASMGFGVPAGMGLQVTTGQRSLTLVGDGAFQMTGMELGNCARLGIDPVVVVFNNASWEMLRVFQPETSYSAINTLDFAAFADALGGHGYRVTTRRELAAAFASATTERGRFQLIDVRLEKGAISDTLANFVAGVKRVSGVK

SEQ ID NO: 18097 - protein, 401 aa, Desulfovibrio vulgaris str. 'Miyazaki F'
MAKAIKKVVLAYSGGLDTSVILKWIAVTYGCEVVTLTADLGQEEDLDGVDAKALRTGASRAYVEDLREEFARDFIFPMMRSGAVYEGRYLLGTSIARPLIAKRLVDIARAEGAQAVAHGATGKGNDQVRFELAVNALAPDLDVIAPWRIWDLRSRTDLTAFAEQHGIPLSTSSKQYSMDRNMLHCSFEGGELEDPWCEPGPNSHVMAVPVEQAPDTPEYITIEFKKGDAVAVNGEAMSPASIIRTLNTIGGRHGIGRLDMVENRFVGIKSRGVYETPGGTVLHIAHRDLEGICMDRESMHLRDQLIPRYSEAVYNGFWFAPEREAMQAFIDKTQETVNGTVRLKLYKGNAYPVGRTSPNTLYCHDLATFEDCATYDHADAAGFIKLQGLRVRGYAQRVKKD

SEQ ID NO: 18098 - protein, 671 aa, Desulfovibrio vulgaris str. 'Miyazaki F'
MNQFSRNLILWAIISLLMVVLFNMFNQPQGTQARLTYTEFLQKVERGEVLRVTIQGQKLTGESSEGKAFQTYAPHDPELVTRLISQKVEVKAEPQEEAPWYMTLLVSWFPMLLLIGVWIFFMRQMQGGGGKAMSFGRSRARMITPESARVTFEDVAGVDEAKEELSEVVEFLSNPRKFTRLGGRIPKGVLLVGPPGTGKTLLARAVAGEAGVPFFSISGSDFVEMFVGVGASRVRDLFMQGKKSAPCLIFIDEIDAVGRQRGAGLGGGHDEREQTLNQLLVEMDGFESNEGVILIAATNRPDVLDPALLRPGRFDRQVVVPTPDVRGRKRILEVHTRRTPLATGVVLDIIAKGTPGFSGADLENLVNEAALQAAKVGKDTVDMGDFEYAKDKVLMGKERRSLILSDEEKRITAYHEAGHALAAKLLPGSDPVHKVTIIPRGRALGVTMQLPEGDRHGYSRSYLLSNLVLLLGGRVAEEVVFNDITTGAGNDIERATKMARKMVCEWGMSEAIGPMNIGEQGEEVFIGREWAHSRNFSEETARLVDAEVKRIIEEARQRCRTLLEGNIDSLHAIAGALLERETISGDDIDVLMRGEQLPPEKPNNRPGTVRAGEQPASDRNAGAPSASAVQPGPASAESDAAGRDEFTLESDDAAERGPGGNDDHNGGAGRR

SEQ ID NO: 18099 - protein, 428 aa, Desulfovibrio vulgaris str. 'Miyazaki F'
MSKLVPPHGGKGLVCCLLEGAAREAELKKAAGLKQIEISSRTKGDLIMMGIGGFSPLNGFMKKADWKSVCEKMTTADGTFWPVPVTMDISKEDAAAVKVGDEVALVRKGETFATMKIEEIYEMTEADKKWECELVFKGEGPDSQKFWEVALEDHPGVKMVMEQKEFNVAGTVKVLSEGDFPTKFAGVYKRPAELRAEMEERGWANVAALQLRNPMHRSHEFLAKIAIEVCDGVVIHSLVGALKPGDIPAEVRVKCIDTLVEKYFVKQNVIQAGYPLDMRYAGPREGLLHATFRQNYGINRMIIGRDHAGVGDFYGMFEAQTIFDKIPYVNEACPEPGKALICTPLKIDWTFYCYKCDGMASLRTCPHGKEDRVILSGTKLRKALSDGAPVADHFGRDEVLEILRAYYEGLTEKVEVKMQQAASGSVMK

SEQ ID NO: 18100 - protein, 562 aa, Desulfovibrio vulgaris str. 'Miyazaki F'
MELNGARILLECLKREGVDVLFGYPGGAVIDIYDELPRHDIRHILVRHEQAAVHAADGFARASGKVGVCLVTSGPGATNTVTGIATAYADSIPMVVLTGQVPTPLIGNDAFQEVDIVGITRPCTKHNYLVKDVRDLARVLRQAFYLARSGRPGPVLVDLPKDVMQAKTEFVWPEDVKLRSYNPTYRPNLNQLRRAVEALIEAKRPLFFAGGGVIMSDASEELGWLARTLSIPVTSTLMGLGAFPGDDPLWLGMIGMHGTYAGNKAVNNADCIVAVGARFDDRVTGRLSAFASGARIIHIDIDPTSIRKNVQVDIPVVGDCRKALAGIREIATTRLAEKDWATAHEPWLTQVSAWRTEQPLTYVKNGSIKPQQVVETIFSITRGDAIVTTEVGQNQMWTAQFFTFRKPRTLLTSGGLGTMGYGFPAAIGAQFAFPDKLVIDMAGDGSIQMNIQELATAVCNKLPIKIVILNNGYLGMVRQWQELFYQRNYCSTCMEAQPDFVKLAEAYGAEGYRITEAGELESTLRAAFASPHTAVIDVRVEREENVYPMVPAGAALDEMLLV

SEQ ID NO: 18101 - protein, 409 aa, Desulfovibrio vulgaris str. 'Miyazaki F'
MRILVQKFGGTSVANLECMKQVREKVRRALRDGYKPVVVLSARSGETNRLLALAEEWSTDPDPAEVDALIATGEQVSVALFSMLLKDSGIKARSMTGFQVPITTSDAFGRARIMDIDASRLRKELETHDVIVVAGFQGVTSEGRVTTLGRGGSDTSAVALAAALGSVECEIYTDVDGVYTTDPNLCSTARKLDRVSYDEMLEMASMGAKVLQIRSVEFAKKYKVPVHVRSTFTDTPGTMVTQEDCEMEAVLVSGIAYDKDQARVTLRSVPDKPGVSAAIFGPLSQQGILVDMIVQNPSRDGVTDMTFTVPRKDLKKTLALMEEIRARTGAQEVLHDTQVAKVSAIGVGMRNHSGVAAKAFAALHAENINILMISTSEIKITCLIEEKYTELAVRTLHDAFGLNHDLGNA

SEQ ID NO: 18102 - protein, 389 aa, Desulfovibrio vulgaris str. 'Miyazaki F'
MADFKLADRLATLPPYLFAGIDKVKAEVAARGVDIISLGIGDPDMPTPDFIIEAMKKAVERPANHQYPSYVGMLEFRQEVANWYGRRFGVSLDPKTEVIGLIGSKEGIAHFPLAFVNPGDLVLVCTPNYPVYHIATGFVGGEVQFIPLVEENDYLPDLDAIPAATWDRAKMIFVNYPNNPTAATAPRAFYEKLIGICRKHNVIIAHDTAYTEVYYDENDKPMSILEVEGAKDVTIEFHSLSKTYNMTGWRVGMAVGNASLVAGLGKVKENVDSGIFQAVQEASIVALRDGDDFCRELRGIYRKRRDVVVAALNKVGIACRVPTAAFYIWAKVPAGYGSSAEFVTAVLEKTGVVLTPGNGFGTPGEGYFRISLTVDTDRLEEAVSRIANL

SEQ ID NO: 18103 - protein, 217 aa, Desulfovibrio vulgaris str. 'Miyazaki F'
MQFFLDTANLAEMRAAKAWGLLDGVTTNPTLMAREGGDWRMVMQAICREVEGPVSLEAVGDTADELITMGLDLVRNGPNVVVKIPMTPEGLKAVRVLKTKGVDTNVTLVFSPMQALLAAKAGASFISPFVGRLDGLSQDGMQLVADIMTILRNYSGMGMDARVIVASVRHPRHVAEAALMGAHVATVPFAVLRQMFDHPLTTSGLETFNKDWAALNG

SEQ ID NO: 18104 - protein, 618 aa, Desulfovibrio vulgaris str. 'Miyazaki F'
MANATKTDQPTQGQSIHLIKRCLKYFRPYKGQIFLSMLAMGVVSLSTAGSAWLVKPALDEIFINKDEQALLYVPLLFFVLTLVKGAGRYVQNYFMQYSGLRVLEKLRSELYDKIIYLPLQFYEESQVGMLMSRIINDVTMIRNSLPSIVMMVRQLLTMLGLVGVVFYQNPRLAVWAVLVLPAALYPLVWFGRKLRKYGRRNQSKLADISVVLQEVFSGIRVVKAFATERHEARRFDDENERLARLYLKQASVSELSSPIMELIGAVGIGLVIWFGGHEVIAGETTAGTFFSFVAALAMMYDPVKSLNSYNMEVQRALAGAERVFEILDAPELTVEQGGDTPFDEPFRELRFDGVTFTYGSKTAPALDNVSLTVRAGERVAIVGPSGAGKSTFVNLIPRFYEPQQGAIILNGRPVSDYTLETLRRNVSMVSQDTFLFNLPVRDNITYGLSGAIDEDTVRAAAMSAYADEFIRELPEGYDTLLGERGVKLSGGQKQRLTIARAIMKDAPLLILDEATSALDSEAERIVQKALDNLMENRTSIVIAHRLSTILSADRILVMEQGRIVDAGRHEELLARCPMYARLYAMQFATDAANAVPASVGDPVDMEQGAAVPATGATA

SEQ ID NO: 18105 - protein, 312 aa, Desulfovibrio vulgaris str. 'Miyazaki F'
MHGDLKILTGTSNPALAKAICNHLGCQLTPALCETFSDGEIRIEIGDNVRGDDVFVVQATCSPVNYNLMQLCLMLDALKRASAGRVTAVVPYYGYARQDRKVSPRAPISAKLVADFLTTAGTDRVVTVDLHAGQIQGFFNVPVDNLYAQPVILEYLRPYAGDIVIVSPDAGGVERARSFAKKLNAGLAIIDKRRDRPNQASAMHVIGDVRDKIAIVVDDMIDTAGTMCAAGEVLLKNGAKEVMACATHPVLSGPAIERLCNSTFSQVIVTDTVPLGDKLAACSKLKVLSVAGLLAKAIHNIHTESSVSVLFV

SEQ ID NO: 18106 - protein, 369 aa, Desulfovibrio vulgaris str. 'Miyazaki F'
MQVGILKEIKVLENRVAMTPAGVLSMRSHGHSVQVQAGAGEGAGFGDEEYVAAGAVMSDARTIYAECGMVMHVKEPQPSEYGMLRKDQILFTYLHLAADEEQTHALVAARNVNIAYETIQKADGSLPLLTPMSEVAGRMAIQQAAKYLEIPTGGMGKLMGGVPGVEPAVVVVIGGGTVGINAAKMACGLGATVYLLDKNLDRLRYLSDVMPPNCITMMSGPYAIRKLLPQADVVIGAVLVPGAKAPHLVSRDDLKLMRKGSILVDVAIDQGGCFETSHPTTHADPVYVVDGVSHYCVANIPGAVAMTSTAALTNATLPYALTIADLGWKEACRQHADIRKGLNVVDGKITYPAVAEAFGLPHAPVEEVL

SEQ ID NO: 18107 - protein, 507 aa, Desulfovibrio vulgaris str. 'Miyazaki F'
MHVKPISQHFNDFVIERERARCINCEVCVRQCSYEAHFWDEARQFVVHDSARCVGCHRCAAMCPTSCLTIRKKPSDFRDNSLWTSTYIKHIFKQADTGGVLLSGMGNPQPKPIYWDNMLLDASQVTNPSIDPLREPMELRTFLGAKPDAVDFIHTPEGPRLKQPLPPQLQLEYPIMFAAMSFGAINFNLHVAMARAATQLGICYNTGEGGLHPDLYQYGANTIVQVASGRFGVHKDYLNAGAAVEIKVGQGAKPGIGGHLPGEKIDEEVSRTRMVPQGSDAISPAPHHDIYSIEDLLQLIYAIKESTRYRVPVAVKIAAVHNAPAIASGIVRAGADIVVIDGFRGGTGAAPTMIRDNVGIPIELALASVDNRLRDEGIRNHASLVVAGGVRCSADVVKAIALGADAVYIGTAALVAVGCTLCGRCYTGKCPWGIATNAAQLKKRQNPDVAAQRMANLVRAWGHEIQEMLGGMGLNSIESLRGNRDKLRGVGLNDVELGVLGIKHAGL

SEQ ID NO: 18108 - protein, 456 aa, Desulfovibrio vulgaris str. 'Miyazaki F'
MTRTSGTRLLVVDDDTTHRGMLQTLLADWGYRTECAGDGETAVTLCRETPFDLILMDLRMGVMSGIGALREIRAYNPAIPILIMTAYSNVESAVDAIRSGAYDYLTKPLDFEELRLTLERALDHAALRDENAALKTTLASSFDPAGIIGQSQSMHRLMDMMASIAPSEATVLVTGESGTGKELIARAIHANSQRRHGPYVTVNCAALTETLLESELFGHEKGAFTGAEKRREGRFQSADKGTIFLDEIGETSLPMQAKLLRAIQEREIQRVGSDQTLRVDVRIIAATNRDLRAEVEAGRFRQDLYYRLNVVTLHVPPLRERVEDIPLLAGHFLRRFTEKNGKRVKGFTPQAMDRLLKHDWPGNVRELENAAERAVVLLVGEYISERELPHAIAGGDGDATCAVPRFNGMTLEEIERAAILDAMDASEGNKSEAARRLGITRKTLHAKLNRYADDEQ

SEQ ID NO: 18109 - protein, 539 aa, Desulfovibrio vulgaris str. 'Miyazaki F'
MESKRAIIAIALSFVVLVGWSYLADHMGWNGQPAPQAQQEETAPSASQAAPQSASQAAAPAPRAETPVFLPSAGREVTVVTPLYKAVLHSGGGVLKHFSLTRYRTAITAGAPAVDMVDTASTVMSPLGLLINGQPSWNTGQWSFDGGDLSLGAGQSGVLTFTGEVDGVRVVRELTFSADTYLISEKVRLAPLADARTVRLGFTVGTGNLSPNGGQYDHTRVAWLHDGSFSEKTSASDLEKGVLETGALSWGAVMSNYFLVAAAPVDTTGVTLKGKLQEGVYRVAMERGDVSIPAGGETTVACNYWFGPKDRGLLKEAPNQLAEAINLGWFSIIARPLVDMLEFFHKYVGNYGVAIILLTVVIKLVFWPLSHKSYKSMEQMKKLQPMLQKLREKHGDDREKMNEEMMRLYKTYKVNPAGGCLPMLVQIPVFFGLYQALLNAIELRHASFITHLPFTDMVWLADLSAKDPYYITPIVMGATMLLQQKLTPAPGDPTQAKIMMFMPVVFTFMFLSFPSGLVVYWLCNNVLSIAQQWWMLRKA

SEQ ID NO: 18110 - protein, 262 aa, Desulfovibrio vulgaris str. 'Miyazaki F'
MLEIRDLHVCIGDVEVLKGIDLKIEAGETFILFGPNGSGKTTLLMTLMGFANYTVTQGQILFKGQDITHAPMYERARLGIGMSFQRPPTIHGLKTGLLVNMCARGREIDVEDLARKVNFDRFLERDVNAGFSGGEIKRSEMLQLMAQRPDLVLFDEPESGVDLENMALIGQTARQLLDGMPPASCSMKQQKARCKTSGLIITHTGYILEYVNADRGQVMYDGHLCCEARPRDILDHVSKYGYQECLRCLDSDTSLGQIKEAL

SEQ ID NO: 18111 - protein, 229 aa, Desulfovibrio vulgaris str. 'Miyazaki F'
MTQQNRRIIERLPLFDGLSDPQLEGLAGIVVDRRVDKGQMIFFESSPAEGFYVVAEGRVKIFKTAPDGREAVMHVMGPGETFGEVAVFQGGTFPAHAMAVENARVLFLPRKGLVDRITRDPTLAMNMLAALSRKLRVFTTKVESLTLHETPQRLAAYLLHASELKGDADTFRLDMAKGVLAGMLGTARETLSRCLGKLAERGAVSVDGREVTIVDRDYLQALADGDETL

SEQ ID NO: 18112 - protein, 368 aa, Desulfovibrio vulgaris str. 'Miyazaki F'
MRFVDEATITVRAGNGGNGCVSFRREKFVPRGGPDGGDGGDGGSVILRASNRLLSLYDFRLQRNYEAPNGQGGMGSQCHGRKGDDLTVELPVGTQIYEVTEDGETLLCDLSDPETVFVVAQGGRGGKGNEHFKSSTNRAPRFAQKGETGEVRSLRLELKILADAGLLGLPNAGKSTFISKVSAARPKIAAYPFTTLIPNLGVMIDDADPEQRLVIADIPGLIEGAHTGQGLGHRFLKHVERTRFLVHILSVEDVSLDSPDGPWSGFDLINEELVRFDADLGQRVQLQVVNKIDLRDPEDVQALRDRAAADGRTVHFMSALTGEGVEDVVAEMWRMRDELDIHEALVRLRETEEFDEEESDIEVIWVRE

SEQ ID NO: 18113 - protein, 102 aa, Desulfovibrio vulgaris str. 'Miyazaki F'
MYAIIETGGKQFRVEEGAKIFVEKLVAEAGSEIVIDKVLMLGGGAFSVGAPYVEGAKVTAEVVEHGRGEKLIVFKKWRRNDSRKKQGHRQDFTALKIKAIQA

SEQ ID NO: 18114 - protein, 318 aa, Desulfovibrio vulgaris str. 'Miyazaki F'
MSTRHESSAGHTATAPDAPGTSGTLGTPDASHGPGASHGPGASRAPGAAMDIDPSGAFVPADMRVHHETFRVRGYEVGPDGTVSAQIICDYLQEAAGVHADRLGLSLAALHEQGQAWVLARLAVQVERAPAEGETVTVRTWPCGVERLQFRRDYLMLGQDGAVVARGASFWVVINLASRRPERIPPTVAALLPENPPLALDGGLLGDRRPPAAAEDAAPLSSRSFAVRRADMDRNRHVNNVRYLDWALEGVPAEVQETSRPVWLDIHFRAETVYGDTVEAQCLPAPADTPAPGAARFVHVLTRRSDGREVARALTGWR

SEQ ID NO: 18115 - protein, 569 aa, Desulfovibrio vulgaris str. 'Miyazaki F'
MSDHNASEPDRKAEPGLDFIRALITADNANGRFDSRVHTRFPPEPNGYLHIGHAKSICLNFGVAREFGGKCNLRFDDTNPLKESQEYVDSIREDVKWLGGDWQGREFYASDYFEQLYQYAEQLILAGKAYVDSLSADEIREHRGTLTAPGKESPYRNRSVEENLDLFRRMRAGEFKDGEHVLRAKIDMASPNVVMRDPTLYRIRHAHHHRTGDAWCIYPMYDYTHCISDSIEGITHSICTLEFVNNRELYDWTLDTLGVYHPQQLEFARLNLTYTVLSKRKLIQLVEGGYVNGWDDPRMPTISGLRRRGVTPEALQDFCARIGVAKADSVVDFSLLEFCMREHLNAVAPRVMGVLDPIKVVIENYPDDQVETFDMPYHPEDTSHGSRTVPFSKVLYIERDDFREDPPKKYHRLAPGAEVRLRYAYYITCREVVKDADGNITELRCTYDPATKGGWSQDGRKVKGTIHWVSAAHALHAEVRLYEHLFSVENPNAAEEGKTFVDYLNPDSLKTVTAMLEPALADVAPGTRVQFERIGYFCADKDGTPGKPVFNRTVGLRDSWAKIEKKEGA

SEQ ID NO: 18116 - protein, 400 aa, Desulfovibrio vulgaris str. 'Miyazaki F'
MPDITSSESPLRVAERVRNIRISATKLMPMLAAKVGGCVSLGQGVPSFRTPDHIVEAVCRALRDDPTAGRYSLQPGMPALREAIAADILARKGARFDPETEIGVTVGAMEALVMIMLTVVERGDEVIIPSPGYASHAEQVLMAEGVPVHVPLRAADWGLDVEAVRFAVTPRTRAIIVCSPGNPTGGVYDDADVRALCDLALERDLVLIVDDTYDYMVYGEQPGTPRFSPVSQPELRRHVITVNSFSKKYALTGWRVGYVAADAAWMAELLKVHDATAVCAPTVSQHAALAALTGPQDCVDVMRAALTARRDLTCRRLDALAPHFAYVPPRGAFYAMARYTFTDADSMTVARRMLEEARVITVPGGSFGPTGERHLRLSFGMDEAELTEAFDRIQHWVAAL

SEQ ID NO: 18117 - protein, 570 aa, Desulfovibrio vulgaris str. 'Miyazaki F'
MAGTDNMSDEATSFLPRTITELRAGYSTQKFIRDLLAGLTVGVVALPLAMAFAIASGTTPERGLFTAIVAGFLISLLGGSRYQIGGPTGAFVVIIYNVIYRHGYDGLVITTLLAGAMLLIFGLCRIGVLIKYIPYPVTTGFTAGIAVLIFSSQMKDFFGLQMDAVPPEFFDKWLAYAEHLGTINTTTLCVAGLALACILATRRFIPRIPAPVVGVAVASLAVWALGLQVETIGSRFGGIPRELPSFVWPTFTFARVRELLPDAMTIALLAGIESLLSCVVADGMTGDKHNSNVELTAQGVANIASVLFGGIPATGAIARTVTNIRSGGQTPVAGMVHAAVLVAFVLFLAPLASFIPLASLAAVLIMVSWDMSELHKFLRLLRAPKSDITVMCLTFVLTVVIDLTVAVYVGVMLASLLFMRRMSEVTAICSCAIDDKPVIQGRETAELVVPEGVQVYEIDGPFFFGVADRFQSVSQALQKQPEVFILRMRKASTVDSTGANALEAFCRTCRRRGTVLLLSGVRPAARRMMERFGTLDLIGRENLFENVDRAIEHAVRLLADKHGVPPTAKK

SEQ ID NO: 18118 - protein, 229 aa, Desulfovibrio vulgaris str. 'Miyazaki F'
MERNWHLWTEDFFADLPDERAAFLALSRRREFSKNDMVFFEEDSGDSCFYVEQGIVRIFRIAPSGKEPIFFLRRRGEMFGLAEVLDSVPRKANAQALTPCVLREAGRDEFEKFLSDNFGAARRVIATLGGRVRYLGEQVGNLMTCDVGTRLAKLLVYMAYEVLGDEAAWHEPAVIPVRLTQEQMAAMTGSCQQTVSDFLREMQDEGLVRVTRREVVVLHPLRLLERAEL

SEQ ID NO: 18119 - protein, 704 aa, Desulfovibrio vulgaris str. 'Miyazaki F'
MANNLYITATESKSGKSAVVLGMMQLLLRDIRKVAFFRPIINRPVTDAVDHDTNLILTHFNLDIPVADTYAYSLQDARELINNGQHATLLENILKKYKQLEDSYDFVLCEGTDFLGKDAAFEFDLNADIAANLGCPVMVVANGQQKTAHEIVASTQLTIDLLDEKGLDIVAAVINRASVTDAERDVVISSLECKVNCSNPLAVYVVPEEPTLGKPTMGDVKKWLNAQVLYGHGRMDTLVDDYVIAAMQIGNFLDYVTPGCLVITPGDRSDIILTGLATRLSGAYPDISGMLLTGGIQPAPNVHRLIEGWTGVPIPILSVKDHTYKTIQTLNELYGKIEPDNERKINTALGLFERSVDSQELGRRLINRKSSRITPMMFEFNLIERAKQNRMRIVLPEGVEERILRAADILARREVADIILLGDADKVGAKVSELGIALDGVQIIQPNLSPKFEEYAQAYFELRKHKGVSIERARDTMNDVTYFGTMMVHKGDAEGMVSGSINTTAHTIRPAFEFIKTKPGFSIVSSVFLMCLKDRVLAFGDCAVNPNPTAEQLAEIAINSAHTARIFGIEPRVAMLSYSTGSSGKGADVEKVIEATRIAKERAPELLLEGPLQYDAAIDMDVARTKLPGSQVAGQATVFIFPDLNTGNNTYKAVQRAAGAVAIGPVLQGLNKPVNDLSRGCTVPDIVNTVAITAIQAQAEKGLI

SEQ ID NO: 18120 - protein, 404 aa, Desulfovibrio vulgaris str. 'Miyazaki F'
MNVLVINSGSSSIKYQLIDMTTEKALCSGLVERIGEGMGKLTHKIKPDTDAEEKIVLEQAFANHVEGMKKVVDLITDADKGVIADKGEIYAVGHRVLLGGEEIKQSVKIDEWAKGIIRDYIPLGPLHNPANLAGIEVAEELFPHAPSVGVFDTEFHQTMPKKAYLYPLPYDLYKTLRIRRYGFHGTSHRYITKKTAEFLGKPLDELNIITCHLGNGCSMAAVKNGRCVDTTMGITPLEGLMMGTRCGDIDPALVPFLMEKKGWSGAEIDTVMNKQSGLKGICGMNDMRDIHAAREKGDEMAELAFQMFVYRIRKYIGSFAVVVGKLDAIVFTAGIGENDDLVRAAVCKDMDILGIDIDEAVNAKRSGQARHIGKPGQRVPVLVVPTNEELEIAQTTVAVLNGKN

SEQ ID NO: 18121 - protein, 301 aa, Desulfovibrio vulgaris str. 'Miyazaki F'
MKVAITTSSFAKFSDEPLRLLREAGIEYVLNPTGRAITEDEAIELLQGCIGVAAGTEPLTRRVMQALPELKVISRCGTGMDSVDRAAAAELGIAVRNTPDAPTLAVAELTLGYALDLMRLVSRMDRELRAGTWKKRMGNLLAGKKVGLIGFGRIGRATGKLFEAFGCEVAFADPFAESDTNARMEVDALLAWADIVSLHCSKPEGGGYILDEHRLGLMRPGTWVINAARGGLIDEAALHALLASGHLAGAALDVFAKEPYEGPLRDLPNVILTPHVGSYAVEARVKMETDTIRNLLDALPR

SEQ ID NO: 18122 - protein, 580 aa, Desulfovibrio vulgaris str. 'Miyazaki F'
MPKMTPSEAMAEVLVQEGVTHVSGILGSAFMDLLDLFPAAGIDFISVRHEQTAGHMEDAFTRMTGRAGVCIGQNGPGITNYVTAVATANMAHTPMVVLSPSAGSISVGWDGFQECDTWNLFKPITKASLRVPHPKRAADILRTAFRIAYAERGPVLVDIPRDYFYGELDEDILAPSQYRVAPGGIGNPEQFREAVEVLKAAKRPVIVSGRGVVDSGALETVKALAEHLNAPVACTYLHNDAFPCDHPLWTGPIGYMGSKAAMRILQQADVILAVGTRLSYFGTLPQYDINYFPKTAKIVQIDINPRHIAKTHPVAVGLCADAKDAAVELLARVREAMPNPRRDDAVYAMVKAELEDWYKEIAAIADEPVMEGRMHPRKALDVVGRFVTEHNAIATTDIGNTSSTANSYLRFRNAKRSVATLTFGNTGFAYQAGLGAQLACPEDTVVAIVGDGAWGMSLFEVPTAVQYNLPVIATVYNNGAWCAEKKNQVDFYNNRFVGADIWSNSYAAIAEAMGATGYKVNTQADLADALDAARKSRKPSVIEIMTDGTRLAPPFRRDALALPTRHLPKYDHLDKRHFVK

SEQ ID NO: 18123 - protein, 119 aa, Desulfovibrio vulgaris str. 'Miyazaki F'
MKILIVDDETEFLDLMHKRLARRGMEVDTADNGTDAVARVEQGAYDAVVLDVKMPGMDGLETLRRIKALRPEVPVVLLTGHASLGAALTGMELGAFDYMLKPVAINELIFKLGEAVRHA

SEQ ID NO: 18124 - protein, 730 aa, Desulfovibrio vulgaris str. 'Miyazaki F'
MAKNPSRRTRRATLRFRQPCWTHGPFEGILWACSASPCVPAGCPKPYGETMPDTPTPETSVTSRSTGNPAGAGDSGSTVPPGRSGPPAQPAGPACPVPLRGLGDKLLCAALPFVESLRGYSMQVLRADVLAALTVAVVALPQSMAYAVIAGVHPKYGLYAAIVPVIVAALWGASRYLVAGPTNAIAMLLFATMAETVVNGVPLSALPEETRMAYVFGVAILAGLLQVLMGLARLGELVHFISHSVMVGFTAGAAVLIAVGQLKNLLGVSIGNAPTFVELVLSTLRHLPRTNPWALGTGLFAMAVALGIARVHRRLPAAFLAVAASGVAAWALDLGAHGVKVVGAIPAGLPPFSLPPAPDAQVMRDLFMPALAIALLGVVEALSIAKTLAGARGEQVDGSREFVAQGLANIAAGLFSGIPGSGSFTRSAVNFVAGARTRFAGALSGVITLLAVLLLAPLAAYIPIAALAGILMIIAWGMVDKHGIALALKATRADRTVLLVTFAATLLLDLEKAVFVGVLLSLVLFLRKVSHPLVTRMDTCDSPELQGLPAGPCCPNLAVYSIEGTLFFGAVDELEQRLYEYEDFGHRAVILHLRQVHWVDATGVHAFQQFLRKCQRRGVALVLSGVKPAVRAVFERSGLVPQLGADNMAETLTDALALCYRRYLKGAVCDACKQSNEGRCRREHHAGDSGNADAARGTGVPATLPDARTNAHTNTGRPGGDARTSGDARQ

SEQ ID NO: 18125 - protein, 371 aa, Desulfovibrio vulgaris str. 'Miyazaki F'
MIVGILKEIKKEENRVAMTPAGVEVMVHAGHTLLVEKNAGAGSGFADEAYVEAGATIVATPAEIYAKSDMVMHVKEPQASEYGMIRPGQIVFTYLHLAADEPQTQALIKSGAVCIAYETIQKADGSLPLLTPMSEVAGRMAIQQGAKYLEMAQGGNGVLLGGVPGVDPGTVVVIGGGVVGTHAARMACGLGAKVYILDMNLDRLRHLSEVMPSNCFPLMSSPATVRKLVREADVVVGAVLVTGAKAPKLVTRDMLKTMKKGAVLVDVAIDQGGCFETSKATTHTDPTFVVDGVVHYCVANMPGAVAKTSTLALTNATLPYALTIANKGWKRAMQDSCEIAKGANVIDGKITFRGVAEAFGLDYVSVDTFLN

SEQ ID NO: 18126 - protein, 390 aa, Desulfovibrio vulgaris str. 'Miyazaki F'
MRISDRLTRIKPSATLAVNAKALELKAKGVQVVSLAVGEPDFPTPEHVREAAKTAIDQGFTRYTQVPGIPELRQAVCGYFARFYGVEAPMEATVVTNGGKQALYNLFQCLLNPGDEVLVPAPYWVSYPALVELAGGVPVFVASPAERGFKVTPEELDRAVTPKTRVLLLNSPSNPTGACYSRAETDAIMEWAIARDLFVVSDEIYDRLVYEPAEAVSVCDWWERHPENVAVVNGLAKTFAMTGWRVGYALAHPDLIKAMTKIQGQSTSNICSVAQKAALAALTGPYDAVEEMKKSFRRRRDLAHGIVSSWPGVICPKPDGAFYLFADMRALFTPALPDSASLCTYIMEQANVALVPGAAFGDDACLRFSYAVSDDTLMIALDKVAKVLFG

SEQ ID NO: 18127 - protein, 307 aa, Desulfovibrio vulgaris str. 'Miyazaki F'
MTKTEHRCGWVALLGPPNAGKSTLLNSALGHKVAIVTPRAQTTRNQIVGILSEPDAQVIFMDTPGIHQQRGRMNKILLQTAWQSMHSADVILVMLDADLYIKKPDFLENDVKPLMDAVAAEERPVIVAVNKVDLFRDKSKMLPLFIELQKLWPKAEVFPVSALKRDGLPELVKLVKSKLPVAPALYPEDQLSTLPVRFMAAEIVREKLFLALRQELPYSVAVEIEKWDEEEGRDLVTIHAVIYVGRPSHKSMVIGKAGATIKDIGTKARVDIQDLLEKKVHLELWVKVREGWTEDVGFLRSLGLADE

SEQ ID NO: 18128 - protein, 333 aa, Desulfovibrio vulgaris str. 'Miyazaki F'
MSDCTCGERRTDWIPLGRDVLDIEIEGLTALRDRLGPSFEAALALLAGCRGRVVVTGLGKSGLVGRKLAATLSSTGTPAFFLHPVEGAHGDMGSLRAEDVVIAISNSGETDELNAILPSLRAIGTSIIAMTGKAQSTLGRAADVVLDSGVPREACPHNLAPTASTTAVLALGDALAVCLIHWKSFTENDFLRYHPGGSLGQRLRLRVQELMHTTGIPVTQDDVGQEEAVRVLDKGGFGAVAVVDGSGRLMGILTDGDVRRAVIRGDYAPRTPVTAIMTCNPRSARSDQSVAELLDIMEQKAITVLPIVDDAHRLLGLIHLHDLLGKGGVSFAG

SEQ ID NO: 18129 - protein, 287 aa, Desulfovibrio vulgaris str. 'Miyazaki F'
MSHIAVLGLGAMGRRMAANLLKAGHQVTVWNRTARAAEPLLALGATQAATPKQAAAGADFVLAMVRDDAASATVWLDAETGAFAGMRPGAIAMDSSTLSVDWIKKLGAEAANRGVTLLETPVSGSLPQADAAQLIFLVGGSADACRQAEPVLLAMGSAVNHTGDIGAGALTKLATNALLGVQVTAIAELIGMLRRNGADAQKIMGIIAGTAVWSPYAQRAIGALLSGEAPVMFPVELVEKDFGYALEAAGSPDAAPTIAAARSVFRRGMDKGLGDANLTSVVKLFPA

SEQ ID NO: 18130 - protein, 544 aa, Desulfovibrio vulgaris str. 'Miyazaki F'
MQPTAGITPSTLSVKDLPWQVEWNKDTCTLCGRCTSVCPVSAIELAVHRKRVVETTTGLLQKPKNTYSVFHGIRQRTDAAYACIGCAMCTMVCPNNAIRPMRLDEGTALRFHNNRGGHARTRGGRRNAPDSLLDQIKFIRISMLTDPALDAGRHEFELRTLLGRVLPPEQGLKAFQENGWVPAVREIYPLVIGSMSFGALSPNMWEGLQMGVAYLNEEMGMPVRMCTGEGGCPPRLLRSRFLKYVILQIASGYFGWDEILHAIPQMKEDPCAIEIKYGQGAKPGDGGLLMWHKVNKLIASIRGVPPGVSLPSPPTHQTQYSIEESVAKMIQSMSMAWGFRVPVYPKISATTTSRAVLNNLVRNPYAAGLAIDGEDGGTGAAYNVSMNHMGHPIASNIRDCYHDLVQQGCQNEIPLIAGGGIGKNGNLAHNAAALIMLGASMVQVGKYVMQAGAGCVGSEIDRCNICNLGRCPKGITSQDPRVYRRLDPEKVAERVVDFYLAFDTELRKIFAPLGRSTSLPVGMSDALGIANKDAAERLGIQYVV

SEQ ID NO: 18131 - protein, 324 aa, Desulfovibrio vulgaris str. 'Miyazaki F'
MTTEAKICQGPHTGGQGPSSLDELVARVAACGARPRIALAACAEAHALGALLDAMERGIAQPLLVGDMDQTARIAAELGRDISGIAAVHAPDPREAVQCAVDMVRRGEADVLMKGLVNTDVLLRRVLNRATGLPPKGVLSHVAVFELPASGGTTRLAMMTDAAVNIRPNLQRKLEIVHNAVAVARALGIARPRVAMLAATEKVILPAMPATLDAQIVARMAEQGEFGEADVAGPMALDIALSPDAAARKGVDHPVAGCADILVAPDIESGNILYKSLTILARADMASTMAGSSAPLVVTSRGDSERSKFCSIALAGYLALAARS

SEQ ID NO: 18132 - protein, 404 aa, Desulfovibrio vulgaris str. 'Miyazaki F'
MNTVYFDNNATTRVDPAVLAAMLPYFGELYGNPSSMHTFGGHVGRAVREAREQVARLIGATPEEIVFTSCGTEGDNTAIRAALAAQPEKKHIITTRVEHPAVLSLSQHLEKNGYELTLLGVDDKGRMDLDELREAIRKDTAIVSIMFANNETGTIFPVAEAAAICKERGVPFHTDAVQAVGKLAIDVRELPVDYLVLSGHKLHAPKGIGALYVRRGAAYRPFLRGGHQERGRRGGTENVPAIIGLGMACDLAAANMAEENTRVRALRDRLEQGLLAAIPDAIVNGDPANRLPNTTNISFKYVEGEAILLLLDQLGVCASSGSACTSGSLEPSHVLRAMGVPFTYAHGSIRFSLSRFNTQEEVDHVVRELPRVIARLREMSPFRAGSEAEAALCKPDRSCQGCGS

SEQ ID NO: 18133 - protein, 288 aa, Desulfovibrio vulgaris str. 'Miyazaki F'
MHTTTSPARLHVPALLLAFLLVLAALLTPHAPARAADASVRQKLSEESVIAGVLERGVLRVGFSTFVPWAMQDVTGKFIGFEVDVATRLADDLGVKVEFVPTKWSGIIPALLTGKFDVIIGGMSVKPDRNLKVNFTIPYDYAGMALMANRATAKGFTTLDDFDKPEVTIAARTGSTAAAAAKKRLPRATLRLFDDEAPAIQEVLSGRAHAMVSSAPLPAFEVLKNPDKLFLPVPGTFTSEPVAFAVRKGDVDTLNVFDNWIRLMDAEGWLKERKHYWFETNEWEARLK

SEQ ID NO: 18134 - protein, 275 aa, Desulfovibrio vulgaris str. 'Miyazaki F'
MRLVKLLAMASALTVLMASVAMAGPVFDRIQKEKKIRIGIMTDSIPGAFYNEKGEWGGFDYDMATEVAKRMGVEIERVQVNNKTRIALVQSGQIDLSVSNMTHTRERDKSVDFSLTYFFDGQKILAKKGQFKSVKDMVGKKIATMQGTTSEVNVRRALKEAGDPNAETNVISFQKESECFQALQNGRVAGWSTDASILVGYAAKTPGQFELVGDFLSDEPYGMAMPQDDSALRDAVNAAIQDMWKDGTYKSIYNKWYGPGTPFEMPLAGQIEMWP

SEQ ID NO: 18135 - protein, 639 aa, Desulfovibrio vulgaris str. 'Miyazaki F'
MGKIIGIDLGTTNSCVYVMEGKDPKCITNPEGGRTTPSIVAFTDKERLVGDIAKRQAVTNPERTVFAVKRLMGRKGDAPEVNNWKTHSPYRIVAGANGDAAVEVQGRQYSAAEVSAMILGKLKADAEAYLGETVTDAVITVPAYFNDAQRQATKDAGRIAGLDVKRIINEPTAASLAYGFDRKTNEKIAVFDLGGGTFDISILEVGDNVVEVRATNGDTFLGGEDFDQRVINYLVEEFRRENGVDLSKDRMALQRLKEAAEKAKKDLSTSMETEINLPFITADQNGPKHLMMKLSRAKLEKLVEDLVDRTIEPCRKALADAGLSAAQIDEVVLVGGMTRMPLVQKKVGEFFGKEPNRSVNPDEVVAMGAAIQGGILAGDVKDVLLLDVTPLSLGIETLGGVFTRLIDRNTTIPTRKSQTFTTAADNQPSVSIHVLQGERPMAGDNMTLGRFELSGIPPAMRGTPQVEVTFDIDANGIVNVSAKDLGTGKEQSIRITASSGLSESEIQRLIKEAESHADEDKKKQELIEARNQADGLIYGTEKSIADLGDKLDAATKSDIEGKIEALKKVMDGSDLEAIKTASEELSRASHKLAEQLYQQSQQGQPGAGPEAGDAGHAGHAGSAKGDDDVVDADYTEVKK

SEQ ID NO: 18136 - protein, 299 aa, Desulfovibrio vulgaris str. 'Miyazaki F'
MQRIGFIGLGIMGAPMCRNLLKAGFPVTAYTRNGDKLRAMAAEGAAAAESPAAVAAASDVVITMLPNSPEVRAVALGPGGIAEGAAPGCIVADMSSIAPLASREIAAELAKKSIRMLDAPVSGGEPKAIDGTLSVMVGGAQEDFDACLPVFKAMAASVVRVGEVGAGNVTKLANQIVVAGNIAAMSEALVLATRAGADPDLVYQAIRGGLAGSTVLDAKAPLVMDGRFTPGFRIRLHAKDMGNVLETSRELHVPLPLAAQLMEVMQGLMADGLGDADHGALIRHWEKLAGVEVRRNKPS

SEQ ID NO: 18137 - protein, 254 aa, Desulfovibrio vulgaris str. 'Miyazaki F'
MSDDSGPSKDPKGRKARILRTVREDDNTTSVYIDTGDDERFRTFRPGQFATLRVMEEDGWSDAHPFTIAAAPGETVRLTIRGKGRFTSELVPGLRDGDEVHCAGPYGVFCRDIERQEQIVLIAGGVGITPFLSVLRSFDQAGAANRVVLFWSNKTYGDAFAAEELETMTRRLDLTVVHVLTRETNPHHYADPELPAVFFEKGHLSRDMLARHVQSATASFYLCGPGPMQQHVLDELRAFGVDTGGVETEQFVFS

SEQ ID NO: 18138 - protein, 525 aa, Desulfovibrio vulgaris str. 'Miyazaki F'
MRNRKCIEIVIILLCVVFAACVSHAEDAHVSDPSGASIGTAADVIGATAGAPTKEEFDALSQSEPLAAKVADVVGHNRIAINMVWTLLCGFLVMFMQAGFALAETGFTRAKNAGHTMAMNMMIYGIGMLGYWICGFALQMGGVGGVLSLGGAGALANEFTVTIAGKEFGLFGTTGFFLSGDAYDAVIFSVFLFQMVFMDTTATIPTGSMAERWTFKSFVVYGFFISMFVYPLFANWVWGGGWLSALGRNFGLGHGMADFAGSAVVHMTGGVAAAAGAIVLGPRLGKFKPDGTPVAMPGHHIPMAIAGCFILAFGWFGFNAGSTLAGGDLRIGVIATNTMLASASGAFFSMMYMWMRYGKPDVSMAANGLLAGLVAITSPCAFVNSVAAVGIGAVAGILLCVSVLFVEQTLKIDDPVGAISVHGVNGAWGVLSLGLFADGTYGEGLNGVEGAVKGLFYGDVSQFMAQLAGVITNIVFVFVVMYVFFKLLDKVVPLRVDPELELEGLDQAEVAVSAYPDFNLKKAMK

SEQ ID NO: 18139 - protein, 233 aa, Desulfovibrio vulgaris str. 'Miyazaki F'
MNRASTTTRAIPGAVLLDRDGTVIEDRNYLSDPSGVTLLPGAARGLAALAAAGARLFLVTNQSGIGRGYFTEADLHACNARLGELLGEHGVALADTAFCPHGPDDRCACRKPAPGMWLALRDRHGLCAAATAMVGDKREDVAFGRDAGLGRVVLVLTGKGQAAAQALGVPVPEGDAAVRESAPAELAARPDWPHAVARDLAAAAEWLLGGTAAVSGASPSGPSFTDLSRSEPS

SEQ ID NO: 18140 - protein, 271 aa, Desulfovibrio vulgaris str. 'Miyazaki F'
MKRLVLLAVALCVVLTGTMAHAGKIEDIKARGALVCGVKDSTVPFGYIDEQSKQIVGFDIDICKAVADKLGVKLELKTVTSATRIPMLTQGSVDMVAATMTHKFERDDVIDFSITYFMDGQKLLVKKGGGVKSAADLKGKKVATAKGSTSEKNIKAAQPEATVVSFDEYPQAFLALKQGKAEAVTTDSTILLGLRNSDPEPDKWEIVGDYISPEPYGLGLAENDSKFRDLVNRTLVDLWNSGEYVKLYDKWFGKDTKYYLPLTWKMETWPY

SEQ ID NO: 18141 - protein, 673 aa, Yersinia pestis CO92
MVTSDIDTKPQKDTLNPVVFFTSAGLILAFCLMTIFYTDLSNRWIGITLNWVSATFGWYYLLAATLYIVFVIYIATSRYGSIKLGPEQSKPEFSLVSWAAMLFAAGIGIDLMFFSVAEPVTQYMMPPEGQGQTLEAARQAMVWTLFHYGLTGWSMYALMGIALGYFSYRYNLPLTIRSALYPIFGKRIDGPIGHSVDIAAVIGTIFGIATTLGIGVVQLNYGLNVLFHIPESLAVQAGLILLSVVMAAVSVTSGVNKGIRILSEVNVLLALGLILFLLNALVLNVGDYINRFLGMTLNSFAFDRPTQWMNSWTLFFWAWWVAWSPFVGLFLARISRGRTIRQFVVGTLIIPFVFTLLWLSIFGNSALYQILHGNIAFANEVMEFPERGFYSLLAQYPGFTLSASVATITGLLFYVTSADSGSLVLGNFTSRLADINNDSPNWLRTFWSITIGLLTLGMLMTDGVAALQNATVIMGLPFSFVIFFVMVGLYKSLKIEDYRKASSQQTPTPTLISGNEVLNWKQRLSRVMNYPGTTYTAKILDTICRPAMEEVAQELAVRGVKVEFNELPPKEDEQLNRLNHLELLVHLGDEQNFVYQIWPQRYSVPAFTYRARSGKSHYYRLETYLLEGTQGNDLMDYSKEQIINNILDQYERHMNFLHIQSEAPGNIMTFPDQ

SEQ ID NO: 18142 - protein, 1488 aa, Yersinia pestis CO92
MLYDQSQERDNCGFGLIAHIEGEPSHKVVRTAIHALARMQHRGAILADGKTGDGCGLLLQKPDHFFRMVAEERGWRLAKNYAVGMMFLSQDEELAKASRRIVEEELQNETLSIVGWREVPTNPDVLGEIALSSLPRIEQIFVNAPAGWRSRDMERRLFVARRRIEKRISDKDFYACSFSNLVTIYKGLCMPADLPRFYLDLADLRLESAICLFHQRFSTNTVPRWPLAQPFRYLAHNGEINTIAGNRQWAKARAYKFKTPLIPDLQDAAPFVNETGSDSSSLDNMLELFLSGGMDLIRAMRLLVPPAWQNNPDMDTDLRAFFDFNSMHMEPWDGPAGIVMSDGRYAACNLDRNGLRPARYVITKDKLITCASEVGIWDYQPDEVVEKGRVGPGELMVIDTRSGKILHSAETDNDLKSRHPYKEWMEKNVKRLVPFEDLPEEQVGSRQLDDSQLETYQKQFGYSNEELDQIIRVLGENGQEATGSMGDDTPFAVLSSGPRIIYDYFRQQFAQVTNPPIDPLREAHVMSLATSIGREMNVFCEAEGQAHRLSFKSPILLYSDFQQLTTLEGEHYRADRLDLTFNPAENDLEQAVLSLCDEAERKVRDGAVMLVLSDRAIAPNRLPVPAPMAVGAIQTRLVDKSLRCDANIIVETASARDPHHFAVLLGFGATAIYPYLAYESLAKLVDSQAIDKKYRDVMLNYRNGINKGLYKIMSKMGISTVASYRCAKLFEAVGLHRDLSDLCFQGVVSRIGGASFSDFQQDLQNLSKRAWLKRKPLDQGGLLKFVHNGEYHAYNPDVVSTLQKAVHSGEYSDYQAYAKLVNERPIATLRDLLAIKPQGTPIPVDQVEPAESLFKRFDTAAMSIGALSPEAHESLAIAMNSLGGFSNSGEGGEDPARYGTNKVSRIKQVASGRFGVTPAYLVNADVIQIKVAQGAKPGEGGQLPGDKVTPYIAKLRYSVPGVTLISPPPHHDIYSIEDLAQLIFDLKQVNPKAMISVKLVSEPGVGTIATGVAKAYADLITIAGYDGGTGASPLSSVKYAGCPWELGLVETQQALVANGLRHKIRLQVDGGLKTGVDIVKAAILGAESFGFGTGPMVALGCKYLRICHLNNCATGVATQDEKLRRDHYHGLPERVVNYFHFIARETRETREIMAELGVSQLVDLIGRTDMLLELDGISAKQNKLDLSPMLKTATPHPGKALYCTESNPPFDKGLLNKELLSQAEPYIEAKQSKTFYFDIRNTDRSVGAALSGAIATKHGDQGLATDPIKAYFSGTAGQSFGVWNAGGVELMLTGDANDYVGKGMAGGRIAVRPPVGSNFRSHEASIIGNTCLYGATGGKLFAAGRAGERFAVRNSGAITVVEGIGDNGCEYMTGGIVCVLGRTGINFGAGMTGGFAYVLDEDGEFRKRVNPELVEVLDVEQLAIHEEHLRGLITEHVQLTGSSRGEEILANWPEWVTKFALVKPKSSDVKALLGHRSRSAAELRVQAQ

SEQ ID NO: 18143 - protein, 413 aa, Bacillus methanolicus
MKIIVQKFGGTSVRDDISRSNAKRHIEKALAEGYKVVVVVSAMGRSGEPYATDTLLSLIGGNATKVSKREQDLLLSCGEIISSIVFTNMLIEHGIRAVALTGAQAGFRTNNDHTNAKIIEMKCDRLLRELEQNEVVVVAGFQGAAKNGDITTIGRGGSDTSAAALGAALNAEWIDIFTDVEGIMTADPRIVENARPLSVVTYTEVCNMAYQGAKVIHPRAVEIAMQAKIPIRIRSTYSDSPGTLVTSLSKNSRGSDIRERPVTGIAHVPNVTQIKVFAKKDQYNLQAEVFKAMANEKISVDLINISPNGVVYTVMNEMADQAIRILTDMGHEPVVERDCAKVSVVGAGMAGVPGVASKIVTALSEKGIRILQSADSHTTIWVLVKQEDLVNAVKALHDAFQLEKETLEFERIE

SEQ ID NO: 18144 - protein, 597 aa, Triticum aestivum
MSSSASLQSFLPPSAHAARSSSRHRPSRARPFQCAAVSAPSSSAASPSASAVPAERLEPRVEQREGGYWVLKEKYRTSLNPQEKVKLGKEPMALFTEGGIKELAKLPMEQIDTDKLTKEDVDVRLKWLGLFHRRKQQYGRFMMRLKLPNGVTTSEQTRYLAGVIEKYGKEGCADVTTRQNWQIRGVTLPDVPEILEGLRSVGLTSLQSGMDNVRNPVGSPLAGIDPLEIVDTRPYTNLLSSYITNNSEGNLAITNLPRKWNVCVIGTHDLYEHPHINDLAYMPAEKDGKFGFNLLVGGFISPKRWGEALPLDAWVPGDDIIPVCKAVLEAFRDLGTRGNRQKTRMMWLIDELGMEAFRSEIEKRMPNGVLERAAAEDLIDKKWERRDYLGVHPQKQEGLSFVGLHVPVGRLQAADMFELARLADEYGSGELRLTVEQNIVLPNVRNDKVEALLAEPLLEKFSAHPSLLMKGLVACTGNQFCGQAIIETKARALQVTRDVEARVSVPRAVRMHWTGCPNSCAQVQVADIGFMGCLTKNSSGKIVEAADIFVGGRVGSDSHLTGVYKKAVPCEDLVPIVADLLVERFGAVPREREEDEE

SEQ ID NO: 18145 - protein, 597 aa, Triticum aestivum
MSSSASLQSFLPPSARAARSSSRHRPSRARPFQCAAVSAPSSSAASPSASAVPAERLEPRVEQREGGYWVLKEKYRTSLNPQEKVKLGKEPMALFTEGGIKELAKLPMEQIDADKLTKEDVDVRLKWLGLFHRRKQQYGRFMMRLKLPNGVTTSEQTRYLAGVIEKYGKEGCADVTTRQNWQIRGVTLPDVPEILEGLRSVGLTSLQSGMDNVRNPVGSPLAGIDPLEIVDTRPYTNLLSSYITNNSEGNLAITNLPRKWNVCVIGTHDLYEHPHINDLAYMPAEKDGKFGFNLLVGGFVSPKRWGEALPLDAWVPGDDIIPVCKAVLEAFRDLGTRGNRQKTRMMWLIDELGMEAFRSEIEKRMPNGVLERAAAEDLIDKKWERRDYLGVHPQKQEGLSFVGLHVPVGRLQAADMFELARLADEYGSGELRLTVEQNIVLPNVRNDKVGALLAEPLLEKFSAHPSLLMKGLVACTGNQFCGQAIIETKARALQVTRDVEARVSVPRAVRMHWTGCPNSCAQVQVADIGFMGCLTKNSSGKIVEAADIFVGGRVGSDSHLTGVYKKAVPCEDLVPVVADLLVERFGAVPREREEDEE

SEQ ID NO: 18146 - protein, 358 aa, Pimpinella anisum
MASHDQEAFLTAMQIVNSSAVDGVLICLIELNVFDIMMQKAGMDGYLHPDEIALNLPTKNPQAPEMLDRMLRILASHSIIKCKLVKKMSGNALLTRAYGLTLISQYFVNAQDGPCLAPYLKLIHHKQMQNSWEKVNEAVLEGGYAFNKAHAGSTFFEYLGKDKSVAELLSQTMAKSIPTSMNILLKSYKGFEGVKEVVDVGGAYAATLSCIISFNPHVKGINFDVPHVIKNAPSLPGITHVGGDMFESVPRGEAIVLQRVLHDWTDEESVKILKKCYEAIPDHGKVVIIEMIQTEMPEDDIIAKNISEMDIRMLLYTPGGKERTVNEFLMLGKQAGFPSSKYICGADLYGVVELYKKK

SEQ ID NO: 18147 - protein, 508 aa, Theobroma cacao
MANPKILYPFSVSLLFLISISSAAASSFLDERRLGGSSFPSIHAKKLIRELNLFPKEEVNVVDGGQVSLPEDSRLVEKRFKFPNLAVPGGVSVEDLGHHAGYYKLANSHDARMFYFFFESRNSKKDPVVIWLTGGPGCSSELALFYENGPFTIAENMSLIWNQYGWDMASNLLYVDQPIGTGFSYSSDRRDIRHNEDEVSNDLYDFLQAFFAEHPEFEKNDFYITGESYAGHYIPAFAARVHQGNKAKDGIHINLKGFAIGNGLTDPAIQYKAYTDYALDMGVIKKSDYNRINKLVPVCEMAIKLCGTDGTISCMASYFVCNAIFTGIMALAGDTNYYDIRTKCEGSLCYDFSNMETFLNQESVRDALGVGSIDFVSCSPTVYQAMLVDWMRNLEVGIPALLEDGVKLLVYAGEYDLICNWLGNSRWVHAMEWSGQKEFVASPEVPFVVDGSEAGVLRTHGPLGFLKVHDAGHMVPMDQPKAALEMLKRWTKGTLSEAADSEKLVAEI

SEQ ID NO: 18148 - protein, 313 aa, Streptococcus pyogenes MGAS315
MKIVFPEGNDERVVRAAARLKFEGLLEPIILGQSEEVRNLLTKLGFADQDYTIINPNEYADFDKMKEAFVDIRKGKATLEDADKMLRDVNYFGVMLVKMGLADGMVSGAIHSTADTVRPALQIIKTKPGISRTSGVFLMNRENTSERYVFADCAINIDPTAQELAEIAVNTAETAKIFDIDPKIAMLSFSTKGSGKAPQVDKVREATEIAKGLNPDLALDGELQFDAAFVPETAAIKAPDSAVAGQANTFIFPDLQSGNIGYKIAQRLGMFDAIGPILQGLNKPVNDLSRGSSAEDIYKLAIITAAQAIESQG

SEQ ID NO: 18149 - protein, 595 aa, Rhodopseudomonas palustris
MLTRPNLVVVLFFTLLLGCLLALPFVAGPYPVKLMTRIVIIATFVLSLDLLIGVTGLVSFGHAAFFGCGAYAVYFVSPEAEAANVIVALGAGLLAGGLAALVVGAFATLTRGFYFIMVTLAAGQMLFALFHDTDIAKGSDGAYINVKPELTLAGLTLLDFSDRRQFYYVCVVVLIAAYGLLLALVRSPFGRVLQGIRANEVRMSSLGYDTYRYKLAAFTIAGMVAGLAGALFASIDGFVTPDLLNWNPSGLAIMMVVLGGAGTLFGPILGALAYSSLEELLKTASIVGSFVADHWRLGTGATLIAAVLMSPDGLAGLLNWRRKQPQATPARPPADEPQRPAKTAKALATNHLSKNFNGIAAVSDVTVTFEPNKVHAIIGPNGAGKTTFTNLLSGALPASAGSVQIDELDVTGWPAYRIARAGLGRSYQRTNIFPRFTVRENCALAAQLDKGALWRLRDAPYRTREQAAVDRALRVAGLADRGDTIAGRMSNGEQRQLEIAMLIASGADLLILDEPLAGMGPEETQRVVALLRDLVRDHTVIVIEHDMDAVFAAADTLTVLVQGKLFARGRPDEIRRNEAVLEAYLGHHAKMKESA

SEQ ID NO: 18150 - protein, 463 aa, Streptococcus pyogenes MGAS315
MTIFRKKKKYSNKTEMQRHFKVIDLIFLGLGSMVGTGIFTVTGIGAAKYAGPALTISIIISAIAIGILALFYAEFASRMPSNGGAYSYVYATLGEFPAWLVGWYIIMEFLTAISSVAVGWGSYLKGLLANYNIVLPNALNGTFNLKNGTYIDILPVLVMFFVTGIVLMNSKLALRFNSFLVILKFSALALFIFVGIFFIDHNNWFHFAPYGVGQITGGKTGIFAGASVMFFAFLGFESISMAVDEVKEPQKTIPKGIILSLIIVTALYIVVTTILTGIVHYTKLNVPDAVAFALRNIRLYWAADYVSIVAILTLITVCISMTYALARTIYSISRDGLLPKSLYTLTKKNKVPQNATLVTGLLAMICAGIFPLSSLAEFVNICTLAYLIILSGAIIKLRRIEGEPKANEFKTPLVPFLPMLAIIICLSFMSQYKAFTWIAFAIATIIGTLIYLAYGYTHSIENK

SEQ ID NO: 18151 - protein, 394 aa, Streptococcus pyogenes MGAS315
MTKEVVITSAYRTPIGNFGGVFKSLSAVDLGVTVVTKILADTGLKSDAIDEVIFGNVLHAGLGQNVARQVALNAGLSYDTPAFTIDMVCGSGLKAVELGAQKIQTGNADIVLVGGTENMSQAPYVLQGQRWGSRMGDSKVVDTMLKDGLSDAFAGYHMGITAENIVQQYGLTREEQDAFAADSQRKAQLAIEKGRFKEEIAPVTIPQRKGEPLLVDQDEYPKFGTTVDKLAKLRSAFIKDEGTVTAGNASGINDGAAAILLMSKEKAEELGLPILAKITSYASAGVDPSIMGCGPIPATKKALAKAQLTIDDIDLIEANEAFAAQALAVSRDLGFDNEKVNVNGGAIALGHPIGASGARILVTLLAEMAKRDVRHGLATLCIGGGQGQSIIVTR

SEQ ID NO: 18152 - protein, 436 aa, Streptococcus pyogenes MGAS315
MVLPTVAIVGRPNVGKSTLFNRIAGERISIVEDVEGVTRDRIYATGEWLNRQFSLIDTGGIDDVDAPFMEQIKHQAQIAMEEADVIVFVVSGKEGVTDADEYVSKILYRTNTPVILAVNKVDNPEMRNDIYDFYSLGLGDPYPVSSVHGIGTGDVLDAIVENLPVEEAEENDDIIRFSLIGRPNVGKSSLINAILGEDRVIASPVAGTTRDAIDTHFTDADGQEFTMIDTAGMRKSGKIYENTEKYSVMRAMRAIDRSDVVLMVINAEEGIREYDKRIAGFAHEAGKGMIIVVNKWDAIDKDNHTVAKWEADIRDQFQFLTYAPIIFVSALTKQRLNKLPDLIKRISESQNKRIPSAVLNDVIMDAIAINPTPTDKGKRLKIFYATQVSVKPPTFVVFVNEEELMHFSYLRFLENQIRAAFTFEGTPIHLIARKRK

SEQ ID NO: 18153 - protein, 397 aa, Streptococcus pyogenes MGAS315
MPKLSKRVLEMKESVTLAAGARAKALKAQGRDVLNLTLGEPDFFTPKHIQDKAIESIQNGTASFYTNASGLPELKAAIATYLKNQYGYHLSPDQIVAGTGAKFILYAFFMAVLNPGDQVLIPTPYWVSYSDQVKMAEGQPIFVQGLEENQFKVTVDQLERARTSKTKVVLINSPSNPTGMIYGAEELRAIGEWAVHNDILILADDIYGSLVYNGNQFVPISTLSEAIRRQTITVNGVAKSYAMTGWRVGFAAGEPEIISAMSKIIGQTTSNLTTVSQYAAIEAFCGSQSSLEEMRLAFEERLNITYPLLCQVPGFEVVKPQGAFYFFPNVKKAMEMTGFSDVTSFANAILEEVGLAVVSGAGFGAPENVRLSYATDIKTLKEAVRRLHVFMESNEIN

SEQ ID NO: 18154 - protein, 270 aa, Streptococcus pyogenes MGAS315
MNFKKIRFGFLLCLLLYLLAACNKSEQLNHYERIKKTRKLVVAVSPDYAPFEFKALVNGKDTIVGADVQLAQAIADELDVDLELSPMSFDNVLSSLQTGKADLAISGISHTKERAKVYDFSIPYYQAENAIVMRASDAKVTKNISDLNGKKVAAQKGSIEEGLVKIQLPKANLISLTAMGEAINELKAGQVYAVTLEAPVAAGFLAQHKDLALAPFSLKTSDGDAKAVALPKNSGDLTKAVNKVIAKLDEQERYKSFIAETIALTKNTMK

SEQ ID NO: 18155 - protein, 380 aa, Streptococcus pyogenes MGAS315
MIYFDNAATTIPYGEALKTYQEVATKIYGNPSSLHQLGTNASRILEASRKQIAGLLGVKSEEIFFTSGGTESANWAIKGIAFEKTAFGKHIIISAIEHPAVSESVKWLLTQGFEVSYAPVTTQGVVDVNALAELIRPDTILISIMAVNNEMGAIQPIRAISNLLANQLTITFHVDAVQAIGKIPLCDYMTNRVDLASFSGHKFHSVRGVGFLYKKAGKRLNPLLSGGGQEQELRSTTENVAGIASMAKALRIVTEKQVSVLPKLTAMRDVIYKALSAYPDVTVFSAQEGFVPNILTFGIRGVRGEVIVHAFEKYEIYISTTSACSSKAGKPAGSLVAMGIPVKTAQTAVRISLDDDNDMGQVEQFLTIFKQIYDKTQKVR

SEQ ID NO: 18156 - protein, 326 aa, Streptococcus pyogenes MGAS315
MTERYADKQIKLFSLTSNLPIAEKIAKAAGIPLGKMSSRQFSDGEIMINIEETVRGDDIYIIQSTSFPVNDNLWELLIMIDACQRASANTVNIVLPYFGYSRQDRVAKPREPITAKLVANMLTKAGIDRVVTLDLHAVQVQGFFDIPVDNLFTVPLFAERYSKLGLSGSDVVVVSPKNSGIKRARSLAEYLDSPIAIIDYAQDDSEREQGYIIGDVSGKKAILIDDILNTGKTFAEAAKILERSGATDTYAVASHGLFAGGAAEVLETAPIKEIIVTDSVKTKNRVPENVTYLSASDLIAEAIIRIHERRPLSPLFSYQPKGKNNA

SEQ ID NO: 18157 - protein, 435 aa, Streptococcus pyogenes MGAS315
MFLDTAKISVQAGRGGDGMVAFRREKYVPNGGPWGGDGGKGGSVIFRVDEGLRTLMDFRYNRKFKAKSGEKGMTKGMHGRGAEDLIVFVPQGTTVRDAETGKVITDLVEHGQEVVIAKGGRGGRGNIRFATPRNPAPEIAENGEPGEERQLELELKILADVGLVGFPSVGKSTLLSVVSSAKPKIGAYHFTTIVPNLGMVRTKSGDSFAMADLPGLIEGASQGVGLGTQFLRHIERTRVILHVIDMSASEGRDPYEDYVSINNELETYNLRLMERPQIIVANKMDMPEAQDNLKAFKKKLATQYDEFNDLPMIFSISSLAHQGLENLLEATAELLAKTDEFLLYDESDLVDEEAYYGFAEAEKEFEITRDDDATWVLSGEKLERLFVMTNMERDESIMKFARQLRGMGVDEALRERGAKDGDLVRIGKFEFEFVD

SEQ ID NO: 18158 - protein, 259 aa, Streptococcus pyogenes MGAS315
MKTPEQILEATIHIGEHKVTKTFLAKSILGFIGGAMISLGYLLYVRIAASGLEAFGAFSSIVGACAFPIGLIIILMAGGELITGNMMAVSAALLAKKIKFSELAKNWLIITLFNVIGAVFVAFVFGHFLGLTSAGIFKEEVIEVAHAKIAASPLQALVSGIGCNWFVGLALWLCYGANDAAGKFLGTWFPVMTFVALGFQHSVANAFVIPAAIFEGGATWLDFVTNFIFVYSGNIIGGAIFVSFLYFKVYYHPQKSKTQ

SEQ ID NO: 18159 - protein, 395 aa, Streptococcus pyogenes MGAS315
MKNIVIVEALRTPIGAFGGSFKSVSAVELGTTVLKKILDKTQVKPEMVDEVILGNVLHAGLGQNVARQVAVHSGIPEDKTAFTLDMVCGSGLKAIQLATQSIMLGDADIVIAGGVENMSQAAYVSTQHRFGQRLGNSQLIDTLVHDGLTDAFNNYHMGITAENVAQKYAISREEQDQFALESQEKAAKALENHRFADEIVPVSVPQRRKDPLIVTTDEYPKVDTSLEKLQQLRPAFLPKEGTVTAGNASGINDGAALLMLMTEEKALELGLTPLVTIESYASAGVAPELMGTGPIPATQKALKKAGLTISDLDLVESNEAFAAQSLAVLKDLKLNPEIVNVNGGAIALGHPIGASGARILVTLIHEMKKRQVARGLATLCIGGGQGTAVIVKNNT

SEQ ID NO: 18160 - protein, 275 aa, Saccharomyces cerevisiae
NPKSSLADGAHIGNYQIVKTLGEGSFGKVKLAYHTTTGQKVALKIINKKVLAKSDMQGRIEREISYLRLLRHPHIIKLYDVIKSKDEIIMVIEYAGNELFDYIVQRDKMSEQEARRFFQQIISAVEYCHRHKIVHRDLKPENLLLDEHLNVKIADFGLSNIMTDGNFLKTSCGSPNYAAPEVISGKLYAGPEVDVWSCGVILYVMLCRRLPFDDESIPVLFKNISNGVYTLPKFLSPGAAGLIKRMLIVNPLNRISIHEIMQDDWFKVDLPEYLL

SEQ ID NO: 18161 - protein, 362 aa, Streptococcus pyogenes MGAS315
MKVFASPSRYIQGKNALFTNAKTLKQLGDSPILLCDDVVYGIVGERFESYLIDNGMTPVHVAFNGEASDNEISRVVAIAKENGNDVIIGLGGGKTIDSAKAIADLLAVPVIIAPTIASTDAPTSALSVIYTDEGAFEKYIFYSKNPDLVLVDTQVICQAPKRLLASGIADGLATWVEARAVMQKNGDTMAGGNQTLAGVAIAKACEQTLFADGLKAMASCDRQVVTPALENVIEANTLLSGLGFESAGLAAAHAIHNGFTALTGAIHHLTHGEKVAYGTLTQLFLENRSREEIDRYIDFYQAIGMPTTLKEMHLDTATQEDFLKIGRQATMAGETIHQMPFVISPEDVAAALVAVDAYVTSR

SEQ ID NO: 18162 - protein, 222 aa, Streptococcus pyogenes MGAS315
MEYMLDTLDLEAIKKWHHILPLAGVTSNPSIAKKEGDIDFFERIREVRAIIGDKASIHVQVIAQDYEGILKDAAEIRRQCGDSVYVKVPVTTEGLAAIKTLKAEGYHITATAIYTTFQGLLAIEAGADYLAPYYNRMENLNIDPEAVIGQLAEAINRENADSKILAASFKNVAQVNKSFALGAQAITAGPDVFEAGFAMPSIQKAVDDFGKDWEAIHHRKSI

SEQ ID NO: 18163 - protein, 299 aa, Streptococcus pyogenes MGAS315
MAKIVECIPNFSEGQNQAVIDGLVATAKSIPGVTLLDYSSDASHNRSVFTLVGDDQSIQEAAFQLVKYASENIDMTKHHGEHPRMGATDVCPFVPIKDITTQECVEISKQVAERINRELDIPIFLYEDSATRPERQNLAKIRKGQFEGMPEKLLEEDWAPDYGDRKIHPTAGVTAVGARMPLVAFNVNLDTDNIDIAHKIAKIIRGSGGGYKYCKAIGVMLEDRHIAQVSMNMVNFEKCSLYRTFETIKFEARRYGVNVIGSEVIGLAPAKALIDVAEYYLQVEDFDYPKQVLENHLLG

SEQ ID NO: 18164 - protein, 447 aa, Streptococcus pyogenes MGAS315
MASNHMNEQEREQAKFSLSGATLYGINAVIGSGIFLLPRAIYKGLGPASIAVMFGTAILTIMLAVCFAEVSGYFGKNGGAFQYSKRAFGDFIGFNVGFLGWTVTIFAWAAMAAGFARMFIITFPAFEGWHIPLSIGLIILLSLMNIAGLKTSKIVTITATIAKLIPIVAFCACTLFFIKNGLPNFTPFVQLEPGTNLLGAISNTAVYIFYGFIGFETLSIVAGEMRDPEKNVPRALLGSISIVSVLYMLIIGGTIAMLGSQIMMTNAPVQDAFVKMIGPAGAWMVSIGALISITGLNIGESIMVPRYGAAIADEGLLPAAIAKQNQNGAPLVAILVSGAIAIVLLLTGSFENLAKLSVVFRFFQYIPTALAVMKLRKDDPDANVIFRVPFGPIIPILAVIVSLVMIWGDNPMNFVYGAVGVIIASSVYYLMHGRNHQMDQMPPKEQI

SEQ ID NO: 18165 - protein, 328 aa, Streptococcus pyogenes MGAS315
MLEDYYPSTTSYYHSGIDDDLYTAKWGMVMTFLDLNDSSLTPFEGTHFALIGFKSDKGVYINNGRVGAVESPAAIRTQLAKFPWHLGNQVMVYDVGNIDGPNRSLEQLQNSLSKAIKRMCDLNLKPIVLGGGHETAYGHYLGLRQSLSSSDDLAVINMDAHFDLRPYDQTGPNSGTGFRQMFDDAVADKRLFKYFVLGIQEHNNNLFLFDFVAKSKGIQFLTGQDIYQMGHQKVCRAIDRFLEGQERVYLTIDMDCFSVGAAPGVSAIQSLGVDPNLAVLVLQHIAASGKLVGFDVVEVSPPHDIDNHTANLAATFIFYLVQIMAQHN

SEQ ID NO: 18166 - protein, 704 aa, Arabidopsis thaliana
MSENCNSRHFSWLMKSCLPNPSDAKSLVQIHQPSSTAANSSATIASLPDDLLLECISRVPSSSIPSLAVVCRRWSRLLHSPYFLHLRRRLGLLRHSLFAISTVDSGLFAADLQFQSEIASWKVSLAVSSRSVGVDGSYGSLSHARAAAIGPRVYVVSRNAVLRYDSWMGTLNLRSPMIFPRKKFAIAVVSGKIYVAGGGGGSEVAAAVEEYDPELNRWEVVTQSARKRYGCIGAAVDGVFYVIGGLKIGNETSRAVAARAYASSMDLFDVESRQWLRSRSVPGGGCVVAACAAVGYVYVLTSHAVELSFWRFDARRRGGNSGFGEWQRLKSPPLPAQVRLDGTVRFSCVGVEDKVAVVQVVGCIDDLLRRSGRGSNLYFSILINYKQLFIKNIKSISNIIWKYYNFTILYNPEPCVSYTIILRKKTKLSVRNQTCFKKSSLSSSSTAKKTTNLSMREQTMFKKALELSTLCNIDVCVIYYGRDGKLIKTWPDDQSKVRDMAERFSRLHERERCKKRTNLSLFLRKKILDDTKLSEKVLEMEDSLESGLRVLQDKLLLLQPEKNQTEFGQTRAVSSTTNPLSPPPSLIEDHRHQQRTEPLMSGVSNTEQDLSTSSLSQNQSKFSVFLYNHDNCSFYQVPDSVSSFDSLTSTGLLGEQGSGLGSSFDLPMVFPPQMQTQTPLVPFDQFAPWNQAPSFADPMMFPYN

SEQ ID NO: 18167 - protein, 299 aa, Arabidopsis thaliana
MMKKGTKRKIEIKKRETKEQRAVTCSKRRQTVFSKAADLCLISGANIAVFVTSPSDSSDVVYSFSGYSSAYEIADCYLNRKPPPKIVNPAGSKLGFWWEDPDLYHSCDDLSELSIIEDRLQRMKKHVMACLEKEEKSQLVSSFDQNPNSTCSLDVEDCDGSSYSQIASTFTPNSVNEYCSDQTFSSFHGDQNPNLSSPSFDQDCYSSLYQICGESSSQVASFDQNPSSEIQGFETEEEINQINLLLQETQTEANVNLDDEICFWNDLSNDDVFGLNSYFGLDNTNAMINFGDSDFRRHV

SEQ ID NO: 18168 - protein, 483 aa, Zea mays
MVSERQQAAGKVAAFNLTEAGFGDGSDLLDDDGRERRTGTLVTASAHIITAVIGSSVLSLAWAIAQLGWVIGPVVLLAFSAITWFCSSLLADCYRAPPGPGQGKRNYTYGQAVRSYLGESKYRLCSLAQYVNLVGVTIGYTITTAISMGAIKRSNCFHSRGHGADCEASNTTNMIIFAGIQILLSQLPNFHKLWWLSIVAAVMSLAYSSIGLGLSIAKIAGGVHVKTSLTGAAVGVDVTAAEKVWKTFQSLGDIAFAYTYSNVLIEIQDTLRSSPPENVVMKKASFIGVSTTTAFYMLCGVLGYAAFGSDAPGNFLTGFGFYDPFWLIDVGNVCIAVHLVGAYQVFCQPIYQFVEAWARGRWPDCAFLHAELAVVAGSSFTASPFRLVWRTAYVVLTALVATVFPFFNDFLGLIGAVSFWPLTVYFPIQMYMAQAKTRRFSPAWTWMNVLSYACLFVSLLAAAGSVQGLVKDLKGYKPLFKVS

SEQ ID NO: 18169 - protein, 445 aa, Zea mays
MGRRLSATAAAAAASAEPLLPPALKRGVLIERCASHADDELQWFRSCLRWVCMDHSGPGQAALSWLLFLVLAAIVPAAAHFLLAFRASRRPFSAVVQLSLSAASAAGFLCLSSSFRRVGLRRLLHLDKLRSKSDRVRASYTARLAFSFRLLASLVAPCFAAEAAYKAWWYATSADRVPFFANDVLSDVLVCSLEMASWMYRSAIYLLTCVLFRLICHLQGLRLEDFAGSLLEEVEEGRAGVDAVLREHLDIRKQLKVISHRFRKFIVAALLIATASQFASVLLTTRRDSVDDLLNTGELALCSVVLMSGLIIILSSAAKITHQAQALTGHTTKWHACCTIEPVLEEGEPGSNQNSMIDQEPESDSDTEDSEETGDEDLLENTKIHMPHAHVISFQKRQALVTYLENNRAGITVFGFTLDRSYLHTIFMLEWTLFLWLLGKTIGFS

SEQ ID NO: 18170 - protein, 474 aa, Zea mays
MAQHHGSHSLEVGGVGAGGVELDDDGHAARTGNLWTCFAHIITAVIGCGVLALSWSVAQLGWVGGPVAMLCFAFVTYLSAFLLSHCYRSPASDDGSLKRQRNYTYMDAVRTHLGEKRTWLCGLFQYLNMYGTAIAYTITTATCLRAIVRANCYHSQGHSAPCGAGGDHLYMLLFGAAQAVLSLIPNFHSMAWLSAVAAVMSFTYATIGLGLGLAKTIENGAIKGSVAGVPMSTAPQKVWRVAQAIGDIAFAYPYTIVLLEIQDTLKSPPPESETMQKGNVLAVLATTFFYLAVGCFGYAAFGNAAPGNLLTGFGFYEPYWLIDFANACIVLHLLGGYQMFSQQIFTFADRSLAARFPNSAFVNKSYAVKVPGAPASWSYSLNLQRLCFRTAYVASTTGLALLFPYFNEVLGVLGAVVFWPLAIYLPVEMYCVQRGVLPWTRTWVALQAFSVVCFVVGTFAFVGSVEGVIRKRLG

SEQ ID NO: 18171 - protein, 341 aa, Zea mays
MATSSTGCLVLLCLASPLLLLPSAVVLGHPWGVGGGGLSPQFYDHSCPMAEKIVQSVVAQAVAKETRMAASLVRLHFHDCFVKGCDASVLLDNSSSIVSEKGSNPNRNSIRGFEVVDQIKAALEAACPGTVSCADILALAARDSTALVGGPYWDVALGRRDSLGASIQGSNNDIPAPNNTLPTIITKFKRQGLNVADVVALSGGHTIGMSRCTSFRQRLYNQTGNGMADSTLDVSYAARLRQSCPRSGADSTLFPLDVVAPAKFDNFYYKNLLAGRGLLSSDEVLLTKSAETASLVKAYAADAGLFFRHFAQSMVSMGNISPLTGSQGEIRKNCRRLNSGH

SEQ ID NO: 18172 - protein, 318 aa, Catharanthus roseus
MVPYNYSLGIFLLFLIGSSSAQLSTDYYSKSCPNVFNTVKSQVHSAILKEARMGASLLRLFFHDCFVNGCDGSILLDDTSSFTGEKRAAPNFNSARGFEVVDNIKSAVENVCPGVVSCADILAIAARDSVQILGGPSWNVKLGRRDATTASQAAANNSIPPPTSNLNALVSRFNALGLSTNDLVALSGSHTIGQARCTNFRARIYNETNNLDAALAQTRRSNCPRPSGSRDNNLAPLDLQTPRAFDNNYYKNLVNRRGLLHSDQQLFNGGSTDSIVRSYSGNPASFASDFAAAMIKMGDISPLTGSNGQIRKNCRRIN

SEQ ID NO: 18173 - protein, 307 aa, Phytophthora sojae
MGVTLGTGSFGRVRFATHKATNSYWAIKILKKAEIIRLQQVEHMLSEKSILLCLDHPFIVNLAGTYQDTKYLYMVLEYVIGGEFFTHLRKAGRFDNNTAKFYAAQVVSIFDYMHSQDFIYRDLKPENLLLDNEGYIKITDFGFAKRVAFKTYTLCGTPEYIAPEVLLNKGHGKGVDWWTLGILLYEMLAGQPPFCDDDPMGIYQQILSGKLNFPRFFDRNAKGLIKRMLTADLTKRYGCLKNGVEDIKKHKFFAGVNWEDLLARKGAAPIIPRVGTANDTSNFDPYPDSMEDAIVPVYNGKDPFAEF

SEQ ID NO: 18174 - protein, 327 aa, Phytophthora sojae
MQEQKQIKLDELEVMRTLGSGTFGRVKLVRHIPTGAAYALKVLNKASVVAYKQQRNVVNEKSVMAQCNNPFLLKLFTTYKDAARLYLLIEFVQGGELFTYLHSTPSSPGRLPNDHARFYASHVLMALEYLHERCIVYRDLKPENLLIDPQGYLKVVDFGFAKVVDDRTYTLCGTTEYLAPELVLGKGHNRGVDYWALGILIYEMVVGHSPFAGSNQIDQMQICRNIVKEKVEFPGWVNSPCRDIISKLLERDLTKRLGLTHGGTRAIRSHAWFAKLDWDAMLQKKVNAPYRPKLADPLDASKFEAINDHDEEAPAYTMEGYEWDKDF

SEQ ID NO: 18175 - protein, 532 aa, Arabidopsis thaliana
AKGLVDHSRRQHHHKSPSFLSPQPRPLASSPPALSRFFSSTSEMSASDSTSSLPVTLDSINPKVLKCEYAVRGEIVNIAQKLQEDLKTNKDAYPFDEIIYCNIGNPQSLGQLPIKFFREVLALCDHASLLDESETHGLFSTDSIDRAWRILDHIPGRATGAYSHSQGIKGLRDVIAAGIEARDGFPADPNDIFLTDGASPAVHMMMQLLLSSEKDGILSPIPQYPLYSASIALHGGSLVPYYLDEATGWGLEISDLEKQLEEARSKGISVRALVVINPGNPTGQVLAEENQRDIVNFCKQEGLVLLADEVYQENVYVPDKKFHSFKKVARSLGYGEKDISLVSFQSVSKGYYGECGKRGGYMEVTGFTSDVREQIYKMASVNLCSNISGQILASLVMSPPKPGDDSYDSYMAERDGILSSMAKRAKTLEDALNSLEGVTCNRAEGAMYLFPRINLPQKAIEAAEAEKTAPDAFYCKRLLNATGVVVVPGSGFGQVPGTWHFRCTILPQEDKIPAIVNRLTEFHKSFMDEFRN

SEQ ID NO: 18176 - protein, 541 aa, Arabidopsis thaliana
RFVIGQAKNLIDQSRRRQLHHHKNLSFVSLIPPFSAPSDSSSRHLSSSSSSDMSASDSSSSLPVTLDTINPKVIKCEYAVRGEIVNIAQKLQEDLKTNKDAYPFDEIIYCNIGNPQSLGQQPITFFREVLALCSYTALLDESATHGLFSSDSIERAWKILDQIPGRATGAYSHSQGIKGLRDAIADGIEARDGFPADPNDIFMTDGASPGVHMMMQLLITSEKDGILCPIPQYPLYSASIALHGGTLVPYYLDEASGWGLEISELKKQLEDARSKGITVRALAVINPGNPTGQVLSEENQRDVVKFCKQEGLVLLADEVYQENVYVPDKKFHSFKKVARSMGYGEKDLALVSFQSVSKGYYGECGKRGGYMEVTGFTSDVREQIYKMASVNLCSNISGQILASLIMSPPKPGDDSYESYIAEKDGILSSLARRAKTLEEALNKLEGVTCNRAEGAMYLFPCLHLPQKAIAAAEAEKTAPDNFYCKRLLKATGIVVVPGSGFRQVPGTWHFRCTILPQEDKIPAIVDRLTAFHQSFMDEFRD

SEQ ID NO: 18177 - protein, 387 aa, Arabidopsis thaliana
TDLLGSSGVDCYEDDEDLRVSGSSFGGYYPERTGSGLPKFKTAQPPPLPISQSSHNFTFSDYLDSPLLLSSSHSLISPTTGTFPLQGFNGTTNNHSDFPWQLQSQPSNASSALQETYGVQDHEKKQEMIPNEIATQNNNQSFGTERQIKIPAYMVSRNSNDGYGWRKYGQKQVKKSENPRSYFKCTYPDCVSKKIVETASDGQITEIIYKGGHNHPKPEFTKRPSQSSLPSSVNGRRLFNPASVVSEPHDQSENSSISFDYSDLEQKSFKSEYGEIDEEEEQPEMKRMKREGEDEGMSIEVSKGVKEPRVVVQTISDIDVLIDGFRWRKYGQKVVKGNTNPRSYYKCTFQGCGVKKQVERSAADERAVLTTYEGRHNHDIPTALRRS

SEQ ID NO: 18178 - protein, 175 aa, Capsicum frutescens
MASKMCEPLVIGRVIGEVVDYFCPSVKMSVIYNSNKHVYNGHELFPSSVTTKPRVEVNGGDLRSFFTLIMIDPDVPGPSDPYLREHLHWIVTDIPGTTDCSFGREVVGYEMPRPTIGIHRFVFLLFQQKKRQTISNAPLSRDRFCTRKFSEENELGSPVAAVFFNCQRETAARRR

SEQ ID NO: 18179 - protein, 263 aa, Nicotiana benthamiana
MGSFDDISCTGLVLGLGFSTMADQKSTKIAPVVMAKGPSLGFEPSLTLSLSGDHTYNKQQAVKNDHQSADLYRQDSAASSYSNASVKRERDVGSEEATTEVERVSSRVSDEDDDGSNARKKFRLTKAQSALLEESFKQHTTLNPKQKQELARNLNLRPRQVEVWFQNRRARTKLKQTEVDCEILKKCCETLTEENRRLHKELQELKAVKIAQPLYMQRPAATLTMCPSCERIGGVGENTSKNPFTLAQKPHFYNSFTNPSAAC

SEQ ID NO: 18180 - protein, 272 aa, Capsicum annuum
MGFDDICNTGLVLGLGFSSTTDQKSTKITPLASKGPASLTFEPSLTLSLISGDRTYEQQATKKVNVTKPSNDHQSADLYRQDSAASSYSNASVKRERDVGSEETTTEVERVSSRVISDEDDDGSNARKKLRLTKAQSALLEESFKLHSTLNPKQKQDLAMELSLRPRQVEVWFQNRRARTKLKQTEVDCEFLKKCCETLTEENRRLHKELQELKALKIAQPLYMQLPAATLTMCPSCERIGGGVGENPSKNPFTIAQKPHFYSPFNNPSAAC

SEQ ID NO: 18181 - protein, 486 aa, Yersinia pestis KIM
MTMQTDVVLPLVGYLVLVFGLSIYAYTRRQTGNFLNEYFIGNRSMGGFVLAMTLTATYISASSFIGGPGAAYKYGLGWVLLAMIQLPAVWLSLGVLGKKFAILARRYNAVTLNDMLYARYQSRLLVWLASISLLVAFVGAMTVQFIGGARLLETAAGIPYDTGLLIFGISIALYTSFGGFRASVLNDALQGLVMLIGTILLLVAVIHAAGGLHKAVETLQHIDPALVSPQGGDQILDVPFMASFWILVCFGVIGLPHTAVRCISYRDSKAVHRGIILGTIVVAILMFGMHLAGALGRAVLPDLKIPDQVIPTLMITVLPPFAAGIFLAAPMAAIMSTINAQLLQSSATIVKDLYLNLWPAELKNERKLARISSLSTLILGLLLLLAAWRPPEMIIWLNLLAFGGLEAVFLWPLVLGLYWERANAHGALSAMIVGAVCYTVLASFDIKIAGLHPIVPSLTLNLLAFYIGNLFGDRARARHPAIVSAD

SEQ ID NO: 18182 - protein, 119 aa, Yersinia pestis KIM
MRSGLQKWSARKAEFYMYAVFQSGGKQHRVSEGQTIRLEKLDIATGETIEFDQVLMIANGEEINIGAPLVDGGKIKAEIIAHGRGEKIKIVKFRRRKHYRKQQGHRQWFTDVKITGISA

SEQ ID NO: 18183 - protein, 669 aa, Yersinia pestis KIM
MRHVYMTTELETSFADLGLSAPILSALTDLGYEKPSPIQLECIPHLLNGRDVLGMAQTGSGKTAAFGLPLLHNIKADLKSPQVLVLAPTRELAVQVAEALSSFSKHINGVNVVALYGGQRYDVQLRALRQGPQVVVGTPGRLLDHLKRGTLNLSNLSGLVLDEADEMLRMGFIEDVETIMAQIPAEHQTALFSATMPEAIRRITRRFMKEPQEVRIQSSVTTRPDISQSYWRVGGGYRKNEALVRFLEAEDFDAAIIFVRTKNATLEVAEALERSGYNSAALNGDMNQALREQTLERLKDGRLDILIATDVAARGLDVERISLVVNYDIPMDSESYVHRIGRTGRAGRAGRALLFVENRERRLLQNIERTMKLTIPEVELPNADLLSERRLAKFAAKVSQQLESSDLDMYRALLAKLQPEEEFDIETLAAALLKMAQGERPLILPPEAPRRPQREFNSRDDRGNDRGSRDRGDSRRDNRSDSRSADSRDGGERPARRERRDVGEMELYRIEVGRDDGVEVRHIVGAIANEGDISSRYIGNIKLFASHSTIELPKGMPGEMLSHFTRTRILNKPLNMQLLGDAQPHERRERPAGGNGGERRGGGRPFSGERREGAGAPPRRSFSGDRAPTGGGERRGNRDGQRSAAPRRDDAAAPAAAAAAPARRRFGDA

SEQ ID NO: 18184 - protein, 598 aa, Yersinia pestis KIM
MKNLRLCRRIFIVLFAVTNGCFRAGLVGLYAVMFVAFALRNRTMSEAEARPSNFIRQIIDEDLASGKHTSVHTRFPPEPNGYLHIGHAKSICLNFGIAEDYQGQCNLRFDDTNPVKEDVEFVESIKRDVEWLGFTWSGDVRYSSDYFDQLYQYAVELINKGLAYVDELTPEQMREYRGTLTAPGKNSPYRDRSVEENLALFEKMRAGGFAEGTACLRAKIDMASPFIVMRDPVLYRIKFAEHHQSGNKWCIYPMYDFTHCISDALEGITHSLCTLEFQDNRRLYDWVLDNISIDCHPRQYEFSRLNLEYTIMSKRKLNQLVTEKVVEGWDDPRMPTISGLRRRGYTAASIREFCRRIGVTKQDNNVEMMSLESCIRDDLNEHAPRAMAVLDPIKVVIENRAAGEEWLTMPNHPNNPEMGSRQVPFDSEIYIDRADFREEANKQYKRLVLGKEVRLRNAYVIKAERVEKDAEGNVTTLYCSYDAETLNKDPADGRKVKGVIHWVSVAHALPAEIRLYDRLFNVPNPAAAEDFLSTINPESLVIRQGFVEPSLADAVSDKTYQFEREGYFCADSRYSRPGALVFNRTVGLRDTWAAKATQ

SEQ ID NO: 18185 - protein, 430 aa, Yersinia pestis KIM
MASEYIEHLAVFHAEDTLLPAKGSFFMSPIEKSSKLDNVCYDIRGPVLKEAKRLEEEGNKVLKLNIGNPAPFGFDAPDEILVDVIRNLPTAQGYCDSKGLFSARKAIMQHYQARNIRDLTVEDIYIGNGVSELIVQSMQALLNLGDEMLVPAPDYPLWTAAVSLSSGKAIHYMCDEESGWFPDLDDIRSKITPRTRGIVIINPNNPTGAVYSKELLLEIVEIARQNDLIIFADEIYDKILYDDAQHHSIAALAPDLLTVTFNGLSKTYRVAGFRQGWMVLNGPKKHAKGYIEGLEMLASMRLCANVPMQHAIQTALGGYQSISEFIQPGGRLYEQRDRAWELINQIPGVSCVKPQGALYMFPRIDQKRFNLKDDQKLVLDLLLQEKVLLVQGSAFNWPYPDHVRIVTLPRVDELEMAVRKLGRFLETYHQ

SEQ ID NO: 18186 - protein, 559 aa, Yersinia pestis KIM
MSAPLYKQELLMLNNPRKDIPLIVTSLLCIILIALAFSLFPQQSSQMAETIFSGVTRLLGSTIQILVLLGLILVLYIAVSKYGNIRLGEGKPEYRTIPWLFMFICAGLGSSTLYWGVMEWAYYYQTPGLNIAPKTPKALEYSVSYSFFHWGISAWATYALASLIMAYHFHVRKNKGLSLSGIISAITGVNPQGFWGRLVDLIFLIATIGALTISLVITAATFTRGLTALIGVPNNFAVQAGVMLVAAVIFSFSSYIGIDHGMQRLSKMVGWGAFGFAVLVLLVGPTEFIINNTINSIGLTTQNFLQMSLFTDPMGDGRFTRSWTVFYWLWWISYTPGVAMFVTRVSRGRKLKEVIWALLLGSSLGCWFFFGVLESYAIQQFISGALDVPLILNTQGGETAVQMLLSALPMGKLFLAAYLFIMIIFLASHMDAVAYCMAATSTRNLREGEDPNRMLRLFWCVVITLIPLSILFAGASLDTMKTTVVLTALPFLLILLIEVYGFVRWIKQDYAHVPAHLIEQSTPQVMLPAESLPPATASMLVVETLVVETAAPPASKHNQ

SEQ ID NO: 18187 - protein, 257 aa, Yersinia pestis KIM
MRHGAPRNSMLSIKNLKVSVEGNEILKGLDLEIKPGEVHAIMGPNGSGKSTLSAALAGREEYEVTEGEVTFKGKDLLELAPEDRAGEGVFLAFQYPVEIPGVSNHFLLQTSVNAVRKYRQQAPLDRFDFSDFIEEKIALLKMPADLLTRSVNVGFSGGEKKRNDILQMAALEPSLCILDETDSGLDIDALKIVANGVNSLRNENRSFIIVTHYQRILDYVKPDFVHVLYQGRIIKSGDFTLVKQLEEQGYGWLTDQQ

SEQ ID NO: 18188 - protein, 265 aa, Yersinia pestis KIM
MKPMLFSNKNILIRITLSILYSSMIAAYGFSSIRSLNYPDPEAFMELYLDTADVAAVKRLARVLPLQGVTTNPSILAKAGKSLWEVLPALRDALGGTGKLFAQVLASDSERMVSEAVQLSEQIPGLVIKIPVTAEGLAAIKKLKTMSIPTLGTAVYGAGQGLLSVLAGAEYVAPYVNRLDAQGSDGIAMVRELQQLLTLHAPNAKVLAASFRTPRQVLDCLLAGCQSVTIPVDVAEQFISTPAVKAAIEQFEQDWQGAFGTTMLS

SEQ ID NO: 18189 - protein, 338 aa, Yersinia pestis KIM
MKYDGYNWLECVMKPSIVLYKSIPTDLHQRLAQHFTVNSFDGLTPDNQPELLAALQQAEGLIGSGGKIDQDFLQLAPNLRAASTISVGYDNFDVEALSQRGIALMHTPTVLTETVADTMMALMLSTARRVVELAERVKAGEWQESIGDDWFGVDVHHKTIGILGMGRIGMALAQRAHFGFSMPVLYTSRRPHEAAEQRFGARHCSLDTLLAEADFLCITLPMTEQTYHMIGREQLAKMKSSAILINAGRGPVVDEQTLIAALQDGTIHAAGLDVFEQEPLPVDSPLLTLRNVVAVPHIGSATHETRYNMAACAVDNLINALTGTVKENCVNPQVLITH

SEQ ID NO: 18190 - protein, 142 aa, Nicotiana tabacum
MKGGKSKAGADSKLGVRKKATETKKAKKAAKDPNKPKRPPSAFFVFMEEFRKTYKEKHPNNKSVAAVGKAGGDAWKKLSEAEKAPYQAKAEKRKAEYQKNMDAYNRKQAGDAEEDESDKSKSEVHDDDDEDDDGSEEEEDDD

SEQ ID NO: 18191 - protein, 472 aa, Desulfitobacterium hafniense DCB-2
MLNLGHKLLQYEAQKLISFHTPGHKGKAEFFTDLHFPDQDLTELPGLDMLHSPAGVIAQAQARAAAVYQSDASFYLINGATVGNQGMFMALAGTGKRGKDLQLPKVLVERQSHRSVFSALVLSGCEPEYIPSVVHPEFGLPLGLKSIAEVDLGEFLGVHLTYPGYYGTLPDLAMIAAQRDRQAVQVSILVDQAHGSHYLSPLFPKGALAYGADLVLCSTHKTLSALTQAAMLHVQGSRIPLSALKEALELLQSSSPSYLLMASLERAVEHALESRRWELLHEAVQELHHRVGGSLRILNPQDVGTYGIAGLDWTKIMINTQRLGVAAPRCVEHLRKSYGIDPELWDDKNILFLLGIGNTPEEVEILTKGLLSLASLNKDVVASPEEMVFEIPLPPVRLTPRQAYFARKRKIPLAESVGHIVGESISPYPPGIPWIVMGEEMTPEILELLTRHKGRWQGWEDAGQGVWIIEEV

SEQ ID NO: 18192 - protein, 657 aa, Desulfitobacterium hafniense DCB-2
MKFFKNAAVYLLIILIAIMLIRFANPPATQPLDMDYTKFYEAVVTGQVEEVVISTDDNVNTYEVKTKDGQQYVVLGEAKDVDLSAQMNEHKVNVRVNPPVTTPWWAGLITTVLPFLLIGGFIFFMMQQSQGGGNRVMQFGKSRAKLVTDEKKKVTFADVAGADEVKEELEEVVEFLKFPKKFNELGAKIPKGVLLFGPPGTGKTLLARAVAGEAGVPFFSISGSDFVEMFVGVGASRVRDLFEQAKKNAPCIVFIDEIDAVGRQRGAGLGGGHDEREQTLNQLLVEMDGFNGNEGIIIIAATNRPDILDPALLRPGRFDRQVVVDVPDVKGREEILKVHVKGKPMHNDVELDVLARRTPGFTGADLANLVNEAALLSARRNEKEIKMNALEDSVERVIAGPEKKARVISDYEKKLVSYHEAGHALVGEMLTHTDPLHKVSIIPRGRAGGYTLLLPKEDRNYMTKSHLLDQVTMLLGGRVAEALVLHEISTGASNDLERATGLVRKMITELGMSEELGPLTFGQKEGQVFLGRDIARDRNYSEAVAYSIDKEARRMIDECYLKAQTIIQENMHKLNAIAQTLMEKETIEAKEFAELMARFDQPVETAQVSEPSETENNTTEHDDLLPATGETSVEGEDRTEAEGLSGSTLEEEKNKID

SEQ ID NO: 18193 - protein, 285 aa, Desulfitobacterium hafniense DCB-2
MKMTESPGVFMGGETPYEEADAVILGIPMDYTVSFRPGTRLGPLSIRNVSIGIEEYSVYLDKDLSDYAYCDCGDLSLPFGNVEKSLQVIEAAARQVVEDGKFPIFLGGEHLVTYPLLKPFIEKYPELRVVHFDAHADLRTDYSGEPNSHATVMRKISEALGPHRVYQFGIRSGTREEFLFAKEHNHLVVEEVLEPLKAVLPELKGKPVYVTLDIDVVDPAFAPGTGTQEAGGCTSREIIKAVHALSELDVVGFDLVEVSPLMDTSERTALLAAKIVREAILSFVK

SEQ ID NO: 18194 - protein, 278 aa, Desulfitobacterium hafniense DCB-2
MHKDRLVAPVVKWVGGKRQLLEDLTPLFPKRVMSYCEPFCGGGAVLFKLQPDTAWVNDINSELIRMYEVIRDDVEELIRALGEHPNEEEHFYRVRDWDRDKEKYGNLSKVQKAARVIYLNKTCYNGLFRVNNAGEFNTPFGHYKNPNIVNEHTLRAVSAYFQRAQITFSSTDYAEVLAGVAKGTFVYLDPPYDPVSSTANFTGYAKGGFDRAEQIRLRECCDELDRRGIKFMLSNSATEFIKEQYGAYQITIVKAKRAINSNAAKRGQIDEVVVRNYK

SEQ ID NO: 18195 - protein, 483 aa, Desulfitobacterium hafniense DCB-2
MPSLRQSKAPVYEALLKYKSMRVVPFDVPGHKQGRGNPELTEFLGEKCLSVDVNSMKPLDNLGHPVSVIKEGEELAAEAFGAHHAFFMVNGTTSAVQAMVMSACKLGEKIIMPRNVHRSAINALIISGAIPVYVNPGVNKELGIPLGMSVADVRKAIKENPDAKAILVNNPTYYGICSDLKTITELAHEHSMLVLVDEAHGTHFYFGENMPISAMAAGADMAAVSMHKTGGSLTQSSFLLIGKRLNVGRVRHMINLTQTTSASYLLLSSLDISRRNLALNGQRIFDKALYLANYGRDEVNKLGGYYAFGKELNNGDSVYDFDCTKLSIHTRDIGLAGIEVYDILRDDYGIQIEFGDIGNILAIISVGDRALALERLVSALAEIKRRYQRDKTGMFDHEYINPVVVMGPQQAFYAQQRSLPIQESKGKVSGEFVMAYPPGIPILAPGEKITEDIIDYIAYSKAKGCFLTGTEDMDIENIKVVEE

SEQ ID NO: 18196 - protein, 228 aa, Desulfitobacterium hafniense DCB-2
MSCIIPNIYSQPTDTNLWNILLSSGIPRHYQKGEFVFEKDQPSNGLICLKKGKVKVSSFFSEGSEKIFGILVAPALFGETETLDQGPRMVSATALTHVEIVAISGNKTKELIYTYPDIALSIIQSIGVKLRWTTLQAEDLSTQKIEYRLARLLLDFKHYGIFTSKNNDNCLMITHEELAHFIGTARSKVTTYLNEFAHKGLIRLRRGEIRILDTAGLNKYKYTHKSQA

SEQ ID NO: 18197 - protein, 301 aa, Desulfitobacterium hafniense DCB-2
MANLYLSPKEITEEYVAIGQKKASTPAYKLFILGILAGALIAFASEGSNVAIHTLDSVGLGKLLAGIIFGTGLMMVVITGAELFTGNTLIVISCIEKKVRWFDMLRNWVIVYLGNFIGALTIVMFIIYSGQLDFSGGLLGGFTIKTAVYKTGLTFNQALLMGIMCNWLVCLAVWMAAAAKDIAGKVLAIFFPIMLFITSGFEHSIANMYYIPAGIIAKMNPVWVEQAEALGVTAAKLAHLNWESFIVNNLIPVTLGNIIGGSLFVGVFYWLGTLYKGRPAAAEKTDRLMPGKLDNAWAKSK

SEQ ID NO: 18198 - protein, 392 aa, Desulfitobacterium hafniense DCB-2
MQDVVIVSAVRTPIASFGGALQGYGAVNLGALVIREAVQRAGIQGKQVDEVIMGNVLQAGLGQNPARQAALKAGLPVETTAQTINVVCGSGLKAVIAAAQAIRAGDAEIVAAGGMESMSDAAFLLDQARWGQRMGHGTLVDSMIKDGLWCAFNEYHMGITAENVAEKYGISRREQDEFAAWSQAKAVAAMEKGRFKEEIVPVAIPQRKGEPVIFDRDEYPRAGTTVETLAKLKPAFKKDGTVTAGNASGINDAAAACVLMSKEKAAALGIPYLAAIKGYGMAGVDPAIMGVGPVNAVKKALQKAGIALDELDLIEANEAFAAQALAVTKELGFPGEKVNVNGGAIALGHPIGASGTRILVTLVHEMKKRRDKLGLATLCIGGGQGIALVVEG

SEQ ID NO: 18199 - protein, 401 aa, Desulfitobacterium hafniense DCB-2
MKKVVLAYSGGLDTSIIIPWLKENYGYEVIAMAADLGQGEELEPLHEKAIKSGASKLYIEDLQEEFVTDFIYPTLKAGAVYEGKYLLGTSFARPLIAQRLVEIAAKEGAVAIAHGATGKGNDQVRFELAVKALNPDLEIIAPWRIWDIKSREDAIDYAVERGIPVPVTKDRPYSMDRNVWHLSHEGGDLEDPWNEPKKDLYLLGVSPEDAPDEAEYLELDFEQGIPVSLNGEKLGPVQLLETLNEVGGKHGIGIVDMVENRLVGMKSRGVYETPGGTILYTAHQALEHLTLDRLTLHYKEQIALKYAELVYDGVWHSPLREALDAFVDVTQKNVTGTVRLKLYKGNCSLAGVKSPYSLYSEEFATFGRDGVYNQKDAEGFINLFGLPLKVRALMEKKSGLR

SEQ ID NO: 18200 - protein, 140 aa, Desulfitobacterium hafniense DCB-2
MTKILVPVDGSPNSDKAIHYALTLARCKDDLLIFLNVQPNYNTPNIKRFATQEQIKVMQEETSKEVLDHSLEIAKDSIAPIRTLLRTGDPGREICKEAQESVVDSIVMGYRGLGAVKRAILGSVATHVLHETSCPVTIVP

SEQ ID NO: 18201 - protein, 486 aa, Desulfitobacterium hafniense DCB-2
MIAFSVIFYMVMMLAIGYYSYKRTTNLSDYMIGGRTLGPAVTALSAGASDMSGWLMMGLPGAMFAAGISSGWIVVGLTIGAYFNWLYVAPRLRSYTEIASNSITIPSFLGHRFRDTSHVIRLVSALVIIIFFTFYVSSGLVSGAVLFNTTFGIGYHTGLWLILLVIVGYTLIGGFLAVSFTDFVQGLIMVTALTMVPVVTLWHSGGLGSSFTTIQTIDPALLNIFTGTSVIGIISLLAWGLGYFGQPHIIVRFMAISSVSEIKKSRRIGMSWMVFSEVGAMLTGLLGIAYFATHGLTLADPETVFIELGKILFHPIVTGLLISAILAAIMSTISSQLLVTSSSLTEDIYRILFHREAKDKELVFVSRLCVLLVALLATYLAWTQNDTILNLVGYAWAGFGSAFGPVILLSLYWKRMNKWGALAGMIVGSATVILWEQFPTFAAVYEMIPGFIMGLLSIIIVSLLTTEPSQEILDEFAKSAAETKGN

SEQ ID NO: 18202 - protein, 239 aa, Desulfitobacterium hafniense DCB-2
MKSCTACHSCGCHSEGQFCAAKAPIFAMLADEQLAVISGLITRRRYKKGQVLFFEGDVSDKFYIINHGKIKTFKHTREGKEQILYILSEGDFIGDLSLLKKSAFPYNAEALEDVGVCTLSKDDLDRILKENPEICLKILESVHDRLVNLENLVQTLSTKDVEARIAGLLFNFSKNFGEHKDGKVMLNIALTREEMANFIGVTRETMSRKLSGMQDEGILELVGNKRIIINRLQDLEAMM

SEQ ID NO: 18203 - protein, 591 aa, Desulfitobacterium hafniense DCB-2
MALWGNETNDTRLTESLAAGRVRMTGAQFLAAFLAKKGVSQIYGIPGAAILPFYDAVRELNMESYNVRHEQAAIFMADGYSRATGKVGVCAATSGPGATNFLTGLYSAYSDSVPLLALTGQVPTSLIGKDSFQEAPMVEMARPVTKAAYLVEKAGDLPRILKEGWELATTGKKGPILLDLPLDVQKGLVEVDWSEFDFSPPQPPRQEIAQDTLNTILSMLYEAKTPTLLAGGGIVQGNAAELLRETAELLQIPVVSSLMGKDAFPNDHPLYGGLVGTMCQTPLGNKTILESDLIINLGGRFDGRGTGDSQRFQSGRKVVHVNLDNRELSRHISTELAVAADIRDFLEHFLAFLRDKGFIPTPQARQRILDLQEERIRLARRTKFDTLPLKPQQAIAEVREAMARDGILTLDCGISQIWATQLFEAYVPRSFLITGRAGTMGWGLGAALGAKLAYPDRQVVNLLGDASLGMSLQELATAAKHNIPVVVVVLNNSLFGLIRQQQNLLFEQRCISTDLEYENHVQGHSRGLDFVATARGMGVEAELVDGPDQIQGALARAFSQNRPYLIEVLVDPLAQCSVSLDGTLTGVLELE

SEQ ID NO: 18204 - protein, 230 aa, Desulfitobacterium hafniense DCB-2
MRILLVDDEKNISNVLKAYLQQEGFHVTTAVNGLIALTLFKENSYDLVLLDLMLPGLSGEEICREIRKISATPVIMLTAKVELEDRLQGLNLGADDYIVKPFSPREVVARIKAVLRRTHIETALLADSITYDNGLTIDNARHEVRFQDEAILLTPTEFKILGALAKYPGRVYSRGQLVQIVQGHDFGGDERVIDAHIKKLRQKLEGVPGDPKIILTVYGVGYKFNAHKEE

SEQ ID NO: 18205 - protein, 342 aa, Desulfitobacterium hafniense DCB-2
MKENTVKIGLLGCGNVGQGVIKGILLHSNKILRKLGATLVVSKALVQDISKERAIEGVVLTQKPQDILDDPEIEVVVEVMGGEHPTYSFIKEALAKGKHVVTANKLLLALHGAELQEIAQRKGICLLYEGSVLGGIPILRTIQYGLAGDQVKKICGILNGTTNYILTQMAESGKGYEEALREAQEAGYAESDPTMDVTGLDAACKLVILCRECFELNIPLEEVEINGIQGLTPEEVAEQKEQGRVPKLVAEAAIIEHSSSEPEKRREGIRAKVSVQWLSGEAILSHVSGVDNGLSLETQLVGDLFWKGPGAGGLATGGAVLSDIVEIAKKVVVERRIGNAAR

SEQ ID NO: 18206 - protein, 151 aa, Desulfitobacterium hafniense DCB-2
MFDLVPFEGRNSGLPRKSRNLFDIDSIFENFFNDTLFPAFYNQSGQMRVDVRENEKEFIVEAELPGVNKEEIQIDCTEDRLTITVQKTESTEEQKDNYIRKERKASSMARSFAIANIRHEEITAKYENGLLTVTLPKHEKTAPKGKKIDIQ

SEQ ID NO: 18207 - protein, 508 aa, Desulfitobacterium hafniense DCB-2
MNEGQGSIKIDKKIFFPPLVLVSLICAYIIKYPEAGSATINKVFAFVTGDLGWAYELFVFANLGIILYFIFGKFANKRLGDEKPEFGTLTWLGMLFSAGTTGTILYWSSMEFYFFLTAPPFGAEPLSPEAWKYSLAFSFFDWGISAYGLYVAVGVVFGYFFYVLKKDVFRPSTACEGLLGERVHGPLGKVIDIFYMIGIIAGVATSIGLGTPIISEIFTKLSGQPRTLAVDAVIILIWTVIIAISVYGGLEKGIARLSNFRIYLGYAILALVAILGPTAFMLNNTFDALGVYLNDFLRMSFYTDAHLGTGFPQNWPIFFFAWFLAFALSTGIYLARISKGRTVREFTLGATFSGVLCAFLYFAVLGNYSIDAFVNNKVDIGRIVAESGGFRAAVEIWSTLPFSSVFLVAILILVFISTATSINSIAYTLAMVSSNKLEKGQDPAKWNRLSWAIIIGGLSLTLMFLGGLTPLQTAATAGSLPTMIIMAIILIGFFKTAGKSWGEESDKQ

SEQ ID NO: 18208 - protein, 506 aa, Desulfitobacterium hafniense DCB-2
MKSASKVDKTIVWSSLIVSSAFIIATLVTPSGVSQILNAIFSFFTKNLGWAYMLSAAAFVAFGIGLAVSKYGHIKLGKDDEEPEYSRGSWFAMLFATGMGVGLVFWGAAEPIMHFDTSPFAANRTPEAASIAMRTVFFHWGLHPWALYGVVAMSLAYFQFRKGLPGLISSTFYPLIGEKGIRGPIGKIIDVIAVVVTLFGVATSLGLGTQQLTTGMNYVYGLPNTTSMALVIIAIITILFTIAAASGIDKGIKFVSNTNMVLAFLLMLFLLIVGPTKYILNTFFESMGNYLQNFVSLSFFLDTQGAVAERTGYDWIGSWSVFYWAWWITWAPFVGSFIARISRGRTIREFVLGILVAPPLLSAIWFSIVGGSALHIELFGSGGISAAVAEDVSSGIFAMLSHFPLSGPVALLTMILLAIFFITSAESATFVVGMFTSGGDLNPDARLKIVWGVVEGAIAAMLLVAGGLSAVQTVAFIFSFPFMLIMILMVVSMVKALGEGEKKPLQ

SEQ ID NO: 18209 - protein, 337 aa, Desulfitobacterium hafniense DCB-2
MVSKCGILKDGSKPKVLIARQVPQEVEEWIGRHCEYSKWEGSGDIPRSELLKQLGDVDGLLINREKIDGELLDAAPKLKIVANISVGYNNFDIGEMQARKVLGTHTPNVLDDTVADLVFGLMLSTARRLCELDRYVKAGRWNETVTPDLFGMDVHHQTLGIIGMGRIGRALAQRGKWGFDMNILYHNRSRHPEAEQRFDARYCTLEELLQRSDFVVLLAPLSPQTVNLMSGREFGLMKRSAVFISASRGETVDEEALVEALREGRILGAGLDVYRKEPIPPDHPLLRFKNVVTLPHLGSATTRTRLAMARMAAENLLIGLKREIPPQCVPELKHLVL

SEQ ID NO: 18210 - protein, 320 aa, Desulfitobacterium hafniense DCB-2
MAQYTVLSTSPTFTKYSPQAAGILEKKGCRLVMIPPNGLREREDFKAVLAEAHVWVVGINKVYAEDLEAAPNLKLIIKHGTGVDSIDLKAAAARGITVANAPGTNANSVADLAFGFMLSLARQIVSADKRTRDGFWGTVMGKDVYGKTLGVLGLGQIGKGVIRRASGFDMNILGYDLVHHSQFEKEYRVRAATLEEIMSEADYISVHLPLLESTKNIIDRSLLEKMRPTAFLINTSRGGVVDETALYDLLKEKRIAGAALDVFATEPPRQSPFFELDNVIVAPHMGAYTEGAMGAVSEILAESIVRVLAGKEPLSVIKTN

SEQ ID NO: 18211 - protein, 453 aa, Desulfitobacterium hafniense DCB-2
MSEKVVQKLEHTRKNYYKDAEIAAYGERKPDYSTLGRKIENTYARQRQVVCVEACRTPYGKSLGALLEYDAAQLGALAIKEVLRRTKGKVAPGEVDYVIMGHVVQAGSGQVSSRQATLLAGLPEHVPSITVNKVCSSGVKTIDLGAQMIALGRAEIVIAGGQESMSNIPFSLPDMRRGRKMGLPTIDCVDLMVKDGLWDSFYERHMAIHGSEVADEFGYSREEQDEWALHSQLAASAAIAAGKLDAEIFPVAVKTGKETLEKDEGPRANTTLEGLAKLGPVFDHISAVTGKPGSVTAGNAPGTNDGGDVCLLMSRAKADELGLKPLFSIVDYAEVSQPTKDIATVPGLSIKKVLEQNKLTLEDIKLIEINEAFAAVALVSARTILGMTKEQMYEKVNVNGGAIAYGHPIGATGARIVMTLAYELKRRGGGYGVCGICAGHAQGDAMLIYVEPD

SEQ ID NO: 18212 - protein, 864 aa, Desulfitobacterium hafniense DCB-2
MSFDTNRFTQKSQEAIIQTQTMAERNGNSQVEPEHLLLALLEQGEGVVPQVLTKLDIPVGALVQKVRQEVNRLPRMMGANVQLTISPRLRTVLVSAHDEMETFKDDYVSTEHLLLAILSQGGGPAEKILKQEGLNREKLLQALRVVRGTQRVTSQTPEGTFRALEQYGRNLVEQARRGKLDPVIGRDEEIRRVIQILSRKTKNNPVLIGEPGVGKTAIVEGLAQRIVRGDVPESVKDKKIIALDMGSLIAGAKYRGEFEERLKAVLKEVQEREDIILFIDELHTVVGAGAAEGAMDAGNMLKPMLARGELHMVGATTLDEYRKYIEKDAALERRFQPVTVGAPSVEDTISILRGLKERYETHHGVRITDGAIIAAAVLSDRYISDRFLPDKAIDLIDEAAARMRMEITSDPYELDQIKRRILQLEIEREALKKEKDEGSKERLEKIEEDLANLKEERSALEAQLQGEREVLTRINSLKEDIDQNRLKMEQAQQAFDYNKAAELQYGILPKLEKELNALEEQLRNRKNTLLKQEVGEEDIAEVVAKWTQVPVAKLLESEMDKLVHMEARIHQRVIGQEEAVKAVADAVRRSRAGLQDPNRPLGSFLFLGPTGVGKTELAKALAEFLFDDDQGIVRIDMSEYMEKHTVSRLIGAPPGYVGYEEGGQLTEAVRRKPYSVVLFDEVEKAHGDVFNVLLQLLDDGRLTDGQGRVVNFKNTVVILTSNIASPLIQELTASGAAQEVLRSRVTEELRLHFRPEFLNRLDEIIVFHPLGQEHIGSIVQIQINKLRDYLAPRKMTLELSQGALNKIIQQGYDPIYGARPLKRVIQQNLQNPLAMKILQGILHEGDHVLVDLDPQGQLLFKKSE

SEQ ID NO: 18213 - protein, 334 aa, Desulfitobacterium hafniense DCB-2
MKRGIILKPRVFITRKIPEDILTLIEEVCEVKVWPEEDTPIPRSVLEQEIREVDGLYCLLTETIDASLLDLGKNLKVVSNMAVGYNNIDIEAATQRNILVTNTPGVLTETTADLTFALLMMTARRMEESSQYLRQGHWKTWSPMLLAGQDIFGATLGIVGMGRIGEALVKRAKGFDMKIIYYNRTPKPELEESLGIEYRSLDELLQEADFVCILTPYTPETRNLIGKRELELMKPTSILINTARGGIVNEEDLYEALAQQKIYAAGLDVFEQEPLPTDHPLLTLTNCVALPHIGSATVKTRREMARLAAQNLLAYLQGQRPPHCVNPSVLTPKL

SEQ ID NO: 18214 - protein, 223 aa, Desulfitobacterium hafniense DCB-2
MIENVNYARTLLTEEEVGHIVQSGTIVRYKKGQIIFSESDAADRVYFVKEGYVRIFRITQYGRRVTVGCIRSPGQLMGLAETLYGGDRTCFASAIDDVTIVVIRHQQFLDLLEKHPAIAIKVTITLAIRMREAEGIIEEMVCFQVPGRLAQLLIKMAKRAGMETPRGTKISFRLTHEDIAYMIGTSRQNVTSLLNTFKYENSIAIEDKELYILDIEKLNSWVV

SEQ ID NO: 18215 - protein, 247 aa, Desulfitobacterium hafniense DCB-2
MSGYSKEYEIFYFQVDQFGEASVITILDFLEDCAIAHSEAVGLGIESLMELRTCWVLNRWRLEMERYPRLGEKVTIETLNTGFERFYGERMFTIRDSQGNIIGKAGSLWIYLNIDKRRPTRIPLQFAAQYGVPERYEGKEPFEDLPEITDIHSEIRFHVRRSDIDTNGHVNNTRYVEWMLEGISEESLKDYRLQRLEVIYKKETPYGTDILSQGQGAKGAGLQYLHRVLDQSGERELACGRTVWTKR

SEQ ID NO: 18216 - protein, 706 aa, Desulfitobacterium hafniense DCB-2
MKVKYFSKKISIVLALLVMFSSLPNVPVSADPNPLNAVIPKYQEERQFGFSAGGLHTVWFDTSHGGDVTASGNNDYGQLGDGTTISRSLPVTINNLYSRVADISAGGTHNLALIDDQTVRAWGNNQKGQLGIGSDINSLIPVEVPGLSEIIAISSGFDFSLALKNDGTVYSFGSNEFNQLGDSSVGSRNTPAQIPGLDSIVAIAAGGTHALALHMDGSVYAWGSNERGELGDGGSASGYQPVKIASLSNITAISAGLRHCLALGADGSVYAWGDNSLGQLGDPKISDYSNVPIKVQGIKAAFRIAAGYNSSFIIAQQNATYGFGDNSANQINSSAVENLSSPTLLNIKASFISPGWGHTVSRGFLGNDNGVDNWSWGYNQFGQTGNGLTEHVLNPTAPYSGTNRQPVFFRISGANRFKTAVAISIEGWDYGAATVVLARADNFPDALAGTPLAYGLNAPILLTDSARLSNDTKDELDRLAPQNIIILGQEGAISSSIEKDLQKHYKVTRVGGQDRYETAAAIAQYMHDHHLILGNKAVIAYGENFPDALAVSSVAAHAHMPILLTKKDVLADAAGEALKRLGINETFIVGGTGVVGTAVESSLPLPTRYSGNDRYATAIAIANGMGTDPYLVYLATGTNFPDALAGSVLAARSNSPIILVNSSSGAEAAAQWFWWNSRDIKQSYVLGGSGAVPDSVIESIYSRIGY

SEQ ID NO: 18217 - protein, 362 aa, Desulfitobacterium hafniense DCB-2
MAEPAVRILVINPGSTSTKIGIYENLTCVFDKTVRYHRAELEGYASIMEQKELRRAFVLNSVQESGIPMTSLQAVVGRCGMVKPLESGTYLLDEHLVHDLTSEESMRHASSLGGVIAYEIGRQLSIPAYVVDPVTIDEMIPQARLTGIKAIARRSIFHALNSKYVAKRFCRENQKRYEESRLIVVHLGGGISVSAHRNGRTIDVNDASAGDGPFGPERAGGLPVSAVVELCFSGLYTKETIFTQIMSKGGMQMLLGTNDLREAEKRIDQGDDYAQLVVEAMAYQVSKQIGAMAAALEGEVEGIVLTGGLAYSRRFVQLIDQRVRKMAPVTVYPGEDELQAMAEGAFAVLTGREQVKHYGVRR

SEQ ID NO: 18218 - protein, 393 aa, Desulfitobacterium hafniense DCB-2
MQDVVIVSGARTPIGDFNGALKDFKAVDLGMIALKGALQKSNLEPAQIEEVIAGHVYQAGCKGNPARQVAMGVGCPVETVAATINQQCPSSMRATEMVSQEIMLGKIQIGAAVGIESMTNVPYLLLKARGGYRMGSDTLHDGLLYDALIDAFYNYHMGITAENLAEMYGISREEQDEHALESHRRACRALKEGKLKEEIVPVEIVTKKETRLIAEDEHPREDVTLESFAKLRPAFQKEGTVTAGNASSLNDGAVALLLMSGEKAQELGFKPLARIVATASASVDPKIMGFGVVPAVRRALNFARMDTKDIDLWEINEAFAAQFLACNRELKLDLDKVNVNGSGISLGHPVGMTGARLILTLIQEMKRRRNQYGCASLCAGGGPAMAVVVEAFS

SEQ ID NO: 18219 - protein, 399 aa, Desulfitobacterium hafniense DCB-2
MKILVINCGSSSLKYQLLDMDTQTPIAKGLVERIGLPGAVLTHRPADGEKEIITAEIPNHTVAIQLVLDALVNPEYGVVKSLEEIGSVGHRVVHGGEKFASSVLITDEVMQAIEECIELAPLHNPPNIAGIEACQKLMPGVPQVAVFDTAFHQTMPPHAYLYGLPYEFYEKYKIRKYGFHGTSHKYVSQRAAKLLNRPAEGLKLISCHLGNGSSITAIKDGKSIETSMGFTPLEGLMMGTRSGDLDPAIVSFIQQKENLSSDEVNDFLNKKCGVLGLSGVSSDFRDIEQARDQGNYRAALALDVFSHDVKKYIGSYAAVLNGADAIIFTAGLGENSAEMREAVVDGLQYLGAKLDLEKNKVRGKEADISAPEATCRVLVIPTNEELMIALDTLDIIQKG

SEQ ID NO: 18220 - protein, 290 aa, Desulfitobacterium hafniense DCB-2
MAEVDYKALKKGGFMQQVQKDHFALRLRVAGGQIQADQLQKVTELARTYGQGYIHMTSRQGIEIPFIRLEDVEAVLNELKEVGLEPGACGPRVRTITACQGAAICPSGLIDTTRLAGELDKRYFARELPHKFKLGVTGCGNNCLKAEENDLGIKGGVRPSWQQDQCIYCGLCQAVCPAKAIEVHRQEETLSLDSQLCTYCGKCVKSCPTSAWEGERGFLLSFGGLFGNRIAIGKRILPLVITEAHLYQVIDKTLEFFQNHGKPSERFRNTLDRVGWETLAKELEGLDLER

SEQ ID NO: 18221 - protein, 303 aa, Desulfitobacterium hafniense DCB-2
MHGSEPNRDFRSGFVTVVGRPNAGKSTLLNQLLGQKILIMSDKPQTTRNKIHCILTEERGQVVFLDTPGIHKPKHKLGEFMVDSALESLREVDLILYMVDTTAEFGAGEEYILENLKHVKTPCILLLNKIDLIEKDKLLKLIKDYSALKDFLAILPISAKTGENKDELLKLIFKEMPQGPMYYPEDEVTDQPERFIMAELVREKVLQLTRDEVPHSIAVVVESVEEKKTLIKVRALIVVERDSQKGIIIGHGGSLLKEIGRLARQDIETLLGSKVFLELFVKVEKDWRNRGRSLREFGYSDRS

SEQ ID NO: 18222 - protein, 614 aa, Desulfitobacterium hafniense DCB-2
MGKVIGIDLGTTNSCVAVMEGGEAVVITNAEGNRTTPSVVGFSKTGERLAGQVAKRQAVSNPDKTVISIKRHMGTDYKVKIDDKSYSPQEISAMILQKLKADAEAYLGQTVTEAVITVPAYFTDAQRQATKDAGTIAGLDVKRIINEPTAAALAYGLDKQEDQTVLVFDLGGGTFDVSLLELSQGMVEVKATSGNNKLGGDDFDQRLIDYMVAEFKKDQGVDLAKDRVALQRLKEAAEKAKVELSGVSTTNVNLPFITMTGEGPAHLDMNITRAKFEELTADLVEATLGPTRQALADAKLSWNEVNQVILVGGSTRIPAVQEAIKKLSGKEPHKGVNPDEVVALGAAIQGGVLAGEVKDIILVDVTPLSLGIETLGGVFTRIIDRNTTVPTTKSQVFSTAADSQTSVDIHVLQGEREMAAYNKTLGRFQLSGIPPAPRGIPQIEVKFDIDANGIVHVSAKDMATGNEQKVTITASTGLSQEEIEKMKKDAEAHADEDKKRKELIDAKNQADSMVYQTEKTLKDFEGKIPDNEAEPIKKALEELKTAAAGENIELIKEKTEGVTKVLYPIIEKMYQQTGGAAPGPDMGADPGAGGAQGDDNVVDAEYTEVDKDQK

SEQ ID NO: 18223 - protein, 534 aa, Desulfitobacterium hafniense DCB-2
MDMETDTNSKNSKVLNRQPKTVNWALLGNIDPYVFIISALLAVGFLLWGVVDSEGLSHVSNTILDYIIQQWGWLFIVGILFFLLFCLYLAFSRYGDIKLGGQDTLPEYSTFSWFAMLFGCGMGVGLVFWSIAEPINHFLNPPAYVNALSPSQSAEWSLAISFFHWGLSAWASFVLIGLAMGVIIFRNKMPMLLSSCFYPLLGDRIYGPIGKLIDIITLWASLFGMTTTIGLGTKQLAAGVTYNYGIPQGIPLLLGILAIVIICYLISACTPNLKGIKIGSDLSLIATGGLLLFVFLFGPTKFIMDMFVNSTGVYIQNFFAMSLWTDPIEQSGWLGSWTIFYWAWWIAWAPFVGMFIAKISKGRTIKEFVLGALIAPTLLDMIFFGIFGGTSLSFELNQVSQGILANAINVDISSAVFVLFEQFPFREITSLILIFVIFTFFVVSADSCTIVLGMLSSGGNENPRIPLKLFWGIAMGAAAGLLLMLGDGGLDALQMASILGGFPFLFIMFAICYSIIKTLRREKSTNLVGIRERN

SEQ ID NO: 18224 - protein, 494 aa, Desulfitobacterium hafniense DCB-2
MGVDKKQNTVLYISSAIALLFVLWGVFLPENMANVVNKVFALLTTNFGWLYLLAVAIFIIFVFGIAISRYGKIKLGADDDKPEFSNFQWFAMLFGGGMGIGLVFWSVAEPIMHFNSPPFGEPGTVEAMQTSMRVVFFHWGIHAWVNFAIAGLALAYFQFRKGLPFLISSAFYPLIGDRIYGPIGKAIDILAVFATIFGIATSLGLGSSQIATGIQYIWGIPAGPLTISLVIAVITVIFTLATVSGLHKAMQSIANVKVWLSVAFMVFIFYFGGKVFILNTFTQSLGDYLQNFVGQTFWMANESWVGGWTIFYWAWWIAWAPFVGQFVARVSKGRTIREFVFAVTLLPVGFSFIWLAIYGGAAFNLDQISGGFIQNAVNADYTTALFALLQQMPLYAITGPLAILLIVTCFVGAADSATYVLAMLTSNGDMDPSKKLRSFWGIMQGAMTIVLIVVGGTAALKALQTASIASAFPFMLIMLVMCYSILKALRSDHP

SEQ ID NO: 18225 - protein, 424 aa, Desulfitobacterium hafniense DCB-2
MFYDQAKIYVKGGDGGAGAVAFRREKYVPEGGPSGGDGGRGGKVIFIADEGLRTLVDFRYKRHYKADRGEHGQGKNMHGKSGEDMSVRIPVGTVVKDADTGEILADLIEHGQKVVVANGGRGGRGNARFMSNTNKAPTVAENGEPGEERNLLLELKLLADVGLVGFPNVGKSTIISRISAAKPKIADYHFTTLVPNLGVVELEDGESFVVADIPGLIEGAHTGAGLGHEFLRHTERTRLILHVLDIAGSEERDPLEDFQIIAEELRQYSQELANRPILIVANKMDIPGAEENLQRLTEKLGEDYRIFPVSAATGEGLKELVYAAAKALPEIPAPQIFVRDEEQHKLTQASAPHRFELTREGDFFVVSGKEVEKHVQMTMFDREDGLYRFQNILKAMGIERALLDEGIKVGDKVRIAGIEFEWEE

SEQ ID NO: 18226 - protein, 297 aa, Desulfitobacterium hafniense DCB-2
MKKMIRSLALVLAGALLLGGLVGCGQTGGDQANNANNANKANGASSAGSLEEIKQRGTLRIGVFSDKPPFGYVDANGQNQGFDVEIARRFAKDLLGDESKVEFVLVEAANRVPYLESNKVDIIMANFTVTEERKQKVDFANPYMKVALGIVSPNGALITSIDQLQGQKVIVNKGTTAQDYLTKNHPDLELLKYDQNTEAFEALKDGRGAALAHDNTEVLAWAKSNPGFTVGVPTLGSTDTIAPAVKKGDTELLNWINQELAELAKEDFIKKAYEKTLLPVYGDDVKPEELIVEGGKL

SEQ ID NO: 18227 - protein, 540 aa, Desulfitobacterium hafniense DCB-2
MDNENKSSNFLRSIILEDLREGKVEEITTRFPPEPNGYLHIGHAKSICLNFGLADEFKGKTNLRFDDTNPVKEDTEYVESIKEDVKWLGFDWDNLFFASDYFAEMHKRAVLLIEKGKAYVCDLSAEEIRKSRGTLTEAGKESPYRNRSVAENLELFERMRQGEFKDGEKVLRAKIDMGSPNINMRDPVLYRIAHATHHNTGDTWCIYPMYDYAHPLEDAIEGITHSICTLEFEDHRPLYDWVVRECEMEHVPHQYEFARLNMTNTVMSKRKLKQLVDEKVVDGWDDPRMPTISGLRRRGYTPEAIRNFAQAIGVARADSVVDSKMLEHFIREDLKLKVSRPMAVIRPLKVVITNYPEGQVERLDADHNKENPEMGKRKIPFSREIYIEQEDFMEVPPPKYHRLYPGNEVRLMDAYFIKCEEVIKDDEGKIIEIRCTYDPETKSGTGFTGRKVKGTIHWVEATQAVPAEFRLYEPLIQDDYINPNSLEIRQGFVEPYMKEAKPQDKFQFPRHGYFNVDPNYTTPESLVLNLIVSLKSSFVI

SEQ ID NO: 18228 - protein, 358 aa, Desulfitobacterium hafniense DCB-2
MIVLKKTTRNNLYTYALVIVAYLIVQLLISGGNISSSLQGQLVPICAYVILAISLNLTVGILGELSLGHAGFMSIGAFAGVVACISLEQIIPITILRLIVSLIVGALFAGVAGFLIGIPVLRLKGDYLAIVTLAFGEIIKNIINILYVGLDKAGLHISFLSDSNALNLGEGGRVIIDGPLGITGIPKLSTFTIGFVLILITLFIVLNLVDSRSGRAIMALRDNRIAAESVGIHITKYKLMAFVTSAALAGAAGTLFAMNYSTIIASKFGFNTSILILVFVVLGGLGNIRGSIIAATLLTILPELLREFNSYRMLLYAIVLILIMLATNNDAFKSHLGALKARLLPAKLRKEKGGAENG

SEQ ID NO: 18229 - protein, 100 aa, Glomus intraradices
MSQIKDRVEKLIQTNPVMMFSKSFCPYCKKAKATLKELNVEPGICELDEDEGRAIQDYLKEKTSQNTVPNIFIKGQHVGGCDDLLAAKDNGSPSKMIAAL

SEQ ID NO: 18230 - protein, 572 aa, Neurospora crassa
MSDIEKGSAGSHDKETRVDAATLPAYEAGSVAEAQQEDFMTRNGLNLASFKPRRFHTGDGTEIERTMKSRHLHMIAIGGSIGAGFFVGSGKALHNGGPASLLIDFAIIGVMMFNVVYALGELAVMFPVTGGFYTYSTRFIDPSWGFAMGWNYVFQWAMVLPLELTVCGFTVGYWNQDITVWITTFLVAIIIINVFGTLGYAEEEFWASAFKLGATIVFLIICLVMVLGGGPKGSRYDHYTGAALWYSPGAFANGFRGFCSCFVTAAFAFSGTELVGLAAAEDKNPVKSLPGAIKQVFWRITLFYILGLFFVGLLIPYDDENLLGANPFINVNASPFVLVGKYANLTGFDSFMNVVILVSVLSLGVSCVYGGSRTLTALAQQGYAPKIFTYVDRSNRPLFSVLLIIAFGPLAYVNLAAAGPTVFDWLLSLSGLAALFTWGSICLSHIRFRKAWALKGHSVEEIPFRAAGGVWGSWLGLVLVVLVLIAQFYVAICPPGGGFNTVEGFFVQYLALPVVIVFWIGGFIWKRTSWLRVDQIDVDTGRREHDWESINAYQAELAAMPAWKRWFHKLFV

SEQ ID NO: 18231 - protein, 159 aa, Helianthus annuus
EFQVGPSVGISAGDEIWAARYILERITEIAGVVVSFDPKPIPGDWNGAGAHTNYSTKSMREEGGYEIIKKAIEKLGLRHSEHIAAYGEGNERRLTGRHETANINTSKWGVANRGASIRVGRDTEKEGKGYFEDRRPASNMDPYVVTSMIAETTILYVNP

SEQ ID NO: 18232 - protein, 174 aa, Helianthus annuus
GFQVGPSVGIEAGDHIWCARYLLERITEQAGVVLTLDPKPIEGDWNGAGCHTNYSTKAMREDGGFEVIKKAILNLSLRHTEHISAYGEGNERRLTGKHETASINQFSWGVANRGCSIRVGRDTEKAGKGYLEDRRPASNMDPYTVTGLLAETTILWEPTLEAEALAAQKLALNV

SEQ ID NO: 18233 - protein, 174 aa, Helianthus annuus
GSQVGPSVGIEAGDHIWCARYLLERITEQAGVVLTLDPKPIEGDWNGAGCHTNYSTKAMREDGGFEVIKKAILNLSLRHTEHISAYGEGNERRLTGKHGTASINQFSWGVANRGCSIRVGRDTDAAGKGYLEDRRPASNMDPYTVTGLLAETPFLWEPSLEAEALAAQKLALNV

SEQ ID NO: 18234 - protein, 174 aa, Helianthus annuus
GFQVGPSVGIDSGDHIWRARYLLERITEQAGVVLTLDPKPIEGDWNGAGCHTNYSTKAMREDGGFEVIKKAILNLSLRHTEHISAYGEGNERRLTGKHETASINQFSWGVANRGCSIRVGGDTEKAGKGYLEDRRPASNMDPYTVTGLLAETTILWEPSLEAEALAAQKLALNV

SEQ ID NO: 18235 - protein, 216 aa, Listeria monocytogenes
LVFWGAAEPLSHYAVQAPGGEVGTQAAMKDALRYSFFHWGISAWSIYAIVALALAYFKFRKNAPGLISATLYPILGKHAKGPIGQLIDIIAVFATVIGVATTLGLGAQQINGGLTYLFGVPNNFTVQFTIIVIVTILFMLSAMSGLDKGIQLLSNVNIYVAGVLLVLTLILGPTLFIMNNFTNSFGDYLQNIIQMSFQTAPDAPDARKWIDSWTIF

SEQ ID NO: 18236 - protein, 379 aa, Poncirus trifoliata
MDWNLKPAWDFTEFQQEAIPNVDAVDGSSSRTKGNFSVDLKLGRVNSSAEDSLNKCKEPGASKMESPSPSGSFKRARAANNGSQTASCLVDGCDSDLSNCRDYHRRHKVCELHSKTPQVLICGQKQRFCQQCSRFHCLEEFDEGKRSCRKRLDGHNRRRRKPQPDPLSRTGTFLSNYQGASLLPFSSSHMYPSATVVKPTWTGVVNTEADARCYNEHHRLNLPDERNLFLRSPSSSYKTGKQFTFLQGDNSTFNSQTSPEASVSQPLLGTANLSDRSGASHNVFHDRSTTQDSDCALSLLSSPTTQSSGISLSQMMPPSSMPLVRPLGTSLHNHSVEPMESVLVSSDQDDNVHCPGVFHLGYDGSAASDTPQTIPFHWE

SEQ ID NO: 18237 - protein, 70 aa, Metarhizium anisopliae
MSERQNGVVKWFNEEKGYGFITPESGPDLFVHFRAIEGSGFRSLKEGQAVTFEAVQGQKGMQADKVQVSN

SEQ ID NO: 18238 - protein, 448 aa, Zea mays
MDTHIGSVNGAASNQTVGCPASAPGCPMASTPAQPAATLSAGEASLGRHLARRLVQVGVNDVFAVPGDFNLTLLDHLIAEPGLRLVGCCNELNAGYAADGYARARGVGACAVTFTVGGLSVLNAIAGAYSENLPVICIAGGPNSNDYGTNRILHHTIGLPDFSQELRCFQTVTCHQAVVNNLDDAHEQIDTAIATALRESKPVYLSISCNLPGLPHPTFSRDPVPFFLTPRTSNKMGLEAAVEATVEFLNKAVKPVLVAGPKLRVAKAGKAFVDMVDASGYAYAVMPSAKGLVPETHPHFIGTYWGAVSTAFCAEIVESADAYLFAGPIFNDYSSVGYSFLLKKEKAIIVQPERVIVGNGPAFGCVMMKEFLSELAKRVNKNTTAYENYKRIFVPEGQPLESEPNEPLRVNVLFKHVQKMLTGDSAVIAETGDSWFNCQKLKLPEGCG

SEQ ID NO: 18239 - protein, 326 aa, Zea mays
MEPHHANKPRPKLSATKHSKFISCKLYISESRNATAVDAVERASKSDPQVVVVSQFGDHHYNRFRYTLVSYIVVVDGGGSSAAGEATVVHSPIRKVLLAMIEAAFSSIDLESQSGAHPRIGVVDDLSFHPVGQATIEDAASLARQVASDIACIAAVPVFLYAAAHPAGKSVGAVRRELGYYRPNYRGNQWSGSVLPNVLPVKPDVGPAHVVSHKRGATTVGVTPWIENYNVPVLCKDVATVRRITRGVTGRSGGLPTVQALALFHGDDCTEIACLLDPDHASAYQVQTVVEQIAGDQGLEVEQGYYTDITKDEAPDKYLKIACADD

SEQ ID NO: 18240 - protein, 565 aa, Zea mays
MPSRSDSDSLLVRAEGMRDAALDYHGRPADRGATGGWRSALFIIAVEIAERFTFYGVSANLINYLTGPLGQGTAAAAAAINAWNGVAQLLPLLGGALADKWLGRYRTIVIASLLYILGLGMLAFSTFLSSGSGHQCTAAGGQICAPSGLKVTFFYVSLYIVAVAQGGHKPCVQAFGADQFDQTDPKETVSRSSFFNWWYFGMCAGTAVTLVLLSYVQDNIGWGLGFGIPCAVMAAALAVFLLGTRTYRYYVTAGQGLFARAGEAFAEWRSRRKAGQLVQDSQELDPPAADAPRFSAGVDVEEQAAVRNNGGLVKEAKAIIRLFPIWAACLLYAVAYSQSSTFFTKQAATLDRRIGRHVQVPPAALQSFISVTIVVIIPIYDRVLVPVSRRYSGKPSGITMLQRIGTGMFLSLLSMVIAALVEKHRLRVAGDAGLVDKPKVPVPMSLWWMVPQYVLFGAADVFTMVGLQEFFYDQVPDKLRSLGLALYLSIFGVGSFISSALVSVIDRVTTDRGGSWFSNNLNRGHVDYFYWLLAALSAVELLAYVFFAVTYKYKNRGAVHATVDG

SEQ ID NO: 18241 - protein, 419 aa, Zea mays
MASARGPCGISVRSDFSSACLIHKAGAPSNSVSGVMAVQVHRHRNKVRNGQAIRCAMATGKEQGAISTASSGDQTKGGLRGKLNKVVLAYSGGLDTSVIVPWLRENYGCEVVCFTADVGQGAIELEGLEKKAKASGACQLVVKDLKEEFVSEYIYPCLRAGAVYERKYLLGTSMARPVIAKAMVDVAKEVGADAVAHGCTGKGNDQGDILEDPANEPKEDMYMMSIAPENAPSKPEYLEIGIIAGVPVSINGRDLSPASLLAELNEIGGKHGIGRIDMVENRLVGMKSRGVYETPGGTIMAAAVRELESLTLDRETMQWKDIIALKYAELVYAGRWFDPLRQSFDAFMEKVTATTTGSVTLKLYKGSVNVASRKSPYSLYREDISSFENGEIYNQADAEGFIRLYGLPTRVRAMLEKGI

SEQ ID NO: 18242 - protein, 349 aa, Zea mays
MSVVIVVIYGANLTINGYMTTGSLTSFILYSLTVGSSVSALSGLYTTVMKASGASRRVFQLLDRVSSMTNSGDKCPINEKDGEVELDDVWFAYPSRPSHMILKGITLKLAPGSKVALVGPSGGGKTTIANLIERFYDPLKGRILLNGVPLVEISHQYLHSKVSIVSQEPTLFNCTIEENIAYGLEGTTNFADVESAAKMANAHNFICGFPDQYKTVVGERGIRLSGGQKQRIAIARALLMNPRVLLLDEATSALDAESEYLVQDAMDSLMKGRTVLVIAHRLSTVKSADTVAVISDGLIVESGTHDELLDRDGIYTALVKRQLQGPKFEATSSISEASEIEAEPSSNGQ

SEQ ID NO: 18243 - protein, 76 aa, Zea mays
MRAKHIFRDLKEDPYVVELDTRVDGRDIQSVLLDLVGRRTVPQVFVNGQHIGGSDDTVNALSNGQLQKLLGKSQSQ

SEQ ID NO: 18244 - protein, 648 aa, Zea mays
MGKNMRIKTAPKANRVPLLGDGETSRALSDLEEGSDVQPANVGFCRVIKLAKHDAGKLVLATAALLVASLSNLLVPKYGGKIIDIVSRDVRRPEDKAQALEDVKGTILYIVTIVLVGSVCTALRAWLFNSASERVVARLRKDLFSHLINQEIAFFDVTRTGELLSRLSEDTQIIKNAATTNLSEALRNVTTTAIGLGFMFSTSWKLTLLALVIVPVISVAVRRFGRFLRELSHQTQAAAAVASSIAEESFGAIRTVRSFAQEYHEISRYGEKVEETLKLGLKQAKVVGLFSGGLNAASTMSVVIVVIYGANLTINGYMTTGSLTSFILYSLTVGSSVSALSGLYTTVMKASGASRRVFQLLDRVSSMTNSGDKCPINEKDGEVELDDVWFAYPSRPSHMILKGITLKLAPGSKVALVGPSGGGKTTIANLIERFYDPLKGRILLNGVPLVEISHQYLHSKVSIVSQEPTLFNCTIEENIAYGLEGTTNFADVESAAKMANAHNFICGFPDQYKTVVGERGIRLSGGQKQRIAIARALLMNPRVLLLDEATSALDAESEYLVQDAMDSLMKGRTVLVIAHRLSTVKSADTVAVISDGLIVESGTHDELLDRDGIYTALVKRQLQGPKFEATSSISEASEIEAEPSSNGQ

SEQ ID NO: 18245 - protein, 508 aa, Zea mays
MGWLTKFFRGSTHNISEGQYHSRPAEDTAWNEPSSSPVVTDILSEFNNEDIDRAIALSLSEEEQRKEKAIDKDMHLEEDEQLARAIQESLNVESPPRRNGSANGGTMYHPPRETGNAYQPPRENGSANGGNAYHPLPFMFSSGFRACAGCHREIGHGRFLSCMGAVWHPECFRCHACSQPIYDYEFSMSGNHPYHKTCYKEQFHPKCDVCKQFIPTNMNGLIEYRAHPFWVQKYCPSHEMDGTPRCCSCERMEPRESKYVLLDDGRKLCLECLDSAVMDTNDCQPLYLEIQEFYEGLNMKVEQQVPLLLVERQALNEAMEGEKAGHHHLPETRGLCLSEEQTVSTILRPRMAGNKIMGMITEPYRLTRRCEVTAILILYGLPRLLTGSILAHEMMHAWLRLKGYRTLSPDVEEGICQVLAHMWIESEIMAGSGSSAASSSSGSSSSTSSKKGGRSQFEHRLGDFFKHQIETDTSMAYGDGFRTGNRAVLHYGLKRTLEHIRLTGTFPF

SEQ ID NO: 18246 - protein, 435 aa, Zea mays
MYSNFKEQAIEYVKQAVQEDNAGNYVKAFPLYMNALEYFKTHLKYEKNPKIKEAITAKFTEYLRRAEEIRAVLDEGGAGPGANGGDAAVATRPKTKGKDGDGGNGGDDSEQSKLRAGLNSAIITEKPNIKWNDVAGLESAKQALQEAVILPVKFPQFFTGKRRPWRAFLLYGPPGTGKSYLAKAVATEADSTFFSISSSDLVSKWMGESEKLVANLFQMARENAPSIIFIDEIDSLCGQRGEGNESEASRRIKTELLVQMQGVGHNDDKVLVLAATNTPYALDQAVRRRFDKRIYIPLPDLKARQHMFKVHLGDTPHSLTESDFESLARRTDGFSGSDVAVCVKDVLFEPVRKTQDAMFFFKADGDMWMPCGPKQPGAVQTTMQELASKGLAAKILPPPISRADFEKVLSRQRPTVSKKDLEVHERFTKEFGEEG

SEQ ID NO: 18247 - protein, 593 aa, Zea mays
MDTAIGSVPAASDAARHPAPSASAPRDATLGRHLARRLAEVGARDVFTVPGDFNLTLLDELEAEPGGVRLVGCCNELNAAYAADGYARARAGGVGACAVTFTVGGLSAINGVAGAFSENLPVVCIVGGPNSNDYGSNRILHHTIGLPDFTQELRCFQNVTCYQAVVNNLEDAHEQIDTAISTAIKESKPVYISISCNLPSIPHPTFSRHPVPFFLSPRLSNQMNLEAAVEAAAAFLNKAVKPVLVGGPKMRVSKAWEALAELADACGYPVAVMPSAKGLVPVHHSRFIGTYWGAVSTPFCAEIVESADAYLFAGPVFNDYSSVGYSLLLKKEKAIIVQPERVVVGHGPAFGCVLMKDFLHALATRLKKNTVAYENYRRIYVPPGEPLSSEPGEPLRVNVLFKHIQAMLSGDMAVITETGDSWFNCQKLKLPEGCGYEFQMQYGSIGWSVGATLGYAQAAKDKRVIACIGDGSFQVTAQEVSTMLRWGQNSIIFLINNGGYTIEVEIHDGPYNVIKNWNYTGLVEAFHNGEGACYTAKVRTEEELTEALEAALGPKKDCLCFIEVIVHKDDTSKALLEWGSRVSAANSRPPNPQ

SEQ ID NO: 18248 - protein, 448 aa, Zea mays
MCGGAILANLREPAPRRLTERDIWQQKKKLKRGGGGGRRSFAAEDDEDFEADFEVFEADSSDSDLELREGTDDDVVEIKPFTAKRTFSSDGLSTMTSAVARSAKRKRKNLYRGIRQRPWGKWAAEIRDPQKGVRVWLGTFNSPEEAARAYDAEARRIRGKKAKVNFPDAPAVGQKHRSGSASAKASKSSFGQKPIVKVAMNNLANTNASFFQSASYPSNLFVQHGNMPFVPAMNSTASVDDLIMNLHSDQGSNSFGCSDLGWENDTKTPDITSIAPISTIAEGDESAFVDSNSNSSFVLPALENSAVDLTDGLTDLESYMRFLLDGGPSDSVDSLLNLDGSQDVGSDMDLWSFDDMPIVVRFLLRILKLGHRSMYIGTRGIKTGGDWEAPAWHLGGSICSCLAQRCRSCILKLLGYRPVPYFSYLFMRAIYETEPFCFAFFSLLQYMV

SEQ ID NO: 18249 - protein, 288 aa, Laminaria digitata
LRGAGVDFGSFDILSDEQVRAGLKVYSNWPTFPQLYVKGVLVGGVDDAAKLAEGGDLKAQLAVAAGVDVGKATAAAADGSKSVQDRCKKLLASAETMVFMKGSPDAPRCGFSRTLVGLLRDEAIEFASFDILEDQDVRQALKELSNWPTYPQLYVKGELVGGLDILKEMKNDGPLAPQLGIKPKESLDSRLKGLISSRSIVLFMKGTPDAPQCGFSRTAIGLLRDEGVDFGTFDILEDQEVRQGLKKFSNWPTYPQLYAQGELLGGLDIMKEMNEAGELGSALRPQAS

SEQ ID NO: 18250 - protein, 470 aa, Sporisorium reilianum
MQSYSHLYESMNHSSASSSPHPTSPGGFNIPYTGSPSASHLGPGTPGSSNMAQNPLSSFGAFYIQHPTSSHSNHTPSASHHHQHLDSYSSTANTPHQHLSPGADHHSSSSASVAALSNSGRLSWANSPADSYHGVTSNATTHSSGADSHSSFANQKYPWDINPASMRPDAGHIGSPYSASDLLHPATASALGFDDDSGSGGNVRPRARKRTRAEDEPRSRLSSSSRSRTRPRIPSALSNANSPASDFHHSISSYHADPEDTDITAWINAGDAEDFSASHVSGADHSRLWSSFGPGIPTDATHAASPYHGSATASALPASLSNSRAQSIVDSDDFGYHASSALHAGPSNLGLSVSIHDQDALDTKSEVAPPVQDDAAPAEDEPLYVNAKQYQRILKRRATRARIEEQRKKDFLAYMHTRDQARKHGQGLDEEGKKPYLHESRHRHAVRRPRGPGGRFLTKAEMSQAAATAS

SEQ ID NO: 18251 - protein, 205 aa, Prochlorococcus marinus subsp. pastoris
MEVIKGLEGASTEMVERSKTIFFPGDPAERVYLIRRGAVRLSRVYESGEEITVALLRENSLFGVLSLLTGHRSDRFYHAIAFTRVEMITAPANSVLRAIEADASVGLLLLQGLSSRILQTETMIETLTHRDMSSRLVSFLMVLCRDFGVASEKGITIDLRLSHQAIAEAIGSTRVTITRLLGDLKDSGLLTIERKKITVFDPIAL

SEQ ID NO: 18252 - protein, 165 aa, Zea mays
MALAEADDGAVVFGEEQEALVLKSWAVMKKDAANLGLRFFLKVFEIAPSAEQMFSFLRDSDVPLEKNPKLKTHAMSVFVMTCEAAAQLRKAGKVTVRETTLKRLGATHLRYGVADGHFEVTGFALLETIKEALPADMWSLEMKKAWAEAYSQLVAAIKREMKPDA

SEQ ID NO: 18253 - protein, 159 aa, Gossypium hirsutum
MGFTEKQEGLVKESWEVLKQDIPHSSLRFFSLILEIAPGAKNMFSFLRESEEIPQNNPKLKAHAVKVFKMTCESAIQLREKGEVVVADTTLKYLGTVHVKSGVKDPHFEVVKEALLRTIEEAIGEEKWNEEMKNAWGEAYDQLAEAIKAEMKNHHDETA

SEQ ID NO: 18254 - protein, 156 aa, Solanum lycopersicum
MGFTDKQEALVRDSWEFMKQDIPQLSLRFFSLILEIAPVAKNMFSFLKDSDELPENNPKLRAHAVKVFKMTCESAIQLREKGEVVVGETTLKYLGSIHLQKRVADPHFEVVKEALLRTVKEATGNKWKDEMKEAWSEAYDQLASAIKAEMHAEAAA

SEQ ID NO: 18255 - protein, 161 aa, Brassica napus
MGEIVFTEKQEALVKESWEILKQDIPKYSLHFFSQILEIAPAAKDMFSFLRDTDEVPHNNPKLKAHAVKVFKMTCETAIQLREKGKVVVADTTLQYLGSVHFKSGVLDPHFEVVKEALVRTLKEGLGEKYNEEVEGAWSKAYDHLALAIKAEMKQEDSQKP

SEQ ID NO: 18256 - protein, 163 aa, Gossypium hirsutum
MATYEGKVFTEEQEALVVKSWTVMKKKTAELGLKFFLKIFEIAPSAKKLFSFLRDSNVPLEQNTKLKPHAMSVFVMTCESAVQLRKAGKVTVRESNLKKLGATHFKYGVVDEHFEVTKFALLETIKEAVPDMWSDEMKNAWGEAYDRLVAAIKIEMKACSQAA

SEQ ID NO: 18257 - protein, 160 aa, Medicago sativa
MGTLDTKGFTEEQEALVVKSWNAMKKNSAELGLKLFLKIFEIAPSAQKLFSFLKDSKVPLEQNTKLKPHAMSVFLMTCESAVQLRKSGKVTVRESSLKKLGANHFKYGVVDEHFEVTKFALLETIKEAVPEMWSPAMKNAWGEAYDQLVNAIKSEMKPSS

SEQ ID NO: 18258 - protein, 399 aa, Rickettsia prowazekii
MSIISTRLNSIKPSPTLAVVKKTLELKKAGVNIIALGAGEPDFDTPDNIKEVAITSIKDGFTKYTNVDGIPLLKQAIKNKFKRENNIDYELDEIIVSTGGKQVIYNLFMASLDKGDEVIIPVPYWVSYPDMVALSTGTPVFVNCGIENNFKLSVEALEHSITDKTKWLIINSPSNPTGAGYNCKELENIAKTLRKYPNVNIMSDDIYEHITFDDFKFYTLAQIAPDLKERIFTVNGVSKAYSMTGWRIGYGAGSKALIKAMTIIQSQSTSNPCSISQMAAIEALNGTQDYIKSNALNFQKKRDLALSILEEVTYFECYKPEGAFYLFVKCDKIFGTKTKSGRIIANSNNFSEYLLEEAKVAVVPGIAFGLDGYFRISYATSMQELEEACIRIKHACNAL

SEQ ID NO: 18259 - protein, 304 aa, Helicodiceros muscivorus
MGGHDSGRSDISFGGRFASSAFAACFAELCTIPLDTAKVRLQLQKKSVAGDGVSLPKYRGMLGTVATIAREEGLSALWKGIVPGLHRQCLFGGLRIGLYEPVKSFYVGEGFVGDVPLSKKILAGLTTGALAITVANPTDLVKVRLQAEGKLSPGIPRRYSGALNAYSTIVKQEGLGALWTGLGPNIARNAIINAAELASYDQVKQTILKIPGFSDNIFTHILAGLGAGFVAVCIGSPVDVVKSRMMGDSTYKSTLDCFIKTFKNDGPLAFYKGFIPNFGRLGSWNVIMFLTLEQVKKVFIKEAP

SEQ ID NO: 18260 - protein, 168 aa, Citrus unshiu
MASSREGHYRGVRKRPWGRYAAEIRDPWKKTRVWLGTFDTPEEAALAYDGAARSLRGAKAKTNFPAPVTNSLPLDLNAPSDTNTSNQHRWITPGHHRHQRFGFCEFLQTGVLKEINFADRQATSASAQTDAAVIDGAPVADNGSTPSFFGIVRRGLPIDLNEPPPLWL

SEQ ID NO: 18261 - protein, 238 aa, Citrus unshiu
MCGGSILGDFFPRHGGSRVTASDLSPNSPFAATKQLPHNFESTPFSDEHQSLAKIKRPQPPSYLNSCSASGDEKKPKRQRKNLYRGIRQRPWGKWAAEIRDPRKGVRVWLGTFNTAEEAARAYDKEARKIRGKKAKVNFPNEEDVFTVTPAAAAHAYHHHQHNHNPTPSPLPSLSQEDLFSRNNSSISSVGFGLYGYDLNPQIVTSGGDENSGTGSGSVSEGGYDSTELMLNCNPECQ

SEQ ID NO: 18262 - protein, 272 aa, Citrus unshiu
MCGGSILGDFFPRHGGSRVTASDLWPNSPFAATKQLPHNFESTPFSDEHQSLAKIKRPQPPSYLNSCSASGDEKKPKRQRKNLYRGIRQRPWGKWAAEIRDPRKGVRVWLGTFNTAEEAARAYDKEARKIRGKKAKVNFPNEEDVFTVTPAAAAHAYHHHQHNHNPTPSPLPSLSQEDLFSRNNSSISSVGFDLYGYDLNPQIVTSGGDENSGTGSGSVSEGGYDSTELMLNCNQNVNDGSFAQMKVKSPRTRRRRKGEKLKRKENEVPKAV

SEQ ID NO: 18263 - protein, 248 aa, Mirabilis jalapa
MLMMQLPREHSQEVTTEADVFEHHLLSDPEEEEEEEEEDDDGNQLSAGKKKKSCKNKRRFSDEQVRSLETIFATETKLEPKKKVQVAKELGLQPRQVAIWFQNKRARWKSKQIEKNYRVLKTNYDSLKVKFETMKEEKESLLKQLQELQNLLEKSNKSENSDCKDNSAVIGAELPVKSISLQDEVDHQGIIYSDDDRSGNMAYLGHDEPELMHFNDNMDCSSIKWCNFDAGNFFDQSNTATYWWDSWI

SEQ ID NO: 18264 - protein, 209 aa, Mirabilis jalapa
MEKRPNTTQENEVRKGPWTMEEDLILINYIVTHGEGVWNSLARSAGLKRTGKSCRLRWLNYLRPDVRRGNISPEEELLIMELHAKWGNRWSKIAKHLPGRTDNEIKNYWRTRIQKHLKRVENNSNSGQISPDHNDQASASHMQTSALTCSYTTDNDHAYMPCMSPSSYSNQAMEVSYMMNHHLQQDTNDQFCWTNPDQDLWSMQLFNAD

SEQ ID NO: 18265 - protein, 499 aa, Mirabilis jalapa
MAVTPTFFLCFFLFVAFVSLSSAQVQQKLMLPLSHSLSKTKFTSTHHLLKSTTIKSTARHHHHRTRHSNKLKNHHRHHQHQQQISLPLSPGTDYTLTFSINSQTLSVYMDTGSDIVWFPCSPFECILCEGKFEPGTLTPLNVSKSSLISCKSRACSTAHNSPSTSDLCAIAKCPLDEIETSDCSNYHCPSFYYAYGDGSLIAKLHKHNLIMPSTSNKPFSLKDFTFGCAHSALGEPIGVAGFGFGSLSLPAQLANLSPDLGNQFSYCLVSHSFDSTKLHHPSPLILGKVKERDFDEITQFVYTPMLDNPKHPYFYSVSMEAISVGSSRVRAPNALIRIDRDGNGGVVVDSGTTYTMLPTGFYNSVATELDRRVGRVFKRASETESKTGLSPCYYLEGNGVERLGLVVPRLAFHFGGNYSVVLPRRNYFYEFLDGEDEKKGRKVGCLMLMDGGDESEGGPGATLGNYQQQGFQVVYDLEERRVGFAPRKCASLWESLTQG

SEQ ID NO: 18266 - protein, 224 aa, Solanum lycopersicum; identical to SEQ ID NO: 582

SEQ ID NO: 18267 - protein, 281 aa, Physcomitrella patens subsp. patens
MGRGKIEIKKIENTTSRQVTFSKRRGGLLKKAHELAVLCDAEVALVIFSSTGKHFEFASSGSMRDIIERYRKSSDGAVKRGTNTDLLGREVIKLKQQVERLESSQRHMLGEDLSALKVSDLLELEQQLDQGASRVRARKNQLILEEIEDLRRKEHELMIANEALRKKIADAEGAAEAAARANFPDARLESPKPFASDFSRDMSVSSQLAASVYPHPNLLQAQRSQTSLQLGWLSEQQIPSTEEGCAGESSLKWDHPHFHIQNRLHANISPSVRTYKLHVDR

SEQ ID NO: 18268 - protein, 167 aa, Helianthus annuus
EFQVGPSVGISAGDELWVARYILERITEIAGVVVSFDPKPIPGDWNGAGAHTNYSTKSMRDEGGYEVIKKAIEKMGLKHKEHIAAYGEGNERRLTGRHETADINTSLWGVANRGASIRVGRDTEKEGKGYFEDRRPASNMDPYVVTSMIAETTIFVEQILKIIRFGP

SEQ ID NO: 18269 - protein, 166 aa, Helianthus annuus
EFQIGPSVGISAADEFWVARYILERVTEIAGVVVSFDPKPVPGDWNGAGGHTNYSTKSMREDGGYETIQKAIEKLGLRHEDHIAGYGEGNERRLTGHHETADINTSSWGVAKRGVSIRVGRDTAEEGKGYFEDRRPGSNMDPYVVTSMIAETTIIVEAFRLFCGSE

SEQ ID NO: 18270 - protein, 242 aa, Daucus carota subsp. sativus
MGRGKVQLKRIENKINRQVTFSKRRGGLLKKAHEISVLCDAEVALIVFSNKGKLFEYSTDSSMEEILERYERYSYAERQVIANDPESTGNWTLEYTKLKARIDLLQRDHRHYMGEDLDSLTLKEIQNLEQQLDTALKHIRSRKNQLIFESISDLQKKEKAIQEENGKLTKKIKEREKTMVQQAQWEKQNPSPNLSTFLMPQENPFLNIGGTFQGESSQGMTRNDLDLTLEPNHYPCNLRCFA

SEQ ID NO: 18271 - protein, 255 aa, Daucus carota subsp. sativus
MSFVDDQSGDLSLHERKSGRGKIEIKRIENTTNRQVTFCKRRNGLLKKAYELSVLCDAEVALIVFSNRGRLYEYANNSVRGTIERYKKANSDTPNTATVSEANTQYYQKEAARLRQQISNLQNSNRHLMGEALGAVPAKELKGLETKLQNGLSRVRSKKNELLFAEIEFMRKREIDLHNNNQYLRAKISENERAQQQMSLMPGASGSSEQYRDVGQPHESFDARNYLQVNGLQPNNANYSSHQDHQTQHVPLQLV

SEQ ID NO: 18272 - protein, 156 aa, Helianthus annuus
EFQVGPSVGILAGDEIWAARYILERITEIAGVVVSFDPKPIPGDWNGAGAHTNYSTKSMREEGGYEIIKKAIEKLGLRHKEHIAAYGEGNERRLTGKHETANINTFKWGVANRGASIRVGRDTEKDGKGYFEDRRPASNMDPYVVTSMIAETTILL

SEQ ID NO: 18273 - protein, 286 aa, Oryza sativa Japonica Group
MGMANEESPNYQVKKGGRIPPRSSLIYPFMSMGPAAGEGCGLCGADGGGCCSRHRHDDDGFPFVFPPSACQGIGAPAPPVHEFQFFGNDGGGDDGESVAWLFDDYPPPSPVAAAAGMHHRQPPYDGVVAPPSLFRRNTGAGGLTFDVSLGERPDLDAGLGLGGGGGRHAEAAASATIMSYCGSTFTDAASSMPKEMVAAMADDGESLNPNTVVGAMVEREAKLMRYKEKRKKRCYEKQIRYASRKAYAEMRPRVRGRFAKEPDQEAVAPPSTYVDPSRLELGQWFR

SEQ ID NO: 18274 - protein, 346 aa, Pyrococcus horikoshii
MHLMEFPREVILGKNLIQEINNVIKRLKLGSPGLVVYGPITKKIAGSNVEKIVKEEFEVYSITVKEAHINEVERVISKIRDKGIKWAIAVGGGSIIDVTKLASFKMGIPFISFPTTASHDGIASANASIKGLNVKTSIKAKPPIAVIADIDVIKTAPKRYLAAGVGDIVSNITAVRDWKLAHKLKGEYFSEYAASLSLMSAKMVIRDAEIIRLGQDEGIRKVVKALISSGVAMSIAGSSRPASGAEHLFSHALDMLLDKPALHGEQTGIGTIIMAYLHGINWKKIRDTLKIVGAPTTAYELGIDPEIIIEALTIAHTIRPERYTILGKEGITREAAEKAAKITGVI

SEQ ID NO: 18275 - protein, 346 aa, Pyrococcus furiosus
MHIMEFPREVILGKNVISETVNVAKRLSFSSPVLVVYGPKTKEIAGKDVERVLKEEFDVHSVIVKEATINEVEKVEGIIRDNKVKWAIAVGGGTIIDVTKLASYRAGIPFVSFPTTASHDGIASANASIKGLGTKTSIKARPPVAVIADIRIIKSAPRRYLAAGVGDVISNITAVRDWKLAHKIKGEYFSEYAAALSLMSAKMVMRDAEIIRIGDDEGVRKVVKALISSGVAMSIAGSSRPASGAEHLFSHALDLLLEKPALHGEQTGIGTIIMAYLHGINWRKIKETLQKVGAPTTAYELGVDPEIIIEALTIAHTIRPERYTILGRDGLTREAAERAAKITGVI

SEQ ID NO: 18276 - protein, 421 aa, Methanosarcina acetivorans
MRSHLVKPGSVYDGIEPGELGESTESVQDRVRQLESRNSFLEEQCSQIESEKRYLENQKIKYEREIRKLQSELDRMKTSPLIIGTVIDVIKNDRIIVRSSNGPQFLVNVSQYIDEKKLLPGAKVALNQHTLAIAEVIPSTEEPFVAAMEVIESIEVDYDQIGGLDEQIQELQEAVELPLIEPERFARIGIEPPKGVLLYGLPGTGKTLLAKAVAHRTNATFIRVVGSELVQKYIGDGSKLVREIFEMARKKAPSIIFIDELDSIAARRLNETTGADREVQRTLMQLLAEMDGFDKRKNIRIIAATNRPDVLDPAILRPGRFDRLVHVPMPGIEARGKILKIHCGKMTLAGDIDFKKLAKVTEGMSGADLKAIATEAGMFAVRKDKALVEMEDFLEAVEKVSMAADTQKMMPGNLPETTMFV

SEQ ID NO: 18277 - protein, 174 aa, Malus x domestica
MPRDRDPLVVGRVVGDVLDPFTRSVSLRVTYGNKEVNNGCELKPSQVVHQPRVDTGGDDLRTFYTLVMVDPDAPSPSDPNLKEYLHWLVTDIPATTAASFGQEIVCYESPRPTVGIHRFVFVLFRQLGRQTVYAPGWRQNFNTRDFAELYNLGLPVAAVYFNCQRESGSGGRRR

SEQ ID NO: 18278 - protein, 330 aa, Yersinia pestis KIM
MKKQFIQKQQQISFVKSFFSRQLEQQLGLIEVQAPILSRVGDGTQDNLSGSEKAVQVKVKSLPDSTFEVVHSLAKWKRKTLGRFDFGADQGVYTHMKALRPDEDRLSAIHSVYVDQWDWERVMGDGERNLAYLKSTVNKIYAAIKETEAAISAEFGVKPFLPDHIQFIHSESLRARFPDLDAKGRERAIAKELGAVFLIGIGGKLADGQSHDVRAPDYDDWTSPSAEGFSGLNGDIIVWNPILEDAFEISSMGIRVDAEALKRQLALTGDEDRLELEWHQSLLRGEMPQTIGGGIGQSRLVMLLLQKQHIGQVQCGVWGPEISEKVDGLL

SEQ ID NO: 18279 - protein, 461 aa, Yersinia pestis KIM
MIQVAPQQTRDAPSATVVAKFGGTSVASFDAMSRSADVVLSNPDVRLVILSASAGITNLLVALADGSEPEKRADHLEDIRHIQYDIIARLTDSTVIREEIDRMLENIAMLSEAASLATSPALTDELVSHGELMSTLLFVELLRQRQVAVEWFDVRKVMRTNDRFGRAEPDTSALAELAQTLLAPRIEDAIVVTQGFIGSEGKGRTTTLGRGGSDYTAALLGEALNVSRIDIWTDVPGIYTTDPRVVPAAKRIDKIAFEEAAEMATFGAKILHPATLLPAVRSDIPMFVGSSKDPAAGGTLVCNETYNPPLFRALALRRKQTLLTLHSLNMLHARGFLAEVFNILARHSISVDLITTSEVSVALTLDTTGSTSTGDSLLTTSLLTELSSLCRVEVEEDLALVAIIGNNLSQACGVGKEVFGVLDPFNIRMICYGASSHNLCFLVPGNDADKVVQTLHYNLFE

SEQ ID NO: 18280 - protein, 404 aa, Yersinia pestis KIM
MFHLDTYGTLVAACLVLLLGRKLVQTVPFLKKYTIPEPVAGGLLVAFMMLLVQKTLGWEVSFDMSLKDPLMLAFFATIGLNANLASLRAGGKALSIFVFIVVGLLLVQNTIGIVLAKLMGLDPLMGLLAGSITLSGGHGTGAAWSKLFSERYGFENATEVAMACATFGLVLGGLIGGPVARYLVKHSSTPEGTPDDSAVPSAFEKPSAGRMITSLVLIETIAMISICLMAGNLIAGWLQGTMFELPIFVCVLFVGVILSNTLSASGFYRVFDRAVSVLGNVSLSLFLAMALMSLKLWELASLALPMLVILSVQALAMALYAIFVTYRIMGKNYDAAVLAAGHCGFGLGATPTAIANMQAITDRFGPSHLAFLVVPMVGAFFIDIVNAIVIKLYLLLPIFPAVTG

SEQ ID NO: 18281 - protein, 357 aa, Yersinia pestis KIM
MLRKAWSESNQHTYSVKDDGNTNIGRILSMSTFDLQPGVDFQQAGKQVLQIEREGLAQLDQYINEDFSRACEAIFRCHGKVVVMGMGKSGHIGCKIAATFASTGTPAFFVHPGEASHGDLGMITPQDIVLAISNSGESNEILTLIPVLKRQKILLICMSSNPESTMGKAADIHLCINVPQEACPLGLAPTTSTTATLVMGDALAVALLKARGFTQEDFALSHPGGALGRKLLLRISDIMHTGTEIPTVSPDASLRDALLEITRKSLGLTVICDDSMRIKGIFTDGDLRRVFDMGIDLNNAKIADVMTRGGIRVPPNILAVDALNLMESRHITALLVADGDQLLGVVHMHDMLRAGVV

SEQ ID NO: 18282 - protein, 296 aa, Yersinia pestis KIM
MKQLQRIGFIGLGKMGTPMVQRLVKAGFELYLCDADITKVQILTAELNAESLTVDNAASLDALITMLPNSEAVEQVLLGSDGISGWVAQLSQAAVVIDMSSSDPERSRRLAILLAVWELDYLDAPVSGGVKKAQNGTLSILIGGEDRVLKSCYTALAAMGEQILFVGPAGSGHAAKALNNYVSATGLLATIEALHVAQRFGIEPEVMTEVLNTSTGRSNTSENKVRQFMLNGSYASGFTLQLMNKDLHIARNLAQRLNYPMRLGMHCVDVWDEVSRRATPMADHTEMYRLLIDKEP

SEQ ID NO: 18283 - protein, 102 aa, Yersinia pestis KIM
MSLLLSAQVRHPLKDRPRSLHYCGKIIEGNISMSNKMTGLVKWFDAGKGFGFITPADGSKDVFVHFSAIQSNDFKTLDEGQNVEFSIENGAKGPSAVNVIAL

SEQ ID NO: 18284 - protein, 95 aa, Yersinia pestis KIM
MPHKFYPSLSSRLWRQLKIIEGSISMSNKMTGLVKWFDAGKGFGFITPADGSKDVFVHFSAIQSNDFKTLDEGQNVEFSIENGAKGPAAVNVIAL

SEQ ID NO: 18285 - protein, 201 aa, Yersinia pestis KIM
MSQNKEWLAASDAWMIYSRELAALKENVDQQVWLQVLDALAECRGKIAVTGVGTSGIAARKVAHMLACVEQPAIYLNATDAAHGDLGFLGAQDIIILISRGGNSDELTRLLPTLQRKQVKIISVTENEQSAIAQVSALVLKTHVKQEIDPLNMLATTSIVLVLALFDAICACLMARTGFSKETLLAVHPGGDVGMVLRKQQ

SEQ ID NO: 18286 - protein, 811 aa, Yersinia pestis KIM
MNATAVAAAATGRQLHKFGGSSLADVKCYLRVANIMANYSHPGDLMVVSAAGSTTNQLISWLKLSQNDRLSAHQVQQSLRRYQHDLINGLLPPEMAEPLISEFIHDLERLAGLLDNKIDDVIYAEVVGHGEIWSARLMSALLNKLDMDAVWLDARRFLRAERAAQPQIDESRSYPLLQQLMAQHPHQRLVVTGFISRNEAGETVLLGRNGSDYSATQVGALAGAERVTIWSDVAGVYSADPRKVKDACLLPLLRLDEASELARLAAPVLHTRTLQPVSGSDIDLQLRCSYQPEQGSTRIERVLASGLGAKIVTSHDDVCLIELQIASHHDFSLAQKEIDLLLKRAQIKPLATGIHPDRNLLQLCYTSEVVNSALRVLEDAALPGKLSLREGLALVALVGAGVSKNPLHSHRFYQQLKDQPVEFVWQAEDGISMVAVLRLGPTEHLIQGLHQSLFRAEKRIGLMLFGKGNIGARWLELFAREQKSLSARSGFEFVLAGVVDSRRSLLSYDGLDASRTLAFYNDEAKEQDEESLFLWMRAHPFDDLVVLDVTASPSLAEQYLDFASYGFHVISANKLAGASSSNNYRQIRDAFAKTGRHWLYNATVGAGLPVNHTVRDLRDSGDSILAISGIFSGTLSWLFLQFDGSVPFTELVDQAWQQGLTEPDPRVDLSGQDVMRKLVILAREAGYDIEPNQVRVESLVPAGAESGSVDQFFENGEALNQQMIQRLEAAKEMGLVLRYVARFDANGKARVGVEAVRTDHPLASLLPCDNVFAIESRWYRDNPLVIRGPGAGRDVTAGAIQSDLNRLSQLL

SEQ ID NO: 18287 - protein, 428 aa, Yersinia pestis KIM
MKQLNFVNAIISSFVLLVLASFVMGLQLQLDGTRLVVQGASEVRWLWIGAGCLVVFCFQLVRPLIQQGIKKVSGPAWVLPSFDGTTPRQKLLAAVVIIAAVAWPFLVSRGSVDIATLTLIYVMLGLGLNVVVGLSGLLVLGYGGFYAIGAYTYALLNHYYGLGFWESLPLAGITAALSGFLLGFPVLRLRGDYLAIVTLGFGEIVRILLLNNTEITGGPNGISQIPKPTLFGLEFSRTAKDGGWDTFHNFFGLTYDPSHRIIFLYLVALLLVILTLFVINRLLRMPLGRAWEALREDEIACRSLGLSPTKIKLTAFTISAAFAGFAGTLFAARQGFVSPESFTFVESAFVLAIVVLGGMGSQFAVILAAVLLVVSRELMRDLNAYSMLLLGALMVLMMIWRPQGLLPMKRPQLKLKVADVKAKQGEQA

SEQ ID NO: 18288 - protein, 390 aa, Yersinia pestis KIM
MKFVDEAAILVVAGDGGNGCVSFRREKYIPNGGPDGGDGGDGGDIYLLADENLNTLIDYRFVKSFRAERGQNGQSRDCTGKRGKDITIKVPVGTRVLDQGTGEIVGDMVRHGQRLMVAKGGFHGLGNSRFKSSVNRAPRQKTMGTEGETRELMLELLLLADVGMLGLPNAGKSTFIRAVSAAKPKVADYPFTTLIPSLGVVRMDYEQSFVIADIPGLIEGASDGAGLGIRFLKHLERCRVLLHLVDLAPIDESDPAENAKVIVNELQQYSENLAEKPRWLVFNKIDLIDPEEAEKRAKAIVETLGWEGKYYMISAANRDNVNALCWDVMSFLNSQPKAMAIAESVPEKVEFMWDDYHREQLAEVEAEAEDDWDDDWDEEDDDGVEIIYER

SEQ ID NO: 18289 - protein, 647 aa, Yersinia pestis KIM
MSDMAKNLILWLVIAVVLMSVFQSFGPSESNGRRVDYSTFMSDVTQDQVREARINGREINVSKKDNSKYTTFIPVNDPKLLDTLLTKNVKVVGEPPEEQSLLASIFISWFPMLLLIGVWIFFMRQMQGGGGKGAMSFGKSKARMLTEDQIKTSFADVAGCDEAKEEVSELVDYLREPSRFQKLGGKIPKGVLMVGPPGTGKTLLAKAIAGEAKVPFFTISGSDFVEMFVGVGASRVRDMFEQAKKAAPCIIFIDEIDAVGRQRGAGLGGGHDEREQTLNQMLVEMDGFEGNEGIIVIAATNRPDVLDPALLRPGRFDRQVVVGLPDVRGREQILKVHMRRVPLDTDIDASVIARGTPGFSGADLANLVNEAALFAARGNKRVVSMVEFEKAKDKIMMGAERRSMVMTEAQKESTAYHEAGHAIIGRLVPEHDPVHKVTIIPRGRALGVTFFLPEGDAISASRQKLESQISTLYGGRLAEEIIYGPEKVSTGASNDIKVATSIARNMVTQWGFSEKLGPLLYAEEEGEIFLGRSVAKAKHMSDETARIIDQEVKLLVERNYQRARKLLLENMDVLHSMKDALMKYETIDAPQIDDLMNRKEVRPPAGWDNVTKNKSSDNDNTPTATMPADEPNTPTSGNTVSEQLGDK

SEQ ID NO: 18290 - protein, 466 aa, Yersinia pestis KIM
MMSDQQEGAELKRGLKNRHIQLIALGGAIGTGLFLGIAQTIKMAGPSVLLGYAIGGFIAFLIMRQLGEMVVEEPVAGSFSHFAYKYWGHFAGFASGWNYWVLYVLVAMAELTAVGIYVQYWWPEIPTWVSAAVFFLAINAINLANVKVYGEMEFWFAIIKVIAIIAMILFGGYLLISGRGGPEATVTNLWAQGGFFPNGIMGLVMAMAVIMFSFGGLELVGITAAEAEDPAKSIPKATNQVIYRILLFYIGSLAILLSLYPWGKVVEGGSPFVLIFDALDSNSVATVLNIVVLTAALSVYNSCVYCNSRMLFGLAKQGNGPKILLKVDGRGVPVIAIAVSAFATAFCVLINYLLPGRAFELLMALVVSALVINWAMISLAHLKFRAAKNRQGVIPKFKAFWYPFGNCLCLLFLTGILVIMFLTPSIRISVILIPVWVVVLAIGYILKNQSQRQNQQLSASSRKVTK

SEQ ID NO: 18291 - protein, 126 aa, Yersinia pestis KIM
MIRTMLQGKLHRVKVTQADLHYEGSCAIDQDFLEAAGILEYEAIDIYNVDNGQRFSTYAIAAERGSRIISVNGAAARCACVGDKLIICSYVQMSYAAARLHHPKVAYFEGENQLQRKAKAVPVQVA

SEQ ID NO: 18292 - protein, 262 aa, Yersinia pestis KIM
MNIKKRMLWLWAVLVLVQAPAVLADQLEKIQQRGVLRVAVPQDFPPFGSVGTDLQPQGYDIDMAQYLADKMKLKLQLVSVTSANRVPYLQTDKVDLVISSLGKNPEREKAIAFSRAYAPFFLGVFGAKDDELKQPEQLAGKTIGVTRGAVEDMVLSEIAPKAAQIRRYEDNNTTLSAYLSGQVNYLATGNLVISALARQNPKQAPVAKFMLKDSPCYIGLRQGEPALKAKVDALIGDALQDNTLNGLSEKWLKAPLPADLGA

SEQ ID NO: 18293 - protein, 407 aa, Yersinia pestis KIM
MEIILGVVMFTLIVLALTVMILFAKSKLVNTGDITVEINEDEDKSFTAPAGDKLLNMLSSHGIFVSSACGGGGSCGQCRVTIKEGGGDILPTELSHISKREAKEGCRLACQVNVKQNLKIELPEEIFGVKKWTCEVISNDNKATFIKELKLKIPDGDVVPFRAGGFIQIEAEPHTVKYADFDVPTEYRGDWDKFNLFRFESVVTEPTVRAYSMANYPEEHGIILLNVRIATPPPSVPDAPPGIMSSYIWSLKPGDKVVISGPFGEFFAKDTDAEMVFIGGGAGMAPMRSHIFDQLKRLHSKRKISFWYGARSRREMFYEEDFDQLQAENDNFRWHVALSDPQPEDNWTGYTGFIHNVLLENYLKDHPAPEDCEFYMCGPPMMNAAVIKMLKDLGVEDENIMLDDFGG

SEQ ID NO: 18294 - protein, 463 aa, Yersinia pestis KIM
MELPVKNKLKRGLTTRHIRFIALGSAIGTGLFYGSADAIRMAGPSVLLAYLIGGVVAFVIMRALGEMSVNNPQASSFSRYAQDYLGPMAGYITGWTYCFEILIVAIADVTAFGIYMGLWFPDVAHWVWVLSVVLIIGAVNMMSVKVFGELEFWFSFFKVATIIIMILAGIGIIVWGIGNGGQPTGIHNLWTNGGFFSNGFVGMLLSLQLVMFAYGGIEIIGITAGEAEDPKKSIPKAINSVPWRILVFYVGTLFVIMSIYPWNQVGTNGSPFVLTFQHMGITIAAGILNFVVITASVSAINSDVFGVGRMLNGMAEQGHAPKAFTAISKRGVPWVTVLVMMCAMLIAVYLNYIMPENVFLVIASLATFATVWVWIMILFSQIAFRRSLSKDQVKALDFPLRGGTFTSVLAIIFLVFIIGLIGWFPTTRISLYVGLVWIVLLLVGYYFKVKYQKKQATLIKNAD

SEQ ID NO: 18295 - protein, 431 aa, Yersinia pestis KIM
MMMKKLLSVLGLGTVALLPSWAMAAAPAVADKADNAFMMICTALVLFMTIPGIALFYGGLLRSKNVLSMMTQVMVSFALVCVLWILYGYSLAFSAGNAFFGSFDMAMLKGIELTSLSGSFYQYIHVVFQASFACITVALIVGSFAERIRFSAVLIFAALWFTFSYLPIAHMVWGGGFLAMDGALDFAGGTVVHINAAVAGLVGAYLLGKRAGFGKEAFKPHNLPMVFTGTAILYIGWFGFNAGSASAANEIAALAFLNTVVATAGAILSWVFAEWALRGKPSLLGACSGCIAGLVAITPAAGTVGVGGALIIGLVGGVAGLWGVVLLKKWLRVDDTCDVFGVHGVCGIVGCILTGVFTSASLGGTGYAAGVTMGHQVGVQLFSVGVTVVWSGVVAFVAFKIAGLIVGLRVPEEQEREGLDVNSHGENAYNQ

SEQ ID NO: 18296 - protein, 515 aa, Yersinia pestis KIM
MSQPLLKITDMAKSFSGVWALSNVQLTLEQGEIHALLGENGAGKSTLLKALSGAQPQTHGEIWFNGEMLALDDSPVERQNKGIITIYQEVNLLPNMTVAENMFLGREPRRRQVFVDEKAVNQEAQAILDYLQLNVSPTTAVARLSIAQQQMVEIARALTLNAKLIVMDEPSAALSDSEVESLHRVVRELKGRGVSIIYVTHRLHEVFQLCDRFTVFQDGRYTGSDEVAGTNVEKIIRLMVGRDVVFNRRPASETHHQDQPIRLSVQGLCREKPPLDPHGVALKDISFHVHAGEVLGIAGLVGAGRTEVARCLFGAGAFTSGNFEIDGVPYQPRDPMFALEQGIALVPEDRKKEGAVQGLSIRDNLTLSSLAGLLQWRFFVNTRKEDQLIETYRLALQIKMVNSEQAVRKLSGGNQQKVILARCMALNPRILIVDEPTRGIDVGTKSEVHQVLFDMAKQGVAVIVISSDLPEVLAVSDRIITLSEGRVTGEIHGDDASEERLMTMMTINHNALNAA

SEQ ID NO: 18297 - protein, 305 aa, Yersinia pestis KIM
MQMRKLALVLLLAGMTSSVAQAEDATAKADTAIDTLQKVKNNGVIVVGHRESSVPFSYYDNQQKVVGYSQDYSNLIVDAIRKELNAPNLEVKLIPITSQNRIPLLQNGTFDFECGSTTNNLERQQQAAFSNTIFVVGTRLLTKKDSEVKDFKDLAGKAVVVTSGTTSEVLLNKLNEKDNMNMRIISAKDHGDSFRTLESGRAVAFMMDDALLAGERAKAKKPDEWSIVGTPQSEEAYGCMMRKNDPAFKALLDKTIATAQTTGVAEKSFDRWFKNPIPPKNLNMNFALSDEMKALFKAPNDKALN

SEQ ID NO: 18298 - protein, 554 aa, Yersinia pestis KIM
MCSIFGVLELKTDPIELRKKALEMSRLMRHRGPDWSGVWANDKAILAHERLSIVDVNTGAQPLYNAAHTHILAVNGEIYNHQALRQQYSDRYAFQTGSDCEVILALYQEKGPAFLDDLQGMFAFVLYDTEKDAYLIGRDHLGIIPLYMGHDEHGNMFVASEMKALVPVCRTIKEFPAGSYLWSQDGEIREYYHRDWFDYDHVKDNVTDKIQLANALEDAVKSHLMSDVPYGVLLSGGLDSSVISAITKKFAARRVEDNERSEAWWPQLHSFAVGLIGSPDLRAAQEVANHLGTVHHEIHFTVQEGLDAIRDVIYHIETYDVTTIRASTPMYLMSRKIKAMGIKMVLSGEGSDEVFGGYLYFHKAPNAKELHEETVRKLLALHMYDCARANKAMSAWGVEARVPFLDKNFLDVAMRINPQDKMCGNGKMEKHILRECFESYLPHSVAWRQKEQFSDGVGYSWIDTLKEKAAEQVTDQQMETAHFRFPYNTPGSKEGYLYREIFEELFPLPSAAECVPGGPSVACSSAKAIEWDESFKNMDDPSGRAVGVHQDAYK

SEQ ID NO: 18299 - protein, 80 aa, Yersinia pestis KIM
MAQNNEGNIFMSNKMTGLVKWFDAGKGFGFISPADGSKDVFVHFSAIQGNDYKTLDEGQNVEFSIEQGQKGPSAVNVVAL

SEQ ID NO: 18300 - protein, 303 aa, Yersinia pestis KIM
MSEVEKTYCGFIAIVGRPNVGKSTLLNELLGQKISITSRKPQTTRHRIMGIHTEGPYQAIYVDTPGLHIEEKRAINRLMNRAASSSLGDVELVIFVVEGTHWTADDEMVVNKLRSLQCPVLLAINKVDNVTDKTKLLPHMQFLSQQMNFLDVVPISAEKGMNVDTIASIVRKHMPEAEHHFPEDYITDRSQRFMASEIIREKLMRFLGEELPYSVTVEIEQFVPNERGGYNIHGLILVEREGQKKMVIGNKGSKIKVIGTEARQDMERMFEAKVHLELWVKVKSGWADDERALRSLGYTDDLK

SEQ ID NO: 18301 - protein, 396 aa, Yersinia pestis KIM
MLDTQTIAIVKSTIPLLAATGPKLTAHFYERMFKHHPELKNIFNMSNQSSGDQREALFNAICAYATNIENLAALLPTVERIAQKHTSLNIQPEHYPIVGEHLIATLDELFSPGQAVLDAWAKAYGVLADVFIQRESQIYQQSETETGGWRTLRRFRIIKKEQQSEVICSFVLAPEDGGQVLHYKPGQYLGIYIEHESLEFQEIRQYSLTTAPNGKTYRIAVKREEQGTVSNLLHRELNEGDIVRIAPPRGDFFLDVSPDTPVALISAGVGQTPMLSMLNTLYSQQHAAPVHWLHAAENGRVHAFADEVSAIAAKMPNLSRHVWYREPDLQDKHGEDYHSQGLMDLSSYQWLADDPKRHYYFCGPLPFMQFIGRQLLAQGIAPEQIHYECFGPHKVI

SEQ ID NO: 18302 - protein, 409 aa, Yersinia pestis KIM
MTESKVKTPIYLDYAATTPVDPRVAEKMMQYLTLDGIFGNPASRSHKFGWQAEEAVDIARNDVAALVGADPREIVFTSGATESDNLAIKGAANFYQKKGKHIITCKTEHKAVLDSCRQLEREGFEVTYLAPQPNGIIDLKQLEATMREDTILVSIMHVNNEIGVVQDIAEIGEMCRSRGIIFHVDATQSVGKLPIDLSKLKVDLMSFSAHKVYGPMGIGALFVRRKPRIRIEAQQHGGGHERGMRSGTLPVHQIVGMGEAYRIAKEEMESEAARLRSLRLRLWNGIKDIEEVYLNGSLENGAPGILNVSFNYVEGESLIMALKDLAVSSGSACTSASLEPSYVLRALGMNDELAHSSIRFSLGRFTTEEEIDYAIALVHKSIGRLRDLSPLWDMFKQGVDISSIEWSHH

SEQ ID NO: 18303 - protein, 759 aa, Yersinia pestis KIM
MDEQLKQSALDFHQFPVPGKIQVSPTKPLATQRDLALAYSPGVAAPCLEIAADPLAAYKYTARGNLVAVISNGTAVLGLGNIGALAGKPVMEGKGVLFKKFSGIDVFDIEVDELDPDKLIDIIASLEPTFGGINLEDIKAPECFYIEKKLRERMKIPVFHDDQHGTAIICTAAVLNGLRVVKKDISDVKLVVSGAGAASIACLNLLVALGLKQHNIIACDSKGVIYKGREANMAETKAAYAIDDNGQRTLGDVMPGSDIFLGCSGSGVLTPEMVKTMAPNPLILALANPEPEILPPLAKAVRPDAIICTGRSDYPNQVNNVLCFPFIFRGALDVGATTINEEMKLACVHAIADLALAEQSDVVASAYGEQDLSFGPEYIIPKPFDPRLIVKIAPAVAKAAMASGVATRPITDFNAYVEKLSEFVYKTNLFMKPIFSQAKKEMKRVVLAEGEEERVLHATQELISQGLAYPILIGRPSVIETRLKKLGLQISAGKDFEVVNNESDPRFNEYWHEYYQIMKRRGVSQEQARRAVIGNPTLIGSIMVHRGEADAMICGTIGTYHEHYDVVEKVFGFREGAHVAGAMNALLLPSGNTFIADTYVNNDPTAEQLAEITLMAAETVRRFGIEPKVALLSHSSFGTSDCPAARKMRQTLALVNQMAPELEIDGEMHGDAALVESIRHNLMPDSPLKGSANILIMPNMEAARISYNLLRVTSSEGVTVGPVLMGITKPVHILTPIASVRRIVNMVALAVVEAITLRP

SEQ ID NO: 18304 - protein, 717 aa, Yersinia pestis KIM
MSRTIMLIPTGTSVGLTSVSLGVIRSMEQKGVSLSVFKPIAQPRAGNDAPDQTTTIIRANSSITAAEPLNMNYVETLLSSNQQDVLMEEIVARYHENTKDAEVVLVEGLVPTRKHQFANALNYEIAKTLNAEIVFVIALGNDSPDQLKERIELARSSFGGSKNKNITGVIINKLNAPVDEQGRTRPDLSEIFDDSTKASVANIDPSQLFANSPIPVLGCVPWSFELIATRAIDMAKHLNARIINEGDIKTRRVKSVTFCARSIPHMLEHFRPGSLLVTSADRPDVLVSACLAAMNGVEIGAILLTGGYAIDDRINNLCERAFQTGLPVFMVDTNTWQTSLSLQSFNLEVPADDHERVEKLQNYVASHISSEWIDSLTAASERPRRLSPPAFRYELTELARKAGKRIVLPEGDEPRTIKAASICAERGIATCVLLGNPEEIQRVATSQGVELGKGVEIIDPVAVREQYVPRLVELRKSKGMTEVVAREQLEDNVVLGTLMLEKGEVDGLVSGAVHTTANTIRPPLQLIKTAPGSSLVSSVFFMLLPDQVLVYGDCAINPDPTAEQLSEIAIQSADSAAAFGIEPRVAMISYSTGNSGAGSDVEKVREATRLAQEKRPDLIIDGPLQYDAAIMADVAKSKAPNSPVAGRATVFIFPDLNTGNTTYKAVQRSADLISIGPMLQGMRKPVNDLSRGALVDDIVYTVALTAIQSAQADSAAS

SEQ ID NO: 18305 - protein, 400 aa, Yersinia pestis KIM
MSSKLVLVLNCGSSSLKFAIIDATNGEEHISGLAECFHLPEARIKWKVDGGKQEAALGAGAAHSEALNFIVNTILAQKPALSAQLTAIGHRIVHGGEKFTSSVIVTEDVIQGIKDSIPFAPLHNPAHLIGIAEALKSFPNLADKNVAVFDTAFHQTMPEESYLYALPYSLYKDHGIRRYGAHGTSHFYVSQEAAKILNKPLEELNVITCHLGNGGSVTAVRNGKCVDTSMGLTPLEGLVMGTRSGDLDPAIIFHLHDAMGMSVDQINTLLTKESGLLGLTEVTSDCRYVEDNYATKADAKRAMDVFCHRLAKYIGSYTALMDGRLDAVVFTGGIGENAAMVRELTLDKLGLLGFEIDHERNMAARFGKSGTITKDSSRLALVIPTNEELVIAQDAARLTA

SEQ ID NO: 18306 - protein, 316 aa, Yersinia pestis KIM
MKHSKQAVLIIAPVMDYLTEKLEQTFTVHKLYQVTDHAEFLADQGKNIKGIVTRGDIGVTNEVLALLPEVQIISIFGVGTDAVDLDYTRERNIIVTTTPGVLTDDVADTALGLIIATSRRFYQASQFLRSGEWPNGSLPLSSKVTGKRLGIFGMGRIGRAIARRAVGFDMQIAYTDTVHDSSLPYQYVPDLISLAKQSDILVVAISGGKDSAGLVDKAIFAAMPNHGILINIARGSMVNQDDLISALQQQQIGGAGLDVFADEPHVPQALIEMDNVFLLPHIASATTDTRIQMSDIVFSNILAHFSGETAPTAITY

SEQ ID NO: 18307 - protein, 121 aa, Yersinia pestis KIM
MRKQEMTTIDKIQRQITENPILLYMKGSPKLPNCGFSAQAVQALSACGERFAYVDILQNPDIRAELPKYANWPTFPQLWVDGELVGGCDILMEMYQRGELQTLLKETADKYRSQEDQPAAE

SEQ ID NO: 18308 - protein, 560 aa, Yersinia pestis KIM
MKDITMRYTGAQLIVRLLEQQGITLVSGIPGGAALPLYDALGQSRIIRHVLARHEQGAGFMAQGMARATGETAVCLASSGPGATNLVTAIADAKLDSIPLVCITGQVPSSMIGTDAFQEVDTYGISIPITKHNYLVRDISELAQVIPQAFRIAQSGRPGPVWIDIPKDVQTAEIDLATLPPPGIADTPGPVDLSAIAQVAKMINQSVRPVLYLGGGIVSSGAHQQAIQLAELASLPTTMTLMALGTMPVDHPLSLGMLGMHAARSTNLIMQQADLLIVLGARFDDRAIGKAEQFCPHANIIHIDIDPAELGKIRCPHLAMNADIAQVLTHLLPMIDAQLRSDWRSTVADMQREFPFNQPNSENPLCHYGLIRAAAEALDDETIITTDVGQHQMWVAQAYPLHRPRQWLTSGGLGTMGFGLPAAIGAALAKPESKVVCFSGDGSLMMNIQEMATAAEEQLNIKIILMNNQSLGLVHQQQDLFFGKRIFAADYAYRTNFIHIAEGFGFSTCDLNTASDPYTALHEALNRPGPVLIHALINVDEKVYPMVPPGAANIDMIGGE

SEQ ID NO: 18309 - protein, 508 aa, Yersinia pestis KIM
MRIGVPRERLANEARVAATPKTVEQLLKLGFTVAIESGAGHLASFDDAAYQEAGAIITDTTDVWQSDLILKVNAPFEDEIALMREGSTLVSFIWPAQNPELLQKLAERQVTALAMDSVPRISRAQSMDALSSMANIAGYRAIVEAAHEFGRFFTGQITAAGKVPPAKVMVIGAGVAGLAAIGAAGSLGAIVRAFDTRPEVKEQVQSMGAEFLELDFEEEAGSGDGYAKVMSEAFIKAEMELFAAQAAEVDIIVTTALIPGRPAPRLITKEMVASMKSGSVIVDLAAQTGGNCELTVADEVTITENGVKIIGYTDLPSRLPTQSSQLYGTNLVNLLKLLCKEKNGEIDIDFDDTVIRGVTVVKTGEVTWPAPPIQVSAQPQAAKAAPIAKEETKPSSPWTKYIIMAVAIVLFGWLANVAPPEFLSHFTVFALACVVGYYVVWNVSHALHTPLMSVTNAISGIIVVGALLQIGHGGWVSFFSFIAVLIASINIFGGFTVTQRMLKMFRKN

SEQ ID NO: 18310 - protein, 399 aa, Yersinia pestis KIM
MYSQNPPIYLDNNATTALDPAVLQAMMPYLTHAYGNAASKSHPFGWEASQAVQRARTLIATAINAVSPADIIFTSGATESINLAILGLQYQGNWGHIITSMIEHKSVLDCCAKLADSGVSVTYLQPQRDGIVSLDTLFQAIRPDTRLVSIMTANNETGTLQKVAEIGALCRDKGILFHTDATQAFGKIALDMQRMNISMATFSAHKVYGPMGVGALYVNTADPHLMLSPLIVGGGHERGLRSGTLNVPGIVGFGRAAELAMENMSVESARLCDLRNRLRQHILDTVPNVQVNGHLTECLPGVLNVSFEGIDADSLLLELSDVALSSGSACTSDQQIPSHVLQALGASDEQIRGSVRFGLGRFNNESEIDYVCQRLENTVKTLRSMAPLSSATTTNETGV

SEQ ID NO: 18311 - protein, 321 aa, Yersinia pestis KIM
MPEVLLVPDMKLFAGNATPELAQRIANRLYTSLGDAAVGRFSDGEVSVQINENVRGGDIFIIQSTCAPTNDNLMELVVMVDALRRASAGRITAVIPYFGYARQDRRVRSARVPITAKVVADFLSSVGVDRVLTVDLHAEQIQGFFDVPVDNVFGSPILLEDMLQQNLENPIVVSPDIGGVVRARAIAKLLNDTDMAIIDKRRPRANVSQVMHIIGDVAGRDCVLVDDMIDTGGTLCKAAEALKERGAKRVFAYATHPIFSGNAVDNIRNSVIDEVIVCDTIPLSAEIKALKNVRTLTLSGMLAEAIRRISNEESISAMFEH

SEQ ID NO: 18312 - protein, 509 aa, Yersinia pestis KIM
MMSGKHSAETHHAAKKRWLDSHDTGYHKSMGLRHIQMIAIGGSIGTGLFLGTGARLQMAGPALALVYLVCGIFSFFILRALGELVLHRPTSGSFVSYAREFLGEKASYVAGWMYFLNWAMTGIVDITAVALYMHYWGTFSDVPQWLFALGALSIVATMNMIGVRWFAEMEFWFALIKVAAIALFLIVGVIFLGTGQSVAGHTTGIHLITDNGGFFPHGLLPALIMVQGVIFAFAGIELIGTAAGECKDPEKMLPKAINSVIWRIGLFYVGSVVLLVCLLPWHAYQAGQSPFVTFFSNLGVPYIGTIMNIVVLSAALSSLNSGLYSTGRILRSLSMGGSAPKFMSKMSPQSVPYAGILVTVGIYVLGVLLNYLVPSQVFEIVLNIASLGIISSWAFIIICQMKLRQAIKRGMAKPVSFKMPGAPVTSWLTLIFLAGVLVMMAFDYPNGTWTIASIPVLTLLLIAGWFSLRKRANEVAAAPIDVWSQEILFEEPDAQNVSPKELYEQKSVG

SEQ ID NO: 18313 - protein, 494 aa, Yersinia pestis KIM
MTMNTPMLVTFLVYILGMILIGLIAYRATNNFDDYILGGRRLGSVVTALSAGASDMSGWLLMGLPGAVFLSGISESWIAIGLTIGAYLNWKWVAGRLRVHTEANNNALTLPDYFTSRFEDKSKLLRVISAVVILVFFTIYCASGIVAGARLFESTFGMDYGTALWAGAAATIIYTFIGGFLAVSWTDTVQATLMIFALILTPIIVILAVGGIDTSMMVIAAKNPANIDMFKGLNLVAILSLLGWGLGYFGQPHILARFMAADSHRTIRSARRISMTWMILCLAGTIAVGFFGIAYFENNPEQAGNVSQNGERVFIELAKLLFNPWIAGILLSAILAAVMSTLSCQLLVCSSALTEDLYKAFLRKKASQKELVWVGRAMVLLVALIAIALAADPDNRVLGLVSYAWAGFGAAFGPVVLISVLWPRMTRNGALVGMLVGAITVLVWKQYGWLDLYEIIPGFLFASLAIFVVSLMGREPSNAITERFHKAEAEFKTV

SEQ ID NO: 18314 - protein, 199 aa, Yersinia pestis KIM
MSELITGQYLSEFINRFQLQLPQPDNVLTHSHYFSATNRRAAVLIPIICRPEPTLLLTRRADHLRKHAGQVAFPGGKADPDDQSLISTALREAEEEVAIPASVVHVLGKLAPLNSSSGYHVTPIVGLVPANIPFYGNDEEVAGLFEIPLHEALSLSRYHSLDIHREGINHRVYLSWYENQFIWGLTATIIRHLAQQVSI

SEQ ID NO: 18315 - protein, 503 aa, Yersinia pestis KIM
MFVPQPSNKPLSLMLAGLSVKKTAADSFMKCVVYSHQCVISATEGRMEQQLQNSSLKRGLKNRHIQLIALGGAIGTGLFLGIAQTINMAGPSVILGYAIGGFIAFLIMRQLGEMVVEEPVAGSFSHFAYKYWGDFAGFLSGWNYWAMFILVGMAELTAVGIYIQYWWPEIPTWVSAAVFFIIINAINLVNVRLYGETEFWFAIIKVAAIIGMIVFGAYLLASGSGGPAASVTNLWAQGGFMPHGFRGLIMAMAVIMFSFGGLEMVGITAAEAEDPRNSIPKATNQVVYRILIFYIGSLTVLLSLFPWNNVVEGGSPFVMIFDALDSPWVATALNVVVLTAALSVYNSGVYCNSRMLFGLASQGNAPKLLTKLNKRGVPIRSIALSALATSAGVVINYIMPGKAFELLMALVVSTLVINWVMICLAHLKFRKAKVKEGVVPRFKALWYPYGNYLCLVFLALILVIMYLTEGIRISVLMMPVWIALLWCGFVLTRRKCPKTVTSL

SEQ ID NO: 18316 - protein, 456 aa, Yersinia pestis KIM
MMTTILKHLPINQRVGIAFSGGLDTSAALLWMQKKGAIPYAYTANLGQPDEEDYEAIPRKAMEYGAEKARLIDCRKQLVAEGIAAIQCGAFHNTTAGVTYFNTTPLGRAVTGTMLVAAMKEDDVNIWGDGSTYKGNDIERFYRYGLLTNAELKIYKPWLDTDFIDELGGRHEMSEFMIQSGFDYKMSTEKAYSTDSNMLGATHEAKDLEFLNSSVKIVNPIMGVKFWDENVVVKAEEVTVRFERGYPVALNGVVFDDSVELMMEANRIGGRHGLGMSDQIENRIIEAKSRGIYEAPGMALLHIAYERLLTGIHNEDTIEQYHANGRVLGRLLYQGRWFDPQALMLRDSIQRWVASEITGEVTLELRRGNDYSILNTVSDNLTYKPERLTMEKGDSVFSPDDRIGQLTMRNLDITDTREKLFNYVETGLLTSSAATGLPQVDNNNLSSGRGLQDKRQ

SEQ ID NO: 18317 - protein, 463 aa, Yersinia pestis KIM
MAHDATVAVGTNQTGTNNRVQLRKTLTLVQVVMMGLAYLQPMTIFDTFGIVSGLTDGHVATSYAIALIAVLFTAVSYGKLVKRFPSAGSAYTYAQKSISPNVGFMVGWSSLLDYLFMPMINILLAKIYLEAIFPGVPSWIFVGALVSLMTLFNLRGINIVANLNSVIVVVQVAIMVVFMGLLIHGVYQGEGAGTLVSARPFYSENAHLVPMITGATILCFSFLGFDGISSLSEETPNAGKVIPKAIFLTALIGGIIFIAVSYCLQLYFPDISRFTDPEASQPEIMLFVAGKFFQSVILCFSCVTVLASGMAAHAGVSRLLYVMGRDGVFPEKVFGYVHPKWRTPAINVLLVGGVALSAISFDLVTATALINFGALVAFTFVNLSVIAQFYVRERRNSTFKDHFNYLILPMIGAGTVGVLWVNLESSSMTLGLVWGAIGLSYMVWKTRAFRRALPQFTEEPAQL

SEQ ID NO: 18318 - protein, 355 aa, Yersinia pestis KIM
MSQKFLFIDRDGTIIAEPPTDYQVDRLDKLALEPDVIPALLALQKADYKLVMITNQDGLGTSSFPQETFDPPHNLMMQILTSQGINFEQILICPHLPEDNCTCRKPKTALVESYLADGVMNSTNSYVIGDRETDLQLAENMGISGLRYQRDGLNWTQIAKQLTQRDRHAYVNRVTKETAIDVNVWLDREGGSKIKTGVGFFDHMLDQIATHGGFRMDIQVSGDLYIDDHHTVEDTALALGEAINIALGDKRGIGRFGFVLPMDECLARCALDISGRPHLEYKAEFNYQRVGDLSTEMVEHFFRSLSYAMACTLHLKTKGRNDHHRVESLFKVFGRTLRQAIRVEGNTLPSSKGVL

SEQ ID NO: 18319 - protein, 582 aa, Yersinia pestis KIM
MMNDKDLSTWQTFRRLWPTISPYKAGLIVAAIALILNAASDTFMLSLLKPLLDDGFGNSNSSILKWMPLAVIGLMVVRGVTGFVSSYCISWVSGKVVMHIRRRLFSHMMGMPVSFFDQQSTGTLLSRITYDSEQVAASSSSALVTVVREGASIIGLFIMMFYYSWQLSLILIVIAPIVSISIRLVSKRFRNISKNMQNTMGEVTTSAEQMLKGHKEVLIFGGQKVETERFDAVSNRMRQQGMKLVSASSISDPIIQLIASFALALVLYAASFPSVMETLTAGTITVVFSAMIALMRPLKSLTNVNTQFQRGMAACQTLFSILDMEQEKDEGKLEVERAKGDIEFRHVTFYYPGKDTPALNDINIHLEAGKTVALVGRSGSGKSTIANLLTRFYDVSEGSILLDGHDLRDYRLGALRNQVALVSQNVHLFNDTVANNIAYARNEQYSRAEIEEAARMAYAMDFINKMEHGLDTVIGENGIMLSGGQRQRIAIARALLRNCPILILDEATSALDTESERAIQAALDELQKNRTSLVIAHRLSTIEKADEIVVIEDGRIVERGVHAELLVQQGVYAQLNRMQFGQ

SEQ ID NO: 18320 - protein, 285 aa, Yersinia pestis KIM
MKADNPFDALLPSAMAKVAEDAGVYKATKHPMTTFYLAITAGVFISIAFVFYITATTGTAGVPFGFAKLVGGICFSLGLMLVVVCGGDLFTSTVLTTVAKASGRITWRQLATNWVNVYIGNLFGALFFVGLIWFAGQYTVANGQWGLNVLQTAEHKLHHTFIEAVCLGILANLMVCLAVWMSYSGRTITDKMLAMILPVGMFVASGFEHSIANMFMIPLGIVIKNFASPEFWQAIGSAPEQFAHLTVSNFIIDNLIPVTIGNIIGGGLLVGLTYWVIYLRGDQQH

SEQ ID NO: 18321 - protein, 356 aa, Yersinia pestis KIM
MRRLLPENDLIHCEAPMTDFIPTDSPTPFCPNRMQVHSIVQETPDVWSLRLINHDFYSYLPGQYALVSIRNSDETLRAYTLSSTPGLSPFIQLTVRCLPDGEGSRWLTQQVNVGDYLWLSDAQGEFTCANADDDHYLMLAAGCGVTPVISMCRALLAQRPQADIRVIFNVRTPADVIFANEWHTLLQRYPQQLKLTLMAESAATAGFIEGRINARIMQQVAPDIAHRRVMTCGPAPYMAWVEQYCQQQQVPADHFQQEQFRTADEVIDTSNELTMTISRPLRSVNVPVGTSLLFALEQHKIPVMAACRAGVCGSCKTHILHGKYTTTSTMTLTPEEIAQGYVLACSCQLQGDVQLA

SEQ ID NO: 18322 - protein, 444 aa, Yersinia pestis KIM
MSTDDQKVGLIPVTLMVAGNIMGSGVFLLPANLASTGGIAIWGWLVTIIGALALSMVYAKISSLDDSPGGSYAYARRAFGPFLGYQTNVLYWLACWIGNIAMVVIGVGYLSYFFPILKEPMVLTITCVVFLWIFVGLNIIGPKMITRVQAVATSLALIPIVGIALFGWFWFKGETYMAAWNVSGLGTFGAIQSTLNVTLWSFIGVETASVAAGVVKNPKRNVPIATVGGVLIAAVCYVLSSSAIMGMIPNAELRLSASPFGDAARLALGDTAGAVVSLCAAAGCLGSLGGWTLVAGQTAKAAADDGLFPPIFGKVNKAGTPVAGLLILGVLMTIFQISSISPNAAKEFGLVSSVSVIFTLVPYLYTCSALLLVGHGHLGNQVKTYVGITLIAFVYCIWAVVGSGAEEVMWSFVTLMVITALYTFNYNRTHKNPFPLDAPVKNGQ

SEQ ID NO: 18323 - protein, 571 aa, Yersinia pestis KIM
MMSQFNNEKIQLLLTQLQHIVGTRYLLTGERQTERYRTGFRSGKGVALAVVFPSTLLQQWQLLQACVAADTIIIMQAANTGLTEGSTPSGDDYDRPIVILNTLRLNNIQLLDDGKQVIGFPGSTLNQLEKRLKPYGREPHSVIGSSCIGASVVGGICNNSGGSLVQRGPAYTEMALYAQIDAQGELQLINHLGISLGNTPEEILQRLEQGQYGAEDIEQTGQQASDSEYATRVRDIDATTPSRFNADPRRLFEASGCAGKLAIFAVRLDTFPSEKQQQVFYIGTNQTQVLTELRRIILRDFKHLPIAGEYLHRDIFDIAETYGKDTFVMINSMGTNNMPRFFTLKGKIDARLNKIPHLVDHLTDRVMQGFSQILPNHLPKRLKTYRNQYEHHLLLKMSGDGITEAQQHLRAFFATAEGNFIACTADEGKKAFLHRFAAAGAAVRYHAVHADQVEDILALDIALRRNEKQWFETLPPEIEKCLIAKLYYGHFLCHVFHQDYIVKKGVDVKALKEKMLSLLNDKGAEYPAEHNVGHLYLAKPALKDFYQQIDPTNSFNPGIGKTSKRKRWQQD

SEQ ID NO: 18324 - protein, 188 aa, Yersinia pestis KIM
MTQSVPAIFLDRDGTVNVDHGYVHEIDNFQFIDGVIDACRELKEMGFALVLVTNQSGIARGMFTEEQFLSLTEWMDWSLADRGVDLDGIYFCPHHPDGSVAEFSETCECRKPLPGMLLQAQNELNIDMAASYMVGDKIEDMQAALAANIGTKVLVRTGKPVTAEGEAAADWVLNSLADLPKAIKARYK

SEQ ID NO: 18325 - protein, 250 aa, Vitis vinifera
MESLGVRKGAWTQEEDVLLRKCIEKYGEGKWHLVPLRAGLNRCRKSCRLRWLNYLKPDIKRGEFALDEVDLMIRLHNLLGNRWSLIAGRLPGRTANDVKNYWHSHHFKKEVQFQEEGRDKPQTHSKTKAIKPHPHKFSKALPRFELKTTAVDTFDTQVSTSRKPSSTSPQPNDDIIWWESLLAEHAQMDQETDFSASGEMLIASLRTEETATQKKGPMDGMIEQIQGGEGDFPFDVGFWDTPNTQVNHLI

SEQ ID NO: 18326 - protein, 636 aa, Yersinia pestis KIM
MGKIIGIDLGTTNSCVAIMDGTKARVLENSEGDRTTPSIIAYTQDGETLVGQPAKRQAVTNPQNTLFAIKRLIGRRFQDEEAQRDKDIMPYKIIAADNGDAWLEVKGQKMAPPQISAEVLKKMKKTAEDYLGEPVTEAVITVPAYFNDAQRQATKDAGRIAGLEVKRIINEPTAAALAYGLDKEVGNRTIAVYDLGGGTFDISIIEIDEVDGEKTFEVLATNGDTHLGGEDFDSRLINYLVEEFKKDQGMDLRTDPLAMQRLKEAAEKAKIELSSAQQTDVNLPYITADGSGPKHMNIKVTRAKLESLVEDLVNRSIEPLKVALQDAGLSVSDIQDVILVGGQTRMPMVQKKVADFFGKEPRKDVNPDEAVAIGAAVQGGVLSGEVKDVLLLDVTPLSLGIETMGGVMTPLITKNTTIPTKHSQVFSTAEDNQSAVTIHVLQGERKRAQDNKSLGQFNLDGIQPAPRGMAQIEVTFDIDADGILHVSAKDKNTGREQKITIKASSGLNEEEIQKMVRDAEANAEADRKFEELVQTRNQADHLIHGTRKQLEEAGDKLPAEDKTAIEEAMKGLEAALKGEDKAEIEAKTQALVQVSGKLLEMAQQQQAAAGGDAGDTSAKKEDDVVDAEFEEVKDKK

SEQ ID NO: 18327 - protein, 245 aa, Yersinia pestis KIM
MKPAILVVDDDTAICEVLRDVLNEHVFDVLLCHSGNEALQITATQPSIALILLDMMLPDINGLLVLQQVQKLRPSLPVVMLTGMGSESDMVVGLEMGADDYIAKPFNARVVVARVKAVLRRSEVLAIESSSVIESSSVKACGLQFNGWRLNTDRCQLMNPQQQQIDLTQGEYGLLLSLMQNARKVLSREKLLELTHRESLDVFDRTIDVLIMRLRRKIEVNPHQPTLIRTIRGVGYVFAADIIHA

SEQ ID NO: 18328 - protein, 271 aa, Yersinia pestis KIM
MKKNRAFLKWAGGKYPLVDDIRRHLPAGDCLIEPFVGAGSVFLNTEFESYILADINNDLINLYNIVKLRTDDFVRDARVLFTGDFNHSELFYQLRQEFNASTDAYRRALLFLYLNRHCYNGLCRYNLSGEFNVPFGRYKKPYFPEAELYWFAEKSQNAVFVCEHYQETLLKAVQGAVVYCDPPYAPLSATANFTAYHTNNFGIADQQNLARLAYQLSTESKVPVLISNHDTELTRNWYHQAASLHVVTARRTISRNILGRSKVNELLALYS

SEQ ID NO: 18329 - protein, 268 aa, Yersinia pestis KIM
MYTDTINKCAANAARIVKLAKESPLGFWIGSAMAGAYVGLGIILIFTLGNLIDPALRPLVMGATFGLALTLVIIAGSELFTGHTMFLTFGVKAGTIKSSQMWAVLPQTWLGNLLGSVFVALLYYYGGGNLLSVDTSLVHTAALAKTTAPAMTLFFKGVLCNWLVCLAIWMAIRVEGAAKFIAIWWCLLAFIASGYEHSVANMTLLALSWFGHHSEAYTLSGIGHNLLWVTLGNTLSGAVFMGLGYWYATPRAQRPQPATINAPHSAKS

SEQ ID NO: 18330 - protein, 472 aa, Yersinia pestis KIM
MRECTMKNDSSTLKRGLSARHIRFMALGSAIGTGLFYGSAEAIRLAGPAVLLAYLIGGAAVFMVMRALGEMAVHDPVAGSFGHYASRYLGPLAGFLTGWTYTFEMVVVALADVTAFGIYMGLWFPDAPQWVWVLSIIFFIGALNLCSVKVFGEMEFWLSLLKVAAIIAMIAAGLGIMMFGFGAGHDSTGVSNLWAHQGFMPNGITGVIASFAVVMFAFGGIEIIGVTASEAKDPGKVLPRAINTVPIRILLFYVLTLFVLMAIYPWNSIGQNGSPFVEIFSSLGINSAANILNLVVITAAISAINSDIYGAGRMMYGLAQEGLAPKSFSRLTRNGVPYMTILVMAITLLCGVVLNYLIPKNVFLVIASIATFATVWVWLMILVSQVAMRRSMSKAQVARLAFPVPFWPLAPILTILFMAFIIAVLGYFPATRIAMYVGLAWVALMTLAWWIWLRKAPSCVIQERAKSSEMPS

SEQ ID NO: 18331 - protein, 284 aa, Yersinia pestis KIM
MKQDLSIKKSAIALTLLAGLATLSGTAYADKLDDIKQAGVVRIAVFDSNPPFGYIDPQTKKLVGYDVDVANAIAKDLGVKVELRATNPANRIPLLASKKVDLIAANFTITDERAKEVNFSLPYFATGQKFIARKGVLKTPEDIGKLRIGADKGTVQEITLREHYPTAKVISYDDTPLAFTALRNGNVQAITQDDAKLVGLLGNIPEAQKADFEISPFSITKEYQGVGIPKGEDRLTAVVNETLIKLEKEGDAVKIYDRWFGPETNSAQPRGEFKFAPLDQQPKA

SEQ ID NO: 18332 - protein, 545 aa, Bacillus subtilis subsp. subtilis str. 168
MKGVYDMNQLHRRMGTFSLMMVGLGSMIGSGWLFGAWRAAQIAGPAAIISWVIGMVVILFIALSYSELGSMFPEAGGMVKYTQYSHGSFIGFIAGWANWIAIVSVIPVEAVASVQYMSSWPWEWAKWTSGLVKNGTLTGEGLAFASVLLLIYFLLNYWTVNLFSKANSLITIFKIIIPGLTIGALLFVGFHGENFTGGQSIAPNGWASVLTAVATSGIVFAFNGFQSPINMAGEAKNPGKSIPIAVVGSLFVATVIYVLLQIAFIGAVNPSDIAHGWSHLNFNSPFADLAIALNINWLVIVLYADAFVSPSGTGITYTATTSRMIYGMEKNKYMPSIFGKLHPIYGVPRQAMFFNLIVSFIFLFLFRGWGVLAEIISVATLISYITGPITVMTLRRTGKDLYRPLRLKGLNVIAPLGFIFASLVLYWARWPLTGQVLFIILIGLPIYFYYQAKAKWKGFGRNFKAGVWMVFYLLAMMVISYLGSDKFGGLNVIHYGWDMVLIAMVSLVFYVWALKSGYQTEYLKDAKEINSQLLNGQSEAAAGKE

SEQ ID NO: 18333 - protein, 449 aa, Bacillus subtilis subsp. subtilis str. 168
MGPAVTALSAGAADMSGWLLMGLPGAMFSTGLSGAWIVIGLCLGAWANWLYVAPRLRTYTEKAGNSITIPGFLENRFGDQTKLLRLFSGIVILVFFTFYVSSGMVSGGVLFNSILGMDYHTGLWIVTGVVVAYTLFGGFLAVSWTDFVQGIIMFAALILVPIVTFFHTGGAGDTVAEIRSVDPDMFNIFKGTSVLGIISLFAWGLGYFGQPHIIVRFMAITSVKEIKRARRIGMGWMILSAVGAVLTGLGGIAYYHQRGMTLKDPETIFIQLGNILFHPIITGFLISAILAAIMSTISSQLLVTSSSLVEDLYKSMFRRSASDKELVFLGRLAVLAVSIVALVLAWEKNNTILGLVSYAWAGFGASFGPVVLLSLFWKRMTKWGALAGMIVGAATVIIWANAGLSDFLYEMIPGFAASLLSVFFVSILTQAPSQAVTDQFNDYQDTMSQ

SEQ ID NO: 18334 - protein, 286 aa, Bacillus subtilis subsp. subtilis str. 168
MKIAVIGLGNMGQPIARNVLQAGYELTVYNRTKQKTEDLVTEGAQAADTPRLAAKSADIVITMLADDDSVSTVTFGEDGLLEGLAENGIHISMSTISVEFSEKLAAAHAEKGQFFLAAPVLGRPDAAAKAALRIITAGPAEAKQAAKPLLDSLSQQIFDVGEESKTANAAKISINFLLVSMLEALSESFLMMEKYGLEQKQFLEIASALFGSPVYQNYGTIMAEQKFEPAGFKMSLGLKDTNLALAAAKRVSANLPLAELAKSHFESGIEKGFGDLDWAALIKCIK

SEQ ID NO: 18335 - protein, 580 aa, Bacillus subtilis subsp. subtilis str. 168
MGVMKRYMQFVKPYKKQIFVTVLIGIVKFSIPLALPLLLKYVVDDIIQGGGTASDKTTSLFTIMAIMFALFLILRPPVEYYRQYFAQWTASKVLYDIRAKLFDHIQKLSLRFYANTRTGEVISRVINDVEQTKDFVITGLMNIWLDMLTILIVISIMLTLDVKLTLISIVLFPLYGISVKYFYGRLRKLTRERSQALAQVQGHLHERIQGMPVIRSFAIEDHEQAQFNEKNGHFLDKAIRHTNWNAKTFAVVNTITDLAPLIVIACAGYFVINGPLTVGTMVAFVGYIDRMYNPVRRLINSSTTLTQSIASMDRVFEFIDEPYELTDKPNAIKADQIRGGVEFQNVSFQYEKDKENILHDVSLKVNRGETVALVGMSGGGKSTLVSLIPRFYDVTSGRLLIDGTDIRDYEARSLRNQVGMVLQDTFLFSETIRENIAIGKPDATLEEIIEAAKAANAHEFIMSFPEGYETRVGERGVKLSGGQKQRISIARVFLKNPPLLILDEATSALDLESEHYIQEAMDKLAKDRTTFVVAHRLSTITHADKIVVMENGTIIEIGTHDELMDYESQYKHLFTIQNLN

SEQ ID NO: 18336 - protein, 398 aa, Bacillus subtilis subsp. subtilis str. 168
MRKGQMKLAGLSREVEENLNKGSWIRKLFDEGARLKKEFGEDQVFDFSLGNPIVEPPEAFKRALIEEAEKGSHGYIQNQGLLAAREKVAQFLGSRFEADFSAERIVMTVGAGGALNVALKSIVNPGEEVIILAPYFAEYKLYIENYGGKAVSCPLTSRFEIDIEAVRQSITPQTKGLILNTPHNPTGTVLSQKNIDDLGALLKEIEEKSGQTIYVLFDEPYSQLIYDEELANPFQSYHRVILASSFSKDLGIAGERLGYIGLDSRMPDADLLINAFVYCNRTLGFVNAPVMMQRAVARMDDLRVDASAYKERRDLMVDILKEAGFEFEMPKGGFFVFPKSPIEDEVAFCVHAAQKYKLLIVPSSGFGMSGHFRLSFSVPIEQIKNSRDIFISLYKDFA

SEQ ID NO: 18337 - protein, 476 aa, Bacillus subtilis subsp. subtilis str. 168
MKKKLLAFALCTGAYAALFAYSVNSEQKTATSEMTDVSRLMPVKIKQTVKGQEEEMLIDTVKEANRKNIKISIAGAQHSMGGHTYYEDGIVLDMTGYNKILSLDQEKKTIRVQSGATWNDIQKYVNPYGLAVKVMQSQNIFTIGGSLSANAHGRDIRYGSLIDTVKSFRLLKADGMIITVTPKDDLFTAVIGGYGLFGVILDVTLELTDDELYVMKTEKMNYSTYSDYFSKHVKGNPDVRMHLARISTAKKGFLKDMYVTNYVLANHQDQLSSYSELKEDEYTGATKFALGLSRRYEWGRNWLWDTQQSYFLSQNGTEISRNNVMRSESKFLEYENNDNTDVLQEYFVPVKEYGSYIDDLRQTLSDEDLNLLNITIRYVQKNEKADLSYAKDDMFSLVLLINEGFSKEDQADTARIIRRMTDVAIKHGGSYYLPYMTYQTKAQMRQAYPKSEAFFQKKRTYDPDERFMNYFYQRYK

SEQ ID NO: 18338 - protein, 393 aa, Bacillus subtilis subsp. subtilis str. 168
MEHLLNPKAREIEISGIRKFSNLVAQHEDVISLTIGQPDFFTPHHVKAAAKKAIDENVTSYTPNAGYLELRQAVQLYMKKKADFNYDAESEIIITTGASQAIDAAFRTILSPGDEVIMPGPIYPGYEPIINLCGAKPVIVDTTSHGFKLTARLIEDALTPNTKCVVLPYPSNPTGVTLSEEELKSIAALLKGRNVFVLSDEIYSELTYDRPHYSIATYLRDQTIVINGLSKSHSMTGWRIGFLFAPKDIAKHILKVHQYNVSCASSISQKAALEAVTNGFDDALIMREQYKKRLDYVYDRLVSMGLDVVKPSGAFYIFPSIKSFGMTSFDFSMALLEDAGVALVPGSSFSTYGEGYVRLSFACSMDTLREGLDRLELFVLKKREAMQTINNGV

SEQ ID NO: 18339 - protein, 404 aa, Bacillus subtilis subsp. subtilis str. 168
MKIIVQKFGGTSVKDDKGRKLALGHIKEAISEGYKVVVVVSAMGRKGDPYATDSLLGLLYGDQSAISPREQDLLLSCGETISSVVFTSMLLDNGVKAAALTGAQAGFLTNDQHTNAKIIEMKPERLFSVLANHDAVVVAGFQGATEKGDTTTIGRGGSDTSAAALGAAVDAEYIDIFTDVEGVMTADPRVVENAKPLPVVTYTEICNLAYQGAKVISPRAVEIAMQAKVPIRVRSTYSNDKGTLVTSHHSSKVGSDVFERLITGIAHVKDVTQFKVPAKIGQYNVQTEVFKAMANAGISVDFFNITPSEIVYTVAGNKTETAQRILMDMGYDPMVTRNCAKVSAVGAGIMGVPGVTSKIVSALSEKEIPILQSADSHTTIWVLVHEADMVPAVNALHEVFELSK

SEQ ID NO: 18340 - protein, 525 aa, Bacillus subtilis subsp. subtilis str. 168
MFRVLVSDKMSNDGLQPLIESDFIEIVQKNVADAEDELHTFDALLVRSATKVTEDLFNKMTSLKIVGRAGVGVDNIDIDEATKHGVIVINAPNGNTISTAEHTFAMISSLMRHIPQANISVKSREWNRTAYVGSELYGKTLGIVGLGRIGSEIAQRRRAFGMTVHVFDPFLTEERAKKIGVNSRTFEEVLESADIITVHTPLTKETKGLLNKETIAKTKKGVRLINCARGGIIDEAALLEALENGHVAGAALDVFEVEPPVDNKLVDHPLVIATPHLGASTKEAQLNVAAQVSEEVLQFAKGLPVMSAINLPAMTKDEFAKIKPYHQIAGKIGSLVSQCMKEPVQDVAIQYEGTIAKLETSFITKALLSGFLKPRVDSTVNEVNAGGVAKERGISFSEKISSSESGYDNCISVKVTGDRSTFTVTATYIPHFGERIVEINGFNIDFYPTGHLVYIQHQDTTGVIGRVGRILGDNDINIATMQVGRKEKGGEAIMMLSFDRHLEDKIVKELTNVPDIVSVKLIDLP

SEQ ID NO: 18341 - protein, 363 aa, Bacillus subtilis subsp. subtilis str. 168
MKVLHDEKRILTINPGSTSTKIGVFHNERSIFEKTLRHNIEELQRFDRIIDQYEFRKNHILETLHEQGINISKFDAVCARGGLLRPIEGGTYVVNDEMIEDLKSGYAGQHASNLGGIIAREIADGLNIPSYIVDPVVVDEMSVLAKVSGMPEIERKSIFHALNQKAVARKAAASLGKRYENMKMIITHMGGGITIGVHDRGRVVDVNNGLHGEGPFSPERAGTVPAGDLVDLCFSGEYTKEEIMKKLVGTGGLLGYLGTNDAVKVEQMIQGGDEKARFIYDAMAYQVAKEIGAASAALKGEVEAIVLTGGLAYGKSFVSAIRSYIDWISDVLVYPGENELQSLAQGALRVLQGEEQSKQYRIE

SEQ ID NO: 18342 - protein, 482 aa, Bacillus subtilis subsp. subtilis str. 168
MIGNSSKDNFGQQQKLSRGLKNRHIQLMAIGGAIGTGLFLGSGKSIHFAGPSILFAYLITGVFCFFIMRSLGELLLSNAGYHSFVDFVRDYLGNMAAFITGWTYWFCWISLAMADLTAVGIYTQYWLPDVPQWLPGLLALIILLIMNLATVKLFGELEFWFALIKVIAILALIVTGILLIAKGFSAASGPASLNNLWSHGGMFPNGWHGFILSFQMVVFAFVGIELVGLTAGETENPQKVIPKAINQIPVRILLFYVGALFVIMCIYPWNVLNPNESPFVQVFSAVGIVVAASLINFVVLTSAASAANSALFSTSRMVYSLAKDHHAPGLLKKLTSSNVPSNALFFSSIAILIGVSLNYLMPEQVFTLITSVSTICFIFIWGITVICHLKYRKTRQHEAKANKFKMPFYPLSNYLTLAFLAFILVILALANDTRIALFVTPVWFVLLIILYKVQTRRGHKVKIKKRQGILTPLSFYMCQTLN

SEQ ID NO: 18343 - protein, 511 aa, Bacillus subtilis subsp. subtilis str. 168
MKHISSVFWIVIAITAAAVLWGVISPDSLQNVSQSAQAFITDSFGWYYLLVVSLFVGFCLFLIFSPIGKIKLGKPDEKPEFGLLSWFAMLFSAGMGIGLVFYGAAEPISHYAISSPSGETETPQAFRDALRYTFFHWGLHAWAIYAIVALCIAYFQFRKGAPGLISSTLSPILGDKVNGPIGKAIDCIAVFATVVGVSTSLGLGATQINGGLNYLFGIPNAFIVQLVLIIIVTVLFLLSAWSGLGKGIKYLSNTNMVLAGLLMLFMLVVGPTVLIMNSFTDSIGQYIQNIVQMSFRLTPNDPEKREWINSWTIFYWAWWISWSPFVGIFIARVSRGRTIREFLIGVLVTPCILTFLWFSIFGVSAMDLQQKGAFNVAKLSTETMLFGTLDHYPLTMVTSILALILIAVFFITSADSATFVLGMQTSYGSLNPANSVKLSWGIIQSAMAAVLLYSGGLAALQNTAILAALPFSIVILLMIASLYQSLSKERREIKKAEKLDKPRSPRVKKAY

SEQ ID NO: 18344 - protein, 324 aa, Bacillus subtilis subsp. subtilis str. 168
MKPFVFITKPIPEEIEAFIGEHCRYEVWQEDTLPSDVLFEKLKEAEGLLTSGTSGPSINRELLEHAPKLKVVSNQSVGYDNFDIEAMKERGVVGTHTPYTLDDTVADLAFSLILSSARRVAELDRFVRAGKWGTVEEEALFGIDVHHQTLGIIGMGRIGEQAARRAKFGFDMEVLYHNRHRKQETEDSIGVKYAELDTLLEQSDFILLITPLTDETYHMIGEREFKLMKNSAIFVNISRGKTVDEKALIRALQEGWIRGAGLDVYEKEPVTQDNPLLQLDNVTLLPHIGSATAKVRFNMCKQAAENMLAAIQGQTPKNLTREFQ

SEQ ID NO: 18345 - protein, 570 aa, Bacillus subtilis subsp. subtilis str. 168
MTKATKEQKSLVKNRGAELVVDCLVEQGVTHVFGIPGAKIDAVFDALQDKGPEIIVARHEQNAAFMAQAVGRLTGKPGVVLVTSGPGASNLATGLLTANTEGDPVVALAGNVIRADRLKRTHQSLDNAALFQPITKYSVEVQDVKNIPEAVTNAFRIASAGQAGAAFVSFPQDVVNEVTNTKNVRAVAAPKLGPAADDAISAAIAKIQTAKLPVVLVGMKGGRPEAIKAVRKLLKKVQLPFVETYQAAGTLSRDLEDQYFGRIGLFRNQPGDLLLEQADVVLTIGYDPIEYDPKFWNINGDRTIIHLDEIIADIDHAYQPDLELIGDIPSTINHIEHDAVKVEFAEREQKILSDLKQYMHEGEQVPADWKSDRAHPLEIVKELRNAVDDHVTVTCDIGSHAIWMSRYFRSYEPLTLMISNGMQTLGVALPWAIGASLVKPGEKVVSVSGDGGFLFSAMELETAVRLKAPIVHIVWNDSTYDMVAFQQLKKYNRTSAVDFGNIDIVKYAESFGATGLRVESPDQLADVLRQGMNAEGPVIIDVPVDYSDNINLASDKLPKEFGELMKTKAL

SEQ ID NO: 18346 - protein, 212 aa, Bacillus subtilis subsp. subtilis str. 168
MLFFVDTANIDEIREANELGILAGVTTNPSLVAKEANVSFHDRLREITDVVKGSVSAEVISLKAEEMIEEGKELAKIAPNITVKIPMTSDGLKAVRALTDLGIKTNVTLIFNANQALLAARAGATYVSPFLGRLDDIGHNGLDLISEVKQIFDIHGLDTQIIAASIRHPQHVTEAALRGAHIGTMPLKVIHALTKHPLTDKGIEQFLADWNK

SEQ ID NO: 18347 - protein, 475 aa, Bacillus subtilis subsp. subtilis str. 168
MNLQENSSQQLKRTMKSRHLFMISLGGVIGTGLFLSTGYTLHQAGPGGTILAYVIGGLMMYLVMQCLGELSVAMPVTGSFQKYATTFIGPSTGFMVGIMYWINWVVTVGSEFTASGILMQRWFPDSSVWMWSAIFAALLFICNAFSVKLFAETEFWFSSVKIVTIILFIILGGAAMFGLISLNGTADAPMLSNFTDHGGLFPNGFLAVFIAMISVSFAFSGTELIGVTAGESANPQKDIPRSIRNVAWRTVIFFIGAVFILSGLISWKDAGVIESPFVAVFAEIGIPYAADIMNFVILTALLSVANSGLYASTRMMWSLANENMISSRFKKVTSKGIPLNALMISMAVSCLSLVSSIVAPGTVYVVMVAIAGFAGVVVWMSIALSQLLFRKRFLKKGGDVKDLTFRTPLYPLMPIAALLLCSASCIGLAFDPNQRIALFCGVPCIILCYLIYHFKRNVTKAKKISQEEYPADHIL

SEQ ID NO: 18348 - protein, 747 aa, Bacillus subtilis subsp. subtilis str. 168
MCGLAGIINLAAPRSQECTFHILKGMADAISYRGPDDEQYHIDSKVGFAFRRLSILDLVNGQQPFLNEDGSIVVMVNGEIYNYKELKASLHNHMFKTTSDCEVIVHLYEEKGIGFVDDIIGMFSIAIWDKNKNKVFLVRDRFGIKPLFYTELKHELIFASEIKSLFSHPHCPRQFNWKEALSDIWLSGEAASNHKETTSFFVNIQNLDAGHYLEINLTTNERKTASYWSLQDILLRQGYRENLHPDDLIEGYRELLADSVHRCLQSDVEVGLFLSGGIDSAAVAHFAAEKQDLHTFTVLSQSTFTNEDAKYAHWLAKDLHLPNHQVLYQLGNDELLQPESYKHLLWICETPFCGPEQLYKFHLHKYAKAIRPNLKVMLTGQGSDEFNGGYSTTLSPAENPSWEGFIESVNTMEMNRLHRLQGNIFRVWEEHFGLSPINLSYLKSNDSSQADPWQSYVLTKYRDLQMYNCWHEDRIAAANHIENRVPFLDHRLVEWVCGIPDGLRKDLLWDKSVLRKSLTNELHTSYTHRPKVPFFYGKDVRYTHKMMFHLLKKNNYQLIEEAFSHSDASSIIQVEHIHAIMTYLEDDPEFTNFEFLLRLVNMGLLSKMTKETPSVQLDITSHLESITIKDWHSQEGDIASRLNISANKCEGQDILALNPGVTLLRPESDSEHCIYIAEEGFIQFIVSEEDVGAWLHILCDINGKDTLHTILDRHGVSLEEVAKYIQEAIEHNIILIKQKNLPEGAYR

SEQ ID NO: 18349 - protein, 578 aa, Arabidopsis thaliana
MVSHKCVEEFGYASYLVPSNARAPRSARKRRSIEKRISKEDDNMCAIDLLATVAGHLSFESGSSLMSIDKLIEDHRVKEEFPEEEKPLMPVALSPYRGSLSPCGFSSVINGKVENEVDGFSYSGGSDACQVGNFSQDVKPDIDGDAVVLDARPNVVVSLGSSSRTEVPSIGNCVSHGVRDDVNLFSRDDDENFSKYIHPRVTKHSPRTVPRIGDRRIRKILASRHWKGGSRHSDTKPWRNYYLHQQRSYPIKKRKNFDHISDSVTDDYRMRTKMHRGSRKGQGASFVASDSHVKLRIKSFRVPELFIEIPETATVGSLKRMVMEAVSTLLSDGHRVGLMVQGKKVRDDNKTLHQTGISQDNSHLDSLDFSLEPSSEMPQLLTSHPLGHACEELLPVCQATKIDNVLESDHHDSALFPSDSLGNNNVTEDSKAMISVALNELSSQSQPPSRKSRRSEQQQQQAAQRRIRRPFSAAEVEALVQAVEKLGTGRWRDVKLCAFEDADHRTYVDLKDKWKTLVHTAKISPQQRRGEPVPQELLNRVLNAHGYWTQQQMQQLQQNVNKLEQETQSQTTEGLLLL

SEQ ID NO: 18350 - protein, 356 aa, Hevea brasiliensis
MSLLSDLINLNLSDTTDKIIAEYIWIGGSGMDMRSKARTLSGPVSDPSKLPKWNYDGSSTGQAPGEDSEVILYPQAIFKDPFRRGNNILVMCDAYTPAGEPIPTNKRHAAAKIFSHPDVVAEEPWYGIEQEYTLLQRDVKWPIGWPLGGYPGPQGPYYCSIGADKSFGRDVVDSHYKSCLYAGINISGINGEVMPGQWEFQVGPAVGISAGDELWVARYILERITEIAGVVLSFDPKPIQGDWNGAGAHTNYSTKSMRHDGGYEVIKKAIEKLGLRHKEHIAAYGEGNERRLTGRHETADINTFLWGVANRGASIRVGRDTEKQGKGYFEDRRPASNMDPYVVTSMIAETTILWKP

SEQ ID NO: 18351 - protein, 324 aa, Pseudomonas stutzeri
MSQSSQLIATAQRTIRLEIEAVEQLNARIDASFVQACELILACKGRVVVVGMGKSGHIGRKIAATLASTGTAAFFVHPAEASHGDMGMITPDDVVLALSNSGTTSEIVTLLPLIKRLGITLISMTGSPSSVLAKAAAVNLDASVAIEACPLNLAPTSSTTASLVLGDALAIALLEARGFTAEDFAFSHPGGALGRRLLLKVEHVMHTGERLPRVPRGTSLRDALLEMTQKGLGMTVIVETDGRLAGIFTDGDLRRALDKGVDVRQTLIDEVMTVHGKTANAEMLAAEALKIMEDHKISSLVVIDEQELPIGALNMHDLLRAGVM

SEQ ID NO: 18352 - protein, 318 aa, Zea mays
MQTPLCANAPAEKGGKNFMIDFMMGGVSAAVSKTAAAPIERVKLLIQNQDEMIKSGRLSEPYKGIVDCFKRTIKDEGFSSLWRGYTANVIRYFPTQALNFAFKDYFKRLFNFKKDRDGYWKWFAGNLASGGAAGASSLFFVYSLDYARTRLANDAKAAKGGGERQFNGLVDVYRKTLKSDGIAGLYRGFNISCVGIIVYRGLYFGLYDSIKPVVLTGNLQDNFFASFALGWLITNGAGLASYPIDTVRRRMMMTSGEAVKYKSSLDAFQQILKKEGPKSLFKGAGANILRAIAGAGVLSGYDQLQILFFGKKYGSGGA

SEQ ID NO: 18353 - protein, 312 aa, Thermomicrobium roseum DSM 5159
MDGRLQIFAGNSNPRLAQAIVGVLETPLGRAEVSSWSDGETRVRLEENVRGSDVFVIQSLCTPVNQNIMELLIILDAVKRASAARITAVIPYYAYARQEKKTAGREPISAKLLANLLTTAGADRVLTIDLHAPAIEGFFDIPVDHLRATPILAAHFRRLGLTDFVVVSPDAGAVVRADEFRRRAGGSLAIISKKRPGPEVAEVLEMVGDVAGRDAVIVDDIIATGGTLLQAAELLRERGARRIFAAAVHGVFAGQALERIQASPIEKVFVTDTIPLPEGMCTDKVEVLTVAPLLAEAIMRIHKDLSISALFT

SEQ ID NO: 18354 - protein, 652 aa, Thermomicrobium roseum DSM 5159
MSDNKWLRNGFVWMILIIAAIAVWVTFVQGGRGGATITTQEMAADIKAGKVERLVMTSGSDEIQVQYIGTNEVRTLRLPPNVDIFELLKTFGIDPQQVDIQTHRASQWGNVLGTLTFLLPTLFLIGVIIFMMRQAQGTNNQALSFGKSRARVFTSNRPTVTFDDVAGVDEAKEELQEIVEFLKYPEKFAALGARIPRGVLLVGPPGTGKTLLSRAVAGEAGVPFFSISGSEFVEMFVGVGASRVRDLFDQAKRNAPCIVFIDEIDAVGRQRGAGLGGSHDEREQTLNQILVEMDGFDSSTNVIVIAATNRPDVLDPALLRPGRFDRQVVLDRPDLHGRLAILKVHTRGKPLESDVDLEDLARQTPGFSGADLENLVNEAAILAARRNKKTIGRRELYEAIDRVVAGPERKSRRISEREKLMTAYHEAGHALVARMLPHADPVHKVSIVARGMMGGYTRVLPEEDRFFWTKKQFEAQLAVFMAGLVAEELVFQEVSTGAANDIERATTLARRMVTEFGMSERLGPLAFGRKEELVFLGREIAEQRNYSDQVAYEIDQEVRRLIDQAYQTAKQILLDHMDKLEKIATLLVEKETLDGHEIEALFDEPRPRPELVGPPLTRPAALIATPETARPDSPSEARPAAPVPHIKPQPAS

SEQ ID NO: 18355 - protein, 536 aa, Thermomicrobium roseum DSM 5159
MRVTGGEAVVRTLERLGVEVVFGIPGVHTLAIYDALYSSPIRHVLARHEQGAGFMADGYARVSGKPGVAIVITGPGVTNIATAIGEAYADSSPVVVIASNVEQAWQGQMLGHLHDCKDQLGIMRVVTKWADRARSVEDVPRLLRTAFAEAISGRRRPTHLEVPLDVLHGSGDIELAHLAPLSMERSQPRRSAIELAARMIEEAERVVLYCGGGVVASGATAELSALAERLGAAVITSLQGKGAIPEDHPRCLGNLWEPENAVERVLRESDLVIVIGSKLGAQDTANGRLPLPDRRIRIDIDAQEILRNYPPTLPIVADARETVRALLSELTSRGITKQGWPVDVLQATKREALATAWGAGQAEWLRAIRAVLPRDGILVSDMTMMAYVGNRHYPVYEPGTYLFPTGYGTLGFALPAAIGAKIARPEAAVVALVGDGGYQFTMQELATAVQFRIGIPIILFNDASYTAVKDEQARSFGGRFIAVDLVNPDFQKLAAAYGIPSEYVTSPQTLEGAIARALERDLPTLIEVPIDFPLGA

SEQ ID NO: 18356 - protein, 530 aa, Thermomicrobium roseum DSM 5159
MAHQRAGQHRDGQLDVQLPDYARELLERSTLIIVSNRGPVEFHQTNDGEIATKRGTGGVITAMSAAARFADAIWVACAMTPTDRVIAEEMRQRREALLTIPDLPGFRLRFVVPDTEAYRGYYNRIANPLLWFLQHYLWDTPRAPDIDHETWQAWHEGYVAVNRLFAEEVVAAAAAAPRDPIVLLQDYHLYLAPTFIRELRPDLLLHHFVHIPWPDQDYWRLLPLPMRRAICEGLLANDIVGFQTPRHARSFLNTVDANLPEAEVDYRRREVTYRGHTTRVRVYPISIDPELVRAVAESEDARRHREHLEAFRNEYTIIRVDRAEPSKNVVRGFLAYDRLLEKHPELIGRVNFLAFLVPTRMEVAEYINYLDEINAVVGRINAKYANAAEIEGIHWEPVHLFVGDDYPRALAAMKFYDVLLVNAIFDGMNLVAKEGALLNERNGVLILSEGAGAYQQLGQWALTVSPTDIEGTAEALWQGLIMPAAERAWRAEQLRRHVVEHDLRRWLVDQLHDIADLRAERAPHRLIAPS

SEQ ID NO: 18357 - protein, 275 aa, Thermomicrobium roseum DSM 5159
MTDGVDGTKEGRNSMTEHTPLFVIENLRAGIEGKEILRGVNLVIERGEIHALMGPNGSGKSTLAYVIAGHPNYEVYEGRILYKGENVLELPPDERARMGMFLAFQYPTAIPGVTMANFLRLAVNSVRKARLGEDKALSPREFRRLLREKLEMLRMDESFASRYLNEGFSGGEKKRAEILQMAMLEPEFAVLDETDSGLDIDALRTVSEGVNRLFNPNMALLVITHYQRILNYIRPHYVHVMLDGKIAVSGGPELAEELEEKGYDWVKEQFAEAAS

SEQ ID NO: 18358 - protein, 397 aa, Thermomicrobium roseum DSM 5159
MLYERAAVVQQASSGPGLVIGVPRERAPRERRVAATPETVARYLKRGFRVIVEQEAGLAAGFPDEEYRQAGAEIVAEPGDLYRRASVIIKVQRPLPEEIEFLQPGHVIIAFLQPLIAPELVAVLAERGVVAVSMDTIPRITRAQPMDALSSMSTVAGYKAVLLAANELPKFFPLMMTAAGTIRPAKVLVLGAGVAGLQAIATARRLGALVEAFDTRPVVKEQVESLGAKFLELDVTTEEVGGYAKELAEEHLRREQELIHRHCLEADVVITTALVPGRRAPLLVRETTVREMRPRSVIVDLAAEMGGNCELTVPGETVVRYGVTIMGPLNLPSEMAYTASQMYARNVATLLEHLAPKGEFVWNLEDEITRGVVLTKDGTILHGPTLERLKEIKEEVR

SEQ ID NO: 18359 - protein, 318 aa, Thermomicrobium roseum DSM 5159
MPKGYAPVSGLESPRFAGIRTFARLPHVRELAGVDVAIVGAPFDTGVTYRVGARFGPAAVREMSAMLRTYHPSLDVDVYEVLSVVDYGDLPVVPGYIEDSYQRIEQGLLPLLEHDVVPLVIGGDHSITLAELRAVARRYGRVGFIQFDSHTDTWDEYWGKKYTHGTPFRRAVEEGLIETTRAIQVGMRGSLYGPEDLDQSRELGFEVWTADDVRRTGLGAVIEAIRRRVGQGPVFVSFDIDFLDPVYAPGTGTPEVGGFTTREAQELLRGLVGVDIVAADMVEVLPAHDVSGVTALAAANLLFEILAVLAFNRRGMTR

SEQ ID NO: 18360 - protein, 324 aa, Thermomicrobium roseum DSM 5159
MDEREDQGRVRWRPRFSGLRTFARFPHRAELAGVDVAIVGIPFDTGVTYRPGARFGPAAVREHSSRIEQYHPPLDVDVTEYLTVIDYGDTPVVPMETLESYQLIEETIRTVVEGGVIPVGIGGDHSVTLPELRAVARRFGPLALVHFDAHVDTWDTIWGTRYNHGTPFRRAVEEGVVDPVRSIQIGIRGSLGERGELEQSRELGFAVWTAWEVRRAGIERVLEAVRQRVGQHPVFVSFDIDFLDPAFAPGTGTPEVGGFAMWEAQELVWGLVGLNIVAADVVEVLPDRDPAGVTALNAANIVFDLLAVLAATRRERHGTAERAE

SEQ ID NO: 18361 - protein, 392 aa, Thermomicrobium roseum DSM 5159
MATPVIVAAVRTPIGRFGGFFKDLPAWRLGASAIAGALSRVGLEPAAVEDVIMGNVLQAGQGMNPARRASMTAGLPDSVPAVTVNMVCGSGLRAVVMAAQAIALGEAQIVVAGGMESMSQAPYLLTGARFGYRLGHGMLVDSLLAEGLTDAFHDCHMGITAENIAREYGIGREEQDRYAVESQRRAALAWETGAFADEIIPVEVPGRQGSELVTRDEHPRPETTLEGLLRLRPAFDPAGTVTAGNASGINDGAAALVVMAEERARALGLEPLARIRSWAWAGVPPRVMGLGPIPALRQALARAELRIEDLDLYEVNEAFAVQVLAVQRELGLDPQRLNIYGGAIALGHPIGASGARILVTLVHALRRTGGRYGAAALCIGGGMGIAVIVERP

SEQ ID NO: 18362 - protein, 328 aa, Thermomicrobium roseum DSM 5159
MRVVVTRRIPEAGLQVLERAGIEYRIWPGELPPSREELIEFARGADGLLTLLTERIDEALLNALPTVKVVSNMAVGFDNIDVDACTRRGVVVCITPDVLTETTADFTWALMLAVARRVCEAAESVRAGTWRTWEPLGFLGRDLSGATLGIVGFGRIGRAVARRARGFDMRVLYTDKTRQSSEVERDLRATFVPLEQLLAESDIVTLHVPLTPETRKLIGARELALMKPRSILINTARGPVVDTEALVRALRTGHLWGAGLDVTDPEPLPADHPLLQCPNVIVTPHIASASETTRARMAELAAENLVAALQNRRPPRSLNWDEVRGKEN

SEQ ID NO: 18363 - protein, 375 aa, Thermomicrobium roseum DSM 5159
MGGRALIIGIPRERKLREYRVAQPPHGVRELVRHGHRVLVERGAGVGSGFTDTDYEAAGAELVDDAEAVWSQSEMIVKVKEPIESEYRFLRPGLILFTFLHLAADERLTRELMAREVIAIAYETVQLPDGSLPLLAPMSEVAGRLAIQVGAYYLMEPYGGRGVLLGGVPGVAPGRVVILGGGTVGTNAAQMALGLGADVLLFDINVERLRYLEQILHGRFQTRVSSEQVIGEAIREADLVIGAVLIPGARAPKLVTRQMVRAMRPGSVIVDVSIDQGGCVETARPTTHDAPVYDVDGVLHYMVTNMPGAVPRTSTFALSNVTLRYVLELADLGLVAAVQRDRALAKGVNVFRGRITHPSVAESFGLPYVPLDELL

SEQ ID NO: 18364 - protein, 312 aa, Thermomicrobium roseum DSM 5159
MIIWDQFVYAIEWGLARTAEVTGSAGLAIILFTILIKTLLLPLTIKSVRSTKAMQELQPKIRELQKKYGQDRQRLSAEMMKLYQEHGINPMSGCLPMLLQIPVFFGLYFAIRNLSLSQVGAWAHGFLWIPDLAKPDPLHILPILAGLFQFIQTRMTRPAGVRRFEDPQQQMMYSMMLFMPLMVVLFGWNFAAGPVLYWVVSAVYSVVQQWLITGWGAMRDWLPFLPELPEHRRLGYVDPKKRANSTNAKRGGLWARFLEHAQAQSQISVSETAVESSRTERAAADASPASQPPVDPASLVPRRSRPRNKRQS

SEQ ID NO: 18365 - protein, 1508 aa, Thermomicrobium roseum DSM 5159
MKRLSVEESAGAAPLYSPQYEHDACGTGFVADLAGRASHEIVEYALEAVVNLTHRGAVSADAKTGDGAGITVQIPRKLLLRELARLGVEAVDPADLAAGLVFLPADNDDLAIRCKDELTSALRRQGIDGIWWRLVPVDPGVLGEQARATMPRIEQVIALRPVGCDEMEFERRLYRARRRAEQAAKELGVRSFFVPSLSCRTIVYKGLFVARDLGTFYADLRDPDMESALALFHQRYSTNTFPTWQLAQPFRRIAHNGEINTLQGNRNWMRAREPELSSPLWGDSLAELFPIIDPDGSDSMSLDQVLEFLELSGRDIVHAVAMLIPEAWENMADLDPAIRAFFDYHAGLMEPWDGPAAIAFTDGRVAGAVLDRNGLRPARYSITEDGLVVLASETGVIDLSDRKVIERGRLGPGQMLVADTITGTVYRNEEIKQLLATRKPYGEWLTQYRLSLGSAPVDGNGHEIDEQSWLRRQVAFGFTAEDQRLVVHPMAVENKEPLWSMGDDTPLAVLSQFPRPLAHFFRQRFAQVTNPPIDSYREKLVMSLDVHLGPWPNLLTELPEHARLLHLSSPFLTEDQLAALANHPVLRARTLAAIFPVADGPAGLEQALERLLNEAERAIDEGASILILSDRAVDAAHAPIPMPLAVGALHHHLIRIGKRLRASLVCETGDVWDVHQAAVLIGYGAAAVHPYLALHVARSFAGSRGAEHLSADQLAKNYLKQLDAGLLKIMSKMGISTLASYQGAQLFEILGLDRSVVDRYFTGTPSRLGGLDLAGIAERALARHRAAFTAPLDKLPDWGFVRFRKDGEYHAFSPTNVRALQQAAQTGDRDAYRQYVQLVQHRRPATLRDLLTFRPTEPIPLEEVEPAEEIRKRFVVTAMSLGALSPEAHRTLAIAMNRIGARSNCGEGGEDPDWYYENGSDVPHNKIKQVASGRFGVTAEYLVRAEELEIKIAQGSKPGEGGQLPAHKVTAIIARFRHAIPGIQLISPPPHHDIYSIEDLAQLIYDLKMVNPRARVGVKLVAEAGVGTIAAGVAKAHADYILISGHSGGTGASPLSSIKFAGVPWELGLAETQQTLVLNDLRSRVRLRTDGGLQTARDIIIAALLGAEEFGFGSAALVAIGCDMARQCHLNTCPTGIATQREDLRKRFAGEPEHVINYFTLLAEEVREYLAMLGARRLDDIVGRVELLAVLDQLDGPAATLDLTPLLAPPPDPTAPRRCLYDRNIFHDLTGPALDEWLVEQARPALEQREPVRITATVRNHHRAVGGRLAGELSLRFGRDHAPDDLITVELTGQAGQSFGAWCWHGLTLILTGEANDYVGKGMGGGTIVVRSPEPPADPTRPHVLVGNTVLYGATGGQLFVAGQAGERFAVRNSGAVAVVEGVGDHGCEYMTGGVVVVLGPTGRNFAAGMTNGLAFVFDPEGVFPTRLNRDYVQLERLSDEDDELLRSLIAQHVAFTGSQRGREILERWAELRSAFWKVVPHPPIEAVEERPARRARERAVEAQAVAD

SEQ ID NO: 18366 - protein, 534 aa, Thermomicrobium roseum DSM 5159
MNNSTLTVMNPSGFAALGLSPALLAALRDVGFEQPMPVQTEAIPVLLSGRDAIVQAHTGTGKTAAFALPILQGLVPYGHGPQALVLTPTRELAIQVAEAIHRLGRYLDARVLALYGGQPIERQLRALRHPVDVIVGTPGRIMDHLRRETLRLDQVRVVILDEADEMLDMGFIEDVEWILEHVPRERQTALFSATIPPRIRQLTQRYLRAPVTIAIHPERVTVPSIAQTVYEVAAHAKLEALSRILDYEAPTSAIIFVRTKSGADELAHKLQSLGYAAEAIHGDLSQAMRDRAMQRFRAGQVDLLIATDVAARGLDIPAVSHVINFDIPSDPESYVHRIGRTGRAGATGTAITLIEPRERWLLRTIERAIGQRLIPKRIPTREEIARRQRELLGASLSEVIEQRDLELGRRIVDQLLPDHDAVDIAAAAVLLLLEARNVSPERAGDLTEIERAEPGMVRLRLELGRRDGIRPSDIVGAIANEAGIPGKEIGQIEIADRYTLVDVPQRAADRVVAALSRTRLRGRAVVVRRLDSTR

SEQ ID NO: 18367 - protein, 390 aa, Thermomicrobium roseum DSM 5159
MLQYHVAERVRQLRPSPTLAVSDRARALRQQGIDVIDLGGGDPDFPTPTHICQAAADAMFRGETHYVASAGIPELRRAIARKLQAENRIPVTPDEIIVTPGGKAALFVSILALVGPGDDVLMFDPGWVSYEPMVIMAGARCLHVPLLPEENYRITREAIEAVLTPQTRLMIVNSPNNPTGRVLTREEADAIVTVAQEHDIVVISDEIYEKIIYDGREHLSLAAFPGMAERTLTVNGFSKAYAMTGWRLGYVAGPAPLIRQIMKVHSHSATCATSFAQWGGVAALEGPQDVIDAMVAAWDRRRRFVTERLNAIPGFRCPLPEGAFYAFPDVSGTGLSGQEVAQKLIEEAYVGVTPGDAFGASGSGCIRLSFATADELLERALDRIANVFGR

SEQ ID NO: 18368 - protein, 324 aa, Thermomicrobium roseum DSM 5159
MGGLYDQLTIFGGNSNPELTKAICAYIDIPPGRIEVFKFSNENIFVRIGESVRENDVFVIQSFSSPVNESIMELLIIIDALKRASAGRITAVIPYYAYGRTDKKDQPRVPITARLIADMITVAGADRILTVDLHAGQIQGFFNIPVDEMTALPILARYFQEKRLENPVVVSPDLGSTKRARNFAEELDAPLAIIEKRRLGNDDRTEVLNLIGSVDDASVILIDDEIDTAGSITQAAELCIARGAREVYAACTHPVLSGPAIERLALSPIKEVVVTDTIPLPPQKRLDKITVLSVAPLLGESIQRIHTGASVSLAYRSAGRLPLR

SEQ ID NO: 18369 - protein, 107 aa, Thermomicrobium roseum DSM 5159
MYAVVRTGSKQYRVRVGDVIEVEKLPVEPGQAVTLEEVLLVERDGTVTVGQPVVPGARVVARVLDQVKGPKLIVFKMKPKTRYRRKTGHRQRYTRLQVEAIEVGAAS

SEQ ID NO: 18370 - protein, 630 aa, Thermomicrobium roseum DSM 5159
MLGVPPPMWHGFWRGPEAERRVSLDRALLRRVLQSALPYRWSIGLMVLAILLTSVTEALQPQLVRVLVDRALPAPGRSGDLLLLTLLSIGMVALPLLGGLIGVWQRQLSARVGEGIIFDLRAALYERLLQQGFRFFTGVKAGELVSRLTNDVVAAQRAVTSTVTNLVSNVAVIAVSLAMMLAMDWRLTLLAFLVFPALVLPTRRFGNRLRALTRAQMERNAAMTAQLTETLGVSGALLVKLFGRRADEVARFRERAAAVRDIGIELAVAGRWLMVFYGMTAAVGTAVVTWSGGVLALRGGLTTGELVAFIVYLARLYGPVTALLNTHVDLATSLVSFERIYQLLDRPIEIRERENAVRIERPRGAIAFEDVWFTYLAESSEAGEPLPLAGREDKWNESLRYWALARVSFRVEPGQLVALVGPSGAGKTTVTYLLARLFDPTRGRITLDGYDLRDLSLDTLARAIGMVTQEPYLFHDTVAANLRYARPEATQAELEAAARAAQIHERITQLPQGYQTVVGERGYRLSGGEKQRLALARLFLADPPVLVLDEATSSLDSESERLIQEALATLMRGRTTLVIAHRLSTILAADRILVMEGGQIVEQGTHHELLAQGGLYARLYRLQFAVEPAA

SEQ ID NO: 18371 - protein, 388 aa, Thermomicrobium roseum DSM 5159
MMSYLDNATTSWPKPDVVRETLAGFLATASGAPVRTGHRLARATWEAVEQARQRLAAFLGVADPRRVVFTASGTDALNLALKGLLGPGDHVVTTALEHDAVRRPLRALEVFGVTTTRVPVGADGTVDPDDVRRALRPNTRLVVVCHASNVTGAIQPVSEIVELAHARGAFVLIDAAQTAGVIPLAIDALGADLVALSGHKWLLGPPGTGALVVGPRIDPSELVPLRDGATGTESPDDAGPRSLPERYETGTLDTIGLAALGAAVDWLARTGLASTGERARVLTERLVAGLSALPGVRLFTPAQAASRVALVSFQVEGWRPLDLARALERDFAILVGAGLHGASEACRSIGAYPCGTVRLSPGWSTSEEEIDRAIAAVATLARAPQCKD

SEQ ID NO: 18372 - protein, 495 aa, Thermomicrobium roseum DSM 5159
MSEEQQRAPYLEQWLAYVDECVIPFTTPGHKQGRGAPPEFVAAFGERALALDIPHDGGTFDAHLEHDPLVAAERLAAALWGARDAVFLVNGSTTGNLAALLTLGRPGQPIVVTRAMHKSLLAGLVLSGARPVYVVPAVHPESGILLDLPPESVAQALAAWPDATAVALVSPTYTGVTSDTAELAALCHAHGVPLFVDEAWGPHLPFHPALPAAAIPSGADLAVTSLHKLAGSLTQTALLLMAGNLVDQAQLRAATAMVQTTSPAAFLYASLDAARRRLALEGEQLLARTLELAEHARRELAAIPGLEVVGPEIVAGRPGAGFDRTRLVVDVQGFGLTGLEVKRILRRDFRIAAEMADLVSVVFLITIGDTPETIAALVAAFRALAADRTRPDCAAGRRAVRALLRSTGPIVAGAPQAMTPREAFFAPAERVPLADAVGRVAAEPVTPYPPGIPVLAPGEVVRPEVVEFLQAGRAAGMRFNGASDPTLATLRVVRA

SEQ ID NO: 18373 - protein, 390 aa, Thermomicrobium roseum DSM 5159
MNRTEIYLDHAATTPVDPRVLEAMLPFFTERFGNPSSIYAAGREARAALDQARARIARLLNCQAREIVFTSGGTESDNLAVKGVAFWHLVNGRGRHIVTTAFEHHAVLHSAEYLERFGFHVTYVAPDADGIVQPEAIEAALRPDTILVSVMYANNEIGTIQPIREIAHLCRERGITVHTDAVQAAGTLPLDVEELGVDLLSISAHKFYGPKGVGLLYVRSGTPILWQQHGGAQESNRRAGTENVPGIVGMARALELAYEELDERNAHVQALRDRLIDGILQRIPDSRLNGHRHQRLPNNVNVTFAGVDGETLLLNLDLHGIAASSGSACTTGSTEPSHVLLAIGATPEQARSSVRLTLGKDNTAREIERTLDVLEETVARLRKLAGARSR

SEQ ID NO: 18374 - protein, 633 aa, Thermomicrobium roseum DSM 5159
MGRVIGIDLGTTNSVMAVIEGGEPVVIPNAEGERLTPSVVAITPTGERLVGRFAKRQAITNPENTIYSIKRFMGRRFDDPEVQRTIKLVPYQVRRAQNGGVEVKMGDRWYTPQEISAMILQKLKQDAEAYLGETVDKAVITVPAYFDDSQRNATKDAGRIAGLEVLRIINEPTASALAYGLDKKGEEKVAVYDLGGGTYDISILDISEGVFQVLATNGDTHLGGDDFDQRIIDWLCDEFKRETGIDLRQDRMALQRLKEAAEKAKIELSSVQQTEINLPFITADATGPKHLVKTLTRSKLEQLVADLVEKTIPPMEQALKDAGLSPRDVDEVVLVGGQTRMPLIQRKVQEFFGKEPHKGINPDEVVAIGAAIQAGVLAGEVKEVLLLDVTPLTLAIETLGGVATPIIPRNTTIPTRKSQIFTTASDNQTQVEIHVVQGERPMAADNKTLGRFILDGIPPAPRGVPKIEVTFDIDANGILTVSARDLATGREQKITITASTGLTEEEIQRMIREAEEHAEEDRRKREAIELRNQAEALLYQAEKTLNEFSDRIPSELKLELENKMQAVREIVERDPMNTARLRPAYDELARTLSQVGARMYEQAGATASTGPDGGGRTSGAPGEETVEGEYREV

SEQ ID NO: 18375 - protein, 467 aa, Thermomicrobium roseum DSM 5159
MFYDEAKIFVKAGNGGNGAVSFHREKYIPRGGPDGGDGGRGGNVYLRVDPSLNTLLPFSYQRQFRAEDGQPGQGNNKNGRDGADLYIDVPPGTVVYDEATGAVLGDLLEPGEVLLVARGGFGGRGNQHFATPSRQAPRFAEKGEPGEERWLRLELKLLADVGLVGLPNAGKSTLLAAVSAARPKIADYPFTTLEPMLGVVSVPGREGGTFVLADLPGLIAGASRGAGLGHEFLRHVERTRLLIHVLDGSGGLEGRDPLEDFHTINAELAAYSASLAGKPQIVAVNKMDLPEAQANWPRIARALDELGYTAYPISAATGQGVGELIRATWERLQQLPRPERVAPPLRSHRVYTLDRSQERWEAIRLSPHHFALRGPKIERLTLMTDFSNPEAAERYQRLLARWGISRRLLALGIQPGDIVHVAGRELVWEPELAEAEQTRPRRRLTKRERLLKRAGLLEEPEEEIGEQ

SEQ ID NO: 18376 - protein, 745 aa, Thermomicrobium roseum DSM 5159
MDRSIRLALDLDGVLTEHPAPLAQAANRALGMQLPDHAFVDSHGCNVPEAVRLWVYGPGGPATLLDPAPNAPKLLQQLLQALGDERLVIITARPQGSQPTTEEWLQRHGFPPCRIVFADDKVAVARELGVTHAIEDSLRHATRYAEAGITCFLLTQDPAPPAESPFIVRVPDFTAAVQAILRLAGAPIALPGSGDGAQPRRRRIVVSDVIDQRARERLASEADVIEVDGRDKPALYEALREADALIVRSETQVTRELLAHAPRLRVVARAGTGVDNIDLQAATEAGILVLNAPGANAVSAGEHTVALMLAIARNLIDANATTHAGRWERKRFRPFDLKGKTIGIVGLGRVGSVVAQRLRAFECRLLGYDPYITRERFAQLGVEPVDYETLLENSDIVTFHVPATPETRHMLDARAIARMKPGAIVINCARGEVVDVQALAEALKSGHLAAAGVDVFPEEPAYQSPLFGLPNVVLTPHIGGSSREALEAVGEIIATTTLAALRGEIVPNAVNLPAASLHAPELRRLTRVAEAAGHLIAVLQPARPTTFQVTVHGQVASDIAEHVTAVALAAALRRWTVRRVTPVNARFVAQELHLFVDVRFDTTASTVPEFNFEVDGDPPHHVMVRWDHREAGIMEVDRFSLERPLAGHMLITHHLDRPGIIGRIGTILGRYEVNIAGMQVGRRARGGEAIMVLNVDDPIPEAALNEILQIPDVWTAYVVSLPESGDYPMAAGSALSAAVAHTRLR

SEQ ID NO: 18377 - protein, 333 aa, Thermomicrobium roseum DSM 5159
MSGREQQPTMGKDVLVLTWKYFSAREEIARFLEERGCRFVEKEIRYPVDEEQLCELVRDVDGLVVGLEPITARVLAHANRLKVISTSGVGFDNIDVAEATRRGIVVANCHGANEHSVAELAFGLMLALARGIHRSDRLMREGRWEPYFGVELWGKTLGVIGLGRAGRAVALLGRGFGMRVLAHDIVWDTTFANAHEISYVPLEKLLRESDFVSLHVPLTPDTRYLIDERALSLMKPTAFLINLARGPVVKQSALVEALRRGQIAGAGLDVFEVEPIRDNPFVEFENVVMTPHLGGSTEEARERTLYLALTNVCNVLNGRPPHHQVNTDVRIGN

SEQ ID NO: 18378 - protein, 397 aa, Thermomicrobium roseum DSM 5159
MGPTDRGRDSANVMSVRPIYLDYHATTPCDPRVVEVMLPYLTGDFGNPASGFHVYGRRAARAVEMAREQVAALIGAQASEIVFTSGATESNNLVLLGLTSSDQSRRRIVTTAVEHKSVLEPCRILHERGFEVVVLPVLPDGTVDLAAAEAAINEETLLVSVQTANNEIGSIQPIAVLAELAHRRGALLHTDAAQAVGKIPFNVEELGIDFASVSAHKLYGPKGIGALYVRSGLRRRLTPLLLGGGQEFNLRPGTLNVPAIVGFGEACRLAREEMPEEARRVAALRDLLESQLANRIPGLRFNGHRTRRLPGNSSITFPKIEADVLIANVPEVALSTGSACSSGTIEPSHVLTAIGLDWEEAHATIRIGIGRFTTREEIERAAHLIAIAWERLVEAGQ

SEQ ID NO: 18379 - protein, 538 aa, Thermomicrobium roseum DSM 5159
MATVAEVIAQELRTAGVDRAFGLPGGEVLALIDALRRAGIVFTLCRHEAVAGIAAGVYGKLRRTAGVAVATLGPGAANFLLAVSNAWLDREPLLAITADLPASWPPSHTHQRLPLHDIYRPVTKHVEAVTPLDPHRPVRRALIACTREPLGPSYLTLSAEDAVRPACILHEESLALRPAATAQDARVAAEELARRLAEAERPLVVIGLGVRPENAPGLRRWLAAWHLPVAVTPKAKGLVDERDPAIDFVGVVGGMAIDGLMVEAVQQADLLVGFGFDPVEVDKTWHAHRPVLWVLESAQATGLLPRRDLLLVDHHALLAALGELAPPRRWERPFQEVQAERAAIAAGKSRAPAQGLAPVRIVEVLAAVLPAETIVTTDVGSHKYLFGQFWPSRHPETFWMSNGLSGMGYGLAAAIGAKLARPAAPVLAVLGDGGFSMVCQELETARRIGAPVIVLIIADRSYSLIRIGQENRGLPRYGVDFEPIDSVLVAQACGCAGTVARTPDELAAAARQALAANEAGLPFVIEVPLDPDAYRPIV

SEQ ID NO: 18380 - protein, 416 aa, Thermomicrobium roseum DSM 5159
MKRGMTRRTFLRRAATTLSLTPLLAACGSAEKSETPATSSAAGGSPTVVVPSQRTSTATASGQLRIGYLPITDAAPLLLAHAKGFYREEGLSVEQPTMFRSWAQVAEAFQARQVDVVHLLMPLAIWMRFGQQVPVKLVAWDHVNGSALTVAERIERLEDLAGATVAIPFWYSIHNVLLQRLLERAGLRPILEGQPSASERTVKLVVLAPADMAPALANGSIAGYIVAEPFNALAEVQKAGKILRFSGDVWLDHACCVVMLHEEECVSRPDWAQAVVRAVVRAQRFARENRAEAAQLLAKRGDRGYLPQPLQAIERVLLDHDHDRYVREGVIRHPEWSAARIDFRPYPFSSYTAALIEHLRRTRVQGDASFLQQLDPLRAHEELVDDRFVRQALTEEGGPAVFGLPESLEREELIDP

SEQ ID NO: 18381 - protein, 476 aa, Thermomicrobium roseum DSM 5159
MRVMKFGGTSVGNAVAIDRTARIIADAYRGDGRLVAVVSAMSGVTNQLIAAAQAAAEGDEQAAARLQQELVERHRGAAAELIPTAARLEATVSRLTELATRCARLVESVHVLRDLSPRAQDWIVSFGERMSAVLIAAVLEERGIPAVPVDSDKVIVTDDHFGSANPLLDETRARAEAILVPLLEAGKLPVVTGFFGATPKGAVTTLGRGGSDFSASILAHALDADEVWIWTDVDGVMTADPRLVPSARTLPAISFAEATELAYFGAKVIHPRTMQPAAERGIPIWIKNTFNPEHPGTRIGPDTSSNGSVVKAITAIPGVSVITVEGSGFLSVADVTARVFETVGRTGVNVFMVFQASSQHSLGFVVRRTDASKVLRALEREFELDLLKGRVARLWEEPGMAIVAVVGAGMRGTPGVAGRVFGTLGQHRINIVAIAQGSSELNISFVIREDEVARAVPAIHDAFGLGGSAGERSAGS

SEQ ID NO: 18382 - protein, 512 aa, Thermomicrobium roseum DSM 5159
MGEQPTIERGGVRYERVGQEYLEQRKLRRHANWVLLWALGVGAVISGDFFGWNFGLSAGGFGGLLIATVLMALMYLFMVYSIAELTTALPHAGGFYSFTRSAFGPWGGYLVGVTDTIEYVITPAVIVVGIGGYMNTLFPQVPVWLWWLLFYMVFVAINIAGVEITLRVGLVVTILAMLILVIFYIGAVASGAFSWDLVFNIEPNPDRAGSSTFLPQGFFGIFAAIPFAIWFYLAIEELPLAAEETHDVVRDMPKGLITGIFTLLALSVFTLVFNSGVNGGAKQIGESSAPLADGFQAVFGAGATTTVLTLIALTGLIASFHTIIYAYGRVIFALSRAGYYPRFLSVTSPKTHTPHRALIAGAIIGLLCAVIIDQFGTGIVGAALLNMAVFGAVISYAAVMLAYIRLKITRPDLPRPYKSPFGIPGAAIGAALAILALFATFSIQDYRPGVLGVAFFLVIALLYFALYSRHRLVAQAPEEEVALILEAEKELKHQYVELESEEERRRMEEQAR

SEQ ID NO: 18383 - protein, 421 aa, Thermomicrobium roseum DSM 5159
MCDNSLGSAFRAMMGREWCSSGAVDEEERRRAVQLQDLLAERMGRLGTESAFEVLARARALEAQGRSIIHLEIGEPDFDTPPHIVEAAIEALRGGDTHYTPAAGLPELRAAIAEEVSRTRGIPVEPDRVVVTPGGKPIMFFTILALAEEGAEVIYPDPGFPIYESVIRFAGATPVPLPLREELGFAFDPDELRRLVTKRTRLVIVNSPHNPTGAVIGREVLEELARLAQEYGFIVLSDEIYRRIVYDVEAPSIASLPGMAERTVILDGFSKTYAMTGWRLGYGVAPRWLAEHLVRLAVNCHSCVPGFTQRAGLAALRGPQDAVDRMVAEFRRRRDAVVAGLNSLPGVRCAVPAGAFYVFPNVTETGRSASELARELLEQAGVAVLAGTAFGRYGEGYLRLSFANSLENLLEAIERMRRYLG

SEQ ID NO: 18384 - protein, 290 aa, Thermomicrobium roseum DSM 5159
MRGRIVVRGGGKVTMRGMAERQDGQVEERSESVPPPVLVALMLEAAEKKAHLPIAALLARGAASGALLGAATLLAMTAWAQGLPRLVGAVVFPVGFCMLVLLGLELATGNFALLPAAWYRRRITAAAVVRNWGWVYLGNCLGSIGFAVLAVASLTGWWSHEAGPLGEQLRQLAASKVLLYRESGWLGWSTALTKGVLANWLVTVGTALAFVSRSTSGKIAAMWLPIMTFFGLGYEHSIVNLFVIPAGMLAGAPIGVGTWLIWNQVPSTLGNVIGGALFTGLPLVWTHGER

SEQ ID NO: 18385 - protein, 225 aa, Thermomicrobium roseum DSM 5159
MTHVLVVDDDTRLVEMLRRTLSYEGFTVSVAQSGDEALRLVAERRPDLIVLDWLLPGMDGLAVVQRLRAAGDGTPILMLTARDAVEDRVLGLDSGADDYLVKPFAPAELLARIRALLRRVEPASDEKPLVFADLVLDPVTRETRRGDRSFRLSPREFDLLSYFMRHPRRVLTRNQILLAVWGHDFDGYDSVLDVYIGYLRQKLEAGGEPRLIHTVRGVGYVLRES

SEQ ID NO: 18386 - protein, 286 aa, Thermomicrobium roseum DSM 5159
MTFLGVPYGRPYRGLGPELPSATAPAALRAASLAFQPYYRNVDVDFGGDLFAGREVLLADAGDVRLVPGDHTGNLERITTVVRTLLRAGTVPIVLGGDHAVTVPVLQAYAEHTGLCIVQIDAHLDWRDEVDGIREGFSSPMRRASELSSVHAMIQIGLRGAGSGREGEFAAARTWGSVLVPARTVHREGIEWVLDRLPQASAYYVTLDADGIDPGIMPGVNAPAPGGLTYWQVFDLLCGIAHRGQIVGFDLTELAPARDPSGVTMAHAVRILLVLIGALAHAGQFG

SEQ ID NO: 18387 - protein, 407 aa, Thermomicrobium roseum DSM 5159
MTKKRVNKVVLAYSGGLDTSVILKWIKETYGCEVITVTADVGQGEDLSGIEAKALATGASKAYVLDLKEEFLTQYAFPVLRSGAVYERKYLLGTSFARPLIAKYQVEIAKREGADAVAHGCTGKGNDQVRFELTYKALAPELTVIAPWREWDLSGREALLEYAASRGIPVAQSKENIYSRDQNLWHLSHEGGELEDPWQAPSERVYQITASPQAAPDQPEEIVIGFEHGYPVSLNGERLPPVTLMERLNAIGGQHGIGRIDLVENRLVGMKSRGVYEQPGATILSVAHKELEHLTLDRETMHFKDQLALKYAELVYYGLWYTPLREALDAFVDVTQRTVTGEVRLMLYKGNCIPTGRRSPYSLYSMELATFGADAIYDQRDAEGFINLFGLPLKVAALLAKQRSTSS

SEQ ID NO: 18388 - protein, 387 aa, Zea mays
MADQANQPTVLHKLGGQFHLSSSFSEGVRARNICPSFSPYERRFATRNYMTQSLWGPSMSVSGGINVPVMPTPLFANAPAEKGGKNFMIDFMMGGVSAAVSKTAAAPIERVKLLIQNQDEMIKSGRLSEPYKGIADCFKRTIKDEGFSSLWRGNTANVIRYFPTQALNFAFKDYFKRLFNFKKDRDGYWKWFAGNLASGGAAGASSLFFVYSLDYARTRLANDAKAAKGGGDRQFNGLVDVIRKTLKSDGIAGLYRGFNISCVGIIVYRGLYFGLYDSIKPVVLTGSLQDNFFASFALGWLITNGAGLASYPIDTVRRRMMMTSGEGVKYKSSLDAFQQILKKEGPKSLFKGAGANILRAIAGAGVLSGYDQLQILFFGKKYGSGGA

SEQ ID NO: 18389 - protein, 670 aa, Arabidopsis thaliana
MAAATTTTTTSSSISFSTKPSPSSSKSPLPISRFSLPFSLNPNKSSSSSRRRGIKSSSPSSISAVLNTTTNVTTTPSPTKPTKPETFISRFAPDQPRKGADILVEALERQGVETVFAYPGGASMEIHQALTRSSSIRNVLPRHEQGGVFAAEGYARSSGKPGICIATSGPGATNLVSGLADALLDSVPLVAITGQVPRRMIGTDAFQETPIVEVTRSITKHNYLVMDVEDIPRIIEEAFFLATSGRPGPVLVDVPKDIQQQLAIPNWEQAMRLPGYMSRMPKPPEDSHLEQIVRLISESKKPVLYVGGGCLNSSDELGRFVELTGIPVASTLMGLGSYPCDDELSLHMLGMHGTVYANYAVEHSDLLLAFGVRFDDRVTGKLEAFASRAKIVHIDIDSAEIGKNKTPHVSVCGDVKLALQGMNKVLENRAEELKLDFGVWRNELNVQKQKFPLSFKTFGEAIPPQYAIKVLDELTDGKAIISTGVGQHQMWAAQFYNYKKPRQWLSSGGLGAMGFGLPAAIGASVANPDAIVVDIDGDGSFIMNVQELATIRVEQLPVKILLLNNQHLGMVMQWEDRFYKANRAHTFLGDPAQEDEIFPNMLLFAAACGIPAARVTKKADLREAIQTMLDTPGPYLLDVICPHQEHVLPMIPSGGTFNDVITEGDGRIKY

SEQ ID NO: 18390 - protein, 723 aa, Agrobacterium vitis S4
MANFFYSRITNRSYSTKNLLNIEDKGRLKDELEKTRQTNICEICLHPRGHRASVCRQILMGFAYTSKTVLEGLLSTMPHDDAPLGKIFVTDLPPYDEQVPQVLLMQAAALVTSYEYSFEDLAYFLVLPLQMALMQKSPSLGKDFPVISGYSITKDSVHSPVAFGRNLMPRGVSCEFPQIDVLYDYRGFLEGGAFSEGVTSFPKETKKPKVAVIGAGISGLVSATLLLRNGIDDVTIFEAKNVVGGRAHTHFFKGEPSVCAELGAMRFPRSQACLFYLLEYLGINAMTKFPNPGTVDTGLYYRGRSYNWKAHSLPPAIFNRVHKGWRTFLHAGFVDGVAAFASPFTLTECLRLRNYEFASSLWQKWLDAFSSETFSSGIERIFRGAHPPGGEKWTRDVDMELFKELGVGSGGFGPVFGCGFIEILRLIVNGYEDNVMLLLDGIEEIPRRLSQQKVGSYSIRDRIIHKEVKEIIRTESGISLAIGEGMHATFDRVIVTSGFTNIQLRHLLTNDDSFFSYDVNQAIENSHMTGSSKLFVLTQNKFWKAEELPSCILTTGVAKAVYCLDYEPDKPSGKGLVLLSYTWEDDSHKLLTFDKGERFQILKRDLAKSYPRFADLLEPADGDYDNNIIQHDWILDPYAGGAFKLNRRCEDVYSKRLFFQPLRLNGEPDGRVCLAGCSCSFSGGWVEGAIQTACNAAMATIRDAGGLISGDNPLTNEFVNYHY

SEQ ID NO: 18391 - protein, 380 aa, Agrobacterium vitis S4
MAFILSVLRETRQGEKRVALAPSVASRLKPLGADVRIETGAGAAATFSDATLADCRIEDDQQTLLGNADIVLAVQPPSVKAVTLMKPGAVLISFIYGETSPDLVRTLRDGKITSFAMEQIPRISRAQAMDALSSQAALAGYYALLLGAVHMPRILPMMTTAVGSLRAAKVLVLGLGVAGLQALATAHRLGAITEGYDVRPETKEQALSLGAKFVETGVDARGEGGYARELTAEEKAKAQTALDKHIVEADMIITTASVPGRPAPKLITAAQIAAMKPGAVIVDLGAEGGGNCEGTRPGETVTAGPATILAPLNVPSMLAQHASELYAKNLFHFVQLIVKDGAVHLDFDDEIVAGTVLTHDGVIRNAAARMAAEATEEKVA

SEQ ID NO: 18392 - protein, 571 aa, Striga hermonthica
MCGILAVLGVSENSQAKRSRIIELSRRLRHRGPDWSGLHNHQNCYLAHQRLAIIDPTSGDQPLYNEEKTVFVTVNGEIYNHKELREKLKSHVFRTGSDCEVIAHLYEEYGEEFVNMLDGMFSFVLLDTRDNSFIAARDAIGITPLYIGWGLDGSTWFASEMKALSDDCERFMTFLPGHIYSSKSGGLRRWYNPPWYAEQIPSAPYEPLVLRAAFEKAVIKRLMADVPFGVLLSGGLDSSLVASVASRYLADSPAAQWGTQLHTFCIGLKGSPDLRAAREVADYLGTRHHEFHFTVQEGIDALEEVIYHIETYDVTTIRASTPMFLMSRKIKSLGVKMVLSGEGSDEIFGGYLYFHKAPNKEEFHEETCRKIKALHLYDCLRANKATSAWGLEARVPFLDKEFIDVAMGIDPEWKMIRPDLGRIEKWILRNAFDDEEKPYLPKHILYRQKEQFSDGVGYSWIDGLKDHANQQVTDAMLANANFVYPENTPTTKEAYYYRTVFERFFPKNAARSTVPGGPSVACSTAKAVEWDASWSKNLDPSGRAALGVHVAAYDEAKMAGEGPTANGSPKE

SEQ ID NO: 18393 - protein, 645 aa, Ageratina adenophora
MSGKGEGPAIGIDLGTTYSCVGVWQHDRVEIIANDQGNRTTPSYVAFTDSERLIGDAAKNQVAMNPTNTVFDAKRLIGRRFSDASVQSDIKLWPFKVTPGPGEKPMISVNYKGEEKQFSAEEISSMVLIKMKEIAEAFLGTTVKNAVVTVPAYFNDSQRQATKDAGVISGLNVMRIINEPTAAAIAYGLDKKATSVGEKNVLIFDLGGGTFDVSLLTIEEGIFEVKSTAGDTHLGGEDFGNRMVNHFVQEFKRKHKKDITGNPRALRRLRTSCERAKRTLSSTAQTTIEIDSLYEGVDFYSTVTRARFEELNMDLFRKCMEPVEKCLRDAKMDKSSVHDVVLVGGSTRIPKVQQLLQDFFNGKELCKSINPDEAVAYGAAVQAAILSGEGNEKVQDLLLLDVTPLSLGLETAGGVMTVLIPRNTTIPTKKEQVFSTYSDNQPGVLIQVYEGERTRTRDNNLLGKFELSGIPPAPRGVPQITVCFDIDANGILNVSAEDKTTGQKNKITITNDKGRLSKEEIEKMVQEAEKYKAEDEEHKKKVDAKNALENYAYNMRNTVKDEKIGEKLSPEDKKKIEDAIDGAVSWLDNNQLAEAGEFEDKMKELENVCNPIIAKMYQGGAGDAAMDDDVPAGGSGAGPKIEEVD

SEQ ID NO: 18394 - protein, 1008 aa, Chaetomium chiversii
MTLTKGAADGVDKADPAGLSLNLSAQRPAVPERAESSLPPHLRPSVIEVPVTPGINREAYEPEGSNSLDAADGTAEPGYFSRQEVDHAIAESPAPDVTSHEGQSFQNKIATGAKEGTEFLRRVSVAVSGESRRESMSDIRAISPDLAITGNIISATFNLPHSLKYRKGEWELSPRRGQSTLIDSFAFLSSEESPWNHTVVAWTGEIENPPDALWPGGEPPKTTVHMSSLNVLSKPVPLDPSKAPPKPPAVDGLWIPKEDMLQLENILSHNKNIKTVPVWLADDVEGHGDGILLKDQARWRRYAEHDLYTLFHYKQHEPTDGRAERVQWADYFRMNQKFANKILEVYKPGDIVIVHDYNLMLLPSMLRQRAPHMYIAFFLHSPFPSSEFLRCLPRRKEVLEGVLGANLVGFQSYSYSRHFASCCTRILGFPSDSSGVDAYGARVEVGVFPIGIDATKVARLAWTDSVNEKYEALKALYAGKKIIVGRDRLDSVRGVAQKLMAFERFLEMYPEWREKVVLIQVTSPTNIEEEKEDPENKISSRVNELVMKINGAHGSIGFSPVLHFPQYISQEEYFALLRAADIGLITSVRDGMNTTSLEYVICQRKTAGPLILSEFSGTAGSLKDAIHINPWDLTGVAVQINNALTMPEDKRQAMEQSLLAHVTSKNVQYWIAGFLRRLVTVLGNRKSVTATPLLDRSAMLLKYRAAKKRLFMFDYDGTLTPIVREPSAAIPSERVIKSLKELARDHRNAVWIISGRDQEFLTQHLGHIKELGFSAEHGSFMRHPGSTEWENLAEKFDMGWQKEVLEVFQKYTDKVPGSFIEQKRCALTWHYRLADPEQGLHMSRECHRELETTVGRKWDVEVMAGKANLEVRPTFINKGEIAKRLVTTYNAEMRALNGGAAEDADKVGFVLCMGDDFTDEDMFRALNGLSDVKPAEIDAENCFTVTVGASTKVTLAHWHLLEPEDVIECVALLAGVGGSGSGAEGGPLSMGEVNLAALSAVEDHIPQH

SEQ ID NO: 18395 - protein, 246 aa, Thermotoga neapolitana DSM 4359
MRRLIAVLVLAISMVAFSGAIEEIKSRGYLLVGLSADFPPFEFVDENGNIVGFDVDLAKEIARRLGVELKIVDMTFDGLIPSLLTKKIDVIISGMTITEERKKVVAFSDPYFDAGQVIVVRKDSDFRPKTYEDLVGKTVAVQIGTTGDIEVSKYEGINVVRFDKFTDAFLELKRKRADAVVLDSATARAFVSKNPDIVISSDVLSSEQYGIAVRKEDTDLLEFINGVLRELKKSPYDVLIEKWFSE

SEQ ID NO: 18396 - protein, 584 aa, Thermotoga neapolitana DSM 4359
MIHVKMKGSKMLFEAFLREGVDTIFGIPGGAIINVYDELCNYEDKINFYLFRHEQGATHAADGYARVTGKPGVVIVTSGPGATNTVTGIATAYMDSIPLVVITGQVPTSFIGTDAFQEVDVTGITMPITKHNHLVTSIEELPYAIKEAFYVATTGRPGPVVLDFPKDIQTAEGEFNYPDEIEILGYKPTVKGHPKQIKKAMELLKESKRPIVIVGGGANLSGAMDLVNRFIDKFGVPAVSTLMGRGVNPSDERLYYDGIGMHGAYYGNYAVANADLIIALGVRFSDRILGNPRTFTRNARIVHVDIDPAEIGKNVSVDVPIVGDLRNVLEEFLKYDLDTDFSEWIEELQEVKKKYPLTYKRDGKLIKPQYIVEKVNEVFPDDTIVVADVGQNQMWVAQYYRFKHQRSFLCSGGLGTMGYALPAGIGAKIGAPDREVVIFAGDGGFQMNIQELMTVKRYNLPVKIIVMDNKALGMVRQWQQLFFNCRYSATILADNPDFAKIAEAVGIKAMRIEKPDEVDRAVEELARSKEPMLIHAVVDPAENVLPMVPPGGDVGTPLVEAPYDESFVERVLKVIEESRRGDER

SEQ ID NO: 18397 - protein, 723 aa, Thermotoga neapolitana DSM 4359
MRKVRVGIAGLGTVGGSIYRILKERGEEIEKRVGERFIVSKVINRSPQKYEVYGVPPEEIAFDFDDLILNSDVVIEAIGGTDVAVDLVRRALELGRIVVTPNKNLISEYGNEFVDYIRKRKLFFEASVGGGIPIISLLQDYLIFQKVTRIRGIMNGTTNYILTEMSKGRPFDEVLKEAQKLGYAEADPTNDVEGYDVAYKVSVLAGVVTGRFPGIHSVRFEGITGIDPEYLKEIVRSGKKLKLIGELDFSTNTYEVRLREVTPEDPFFNVDGVDNAIEVSTDLAGDFLLKGRGAGGYPTASAVIADLFRVAKYKVLGGAEKFSVVVMKFGGAAISDVEKLEKVAEKIIKRKKSGVRPVVVLSAMGDTTDRLIDLAKTIDENPDPRELDLLLSTGEIQSVALMSIALRKRGYRAISFTGNQLKIITDKRYGSARIIDINTDIISRYLRQDFIPVIAGFQGITETGDITTLGRGGSDLTAIALAYSLGADLCELYKDVDGVYTADPKIVKNARVIKELSWEEMIELSRHGAQVLQARAAEFARKYGVKVLIKNAHRETRGTLIWEGTKVENPIVRAVTFEDGMAKVVLKDVPDKPGVAARIMRTLSQMDVNIDMIIQGMKSGEYNTVAFIVPESQLEKLDLDLLKTRSDAREVIIEKGLAKVSIVGVNLTSSPEISATLFETLANEGINIDMISASSSRISVIIDSKYVEDAVKAIHSRFELDRE

SEQ ID NO: 18398 - protein, 371 aa, Thermotoga neapolitana DSM 4359
MEPGGDVMITTTIFPGRYVQGAGAINILEEELSRFGERAFVVIDDFVDKNVLGDGFFGTFTKVRVNKQIFGGECSDEEIERLSGLAEGETDVVVGIGGGKTLDTAKAVAYELKRPVVIVPTIASTDAPCSALSVIYTPSGEFKRYLFLPKNPDVVLVDTKIVAKAPARFLVAGMGDALATWFEAESCKQKHAPNMTGRIGSMTAYTLARLCYETLLEYGVLAKRSVEEKAVTPALERIVEANTLLSGLGFESGGLAAAHAIHNGLTILENTHKYLHGEKVAIGVLASLFLTDKPREIIEEVYSFCEEVGLPTTLADIGLDDVSDEDLMKVAEKACDKNETIHNEPRPVTPEDVFFALKTADRYGKMRKNLT

SEQ ID NO: 18399 - protein, 502 aa, Thermotoga neapolitana DSM 4359
MRLILLKHIKDIQRIFPGNPQQNIQPYMGFVPSEGGPHRVFVFCVSKKKLFIFTLIYKSTLLGGGVLMRRKFLFLMLAFVLLSLGFAQDGSVDVGWSLDMVWLLVSAALVFFMQAGFAMVESGFTRAKNTVNIVMKNLMDFSIGSVVYFLFGYWIMFGTHPLTFDPSMKEGLWEFAMWMFQMAFAGTAATIVSGAMAERTKFSAYLAYTGFITGIIYSVVGRWIWGGGWLAQRGFIDFAGSTVVHSVGGWAAMIGAALLGPRFGKYDSQGNPRPIPGHNIPLAALGTFILWFGWFGFNGGSTLAGTNGAIGMIILNTNLAAAAGALAAMITVWMRYGKPDASMTMNGALAGLVAITAPCAVVSPVSSLIIGAIGGVIVVFAVEFFDKVLKIDDPVGAISVHGVNGAWGTLAVGLFAESKYALASGMGDVQGLFFGGGVHQLGVQFLGVISVFAWTVATSFLVFWFIKKTIGLRVDRDTELKGLDIDEHGMEGYADFEIFTTR

SEQ ID NO: 18400 - protein, 507 aa, Thermotoga neapolitana DSM 4359
MAKRKVPAEFVVERDDYKCIRCLACVRVCSYGANYYDENANRVYTENYKCVGCHFCEAICPTEAITVRRNNFDIRPLAHWTPEHLIGIMKQADTGGVLLTSMGNDRPYFSYFDRIVLNASQVTNPSIDPLREPMEIRTYIGRKEAKLEIEEDGEGNVALKTEIAPQLKLEVPVMFTAMSYGSISLNALLSLARAARTIGTFFNTGEGGLPKELREFKDNMIVQVASGRFGVSADYLNAGSAVEIKIGQGAKPGIGGHLPGEKVTEPISETRMIPVGTDALSPAPHHDIYSIEDLRQLIYAIKEATRYEKPVGVKIAAVHNVAPIAAGMVRAGADYIVIDGIRGGTGAAPKVTRDHVGIPIEFAIAVVDQRLREEGIRHMASIVVAGGIRNSADVIKAIALGADAVYIGTAALVALGCHLCQTCYLGKCNWGIATQDPKLTKRLNPEIGARRAANLLRAWAHEIKEILGGMGINAIESLRGNREALRGVGLHEYELKLLGIKPAGEAW

SEQ ID NO: 18401 - protein, 596 aa, Thermotoga neapolitana DSM 4359
MAEKKEFVVGIDLGTTNSVIAWMKPDGTVEVIPNAEGSRITPSVVAFTKSGEILVGEPAKRQMILNPERTIKSIKRKMGTDYKVRIDDKEYTPQEISAFILKKLKKDAEAYLGGEIKKAVITCPAYFNDAQRQATKEAGIIAGLEVLRIINEPTAAALAYGLDKAGKEQKVLVYDLGGGTFDVSILEIGDGVIEVIATAGNNHLGGDDFDQRLIDWMAEEFKKQHGIDLREDRQALQRLRDAAEKAKIELSTKMETDVSLPFIAVSPSGQPLHLEMRITRSLFESLTRDLVEMTRGPIEQALNDAKLSPQDIDEIILVGGMTRVPMVQRFIKEFFGKEPNKSVNPDEAVAIGAAIQAAILAGTEGAKGRDIVLVDVTPLTLGIEVKGGLFEPIIPRNTKIPVRKSKIFTTVEDGQTEVEIRVYQGERPIARENIFLGSFKLVGIPPAPRGVPQIEVTFDIDSDGIVHVSAKDLGSGKEQSMVVTGRHKLSEEDIKRMIEDAKRYEEQDKRLKEEIELKNRADDLAYSVEKTLREHGDKIPADLKSKLENMIKELRDAINRNDIPRVKMLFDDLQKESMKIGEYLYKSATGGEATNQ

SEQ ID NO: 18402 - protein, 147 aa, Thermotoga neapolitana DSM 4359
MLLGRREDIFRPFRELQREIDRLFDEFFKTEIRPSREVFAPDMDVYETDDEVVVEVEVPGLDRKDIKITVEENILKISGEKKIEREQKGRNYYFVERSAGKFERAIRLPDYVDVEKIKAEYKNGVLTVRIPKKEERKKKVIEVEVQE

SEQ ID NO: 18403 - protein, 327 aa, Thermotoga neapolitana DSM 4359
MRKVLIVTRTFGKYSQEPIDFLRKNGFETIRADTIDPDALKDADALIVGTHPVTAEMIENSNLKIIAKHGVGVDNIDLNAATKKGIPVTITAGANSLSVAELTIAFIFALSRGLVWAHNRLFQERKWEGIIGQEVSGKTLGVIGFGAIGREVVKKAVCLGMNVLVYDPYVSKDSVRLSEATPVDDLDHLLRESDFVSLHVPLNESTRNMIGEREISLMKKSAFLINTSRGGLVDEKALVKALKEGKIAGAALDVFSEEPPDPGSPLFECPNLITTAHIGAHTKEAIYRMNMMAAQAVVDFFSGKIPKHVVNEEVIDLLKRKGLQETS

SEQ ID NO: 18404 - protein, 223 aa, Thermotoga neapolitana DSM 4359
MGGGKMKIFLDTANLEEIKKGVEWGIVDGVTTNPTLISKEGAEFKQRVKEICDLVKGPVSAEVVSLDYKGMVKEARELAQLSEYVVIKIPMTPDGIRAVKTLSAEGIKTNVTLVFSPAQAILAAKAGATYVSPFIGRMDDLSNDGMRMLAEIVEIYDNYGFETEIIAASIRHPMHVVEAALMGVDIVTMPFAVLEKLFKHPMTDLGIERFMNDWKKYLENLKK

SEQ ID NO: 18405 - protein, 597 aa, Thermotoga neapolitana DSM 4359
MPEFRRRPHGPVLEKPTLKNPKATLKRFLGYLRPHALTLILVFVFVTVSSFFGILSPYLIGKTIDEVFVPRAFDRLPRYALVLGSIYVLTSLLFWLQGKLMLRLSQDVVFRMRKELFEKLQRIPVGFFDKTPHGDIMSRLINDVDNINNVLGNSIVQVFSGIVTLIGVVIMMFRVDVLLSFVTLSIVPLTVLITRIVSSRTRKYFYENQKVLGELNGIIEEDISGLSVIKLFTREEKEIEKFNRVNEVLRKVGTRAQIFSGILPPLMNMVNNLGFALISGFGGWLALRGTITVGTIATFIGYSRQFTRPLNELSNQFNMIQMALASAERIFEILDIEEEKDDPEAIELKDVRGEIEFRNVWFSYDKKTPVLKNITFHIKPGQRVALVGPTGSGKTTIVNLLMRFYEVDEGQILIDGVDIRKIKKSSLRSNIGIVLQDTILFSTTVKENLRYANPDATDEEIKEAAKLTHADHFIKHLPEGYDTILTDNGEDLSQGQRQLLAITRVFIANPKILILDEATSNVDTKTEKSIQSAMWKLMEGKTSIIIAHRLNTIKNADLIIVLRDGEIVEMGKHDELIQKRGFYYELFTSQYGLVVER

SEQ ID NO: 18406 - protein, 412 aa, Thermotoga neapolitana DSM 4359
MERREVKEMKVLVINSGSSSIKYQLIEMEGERVLCKGIAERIGLDGSRLVHRVNEEKHVIEKDLPDHEEALKLVLNTLVDENLGVIKDLKEIDAVGHRVVHGGEKFKESVFVNEEVIKAIEEVSPLAPLHNPANLMGIKAAMKLLPGVPNVAVFDTAFHQTIPQKAYLYAIPYEYYEKYGVRRYGFHGTSHRYVSKRAAEILGKKLEELKIITCHIGNGASIAAVKHGKCVDTSMGFTPLEGLVMGTRSGDLDPAIPFFIMEKEGISPQEMYDILNKKSGVYGLSKGFSSDMRDIEEAALKGDEWCKLILDIYDYRIAKYIGAYAAAMNGVDAIVFTAGVGENSPITREDVCSYLEFLGVKLDKQKNEETIRGKEGIISTPDSRVKVLVVPTNEELMIARDTKEIVERLGKR

SEQ ID NO: 18407 - protein, 438 aa, Thermotoga neapolitana DSM 4359
MNIKSAEFVDRVKIFVKAGDGGNGCVSFRREKYVPKGGPDGGDGGDGGFVFLRANPSLSTLIEFVNKRKFFAENGKHGMGKKMKGRNGRDLYIDVPVGTVVKDASTGQIIADLDEPGKVVCVARGGRGGRGNAHFSTPTRQAPLIAEKGEKGEARWLELELKILADVGLVGYPNVGKSSLIARISNARPKIANYPFTTLVPNLGVVKYGDFSFVVADIPGLIEGASEGVGLGNVFLRHVERCFVIVHMLDVSGFEREDPARDYFIIREEMKKYSPFLLEKPEIVVANKIDLLEREKLPQRIKEIESSIGKEVIPISAVTGEGVDLLLDRVASIVRKERIEREERKEKKDHPMEKPAPVWRKLPERFEVEVVKEEDGQWVVEGEGLRVWMERFDLNQRDARLLILQILEKNGLEEKLKEAGVKEGDVVRIGNFEFEYRE

SEQ ID NO: 18408 - protein, 78 aa, Thermotoga neapolitana DSM 4359
MSGKILKRSDFFMRGTVKWFDSKKGYGFITMENGEDIFVHWSAIQMDGFKTLRENEPVEFDVQQGTKGPQAVNVRPVR

SEQ ID NO: 18409 - protein, 315 aa, Thermotoga neapolitana DSM 4359
MSFSNEMKVFAGNSNKPLAEKIARYLNLQLGDCEVGRFADGEINVRINETVRGHDIFLIQSTSPPVNENLMELLIMIDAFKRASANTIAVVIPYYGYARQDRKAKGRDPISAKLVANLITVAGATRVLTVDLHAEQIQGFFDIPVDNLWSYPVFAEELQKREEIVPEETVVVSPDVGGVRRARRMAERLKTSLAILDKRRPSDNVAEVVNIIGEVKDKVVILFDDIIDTAHSIVKGAEALKKAGAKKIIACATHGVFSENALERIENSPIDTVYITDTIYHERLPEKVKVISVANLIGEAIMRIRKHLSVSILFR

SEQ ID NO: 18410 - protein, 66 aa, Thermotoga neapolitana DSM 4359
MRGKVKWFDAKKGYGFITKDEGGDVFVHWSAIEMEGFKTLKEGQVVEFEVQEGKKGPQAAHVRVVE

SEQ ID NO: 18411 - protein, 387 aa, Thermotoga neapolitana DSM 4359
MNIMRVYFDNNATTRLDDRALEEMITFYREKFGNPNSAHGMGIEANLHLEKAREKIAKILGVSPSEIFFTSCATEAINWIHKAVAEVFEKRKRTIITTPIEHKAVLETLKYLSLRGFRVKYIPVDSRGVVKLEELERMIDEDTFLVSVMAANNEVGTIQPIEEVVKIVKKKNKEILVHVDAVQVIGKIPFSLERLNVDYASFSAHKFHGPKGVGIAFIKKGAPIRPFVHGGGQERGLRSGTQNVPGIVGAAKAMELAVENLESTMKHMERLRRKLAEGLRKLGAHIITPLDVSLPNTLSVSFSNLRGSTLQNLLSSHGIFVSTSSACTSKDENLSHVLTAMGIDRRIAQGAIRISLCRYNTEEEVNYFLEKTGEILSFLGINENNRR

SEQ ID NO: 18412 - protein, 400 aa, Thermotoga neapolitana DSM 4359
MFSKRVLNFEESPIRKLVPYAEAAKKRGIKIYHLNIGQPDLKTPEVFFESIRKRTPDVVYYSHSAGIPELREAFASYYQRRQNAHVKPENVLITNGGSEAILFSFTVVADPGDEILVLEPFYANYKAFAKIAGVKLVPVVRQMEDDFSIPDNLDRFVNDRTRAIVLSNPCNPTGVVYGERDLRYLLDFVERNDLFMIVDEVYSEIVFRGNFVSAMTFESDRVIVVDSVSKKFSACGARVGCLITKNEQVLNHAMKLAQGRLAPPLLEQIGSVALLNLDEDFFRTVRETYRERVEIVIKKLEEYGLKRFTRPSGAFYVTVELPVNDSEEFARWMLTDFDLDGETTMVAPLKGFYITPERGKREIRIACVLDKEVLSRAMDVLMEGLRTWLKKFSSVQQYLS

SEQ ID NO: 18413 - protein, 385 aa, Thermotoga neapolitana DSM 4359
MFRILVINPGSTSTKMAIFEDENMVKMENIAHTPEEIGRYQKIVDQLEFRESLIRRFVEDSGYSLFSFSAFVGRGGLVDPVPGGVYIVDDLMVETLKSGKNGEHASNLGALIAYDLSLQTEAPAYIVDPVVIDEMEEVARISGHPDYQRRSIFHALNQKAVAREVAGSVGRRYEELNLVVAHMGGGISIAAHRKGKVIDVNNALDGDGPFTPERSGTLPLIQLIDLCFSGRFSYEEMRKRVVGNGGLIAYLGTNDAREVVRRIKEGDRWAERVYRAMAYQIVKWIGKMAAVLNGDVDYIVLTGGLAYENEFLVPWIKEKVSFIAPVLVFPGSNEEKALALSVLRVLKGKEKAKNYAEEARKWREKHDFHLELIRSRENRLRQSSK

SEQ ID NO: 18414 - protein, 409 aa, Thermotoga neapolitana DSM 4359
MTEVVEMKLVVQKYGGSSVATPERIKNVAMRIKKKVEEGFKVVVVVSAMGKTTDELIKLAKEVSPKPDARELDMLLATGEQVSAALLSMALKDLGVKAKSLNAFQVRIKTTPHHTSARIMDIDDSVIMENLKEHDALVVTGFQGVNERGDLTTLGRGGSDTSAVALAAKLRVPCEIYSDVDGIYTCDPRLIPGAKKLKYITYDEALELTALGAKVLHSRSVEIAKKYRIPVYCASSFVEEEGTMVVERLPEWLEEPVVTGATISHGQIKVSISFLPKEAEYITAIFEEVGKRSLNVDMISLVPSNGKVFLSFTILEDHKDDLDEALRNALKNVEGWKSSYEEGFAKLSIVGVGMRTSPGVAARFFSALKRVGVTPELVTTSEIKISCLVPEKDAEKALKAVVDEFDLAE

SEQ ID NO: 18415 - protein, 445 aa, Thermotoga neapolitana DSM 4359
MILKKIVAVLLVILPFILFGIEPIKVTRSDEEIVVLTKFREYHFDLERGILKDYYTLVEGRKHVFTYGNDGFDVLDEGTPLTVIEDPIVTGKGKTSEGFSEEVSIVYNYGYVKKIFTIKNDENYLFFVGIESSRPVEVTLPRVSLDPSTDRYMENYFASFNSKSRTLVLVKHDEGLRFEGTLEVNGQKRLTVFMGPNKRTLIKKAFPEDYESLMKALGNIPGFNRWYDTVFYGLVWFFWWLKDLTKSFGWAIVLFTLIVRLILYPLYHAQTKSLINMRKLQPQIEAIKKKYKDPAKQQEALLKLYKEAGVNPASGCLMLLIQLPIFILLWSVIRYYVEEFAYSGGFLIWKDLSAGGFANNWIFLVITIVSSYYTTLLTSQDVRTAWQGLIMSIIFPFLFVGLPSGLFLYYTTNTLIQLAVTYYTYRRYKIKGITTRELLGLPKKA

SEQ ID NO: 18416 - protein, 127 aa, Thermotoga neapolitana DSM 4359
MRRKSLFGYVLQRLYTSGWEVKVLYAIVETAGRQYKVEEGKILYTEKQTEYAPGDEIVFDRVVLLRKDNEVLVGKPYVEGARVVGKVLEHAKARKVKTVKYRPRKNSKVEKGHRQWYTAIKIEKIEV

SEQ ID NO: 18417 - protein, 246 aa, Thermotoga neapolitana DSM 4359
MMKVLELVDIWYEVEGKTILREINARFEEKKVYSILGTNGAGKSTLAYLIMGLEGYRPTRGKILLDGEDITNLSVTERARRGITLMWQEPARFTGIKIRDYLTLGGKRKVSEDELERVLETVGLNPLLYLERNVDEKLSGGERKRVELASILLMKPRYTILDEPDSGIDIMSLEMIERVLSELVSAGGSVILVTHREEIALESDYAFLICHGTILKEGDPSTIVQFYKNSCDKCDHPNEPQEEMIG

SEQ ID NO: 18418 - protein, 409 aa, Thermotoga neapolitana DSM 4359
MKEKVVLAYSGGLDTSVILKWLCEKGFEVIAYVANVGQKDDFEAIKEKALKTGASKVYIEDLRREFVTDYIFTALLGNALYEGRYLLGTAIARPLIAKRQVEIAEKEGAQYVAHGATGKGNDQVRFELTYAALNPNLKVISPWKDPEFLSRFKGRTDLINYAREKGIPVKVSKKRPYSEDENLMHISHEAGKLEDPMYIPDEDVFTWTVSPKEAPDEETLLEIHFEKGVPVKVVNLKDGTEKTDPLELFEYLNEIGAKNGVGRLDMVENRFIGIKSRGVYETPGATILWIAHRDLEGITMDKEVMHLRDMLAPKFSELIYNGFWFSPEMEFLLAAFKKSQENVTGKVIVSVYKGNVMPVARYSPCSLYNPELSSMDVEGGFDATDSKGFINIHALRLKVYRLTKKGYEK

SEQ ID NO: 18419 - protein, 306 aa, Thermotoga neapolitana DSM 4359
MAKYRVHVNDPLDEEATKLLMEKEELTVTSRHLEKEELLKTISEVDVLVVRSATKVTSDIIEAGKNLKIIARAGIGLDNIDVQKAKEKGIKILNTPGASAPSVAELAIGLMLACARHIAKATISLKEGKWEKKILKGKELLGKTLGLIGFGNIGQEVARRALGFGMRVIAYDPARPKTDLPVEYVDLDTLLKESDFISLHVPLIESTKHMINKDTISKMKDGVIIVNTSRGGTIDEEALYEALVSGKVYAAGLDVFEVEPPSDELRRKLLSLDNVVATPHIGASTAEAQKRVGKELVEKIFRELGI

SEQ ID NO: 18420 - protein, 246 aa, Thermotoga neapolitana DSM 4359
MLEIKDLHAKLRDEEKEILKGVNLRIEKGEVHVLMGPNGSGKSTLANVVMGNPKYVVTKGDILFEGRSIKDLPPDERAKLGIMMTFQNPYEIEGVKFSQFLITSHRKVHGEEKNYLELRRELENQSEKLGLGRDFLERYLNVGFSGGEKKRAEILQALFLKPRLLILDEIDSGLDVDALKLIAKIIADLNKEGVTLLIITHYKRLLDYLERIDRVHVYVDGRIVKSGGADLADEIEEKGYSLEGVR

SEQ ID NO: 18421 - protein, 377 aa, Thermotoga neapolitana DSM 4359
MIARRISEIPISKTMELDAKAKALIKKGEDVINLTAGEPDFPTPEPVLEAAKSFLEKGQIKYTDPRGIYELREAIAKKVGERYGKEISPDQVVVTNGAKQALFNTFMALLDPGDEVIVFSPVWVSYIPQILLAGGTVKVVETFMKNDFHPSLEEVEGLLVGKTKAVLINSPNNPTGVVYSRSFLEGLLRLSEEMHFYIVSDEVYDSLVYTDNYTSILDIAKDFERVVYINGFSKSHSMTGWRVGYLISNRELASAVSKIQSHTTSCINTVAQYAALKAIEVDNSHMVQVFKERRDLVVERLKKMGVKFVEPQGAFYLFFKVPGDDVKFCERLLEEKKVALVPGSSFLKPGFVRLSFAISTERLAEALDRIEDFLNSH

SEQ ID NO: 18422 - protein, 359 aa, Thermotoga neapolitana DSM 4359
MMEMEKRLSTRTNFILTVIFVLFMVFLLYLANRYMDSYKLRVVRLIAIYGIMAVSLNLINGITGIFSLGHAGFILIGAYTASLLTLSPEQKAMSFIIEPIVPWLANVHTDFLTATLAGGALAALFAFLIGWPVLRLSGDYLAIASLGFAEVIRIVALNAISITNGPLGLKGIPEYSNIWWCYGWLFVTVLFTASLVNSSYGRALKAVREDRIAAEAMGINVFKHQLLSFVIGAFFAGVSGSLYAHWLTTIDPRITTLGPMLTFYVLIMIVLGGLGSISGSLIGAALFAILFEWLRDLEEPFTFFGIHVPGIKGMRILVISAIFILVMIFWQRGIMGREELTWNNLYRWLFARRKGGEKK

SEQ ID NO: 18423 - protein, 222 aa, Thermotoga neapolitana DSM 4359
MRMKFFLDSANLEEIKYAIKKWKIDGITTNPRHLMVAGMTVEDFAREVKELVEGTHITVSLEVNPHLEDPKEIVDQATSLASLSNNFVIKIPATESGFEALAELSSKGVKVNITLVFNLVQALQAARLGAYYISPFVGWREERGELNTDFINQIVKAVKGYGYSSQIIVAAVRSAKHFVEAALAGADIVTAGFQVYKRAFDNPYTRMGLQIFSDAWNSIYGR

SEQ ID NO: 18424 - protein, 125 aa, Thermotoga neapolitana DSM 4359
MHDKIFREGETMLNIYLKSKIHMATITRKEVYYEGSIEIDEELMGKAGISEGELVLVVNVNNAERFVTYVIKGKRGSREINLYGAAARLGEEGDRVIIMAFTFSDKPVKAKTIVLNEKNEIVQEK

SEQ ID NO: 18425 - protein, 363 aa, Thermotoga neapolitana DSM 4359
MKCPGCGANIQFEDPKKPGYIPREAFEKRLEEGKEILCQRCFRIKHYGKLEPIEYDWDFRNQLKSYLGGFEVVLWVIDIFDFEGTYREDIANLLEGKDVVYVINKLDLLPRAVTVKEVKEWVKKRIKAKDPERIRIVSAEKNYGLKSLVKLLARLTDKALVIGVTNVGKSSLLNRICTHENTISSFPGTTLGILRRKVKGENLYLYDTPGIMTKDRILDLLDPECQKTILPKEELSRKTFKPERNRTIFMGGLCRFDVDYETERSPIFLLFSSREVTFHETRRERADELMKNRLGDLLKPPCSKARYEDFTWKKEKFVLNEGEELAVAGLGWMSVRRGPLTVEVTVPENVKLVVREALVNPNR

SEQ ID NO: 18426 - protein, 301 aa, Thermotoga neapolitana DSM 4359
MMNIKSGFVALAGKPNVGKSTFINTVLGRKVVIVSDKPQTTRNRINCIYTDKDAQIVFVDTPGIHKPLHRLGEYMVRAAVQALKGVDIVLFMLDAADGFTKTDEQVAKIVNESRTKTIIAVNKIDVAGEEKAKSVGELAKSMVENAVSVHYISALKGIGVFELLDRIKEELPEGPQYYPEDMITDRPLSFMAAEIIREKIFHLTRQEVPHSTAVVIEEIKDRPNGVLYIRANIYVERDSQKGILIGKNGSMIKKIGTLAREEIEFLVGRKVFLDLNVKVKEKWREKDFIILQEIGLKHDIE

SEQ ID NO: 18427 - protein, 304 aa, Thermotoga neapolitana DSM 4359
MKLVESVPNFSEGRRKEVVEKIVAEAKKYDRVWVLDWSMDADHNRSVVTLVGEPENLINALFDMTKKAVELIDLRNHTGQHPRMGAADVIPLVPLYNVTMDECVQYSKILGKRIGEELGVPVYLYEKSATHPERENLANIRRGEFEGFFEKIKDPMWKPDFGPDRVHPSAGVTAVGAREFLIAFNVNLGTGDVRIAEKIAKAIRFSSGGLRYVKAIGIELKEKGIVQVSINITNHKKTPLYRVFEMIKMEAERYGVPVLSSEIVGLFPLDSLIQTVSYYLRTNLNSKKVIESNLLDILVKEAGK

SEQ ID NO: 18428 - protein, 316 aa, Agrobacterium vitis S4
MTGAELAPEATELLKRHAIEIVYADGYSGSENLAEIAKTHAVDAILVRQGQINDQVIASSSRLRVIAKHGSGVDNIDLDAATSHNIPVLRALAANAQSVAELAITLSVTLMKDIGSLSDTVKGGAWPKTKYVGRDLAGACFGIIGFGEIGRRTAKLAQGLGMETIAYDPFAEDADGTRVSRDLSDILAQSDIVSLHCPLTPQTHHLINAERLKVMKSTAFIVNTSRGAVIDEAALLDALKDGSIAGAALDSFEQEPPAADHPFWALPNLIATPHVGGASRSALRNMALQSAQHIVDVLTGAPFDRRALANQNLAQN

SEQ ID NO: 18429 - protein, 404 aa, Agrobacterium vitis S4
MSMPKPMIADRLKNVAVSASAAMTQRARELAAQGIDVVSLSSGEPDFATPAHAIEAAHAAALAGDTKYPPLDGTAALRAAISRKFKRENSLDYDPSQIVVAGGGKQVIFNAVMATCNPGDEVVIPTPSWISYADIVRFAGGVPVPVECPQQNGFKLRAEDLEAAITPKTKWLFLNFPNNPTGAACSRQDMAAIAEVMLRHPDVWIMTDDIYEHLIYDGFEFCTIAEVEPRLYDRVLTVNGASKAYAMTGWRLGYCGGPKDLIKAISNVNGQNAGGTSTITQAAAMAVLDGPQDLLKERANIYKGRRDYVLSRLAEIDGLRAHKPEGAFYIFPSIAGLIGKTTKGGRKIENDADFVSALIDEQHVATVQGAAYGMSPFFRISYATSMERLTAGCDRIAQFCKDMK

SEQ ID NO: 18430 - protein, 315 aa, Agrobacterium vitis S4
MAKPEILQVGPYPAWDEGPLNDQFTVHRYFDAADKNAFVAHVGPSIQGIATRGELGADRAMIDACPKLEIISVYGVGYDAVDLAACRDRGIRVTNTPDVLTNDVADLGIAMMLCQSRGMIGAETWVKDGSWAAKGLYPLKRRVWGRRAGVLGLGRIGFEVAKRLKGFDMQISYSDVAAKPYAEGMTFVADPVELAGNSDFLFVTLAASADTRHIVGRDVIEALGPEGMLINISRASNIDEAALLEALEAGRLGSAALDVFEGEPKLNPRFLALDNVLLQPHHASGTIETRQAMGQLVRDNLTAHFAGSALPTPVL

SEQ ID NO: 18431 - protein, 524 aa, Agrobacterium vitis S4
MGGVSLAAGECKPAPLLLKLEGVTKEFPGVKALQDVSLDVRAGEVHAVCGENGAGKSTLMKIISGVYQRDAGNMIYKGETVHFTSTLQSEAAGIAIIHQELNLVPHLSVAENIYLAREPRLSFIGGDFMVNRRKLRQDAKRCLDRLGVDINPDAQVRTLSVAQRQMVEIAKALSLNASVLIMDEPTSSLTQQEAQLLFRVIRDLKREGTGIIYISHRLDEMAEIVDRVTVLRDGRYISTDDFDAITVDYIVARMVGRSLEEKFPAPTRSPSKDTIFSVSGLTRHGVFSDIGFELRRGEILGFAGLMGAGRTEVARAIFGADPFDSGTLLLEGRPLSISDPRSAIDAGLAYLSEDRKAGGLAVKMPVDANLMMANMEAVSNPFGVIDKELHRQSSQHYVNLLNIKTPSLNQPVRLLSGGNQQKIIIGKWLFRQPKIMFFDEPTRGIDVGAKLAIYRLMDELAAKGIGIILISSELPEILGLSDRVAVFHEGRITATLTTRETSQEEIMLYASGRVRESARGMTHG

SEQ ID NO: 18432 - protein, 429 aa, Agrobacterium vitis S4
MIPGDNLSWSNWSGSVETKLKAILRPRTKEELQDVIRSAPGPLRLVGSGHSFTPLVSTPGTIVDLSALSGLIDYDSDALTATIAAGTKLSDLTELLAGIGQALPNMGDIDKQSVAGALGTATHGSGLGLGAYHTLLKGMQFIDGRGTHREFTAGRDDEMIHATGVTLGSFGALTAVTFQNVPAYNLRRKRTMLSIGNTLENFETLMSAHRSAEIFFVPFANHALFQTLDITDETGDFQVTSEDEDGLATLKKLRTFLRWFPGLRRKLIGNAMAKLSDEEAVGEWMKVYVTDRQTKFNEMEYHLPFEEGAGALAEIIELIEKRFPEIYFPIEVRSVKGDEFWLSPFYKRDTCSIAIHHGIGENPAAFFLAAEAVFRKRGGRPHWGKLHNLRAADLVGIYPRFKDAMEIRSEIDPENRFISPYMATLLGVR

SEQ ID NO: 18433 - protein, 376 aa, Agrobacterium vitis S4
MNSGIKKILIIGGGFSGMTAALQLSREGFEVDLVEIDPGWRSYGAGISLHGSTLRVLRQLGLLDRFMEEGYASDGVHLRGPDDAVLFTLPTPRVAGDDIPGGGGIMRPALAKILSEAVRASTTKVRLGVTFTEIVQSEDGAQVSFSDGSSDRFDLVIGADGLFSAVRSKTFPHAPKPRFIGQSVWRAVLPRPEELETITMWMGPKLKVGLNGVNKTQAYLFLTEDRPTNNFVAPELFVDTLRGLMERFSSPIIQGIAKQLSAEHQIIYRPLEQMLLPRPWFQGRVVLIGDAVHATTPHLAAGACIGIEDAMVLAEELVRGSDVDGALAAFEARRWERCRMVVENSGRLADIEIHGGSREEHASIMTVSMKTLAEAI

SEQ ID NO: 18434 - protein, 70 aa, Agrobacterium vitis S4
MAIKGTVKFFNQDKGFGFITPEGGAKDVFVHISALQAAGIQTLRDGQEVTFDTEADRMGKGPKAVNIRAA

SEQ ID NO: 18435 - protein, 290 aa, Agrobacterium vitis S4
MTRIAFLGTGLMGEPMARHLAADFEVVVWNRSPQKAQALSDVARVAASPADAARGADVVISMLLDGPATRATLEDSGAMAAAGEGALIIDMGSVEPACDRDLASLARQMGKRFLDAPVSGGVAGAKAKSLSIFVGGAPEDFAAAVPILEKLGRPTLMGPVGTGQTAKLANQLIVAVTIGAVAEAFRLAQSAGCDPATLRDALRGGFADSRILDLHGERMVTGNFTPGGRSAAQLKDLNNALSVAAEHDLTLPLSETVRAGFTDLVQNKGGADLDHSAYYLWLQQIQPVKD

SEQ ID NO: 18436 - protein, 432 aa, Agrobacterium vitis S4
MTRIAHHAINRRSILKATGAVATLAAARILLPSGALAATATPEVTSAKLGFIALTDAAPLIIAQEKGLFAKYGMTGVDVSKQASWGATRDNLVLGGASNGIDGAHILTPMPYLMQTGKVTQNNVPVPMSILARLNLDSQGISVAKEYAETGVALDAAKLKDAFAAKKAKTGEVKVAMTFPGGTHDLWIRYWLAAGGINPDKDVSTIVVPPPQMVANMKVGSMDAFCVGEPWNEQLVNQGIGFTACTTGELWKGHPEKAFSMRTEWVEKNPNATKALMMAIMEAQIWCDSMENKAEMADILGKRQWFNVPPKDVLGRLKGNINYGNGRVVENTGLQMKFWQDHASYPFKSHDLWFLTENIRWGKFAADLDMNALVDKVNREDIWRAAAKDLSVASADIPASTSRGKETFFDGKVFDPENPKAYLDSLTIKAAA

SEQ ID NO: 18437 - protein, 310 aa, Agrobacterium vitis S4
MECRLIGVPLQIGAGRLGCEMGPSALRIAGLGPMLEELGHRVTDLGNVAPAAFKSLSHPNPAVHHLPETVAWIETLSEAAYRESADAMPIFLGGDHALSAGTVPGLARRAAEQGRPLFVLWLDAHTDFHTLETTESGNLHGTPVAYFTGQPGFTGYFPDLVEAVDPAHVAMIGIRSVDPAERAALRRTGITVHDMRMIDEHGVAVLLRAFLDKVRAANGLLHISFDVDFLDPMIAPAVGTTVPGGATFREAHLVMEMLHDSGLVSSLDLVELNPFLDERGRTAILMADLTASLMGRQVMDRPTRDYAGSV

SEQ ID NO: 18438 - protein, 374 aa, Agrobacterium vitis S4
MTSRGYGGPLRYVQGPGVINEIGLYIAPLSNSALIVIDGFFWDTLRPEVEKNLDAHGVKSHFMKFCGESTDKEVERAVSLGKTAGAGVVIGIGGGKALDTAKISALHIGARTVTVPTIASTDSPTSALGVIYSEDGVYDRVVRCGRNPDVVLVDSALIIKAPVRFLVAGMGDALSTWYEARSNFESHSNNYIGDGYGTTAAGAAIARRCHEVLMRDGRAAYAAAIDGKLTPAVENIIEANTLLSGLGFENCGVSGAHGIHDALTVLEPTHHFFHGEKVAFGIIGLLVLENRPLDEINEAIDFCQDLKLPTMLGDLGLETVTAEDLLKVGEIAMAPASVIHSVPVKLTPRLIADCIWTASKLAETRKQSRAGRVL

SEQ ID NO: 18439 - protein, 401 aa, Agrobacterium vitis S4
MTEAFICDYIRTPIGRFGGALSSVRADDLGAVPLKALLAKHANLDWEAVDDVIFGCANQAGEDNRNVARMSLLLAGLPVSVTGTTINRLCGSGMDAVIAAARAVKSGESELMIAGGVESMSRAPFVMPKAETAFSRNAEIYDTTIGWRFVNPLMKKQYGVDSMPETGENVAEDYKISRQDQDAFAVRSQNKASEAQANGRLGQEITPVTIPQRKGDPVIVDKDEHPRATTIETLAKLGTPFKKEGGSVTAGNASGVNDGAAALIIASEAAARKYGLTPIARIMGGATAGVPPRVMGIGPAPASQKLLDRLGLTQQQLDVIELNEAFASQGLATLRQLGIADDDPRVNRNGGAIALGHPLGMSGARITGTAALELSLTGGRYSLSTMCIGVGQGIAVALERA

SEQ ID NO: 18440 - protein, 190 aa, Staphylococcus aureus
KIVLPEGEDERVLTAATQLQATDYVTPIVLGDETKVQSLAQKLDLDISNIELINPATSELKAELVQSFVERRKGKATEEQAQELLNNVNYFGTMLVYAGKVDGLVSGAAHSTGDTVRPALQIIKTKPGVSRTSGIFFMIKGDVQYIFGDCAINPELDSQGLAEIAVESAKSALSFGMDPKVAMLSFSTKG

SEQ ID NO: 18441 - protein, 192 aa, Staphylococcus aureus
VKIVLPEGEDERVLTAATQLQATDYVTPIVLGDETKVQSLAQKLDLDISNIELINPATSEFKAELVQSFVERRKGKATEEQAQELLNNVNYFGTMLVYAGKADGLVSGAAHSTGDTVRPALQIIKTKPGVSRTSGIFFMIKGDEQYIFGDCAINPELDSQGLAEIAVESAKSALSFGMDPKVAMLSFSTKGS

SEQ ID NO: 18442 - protein, 286 aa, Vitis vinifera
  misc_feature (219)..(219): Xaa can be any naturally occurring amino acid
  misc_feature (234)..(234): Xaa can be any naturally occurring amino acid
  misc_feature (238)..(238): Xaa can be any naturally occurring amino acid
  unsure (1)..(286): unsure at all Xaa locations
MVVSERGCDSEEEMNMDLRKGPWTAEEDTLLNNYITIHGEGRWNSLARCAGLKRTGKSCRLRWLNYLRPNVKRGNITLQEQLLILELHSRYGNRWSKIAQHLPGRTDNEIKNYWRTRVQKQAKQLKCDVNSKQFRDTMRYVWIPRLVERIKAAGGDSTSTAPATYGHHMSSQILDMPRNGEFGLGYSDPGLRPEFSGGPSEGSETQVSPVSDMTDYYDXLWRELLGQSAKRGRXHTQXQADTSSGCLEFEGLEQSNGWSLGGGDSLENLLNDEDIWFLRQQFFDDF

SEQ ID NO: 18443 - protein, 563 aa, Saccharomyces cerevisiae
MSEITLGKYLFERLKQVNVNTVFGLPGAFNLSLLDKIYEVEGMRWAGNANELNAAYAADGYARIKGMSCIITTFGVGELSALNGIAGSYAEHVGVLHVVGVPSISAQAKQLLLHHTLGNGDFTVFHRMSANISETTAMITDIATAPAEIDRCIRTTYVTQRPVYLGLPANLVDLNVPAKLLQTPIDMSLKPNDAESEKEVIDTILVLDKDAKNPVILADACCSRHDVKAETKKLIDLTQFPAFVTPMGKGSIDEQHPRYGGVYVGTLSKPEVKEAVESADLILSVGALLSDFNTGSFSYSYKTKNIVEFHSDHMKIRNATFPGVQMKFVLQKLLTAIADAAKGYKPVAVPARTPANAAVPASTPLKQEWMWNQLGNFLQEGDVVIAETGTSAFGINQTTFPNNTYGISQVLWGSIGFTTGATLGAAFAAEEIDPKKRVILFIGDGSLQLTVQEISTMIRWGLKPYLFVLNNDGYTIEKLIHGPKAQYNEIQGWDHLSLLPTFGAKDYETHRVATTGEWDKLTQDKSFNDNSKIRMIEVMLPVFDAPQNLVEQAKLTAATNAKQ

SEQ ID NO: 18444 - protein, 563 aa, Saccharomyces cerevisiae
MSEITLGKYLFERLKQVNVNTVFGLPGDFNLSLLDKIYEVEGMRWAGNANELNAAYAADGYARIKGMSCIITTFGVGELSALNGIAGSYAEHVGVLHVVGVPSISAQAKQLLLHHTLGNGDFTVFHRMSANISETTAMITDIATAPAEIDRCIRTTYVTQRPVYLGLPANLVDLNVPAKLLQTPIDMSLKPNDAESEKEVIDTILVLDKDAKNPVILADACCSRHDVKAETKKLIDLTQFPAFVTPMGKGSIDEQHPRYGGVYVGTLSKPEVKEAVESADLILSVGALLSDFNTGSFSYSYKTKNIVEFHSDHMKIRNATFPGVQMKFVLQKLLTTIADAAKGYKPVAVPARTPANAAVPASTPLKQEWMWNQLGNFLQEGDVVIAETGTSAFGINQTTFPNNTYGISQVLWGSIGFTTGATLGAAFAAEEIDPKKRVILFIGDGSLQLTVQEISTMIRWGLKPYLFVLNNDGYTIQKLIHGPKAQYNEIQGWDHLSLLPTFGAKDYETHRVATTGEWDKLTQDKSFNDNSKIRMIEVMLPVFDAPQNLVEQAKLTAATNAKQ

SEQ ID NO: 18445 - protein, 149 aa, Escherichia coli CFT073
  misc_feature (34)..(34): Xaa can be any naturally occurring amino acid
  misc_feature (63)..(63): Xaa can be any naturally occurring amino acid
  misc_feature (71)..(72): Xaa can be any naturally occurring amino acid
  misc_feature (88)..(88): Xaa can be any naturally occurring amino acid
  misc_feature (101)..(101): Xaa can be any naturally occurring amino acid
  misc_feature (121)..(121): Xaa can be any naturally occurring amino acid
  misc_feature (130)..(130): Xaa can be any naturally occurring amino acid
  misc_feature (143)..(143): Xaa can be any naturally occurring amino acid
  unsure (1)..(149): unsure at all Xaa locations
SNAKARGFTAEDFALSHPGGALGRKLLLRVNDIXHTGDEIPHVKKTASLRDALLEVTRKNLGXTVICDDNXXIEGIFTDGDLRRVFDXGVDVRRLSIADVXTPGGIRVRPGILAVEALNLXQSRHITSVXVADGDHLLGVLHXHDLLRA

SEQ ID NO: 18446 - protein, 74 aa, Agrobacterium vitis S4
MKGFIMTTGTVKWFNSTKGFGFIQPDNGGPDAFVHISAVERAGMREIVEGQKIAYDMERDNKSGKMSACNLQAA

SEQ ID NO: 18447 - protein, 596 aa, Agrobacterium vitis S4
MRDTIKTSLPESSESITAVLKRVIAENGRDHVRGYVFAIICLATVALTTAFTAWIMETVINEAFANKRADLVWIICVSIFIAFSLRGLASYGQAVALSKIGNNIVARYQKRLFSHLMTLSMGYFNEARSAHLAAQVSQNVNGIRDVLNLTVTSTARDLLSLIGLIAVMLAKDWVLTLIVFVVAPPVLYSLRYISKRLRKATTDSVMLNSRVLGAMQESVQGIAVVKAFTMEEELGRKVEGIIDSAESRANRIARLSERTSPITESFAGLAIAAVIAYASYRTIAGGMLPGAFFSFIAALLMAYEPAKRLAKLQIQMERAVVNARMIYAILDTQPHQRDKPGAGELKVSEARIEFKDIHFAYGNGPEILKGVDITAEGGKTTALVGPSGAGKSTIITLIPRFYDPPRGQILIDGQDIADVTKASLRKHIAYVSQHPYLFEGTIRDNIRYGRPDANDAEVEEAARLAHAHDFILAQPYGYETPVGENGLTLSGGQRQRLSIARALVRNAPILLLDEATSALDTESEAAVQKALDEAMNGRTVVVIAHRLSTVVKADKIVVMQDGRVVEMGNHRTLTERPEGLYARLNNMQATNGSPSL

SEQ ID NO: 18448 - protein, 638 aa, Agrobacterium vitis S4
MAKVIGIDLGTTNSCVSVMDGKDAKVIENSEGARTTPSMVAFSDDGERLVGQPAKRQAVTNPTNTLFAVKRLIGRRYEDPTVEKDKGLVPFPIIKGDNGDAWVEAQGKGYSPAQISAMILQKMKETAEAYLGEKVEKAVITVPAYFNDAQRQATKDAGRIAGLEVLRIINEPTAAALAYGLDKTEGKTIAVYDLGGGTFDISVLEIGDGVFEVKSTNGDTFLGGEDFDMRLVEYLAAEFKKEQGIELKNDKLALQRLKEAAEKAKIELSSSQQTEINLPFITADASGPKHLTMKLTRAKFENLVDDLVQRTVAPCKAALKDAGVTAADIDEVVLVGGMSRMPKVQEVVKQLFGKEPHKGVNPDEVVAMGAAIQAGVLQGDVKDVLLLDVTPLSLGIETLGGVFTRLIDRNTTIPTKKSQVFSTADDNQQAVTIRVSQGEREMAQDNKLLGQFDLVGLPPSPRGVPQIEVTFDIDANGIVQVSAKDKGTGKEQQIRIQASGGLSDADIEKMVKDAEANAEADKNRRAVVEAKNQAESLIHSTEKSVKDYGDKVSADDRKAIEDAIAALKSSIETSEPNAEDIQAKTQTLMEVSMKLGQAIYESQQAEGGAEGGPSGHHDDGIVDADYEEVKDDNTKKSA

SEQ ID NO: 18449 - protein, 334 aa, Agrobacterium vitis S4
MTQRKKTKVYITRKLPDAVETRMRELFEAELNIDDTPRSRDALMDAVKTCDVLVPTVTDRIDAGLIEAAGPQLKLIASFSNGTDHIDVDAAARKGITVTNTPNVLSEDTADMTMALILAGPRRLAEGSRILTDQPGEWAGWSPTWMLGRRIWGKRIGIVGMGRIGTAVARRAKAFGLAIHYHNRKRVSPQTEDELEATYWDSLDQMLARVDIVSVNCPSTPATYHLLSARRLALMQPTSYIVNTARGGIIDESALIQCIRDGKIAGAGLDVFENEPAVNPKLLKLAEDGKVVLLPHMGSATIEGRIDMGDKVIINIRTYFDGHRPPNRVLPGRD

SEQ ID NO: 18450 - protein, 467 aa, Agrobacterium vitis S4
MSRLVVVSNRVPVPDKTNKAPAGGLAVALRAALEDKGGIWMGWSGVSSGEEEAGELAMIEDGKITYALTDLTDRDVDEYYHGFANRVLWPTFHYRLDLTDYARKDMTGYFRVNRFFAERLVPLLKPDDTIWVQDYHLIPLAKELRQMGVKNRIGFFLHIPLPPADVLFAMPVYETLIESLAHYDLVGFQTDFDHANFVGALVREGIGEAISGNKIKSHDRTFKAGHYPIGIETAAFAAYARRAVRNVMVKRAAQSIEGKALVIGVDRLDYSKGLTQRLDAYEHFINANPNYQGKVTYLQITPKSRSEVPEYEAMQRTVAEQAGRVNGALGTVDWVPIRYMTRSVARPVLAGLYRLAKVGLVTPMRDGMNLVAKEYVAAQDPDDPGVLVLSRFAGAARELKGALLVNPYDTEGTAQAIARALDMPLAERQQRWKGMMDHLLVNDVNHWCDTFLSDLMEMPTEKTAEAA

SEQ ID NO: 18451 - protein, 620 aa, Agrobacterium vitis S4
MMENNRNYLIAIALSVMVVLGWQFFYMNPRIEAQRQAEQAQQAQQAKTPATQATPGAAVNGALPGQTQASATTSREDAVAKSARVEINTEALSGSINLTGARLDDLRLKGYHETVDKTSPIITLLNPADTKDGYFAEIGFIGGEKSGSVPGPSTVWTVKDGQTLTETTPVTLTYTNETGLTFSRKISVDKHYMFTIEDTVANAGGADISLAPYGRVTRYNKPAVASTYVLHEGFIGVMGSGDGKFASVEAKYAAIEKENETNAKATGGWLGITDKYWAATLVPPQSLAYDSRFSHFTDGQARFQADYKNDPVTIAPGQSTTLKTLLFAGAKEVPVVDGYALDKSWFGQAFTNLFAGAKDTVQQYDIPRFDLLIDWGWFYFLTKPMFKLMDFFFRQVGNFGVAILLTTIAVKLLFFPLASKQYASMANMKRMQPKMEELKAKHGDDRMALQQAMMELYKTEKINPVAGCWPLLLQIPVFFALYKVIYITIEMRHAPFFGWIHDLSAPDPTSFVNLFGLLPFESPAMLHLGIWPIIMGITMFVQMRMNPTPPDPTQAMLFNWMPLVFTFMLGSFPAGLVIYWAWNNTLSVLQQSIIMKRHGVKIELFDNLKGLFQRKSAKTK

SEQ ID NO: 18452 - protein, 395 aa, Agrobacterium vitis S4
MSLPAGPSLISSLSHRATSAPESGIVEIINYARGRDNLLPLWAGEGDLPSPDFINRAASDALLGGETFYTWQRGIPELRQALSDYYRRHFAVSLPSEHFYVTGSGMQAIQLAVQAMTGPGDEMIYLSPCWPNIVAAIEISGAKAVGVEIGYNHGAWQLDLGQIEKAITPKTKALFINTPSNPTGWTASLDDLRAILALARKHGLWILADEIYSLYYFAGPSRAPSFLDVMEEGDRVMFGNSFSKNWSMTGWRVGWLVAPPEIGQVLENLIQYSTSGVAQFMQRGAVAALDHGDQFVAENIQRASTSRDILLDALIATNRVRSVKPDGALYAFMEIDGVTDSRAAAMDIVDKTGVALAPGSAFGAGGSSFLRACFLRDPRQIEDAAARLSDYIARL

SEQ ID NO: 18453 - protein, 362 aa, Agrobacterium vitis S4
MIMAVDKIYRHVDEMRPWSDREHLLECVAWTPEAPDVMTFTFKSDRPGHWFRYLPGQFVTLELPVGPEPVMRTYTLSSSPSRPYTVAVTVKAQKDSIGTRWMFENLKPGMKIKAFGPLGDFSYVKHPGEKYLFISAGSGITPMMSMTRDMADRQPDSDIAFIHCARSPDDIIFRWELEYKARYLPFFQLGFIVEQLQRSQLWSGLRGFIDKAKIGLLAPDFLDRTVFCCGPEPFMATVRESLAGAGFDMSRYHEETFQPVAPEPMVVVADPTGEVKPHKVAFTLAGKEALCEPGFTVLQAARSIGVRIGAACESGLCGTCRVMKLSGDVEMNHNGGILDDEIEEGYILACCSRPTGDVEIEV

SEQ ID NO: 18454 - protein, 318 aa, Agrobacterium vitis S4
MTSSFHQPVDAAEVPRFAGHATFMRLPAVTSAEGLDIALIGIPWDGGTTNRAGARHGPREVRNQSSLMRRVHHVSKIEPFILANIADVGDVTVNPIDLMLALQQIEDGVAAVVAAGALPLCAGGDHLTTLPVLRAVAKSQPVGLIHFDAHSDTNDSYFGGQRFTHGTPFRRAIEEGLLDPKRMVQIGIRSSNYEVDEHQWAKDQGIRIIYMEEFVARSVADVMAEARAIAGDGPTYVSFDIDCIDPSMAPGTGTPEIGGFLTREVQAMVRLLEGVNIVGADVVEVAPPFDVGGMTALAGATMMFELLCVMAKVVADRR

SEQ ID NO: 18455 - protein, 400 aa, Agrobacterium vitis S4
MTIVARSVSEIRPSETITISQKARSLKLAGVDVISMSTGEPDFDTPDHIKAAAIAAIQRGETKYTNVAGIPELREAIVRKFQRENQLSYRVDETIVGTGAKHVIYNALRASLNPGDEVIIPAPYWVSYPEMVSLCGGVPVRVATTQKAAFKLRPEDLEQAITPRTRWVLLNSPSNPSGAAYTHDELKALTDVLMRHPHVWLLTDDMYEHLVYGDFQYVTGAQIEPGLKDRTLTVNGVSKAYAMTGWRLGYAAGPKVLIDAMVLLQGQQTSGTCSIAQWAAVAAMDGPQDHLVQFRTAFDNRRHLITSMLNQANGLTCLLPEGAFYVFPSCESTFGKTTEGGRLIETDEEFVTALLEEKGVAAVHGSAFGQAGNFRLSYATDEAAITSACHRIQEFCGNLR

SEQ ID NO: 18456 - protein, 327 aa, Agrobacterium vitis S4
MTEHENQPTGDGQIADTVAGTVAEDAAVVRPTHSGFVALIGPTNAGKSTLVNRFVGAKVSIVSHKVQTTRAVMRGIAIHNNAQIVFMDTPGIFKPRRKLDRAMVTSAWGGAKDADVILLLIDSERGLRGDGEAILEALKDVHQPKILVLNKIDQVRHEDLLKLASTANEAVKFERTFMISATNGSGCQDVMDYLADYLPEGPWYYPEDQISDLPMRQLAAEITREKLFLRLHQELPYSSHVETEKWEERKDGSVRIEQVIYVERDSQKKIVLGKNGDAIKSISTSSRKEMSEILEQTVHLFLFVKVRENWGNDPERFREMGLEFPRD

SEQ ID NO: 18457 - protein, 260 aa, Agrobacterium vitis S4
MHRRTLLALGLSLATFAAVLPAHADALGDITKRGTLKVAVPQDFPPFGSVGTDMQPVGYDIDTAALIAKKLGVKLELVPVTSANRIPYLQTNKVDLVISSLGKNPDREKVVDFSTAYAPFYNGVFAPADTAIKSAADLSGKSVGVTRGAVEDLELTKVAPSDAVIKRYEDNNGTISAFLSGQVDAVATGNVVAAAILAKNPPKRPEPKFLIKNSPCFIGFNKNEPALAEKINAIIAEAKADGSLSKISEKWLGAPLPADL

SEQ ID NO: 18458 - protein, 317 aa, Agrobacterium vitis S4
MADKSIDHAFTATDLTSAATDPTYAGVLSFMRRRYTKLLDGVDTAVWGIPFDAATSNRPGARFGPQAIRRASAIFDNDPQYPFERDLFAAMPTVDYGDCRLDYGNHWETPATIEKEAADILSKANFLLTLGGDHFITWPLLKAHVAKHGPLALVQFDAHQDTWFDDGNRIDHGSFVGRAVREGLIVPSRSIQIGIRTHAPDDCGIRMLYGHQVEEMRAAEIAALILEHTAGQPAYLTFDIDCLDPAFAPGTGTPVAGGPSSAKILSVLQNLHPLDIRGADIVEVAPAYDHADITAIAGATVAMYMLGLRAERLARSG

SEQ ID NO: 18459 - protein, 768 aa, Agrobacterium vitis S4
MTDDKTKTNSPASGDLDEQALFYHLHPRPGKLEIQATKPLGNQRDLALAYSPGVAAPCLAIRDNPQAADDYTARANLVAVISNGTAVLGLGNIGPLASKPVMEGKAVLFKKFAGIDVFDIEVDAMTVDAMVSTVASLEPTFGGINLEDIKAPECFEIEQQLRDRMNIPVFHDDQHGTAIIVAAAILNGLELAGKTIGDVKIVASGAGAAALACLNLLVALGAKRENIWVHDIEGLVYKGRNELMDPWKEVYAQESDKRVLAESIGGADVFLGLSAAGVLKPELLEQMAPSPLIMALANPKPEIMPELARTARPDAMICTGRSDYPNQVNNVLCFPYIFRGALDCGATTINEEMKMAAVKAIAALAREEVSEVAARAYTGDSPTFGPEYLIPSPFDPRLILRIAPAVAKAAEESGVARRPIADYDSYLDTLSRFVFRSGFIMKPIFANAKAAVKKRVIFAEGEDERVLRAAQVLLEDGIGEPILIGRPQIIETRLKRFGLRIRPGIDFAIVNPEDDPRYRDYVDDYVALVGRSGINPEAARTIVRTNTTVIGALSLKRGEADALICGVEGRFDRHVHDVGQILGKKPNVRDFSGLSLLISQRGAVFMTDTFVTENPTAEEVAEMTILAAQAIRQFGITPKAALLSHSNFGSRNCESARKMRAALEILRKEAPELEVDGEMQGGSALSETLRRRAIPNSTLSGDANLLVFPNLDSANISLGLVRTFTDALHVGPILLGAAQPAHVLSTSVTSRGVVNMAALAVVEANQQV

SEQ ID NO: 18460 - protein, 111 aa, Agrobacterium vitis S4
MSGVNEFIDNAVKSNDVVLFMKGTPQFPQCGFSGQVVQMLDYLGIDYKGINVLADQEIREGIKTYSNWPTIPQLYVKGEFIGGCDIVREMFQAGELQSHLEEKGIAVRGAA

SEQ ID NO: 18461 - protein, 289 aa, Agrobacterium vitis S4
MAKVAFIGLGVMGYPMAGHLKAKGGHDVTVYNRTTAKAESWVAQHGGSLGLTPAAAAMGADFVFTCVGNDDDLRAVTIGADGVFASMKPGAILIDNTTASADVARELYQAAKAKGFDFIDAPVSGGQAGAENGVLTVMCGGDEPLFEQARPVIDAYARMIGLMGPAGSGQLTKMINQICIAGIVQGLAEGVHFGKRAGLDIEKVIEVISKGAAGSWQMENRHKTMAVGKYDFGFAVDWMRKDLGIVLNEAKTNGATLPLTALVDQFYGDVQKLGGNRWDTSSLLARLEK

SEQ ID NO: 18462 - protein, 557 aa, Agrobacterium vitis S4
MYRYDEFDHAFVAARVDQFRDQVGRRLSGELAEDAFKPLRLMNGVYLQLHAYMLRVAIPYGTLNAKQMRMLAHVARKYDRGYGHFTTRQNIQYNWPKLSDTPDILQELASVEMHAIQTSGNCIRNVTADHFAGAAQDEVADPRPYAEILRQWSSVHPEFSFLPRKFKIAVTGAERDRAAIQVHDIGLHVKKDASGNLGFAVYVGGGQGRTPMIAKKIKDFLPEEDMLSYITAIVRVYNLHGRRDNKYKARIKILVHETGTEELTRQIDAEFANLKDSVLKLPDADIRAIESYFALPDLVERPEGWEVLAKSKKADDGFATWLAQNVQPHKHPDYGMVTISLKPIGGIPGDASDAQMDLVADLAERFGFDEIRVSHEQNLILPHVAMADLPALYQALSGANLATANAGLITDIIACPGLDYCALANARAIPVAQAISSRFGSQARQAEIGELKIKISGCINACGHHHVGHIGLLGVEKKGAELYQITLGGSGDENSSIGEIIGRGFEPEKVTDAVETVVDTYLALRLDPKETFLEAYRRVGPKPFKEALYGGASAEAA

SEQ ID NO: 18463 - protein, 303 aa, Agrobacterium vitis S4
MNNGPSFLGFPERLSGGRKPEIVIVGAGHGSTYAGQDSGGHALPPDAIRVASQEDVGLIDHWDFDLGGPLFDNKPACCIDVGNVSTIMHDNLGNRTRIEAKTREILASSAVPVVLGGDDSIPIPFVAGFSQHGPVWVLQIDAHIDWRDDKDGERYGYSSPMRRISEMPHVAGIVQVGMRGVGSAGIAEIEAAQQYGSRIITSRTVHARGIEAVLQHIPEGAQTIITLDCDGLDPSVMPGVAARTPGGLTYNQVIDLIAGIGKRGRIAGFDLVELYPPADIDNLSALTAARLVINVIGAIVRQG

SEQ ID NO: 18464 - protein, 192 aa, Agrobacterium vitis S4
MADRISAKEFVEFSGLSEEPLDLVEITGVVKWFDVAKGFGFIVPDNGMQDVLLHVTCLRRDGYQTILEGTRIVALIHKRDRGYQAFRVLSMDQSTATHPSQMPPVRTHVQVTPSSGLERVLVKWFNRTKGFGFLTRGEGTEDIFVHMETLRRFGLTELRPGQTVLVRFGNGDKGLMAAEIHPDNPAPHVMAH

SEQ ID NO: 18465 - protein, 387 aa, Agrobacterium vitis S4
MAERIYMDWNATAPLLNEARDAMLAALAMPGNPSSVHAEGRTARALVEKARRQVAELVGAAPANVIFTSTATEAANFVLSPRYRMGRSLLAVGRAYVSAIEHPAVRQGGRFSPDCVTEIPVTRQGVVDLDALERALADHPADQGMPLVAVMLANNETGVIQPVEAVGKLVHAKGGLLLVDAVQAVGRILVDIAALDADFLIVSAHKLGGPKGAGAVVARGEALMPEPLVRGGGQEKGHRGGTENLSAIAGFGAAADHATKDLINRNLQIAALRDALETGMRSIAPDLVIHGAGQTRIGNTSFFTLPGLKAETGQIAFDLEGVALSAGAACSSGKVGQSHVLTAMGLDAGSGGLRLSLGPATTAEDIERVISVFARIAGRRQLAGHAA

SEQ ID NO: 18466 - protein, 251 aa, Agrobacterium vitis S4
MLEIRNLHARIAEDGTEIIRGLNLTVKAGEVAAIMGPNGSGKSTLSYILSGRSDYEVTEGEILYNGESILELDPAERAAKGIFLAFQYPVEIPGVATMQFLKVAMNEQRKARGEAELTTPDFIRRVKEAAGELKINPDMLKRPLNVGFSGGEKKRAEILQMALLAPQLCILDETDSGLDIDALKIVADGVNALKSPDRATIVITHYQRLLDYIVPDTVHVLYKGQIIKTGDKSLALDLEANGYADIIGEAA

SEQ ID NO: 18467 - protein, 351 aa, Agrobacterium vitis S4
MAFDNEKLDALRRKYGGETGGEVFDPRFKRVAEKIFDSKGTRLAPYSGIPTFLSAPYRQVEADNPDFGGLDVGIIGVPMDLGVTNRPGSRFGPRALRTIERIGPYNHVLDCAPVHELKVADVGDVPFASRYRLEQSHVDIEQRIGQMVTQGVVPLSVGGDHSITHPILKAVGKDRPVGLIHIDAHCDTSGLFDQTKFHHGGPFRNAVLDGVLDPSRTVQIGIRGPAEYLWEFSYESGMTVIHAEEISALGIPAVIAKALQVVGDGPTYLSFDIDSLDPAFAPGTGTPEVGGLTTREVLELLRGLKGVNLVGGDVVEVAPQYDSTTNTAQAGAQVLFEILSLMVFSPSIGKE

SEQ ID NO: 18468 - protein, 67 aa, Agrobacterium vitis S4
MPTGTVKFFNDDKGFGFITPENGGTDVFVHVSSLQRGDSLREGDKVSFEIGQDRKTGKSKAENVSVL

SEQ ID NO: 18469 - protein, 400 aa, Agrobacterium vitis S4
MAFLADALSRVKPSATIAVSQKARELKAKGRDVIGLGAGEPDFDTPDNIKQAAIDAIHRGETKYTPISGIPELRKAIADKYKRENNLDYKPEQTIVGTGGKQILFNAFMATLNAGDEVIIPTPYWVSYPEMVALCGGMPVFVATTQENNFKLTAEDLEKAITPKTKWFLFNSPSNPSGAAYTEAELKALTDVLLRHEQVWVLTDDMYEHLVYGDFKFTTPAEVEPKLYDRTLTMNGVSKAYAMTGWRIGYAAGPLPLIKAMDMIQGQQTSGACSIAQWAAVEALNGTQDFIPENKKIFEGRRDLVVSMLNQAKGIVCPSPEGAFYVYPSCAGLMGKTAPSGKVLETDEDFVTELLETEGVAVVHGSAFGLGPNFRISYATSEALLEEACKRIQRFCAACK

SEQ ID NO: 18470 - protein, 71 aa, Agrobacterium vitis S4
MAETGIVKFFNNDKGFGFIKPDNGGADIFVHISAVQASGLNGLSENQKVSFDTEPDRRGKGPKAVNLQIAG

SEQ ID NO: 18471 - protein, 232 aa, Agrobacterium vitis S4
MKRIDLTDDAPHLLVVDDDTRIRDLLHRYLTEQGFRVTVAAEAQEARRKLAGLAYDLLIVDVMMPGENGLSLTKSLSGEINAPIILLTARTEADSRIAGLEAGADDYLAKPFDPRELVLRINNILRRNTSADTPKIEQVMFGPYTFSILRKELKKGPEVIHLTDREQDIMLLFANRAGDTIPRHELVGEDTDVGERTIDVQINRLRRKIEDDPANPVWLQTVRGIGYRLSRD

SEQ ID NO: 18472 - protein, 310 aa, Agrobacterium vitis S4
MKVFAGNSNRQLAEAVCKYLNVPLGKASVRRFADQEIFVEIQENVRGEDIFIVQSTSFPTNDHLMELLIMIDAFRRSSARRITAVIPYFGYARQDRRASGRTPISAKLVANLITEAGADRVLTLDLHAGQIQGFFDIPTDNLFAAPVLARDVKEHYDLANLMVVSPDVGGVVRARALAKRLDCLLAIVDKRRDRPGESEVMNIIGDVEGKDCILIDDIVDSGGTLCNAAEAMLNMGAASVTAYITHGVLSGGAVTRVTSSKLRELVITDSIQPTVAVQSAHNIRVLSTATLLGEAINRTSAEASVSSLFD

SEQ ID NO: 18473 - protein, 218 aa, Agrobacterium vitis S4
MTETNRNNLTLSGFTADEFRRRAQSQSGAPLETAWRDHGDHVLNAEILLKLEGLRLKDAAVLVPVVDDGDDARIILTQRTTTLRKHSGQIAFPGGGIDAEDASPEAAALREAEEEIGLDPRFVETVGRLPHYLAGTGFRITPVLAVVQPGFQLTINPDEVADVFEVPLSFLMDPDNHRRDSKVFNGTTRHFYVMPYGERQIWGITAGILRTLYERLYA

SEQ ID NO: 18474 - protein, 409 aa, Agrobacterium vitis S4
MAREIKKLVLAYSGGLDTSVVLKWLQETYGCEIITFTADLGQGEELEPARQNAQRLGIEDIRIDDLREEFVRDFVFPMMRANALYEGQYLLGSSIARPLIAKHLISIAQDVGADAIAHGATGKGNDQVRFELAANALDPSISVIAPWRIWSIQSRTQLIEYAQTHQITIPHDKLGEAPFSTDANLLHTSTEGKALEDPSVVAPAHVYQRTVDPIHAPDVPDIITIGFEKGDAISLNGENLSPAALLTKLNSLGGRHGIGRLDLVENRFIGMKSRGIYETPGGTILLAAHRGIESITLDRAAAHLKDEIMPRYAELVYNGFWFAPEREMLQALIDRSQDYVAGEVTVSLYKGQARVIARTSPYSLYSMDLVTFEEGSGSYDHHDAEGFIRLNGLRLKSWGARNRSVMRSK

SEQ ID NO: 18475 - protein, 344 aa, Agrobacterium vitis S4
MTKYKLEYIWLDGYTPVPNLRGKTQIKEFAEFPTLEQLPLWGFDGSSTQQAEGHSSDCVLKPVAVYPDPARTNGALVMCEVMMPDGVTPHSSNSRATILEDEGTWFGFEQEYFLYQDGRPLGFPENGYPAPQGPYYTGVGFKNVGDVAREIVEEHLDLCLAAGINHEGINAEVAKGQWEFQVFGKGSKKAADEIWLARYLLLRLCEKYGVDVEFHCKPLGDTDWNGSGMHCNFSTKFMREVGGKDYFEALMAAFAKNWKEHIDVYGPDNHLRLTGKHETAPWNKFSYGVADRGASIRVPHSFVNNGYRGYLEDRRPNSQGCPYQIASQVLKTIAEVPAAKSEAA

SEQ ID NO: 18476 - protein, 379 aa, Agrobacterium vitis S4
MQPSVSILKETRDDDKRVILLPDAVRMFSDEGFDVFVEKNAGVGLNISDREYADAGATITSTDEAWAVSPFILKYKYPSVDERKYLCRPLHIAAHFYPGENYELTQHLRANSITAYSYEYFKADDGSFPLMTPDSEISGKLAVLLGARQLLSSQGGCGILLASIPGISSPKVVVIGHGNAGGAAARTAAALGNEVTVFGHRAESLRRFQSTVPSSVKCLLLDDETLAREVQDADLVIGAILISTFDTPALISEELVKRMKKGAVIIDVTCGYGPGFLPTADKLTRLGAPAYEVHGVWHFKDPVLPTQVHRTSAIGASNNHTPYLINLGKSIFDRSFKDPVSERAKFTDGGEIVHPDVLSDFAFIEQLAARNVSEERRHG

SEQ ID NO: 18477 - protein, 231 aa, Agrobacterium vitis S4
MLTVENLNLHYGAAQALRGVNITAPMGKITCVLGRNGVGKSSLLRAVTGQHPVSGGTIAFEGTVLNGMAPFNRARHGVGYVPQGREIFPLLSVKENLETGFAPLKRKDRTIPDDIFALFPILQTMLSRRGGDLSGGQQQQLAIGRAMVTRPKILVLDEPTEGIQPSIIKDIGRAIRYLRDSTGMAILLVEQYLDFCRELADHVYIMDRGEIVHEGGAETLDTVEARRHLTV

SEQ ID NO: 18478 - protein, 463 aa, Agrobacterium vitis S4
MANVDISTVKAQPGLMARALKEAVFAGLLALGLFVLFIGIKTDQDINNALVWYTRWGLLSIFVAIAAIGRFAVVAVLRPWSASRKARAAAKPAAATDARPSLFKTHFLKIALVALILYPPVILFLVGTQGSLKYVDNFGIQILIYVMLAWGLNIVVGLAGLLDLGYVAFYAVGAYSYALLSQHFGLSFWLLLPISGILAAFWGIMLGFPVLRLRGDYLAIVTLAFGEIIRLVLINWTDVTQGTFGVSGIPKATLFGIPFDASAHGFAKTFGLPMSSAYYKIFLFYLALGLCMLTAYVTIRLRRMPIGRAWEALREDEIACRSLGIDTVKTKLTAFAIGAMFGGFAGSFFAARQGFVSPESFVFLESAVILAIVVLGGMGSLTGIAVAAIVMVGGTELLREMEFLKHVFGPDFTPELYRMLLFGLAMIVVMLFKPRGFVGSREPTAFLKERKAVSGSFTKEGHG

SEQ ID NO: 18479 - protein, 531 aa, Agrobacterium vitis S4
MAPRVLVSDELSETAVQIFRDRGVEVDFQPQLGKDKDKLAEIIGNYDGLAIRSATKATEKLIAAATNLKVIGRAGIGVDNVDIPAASRRGIIVMNTPFGNSITTAEHAIALMFAVARQLPAADASTQAGKWEKSKFMGVEITGKVLGVIGAGNIGGIVCKKAIGLGMHVIAYDPFLSTERAQEMGVKKVELDELLAQADFITLHVPMTDKTRGILGKENLAKTKPGVRIINCARGGLVDEAALAEAIKSGHVAGAGFDVFEVEPAKESPLFGLPNVVCTPHLGASTTEAQENVALQVAEQMSDYLVNGAVSNAINMPSITAEEAPLLKPFIRLADVLGAFVGQVTDGAIKEIEILYDGQTATMNTKALTSALLAGLIRAQVSDVNMVSAPIMIKEKGIVLSEVKRDKTGVYDGYIKLTVTTEKQTRSIAGTVFSDGKPRFIQIKGINLDADVGPHMIYISNTDVPGMIGFMGTTLGNAGVNIANFQLGREKESGDAIALLYVDGPVEQTVLDQLTANAAIKQARLLTFAVE

SEQ ID NO: 18480 - protein, 681 aa, Agrobacterium vitis S4
MTENEVGAALCLGKALQETYVTVRRYGVFMRRTFFLGSSMNPNFRNLALWAIIALLLVALFSMFQTSPSQTSSREIPYSQFLREVDSGRVRDVTVTGNRIIGSYGENGAAFQTYAPVVDDNLLEKLQTKNVMIVARPESDGSSGFLSYLGTLLPMLLILGVWLFFMRQMQGGSRGAMGFGKSKAKLLTEAHGRVTFEDVAGVDEAKQDLEEIVEFLRDPQKFQRLGGKIPRGVLLVGPPGTGKTLLARSVAGEANVPFFTISGSDFVEMFVGVGASRVRDMFEQAKKNAPCIIFIDEIDAVGRHRGAGLGGGNDEREQTLNQLLVEMDGFEANEGIILIAATNRPDVLDPALLRPGRFDRQVVVPNPDIIGRERILKVHARNVPLAPNVDLKVLARGTPGFSGADLMNLVNEAALMAARRNKRVVTMAEFEDAKDKIMMGAERRSSAMTEAEKKLTAYHEAGHAITALNVPVADPLHKATIIPRGRALGMVMQLPEGDRYSMSYKWMVSRLVIMMGGRVAEEITFGKENITSGASSDIEQATKLARAMVTQWGFSDILGQVAYGENQQEVFLGHSVSQSKNVSESTAQKIDTEVRRLIDEAYTEARRIITEKHDAFVILAEGLLEYETLSGEEIKALIRGEKPTRDSGEDGPTRSSAVPSTGKKDAPKGGEPEAGLEPQAH

SEQ ID NO: 18481 - protein, 608 aa, Agrobacterium vitis S4
MAGAEYGSVSENQERQAKSSRSLKPLARLNPYLMRYRGMALAALVFLALAAVTTLALPLAVRRMIDHGMASADAGFINKYFAMLIVLALIMAASSALRYYYVITIGERIVSDIRREVFDHVSRLSPAFFDVNQSGEIVSRLTADATQIKSAVGASASVALRNIIMCFGAMGMMIYTSPKLSVMVLAAIPVIVFPLIAFGRSVRRRSRLAQDRLAEAAAFAGESIGAARTVQAFNGEAAASARYGAAVEQAFQAARIATRSRAILTGVAITLVFGSIVGVLWYGAQSVLAGTLSAGTLGQFLLYSVIAASSLGQLSEVWGELMQAGGAAERLTELLAEVSAVQSPDHPKPLPTPARGEVWFENVEFSYPSRPGRSAVKGLSFAVDAGETVAIVGPSGAGKSTIFSLILRFYDPTSGRICLDGSDLRDVSTEALRGSIAIVPQDVTIFSGTIHDNIAFSCPDASREAVIKAARAAQATEFIDRLERGYDTEVGERGITLSGGQRQRIAIARAILKDAPVLLLDEATSALDAESETLVQKALDELMKSRTTIVIAHRLATVLKADRILVIDDGKVVEQGTHQSLIQQGGIYARLARLQFQSGAQDFLAEAK

SEQ ID NO: 18482 - protein, 331 aa, Agrobacterium vitis S4
MNKLAVKLVEASAIKAALRVVATEQSGLAALEEALAGYLAGPFCNAIDVIGKSSGRVIVSGVGKSGHIGGKIAATFASTGTPAFFIHPAEANHGDLGMIARDDVVIALSWGGESTELNGILSFTRRFSIPLIAITAGEQSTLAREADIVLLMPKVQEACPHGLAPTTSTMMQMALGDALALALLEARGFGPNDFKTFHPGGKLGAMLTHVGDMMHIGEDVPLVPEGTSVPEAIIMLSQKRFGCVGVTDSANRLVGIITDGDIARNLNRNLGERMVEEVMTRHPKTVHTETLATTAMAILNQHNISALFVTDEDGVPNGIIHFHDLLRIGVA

SEQ ID NO: 18483 - protein, 319 aa, Agrobacterium vitis S4
MTNKPVILIPGKIHPRVLERLQPGFELVQTPPGQPVALNDADAARVRGIAIAGAVPGALIDSLPKLEIIANFGVGYDGVDVAKAASKNVIVTNTPDVLDDEVADTTIALLLNTIRQFHQAESYLRAGRWQNEGPFTLSPLSLRGRHVGLYGLGRIGGEIASRLQPFKVKISYHTRSPKPGVPYDYHASLTDLAAAVDTLICIVPKTPETHKAINADVLKALGPNGVFISVGRGWSVDEPALISALKDGTIAAAGMDVFYEEPKVPAEFLDLPNVSLLPHVASASVPTRNAMADLVADNLIGWFENGMVKTPVPETPVKR

SEQ ID NO: 18484 - protein, 525 aa, Agrobacterium vitis S4
MSLTIGSPKELYAGEARVAMTPDSAQQLQKLGYACLIETGAGKAAGFSDDAYRKAGVTVADSADALYAQADVIAKVRPPESSEVEKLAPGKTLISFFYPAQNTALLEEAKAKGANVIAMDMVPRISRAQKMDALSSMANIAGYRAVIEAGNNFGRFFTGQVTAAGKVPPAKVLIIGAGVAGLAAIGTATSLGAIVYAFDVRPEVAEQIESMGAQFVYLEFEASQDGAATGGYAAPSSPEFREKQLAKFRELAPDIDIVITTALIPGRDAPKLWLADMVASMKPGSVIIDLAAERGGNCDLTVADQRVVSDNGVIVIGYTDFPSRMAAQSSTLYSTNIRHMMTDLTPAKDGKLVHNMEDDVIRGATVTFEGAITYPPPPPKVQAIAAAKPKEKVKELTHDEKRAKEAAEFKAQTANQIKLLAIGTAVMLLVGAFAPVSFMSHFIVFVLACFVGFQVIWGVSHSLHTPLMALTNAISGIVILGALLQIGSGNWLVVTLAALSVLIATINIVGGFLVTRRMLAMFQKS

SEQ ID NO: 18485 - protein, 424 aa, Agrobacterium vitis S4
MARIVMKFGGTSVANLERIHNVARHVKREVDAGHEVAVVVSAMSGKTNELVDWVQTMPKVAGAASPFYDAREYDAIVASGEQVTSGLLAIALQSLGINARSWQGWQIAIKTDNAHGAARIQDIDGSDIIRRMGEGQVAVVAGFQGIGPDNRIATLGRGGSDTSAVAIAAAVKADRCDIYTDVDGVYTTDPRIEPKARRLKKVAFEEMLEMASLGAKVLQVRSVELAMVHKVRTFVRSSFEDPDAPGMGDVLNPPGTLICDEEEIVEQEVVTGIAYAKDEAQISLRRLADRPGVSAAIFGPLSESHINVDMIVQNISEDGSKTDMTFTVPSGDVDKALKVLSDNQEKIGFDVVQSEKGLVKVSVIGIGMRSHAGVAATAFRALADKGINIKAITTSEIKISILIDGPYAELAVRTLHSCYGLDKA

SEQ ID NO: 18486 - protein, 409 aa, Agrobacterium vitis S4
MVLPKDVKKVVLAYSGGLDTSIILKWLQTELGAEVVTFTADLGQGEELEPARKKAEMLGIKEIFIEDVREEFVRDFVFPMFRANAVYEGVYLLGTSIARPLISKHLIEIAKKTGADAIAHGATGKGNDQVRFELSAYALNPDIKIIAPWRDWAFKSRTDLLAFAEANQIPVAKDKKGEAPFSVDANLLHSSSEGKVLEDPSQEAPEYVHMRTISPEAAPDKATTIKVGFEKGDAVSINGVRMSPATLLAELNTYGRDNGIGRLDLVENRFVGMKSRGVYETPGGTILLTAHRAIESITLDRGAAHLKDELMPRYAELIYYGFWFSPEREMLQAMIDKSQEHVEGEVTLKLYKGNVMVIGRESPKSLYSDQLVTFEDDQGAYDQKDAAGFIKLNALRLRTLAKRNLGKSS

SEQ ID NO: 18487 - protein, 452 aa, Agrobacterium vitis S4
MSFSTFKSQALRLGAASAALMAPAIAFAQDAAPAVAAAAAPVPDKGDTAFMFLSTILVLFMAVPGLGLFYGGLVRAKNMLSVLMQCTVIAAMVMIVWVIYGYSFAFGGGESPFFGGFAKMFLAGVDTTTTAATFSKGVVIPEYIFMLFQMTFAAITPALIIGAFAERIKFSAAILFCLLWVTFVYFPVAHMVWDAKGYLFGLGALDFAGGTVVHINAGVAGLVGAILVGKRTGYGKDMMAPHSMTLTYVGAAMLWVGWFGFNAGSNLEASGGAMLATVNTFIATAAAILSWCVVESFTRGKASMLGAASGMIAGLVAITPAAGIVGPMGAIVMGVIVSPLCYFFVSVVKNKFGYDDTADVFGVHGIGGMFGAISTGIFASASLGGVGYVGEQTMGGQVMVQLQAVVITVLWTGIGSAILYKIVDVIVGLRVPVEAEREGLDLASHGEAAYHS

SEQ ID NO: 18488 - protein, 366 aa, Agrobacterium vitis S4
MKFLDEAKVYIRSGDGGAGAVSFRREKFIEFGGPDGGDGGRGGDVWVEAVNGLNTLIDFRFQQHFKATVGTHGMGRNRTGANGEHVTLKVPVGTQIFEEDAETLIVDMVTEGQRFRLAAGGNGGFGNAHFKSATNQAPDWANPGLEGEEKTIWLRLKLIADAGLVGLPNAGKSTFLAAVTRARPKIANYPFTTLHPNLGVATVDEREFILADIPGLIEGAHEGVGIGDRFLGHVERTRVLLHLVSAQEEDVAKAYTTVAHELEAYDGGLEDKPEIVALSQIDVLDEDELKKKLKALQKACSKKPMMISAITGKGMLEVLRALRDVIVENRSYDDETISQRPKKHRHKLEDRPQHENGPEESEEGEE

SEQ ID NO: 18489 - protein, 104 aa, Agrobacterium vitis S4
MFAVIKTGGKQYRVAANDVLTIEKLEAEAGAIVEFTEILVVGVGADATIGAPFVAGATVKAEVVEHNRGKKVIAFKKRRRQNSKRSRGHRQHHTVVRITDIVAA

SEQ ID NO: 18490 - protein, 408 aa, Agrobacterium vitis S4
MTVSAAAKNTIEEIPMSTPSIVIASAARTAVGSFNGAFANVAAHDLGATAIKAVLERAGIEAAEVDEVILGQILTAGQGQNPARQAAMKAGIPQEKTAWGLNQLCGSGLRAVALGMQQIATGDASIIIAGGQESMSLAPHCAHLRAGTKMGDMKMIDTMIKDGLTDAFYGYHMGVTAENVARQWQLTRDEQDAFAVASQNKAEAAQAAGRFKDEIVPVTVPGRKGDVIVDADEYIRAGATLDSMTKLRPAFDKEGTVTAGNASGINDGAAAALLMTEAEAVRRGIQPLARIASWATAGVDPKIMGTGPIPASRKALEKAGWSVNDLDLVEANEAFAAQACAVNKDLGWDTSIVNVNGGAIAIGHPVGASGARILNTLLFEMKRRGAKKGLATLCIGGGMGVAMCIEGL

SEQ ID NO: 18491 - protein, 462 aa, Streptococcus uberis 0140J
MNIFRKKNNSTQKTEMRRHLTVFDLIFLGLGSMVGTGIFTITGIGAAKYAGPALTISIILSALAIAILALFYAEFASRIPANGGAYSYVYATLGEFPAWIVGWYIIMEFLTAISSVAVGWGSYLKGLLSSYGIHLPQALNGTFNVSKGTYIDFLPMLVMVIVTSIVLMNSKTALRFNSILVILKFSALALFIVVGLFFIDLNNWSNFAPYGLGQLYGGKSGIFAGASVMFFAFLGFESISMTVDEVKNPQKNVPKGIIYSLIIVTILYVVVTGILTGIVYYKKLDVPDAVAYALREIGIGWAANYISFVAVLTLITVCISMTFALARIVYSISRDGLLPKVLKKVTKDSFIPKNATLLVGLISMICAGVVPLASLAEFVNICTLAYLIIMSIAIIILRKNEGLPEKGQFKTPLVPILPILAILICLSFMSQYMVGTWIAFGVSTLIGILLYIFYGFKHSELN

SEQ ID NO: 18492 - protein, 319 aa, Streptococcus uberis 0140J
MSYSDLKLFALSSNKELAEKVASSMGIELGKSTVRQFSDGEIQVNIEESIRGHHVFILQSTSSPVNDNLMEIMIMVDALKRASAETVSVVMPYYGYARQDRKARSREPITSKLVANMLEVAGVDRLLTVDLHAAQIQGFFDIPVDHLMGAPLIAEYFDRHGLVGNDVVVVSPDHGGVTRARKLAQFLHTPIAIIDKRRSVNKMNTSEVMNIIGNVSGKKCILIDDMIDTAGTICHAADALAEAGATEVYASCTHPVLSGPALDNIQKSAIKKLVVLDTIFLPEERLIDKIEQISIADLIGEAIIRIHEKRPLSPLFEVD

SEQ ID NO: 18493 - protein, 392 aa, Streptococcus uberis 0140J
MDLSHKFNKQLYKIEISLIRQFDQSISDIPGILKLTLGEPDFTTPDHIKEAAKDAIDANQSHYTGMSGLIELRQAVSGFLKTKYNLTYHPDNEILVTIGATEALSATLLAILEEGDKVLLPAPAYPGYEPIVTLAGAKMVEIDTTANHFRLTPQMLDKALKEEGANVKAVLLNYPSNPTGVVYSREEIASFADVLKKHEVFVVSDEVYSELNYSGQGHVSIAEYLPDQTIVINGLSKSHAMTGWRIGFICAKASITSQLIKSHQYLVTAATTMAQFAAIEALTKGKNDAFPMKNEYIHRRDYIISEMTKLGFSMIKPEGAFYIFAKIPEGYGHEDSFKFCQDLARKEAVALIPGRAFGKYGEGYVRLSYAASMTTIKEAMKRLTVFMDHYGN

SEQ ID NO: 18494 - protein, 396 aa, Streptococcus uberis 0140J
MSKTIAINAGSSSLKWQLYQMPEETVLAQGIIERIGLKDSISTVKFNGNKEEQVTDIPDHTTAVKILLNDLIHLNIISAYDEITGVGHRIVAGGEYFTDSVLVDEKVIEQVEELSALAPLHNPGAAAGIRAFREILPDITSVCVFDNAFHMTMQKHTYLYPIPQKYYTEHKVRKYGAHGTSHKYVAQEAAKMLGRPLEELKLITAHIGNGVSITANYHGQSVDTSMGFTPLAGPMMGTRSGDIDPAIIPYIIERDPELKDAADAINMLNKKSGLGGVSGISSDMRDIEAGLQEKNPDAVLAYNIFIDRIKKFIGQYFAVLNGADALVFTAGMGENAPLMRQDVINGMSWFGMEIDPEKNVFGYRGDISTPNSKVKVLVISTDEELCIARDVERLKK

SEQ ID NO: 18495 - protein, 222 aa, Streptococcus uberis 0140J
MEYMLDTLNVEDIKKWSAILPLAGVTSNPTIAKKEGDIDFFERIKEVRSIIGEEASIHVQVVAQDYEGILKDAARIREHCGDSIYIKVPVTKEGLAAMKTLKAEGYRITATAIYSIFQGLLAIEAGADYLAPYYNRMENLNIDAEAVIGQLAEAIDRECSDSKILAASFKNVGQVNKAFALGAQAITAGPDVFEAGFAMPSIQKAVDDFSADWESVHGQKQI

SEQ ID NO: 18496 - protein, 214 aa, Streptococcus uberis 0140J
MKFFLDTANVEAIKSINELGLVDGITTNPTIISREGRDFETVIKEICQIVDGPVSAEVTGLTAEEMVAEAREIAKWHDNVVVKIPMTKDGLKATNILSKEGIKTNVTLIFTVSQGLMAMKAGATYISPFVGRLEDIGTDPYQLIEDLRDIIDLYSFDTEIIAASIRNAAHVEAVAKIGAHIATIPEGIFEKMTKHPLTTSGIDQFMKDWSSFKK

SEQ ID NO: 18497 - protein, 449 aa, Streptococcus uberis 0140J
MKVAKFGGSSLASANQLKKVFNIVASDSERKIIVVSAPGKQDPKDTKITDALITYHDTFVTGGDVRQIQNWIIKRYQDIAEDLDIHNKIMEQIKESILSLTENQIEDNPFLYDTFLAAGEDNNAKLVAEYFRSNGLMARYMHPKTAGLFVTGEPQNARILPSSYDKLEKLKEYEGVLVIPGFFGITAEGDICTFSRGGSDITGSLIAAAVGAELYENFTDVDGIFAAHPGVVDKPHSIKELTYKEMRELAYAGFTVLHDEALIPAYRGKIPLVIKNTNNPDHPGTKIVLERKENQSPVVGISGDDKFVSINIAKYLMNREVGFGRKVLQILEDLNIRWEHMPTGIDDLSIVIREHELTPIKQDEIVNQLVHNIEVDQLSITKDLSIIMIVGENMKSHIGVTATAAKALSDNQINITMMSQGSSEFSIMFVVKSKDEKKAIKALYDAFFK

SEQ ID NO: 18498 - protein, 256 aa, Streptococcus uberis 0140J
MSVLEIKNLHVSIEEKEILKGVNLTLKTGEIAAIMGPNGTGKSTLSAAIMGNPNYEVTEGEILLDGVNILDLEVDERARMGLFLAMQYPSEIPGITNAEFMRAAMNAGKEDDDKISVRDFITKLDQKMELLGMKEEMAERYLNEGFSGGEKKRNEILQLLMLEPKFALLDEIDSGLDIDALKVVSKGVNDMRQKDFGAMIITHYQRLLNYITPDLVHVMMDGRIVLSGDAQLAQRLEKEGYSGIAEELGIDYKEEV

SEQ ID NO: 18499 - protein, 372 aa, Streptococcus uberis 0140J
MEELFCIGCGIRIQTEDKNLAGFTPKAALEKGLESGELYCQRCFRLRHYNEITDVHITDDEFLKLLHEVGDSDALVVNVVDIFDFNGSIIPGLSRFVAGNDVLLVGNKKDILPKSVKDSKVTQWLIERAYEEGLRPVDVFLTSAQNKYAIKELISRIDQLRKGRDVYVVGVTNVGKSTLINAIIQEITGDKDIITTSRFPGTTLDKIEIPLDDGSFIFDTPGIIHRHQMAHYLSDKDLKYVSPKKEIKPKTYQLNPEQTLFLGGLGRFDFVSGEKQGFTAYFDNNLKIHRTKLEGASDFYQKHLGSLLLPPNHIDKESFPKLSSFDFTINSKMDLVFSGLGWIRINGSEDKPVKITAWAPEGVAVLTRKAII

SEQ ID NO: 18500 - protein, 299 aa, Streptococcus uberis 0140J
MSFKSGFVAILGRPNVGKSTFLNHVMGQKIAIMSDKAQTTRNKIMGIYTTDKEQIVFIDTPGIHKPKTALGDFMVESAYSTLREVDTVLFMVPADEKRGKGDDMIMERLKNAKIPVILVINKIDKVHPDQLLEQIDDFRSQMDFKEVVPISALQGNNVPTLISLLTDNLEEGFQYFPEDQITDHPERFLVSEMIREKVLHLTQQEIPHSVAVVIESMKRDQVTDKVHIRATIMVERDSQKGIIIGKQGSMLKKIGQMARRDIELMLGDKVYLETWVKVKKNWRDKKLDLADFGYNQKEY

SEQ ID NO: 18501 - protein, 271 aa, Streptococcus uberis 0140J
MNQFKKWTFFCLMTLLTLIFMPKASADDNQLLKTKSIQTIKKAGVLRVGVKQDVPNFGYYSADTGKYEGMEVDLARKIAKKLKVKPVFTAVTAQTREALLDNGQLDIIIATYTITPERQANYSFSIPYYRDEVGFLVNQSEKIDSIKDLNHRTIGVAQGSTTKAAIEEYGKAHHLDFKFVQLGSYPELAISLYSKRIQAFSVDKSILSGYVSKQTAILPDGFNQQSYGIASSKANSQLTKYINQLIEEWTNDGSLQAIYKNYGLKPAKSEK

SEQ ID NO: 18502 - protein, 401 aa, Streptococcus uberis 0140J
MTKLSKRVLEMNESITQAAGARAKALKAEGRDILSLTLGEPDFVTPKNICQKAISSIENGKASFYTIASGMPELKKAIATYMENYYGYSVTNNHILAATGAKFVLYAFFMAVLNPEDEVIIPTPYWVSYADQVEMAEGVPVFVDCQESNHFKVTVEQLETARTEKTKVLLINSPSNPTGMIYEKEELQAIGDWAVEHDILILADDIYGRLVYNGNHFTPISSLSESIRNQTITVNGVAKTYSMTGWRVGFAVGNPEIISAMSKIIGQTTSNLTTAAQYAAIEAFTGDQSAVEEMRLAFEERLNTIYPLLNQVPGFNAIKPQGAFYLFPNVSNAMEMTGFTDVTAFTDAILEEVGVAMVTGAGFGSPQNIRLSYATDMETLKEAIRRLNAFMDKHTLDSFKK

SEQ ID NO: 18503 - protein, 67 aa, Streptococcus uberis 0140J
MAQGTVKWFNAEKGFGFISQENGDDVFAHFSAIQSDGFKSLDEGQKVEFDIEQGQRGLQATNITKVQ

SEQ ID NO: 18504 - protein, 270 aa, Streptococcus uberis 0140J
MKKFKLIFTALSLSSLMLLTACSQNSSASLQTKIKDKGKLVVALSPDYAPFEFKTLKDGKDTIVGSDIMLAQEIANKLDVALELSPMSFDNVLSSLQTGKADLAISGISYTKERAKVYDFSKPYYSTKNAMLIKGESKNDLKSLEDLAGKKIGVQKGTIEESLSKKQLKASHIVSLTTMSEAINELKSGQIDAVDLEGPVAEGYLAQNEDLVLAPFKLKTGEGDAKAIAMPKGSKDLKKTVNQVISKMEKENQYETFVKKAAALTGKEEK

SEQ ID NO: 18505 - protein, 380 aa, Streptococcus uberis 0140J
MIYFDNSATTIPFSEALRTYHEVSEKIYGNPSSLHDLGTKSSRILKASRKQIADLLGCSDEEIFFTSGGTESDNWALKGTAFEKATFGKHIIVSDIEHPAVKESAKWLATQGFEVSFAPVDHKGFIDLEKLKALIRKDTILLSVMAVNNEIGSAQPIEAISSILSDKPGITFHVDAVQAIGKRPLKDYLTDRVDLASFSGHKFHAVRGVGILYKKAGKRISPLLHGGGQESDLRSTTENLAGIASMAKALRMTVENEEVALKRLTKMKSVLYQALSAYDDVMIFSEMDHFVPNILTFGIKGVRGEVIVHAFESHGIYISTTSACSSKAGKPAGTLIAMGVPVKDAQTAVRISLDETNNMEEMEQFLTIFKQIHEKTKKVR

SEQ ID NO: 18506 - protein, 104 aa, Streptococcus uberis 0140J
MSTYAIIKTGGKQVKVEVGQAIYVEKIDAEAGAEVTFNEVVLVGGDKTVVGTPIVEGATVVGTVEKQGKQKKVVTFKYKPKKGSHRKQGHRQPYTKIVIDAINA

SEQ ID NO: 18507 - protein, 376 aa, Streptococcus uberis 0140J
MKNKASIYFDNAATTPLTDSVIEAMTTVMKDTFGNPSSIHAFGREANKLLRESRQDIAQLLKVPARDIIFTSGGTESNNTAIKGYALANQNKGKHLITTAIEHHSVLHTMAYLEKTFHFEVTYLTPKNGHISAEQVKEALREDTILVSIMAANNETGDLLPIAEIGELLRDHPAAFHVDAVQLMGKRPIYPLELGIDFLSASAHKFHGPKGIGFLFSHSNHFDALLHGGDQEEKRRASTENLIGIIGMVRALKDAYAEMDNNWNKIEELSRQLLSQLEGIPFYLNKNQPSLPHVLNIGFPNHQNGILLTRLDIDNIAISTGSACTAGTVEPSHVLEAFYGQGATQLDESVRISLSDQNSSEEVIQVTDSIKKIIGG

SEQ ID NO: 18508 - protein, 323 aa, Streptococcus uberis 0140J
MTERYADKQIKLFSLTSNLPIAEKISEASGIPLGKITSRQFSDGEIMINIEETVRGDDIYIVQSTSFPVNDNLWELLIMIDACKRASANSVNVVLPYFGYSRQDRVSKSREPITAKLVANMLTKAGIDRVLTLDLHAVQVQGFFDIPVDNLFTVPLFATHYHQKGLYGEDVVIVSPKNSGIKRARALAELLNSPIAIIDYAEDEAGREEGYIIGEVEGKKAIIIDDILNTGITFAEAAKILDRSGATDIYAVASHGLFAGGAADILDTAPIKEIIITDSVLTENKKPQNLHYLSASQLIADAIIRIHERKPLSPLFEYHADEK

SEQ ID NO: 18509 - protein, 330 aa, Streptococcus uberis 0140J
MSIRSLFGSLKEKVVGKNVKIVFPEGNDERVVRAAARLKFEGLVEPIILGKAEDIRALLTKLGFADQDYQIINPEDYADFEKMKAEFVEIRKGKATIEDADKLLRDVNYFGVMLVKMGLADGMVSGAIHSTADTVRPALQIIKTKPGISRTSGVFLMNRENTNERYIFADCAINIDPNAQELAEIAVNTAETAAIFDIDPKIAMLSFSTKGSGKAPQVDKVAEATQIAKSLNPQLALDGELQFDAAFVPETAAIKAPDSDVAGKANTFIFPDLQSGNIGYKIAQRLGMFDAIGPILQGLNKPVNDLSRGSSAEDIYKLGIITAAQAIEAK

SEQ ID NO: 18510 - protein, 438 aa, Streptococcus uberis 0140J
MSMFLDTAKISVQAGRGGDGMVAFRREKYVPNGGPWGGDGGKGGSVIFKVDEGLRTLMDFRYNRKFRAKAGEKGMTKGMHGRGSEDLIVLVPQGTTVKDAETGKVITDLVENGQEYVIAKGGRGGRGNIRFATPRNPAPEIAENGEPGEERELELELKILADVGLVGFPSVGKSTLLSVVSAAKPKIGAYHFTTIVPNLGMVRTKSGDSFAMADLPGLIEGASQGIGLGTQFLRHIERTRVILHVIDMSASEGRDPYEDYVSINNELETYNLRLLERPQIIVANKMDMPEAEEHLAAFKEKLAAEYDEFDDMPQIFPVSTLAKQGLDSLLDATANLLASTDEFLLYDESDYQVEDEVYYGFSEEEKAFEITRDDDASWVLSGEKLERLFVMTNMERDESIMKFARQLRGMGVDEALRERGAKDGDLVRIGNFEFEFVD

SEQ ID NO: 18511 - protein, 249 aa, Streptococcus uberis 0140J
MPKKDSIQDKRKNGCNTSSHTHHRRDNSDSQTSCISVVPIFNHLEEEQMDEIMKVMRSISYKKGEVVYREGDTFNALYVVSKGKIRIYRLSESGKEQLLRILNPGDFTGELALFRESIHEAYAEAMSDTDVCMISKNDLQEFLLKYPTISLKFLSEFSNRLETSEKQTTRFATEKVDSRIALFLAECLDGDEGSMEIELPMNRKDLASYLGTTPETISRKFADFEEAGYIKQKRNRKIEILDLDGLLLI

SEQ ID NO: 18512 - protein, 258 aa, Streptococcus uberis 0140J
MKSPEEIIESTIAIGQYKVEKPFRAKAILGFIGGAMISLGYLLYVRIAASGLETFGAFSSILGACAFPIGLIIILMAGGELITGNMMAVSASFFAKKISLNDLLKNWLVITIFNLIGAFFVAYVFGHFLGLTASGIFKEEVIEVAHAKIAANPLQAFVSGIGCNWFVGLALWLNYGAKEASGKLLGIWFPVMTFVALGFQHSVANAFVIPAAIFENGATWLEFLENFSLVFAGNIIGGAIFVSLFYYIAFYHAHDNHD

SEQ ID NO: 18513 - protein, 756 aa, Streptococcus uberis 0140J
MLCQNCKLNEATIHLYTNVNGKQRQVDLCQNCYQIMKTDTNNPILGGQNGKPQQDSINPFFDDFFGDLNNFRAFGQLPNTPPTQSGGGQGNGGHRGGHNGSQAQAAQTQKPNGLLEEFGINVTDIARRGDIDPVIGRDDEIVRVIEILNRRTKNNPVLIGEPGVGKTAVVEGLAQKIVDGDVPHKLQHKQVIRLDVVSLVQGTGIRGQFEERMQKLMEEIRNRQDVILFIDEIHEIVGAGSAGDGNMDAGNILKPALARGELQLVGATTLNEYRIIEKDAALERRMQPVKVDEPSVEETITILKGIQSKYEDYHHVKYSQDAIEAAAHLSNRYIQDRFLPDKAIDLLDEAGSKMNLTLNFVDPKEIDKRLVEAENLKAQATRDEDFERAAYFRDQIAKYKELQKQKVDDEDTPIITEKTIEAIVEQKTNIPVGDLKEKEQSQLVNLSDDLKAHVIGQDDAVEKIAKAIRRNRVGLGSPNRPIGSFLFVGPTGVGKTELSKQLAIELFGSADNMIRFDMSEYMEKHAVSKLVGAPPGYVGYEEAGQLTEKVRRNPYSLILLDEVEKAHPDVMHMFLQVLDDGRLTDGQGRTVSFKDTIIIMTSNAGTGRVEASVGFGAAREGRTNSVLGELSNYFSPEFMNRFDGIIEFQPLSKENLLHIVDLMLEDVNARLSHNNIHLEVTAKVKEKLVDLGYDPKMGARPLRRTIQEHIEDAITDFYIENPTEKNLKAMMSSNGNILIKAIKAKSSEEPLDMPVK

SEQ ID NO: 18514 - protein, 484 aa, Streptococcus uberis 0140J
MNQKDQTKAPIYQGLVDLRKKRIVPFDVPGHKRGRGNPELVELLGEKCVGIDVNSMKPLDNLGHPVSIIREAEELAADAFGAAHAFLMVGGTTSAVQAMILATVKAGDKIILPRNVHKSAINALVLCGAIPIYIELSVNHKIGIALGLENDRFAQAIKEHPDAKAVLINNPTYYGICSDLKGLTDLAHAAGMKVLVDEAHGAHLPFTDKLPLSAMEAGADMSAVSMHKSGGSLTQSSILLLGPGMNQEYVRQIINLTQSTSASYLLLSSLDISRRNLASRGKESFEKVIEMAEYARREINAIGGYYAFSKELVDGVSVYDFDVTKLSIYTQGIGLTGIEVYDLLRDEYDIQIEFGDIGNILAYISIGDRLQDIERLVGALADIKRLHARDGKDLMSGEYIQPELVLTPQEAFYAERDSVPLKEAIGHVCGELVMAYPPGIPILAPGERITEELIDYIIFSKERGCSIQGTEDPDVKYINIIKEA

SEQ ID NO: 18515 - protein, 330 aa, Streptococcus uberis 0140J
MKKSFIHQQEEISFVKNTFTQYLIAKLDVVEVQGPILSRVGDGMQDNLSGIENPVSVNVLKIPEAQFEVVHSLAKWKRHTLARFGFNEGEGLVVNMKALRPDEDSLDQTHSVYVDQWDWEKVIPDGKRNLAYLKETVETIYKVIRLTELAVEARYDIEAILPKKITFIHTEDLVKRYPDLSPKERENAITKEFGAVFLIGIGGELSDGKPHDGRAPDYDDWTSETEDGYHGLNGDILVWNEQLQSAFELSSMGIRVDEDALKRQVAITGDFDRLEFDWHKSLLNGLFPLTIGGGIGQSRMAMFLLRKKHIGEVQTSVWPQSVRESFDNIL

SEQ ID NO: 18516 - protein, 395 aa, Streptococcus uberis 0140J
MDKVVIVQALRTPIGAFGGAFKDVNAVTLATTVIKKMLDNTQLPPHHIDEVIIGNVLHAGLGQNIARQIAIHSGIPNEKTAFTVDMVCGSGLKAIQLAAQSILLGDAKIIIAGGVENMSQAPYVCQSNRFGSRLGNSELIDTLVHDGLTDAFSKTHMGITAENVAKNYQISREEQDQFAFNSQQKAAEALKNNRFKEEIVPVTVTQRKGDPLIVSQDEYPKPNSSLEKLKKLRPAFMSSEGTVTAGNASGINDGAAMVMLMTEKHAKQLGLEILASITSYASAGVDPDIMGTGPIPATQKALEKANLKISDIGLIESNEAFAAQSLAVMMSLECQADKVNVNGGAIALGHPIGASGARILVTLLHEMKKQDVTNGLATLCIGGGQGTSLIVTQEK

SEQ ID NO: 18517 - protein, 214 aa, Streptococcus uberis 0140J
MKFFLDTANVEAIKDLNEHGLVDGVTTNPTIISREGRDFETVIKEICQIVDGPVSAEVTGLTAEEMVAEAREIAKWHDNVVVKIPMTKDGLKATHILSKEGIKTNVTLVFTVSQGLMAMKAGATYISPFVGRLEDIGTDPYQLIEDLRDIIDLYDFDTEIIAASIRNAAHVEAVAKIGAHIATIPDSVFSKMTEHPLTTNGIKQFMDDWASFKK

SEQ ID NO: 18518 - protein, 67 aa, Streptococcus uberis 0140J
MTNGTVKWFNAEKGFGFITQENGTDVFAHFSEIQSNGFKSLDEGQKVSFDLEQGQRGLQATNICKIA

SEQ ID NO: 18519 - protein, 404 aa, Streptococcus uberis 0140J
MKIFEKSSKLEHVAYDIRGPVLEEAERMMANGEKILRLNTGNPAAFGFEAPDEVIRDLILNARNSEGYSDSRGIFSARKAIMQYCQLKDFPEVDINDIYLGNGVSELISMSMQALLDDGDEVLVPMPDYPLWTACVSLAGGKAVHYICDEQAEWYPDIDDIKSKVTDRTKAIVIINPNNPTGALYPKELLEEIVDIAREHQLIIFADEIYDRLVMDGGKHIAIASLAPDVFCVSMNGLSKSHRIAGFRVGWMVLSGPKNHVKGYIEGLNMLANMRLCSNVLAQQVVQTSLGGHQSVDDLLLPGGRIFEQRNFIHKAINDIPGLSAVKPKAGLYIFPKIDRQMYRIDDDEQFVLDLLKQEKVMLVHGRGFNWKDPDHFRIVYLPRVEELADVQEKITRVLKQYKR

SEQ ID NO: 18520 - protein, 399 aa, Streptococcus uberis 0140J
MNKNKIVLAYSGGLDTSVAIAWLKKDFDVIAVCMDVGEGKDLQFIHEKALKIGAIESYVIDVKEEFAEAFVLPALQAHAFYEQKYPLVSALSRPLISKKLVDIAHECGATYIAHGCTGKGNDQVRFEIAIAALDPTIEVIAPVRDWHWSREEEIAFAKENGVPIPADLDNPYSVDQNLWGRANECGVLENPWNQAPEEAYDMTVSPEEAPDRPEYIDITFEAGVPIALNGKVLSLANLIIELNQIAGAHGIGRIDHVENRLVGIKSREIYECPGAITLLAAHKEIEDLTFVREVSHFKPILENELSNLIYNGLWYNPATQAILSYLKETQKVVNGIAKVKLYKGHVQVVARQSDNSLYDENLATYTSADSFDQEAAIGFIKLWGLPTQVNAQVNKKGVV

SEQ ID NO: 18521 - protein, 67 aa, Streptococcus uberis 0140J
MAQGTVKWFNAEKGFGFISTEEGQEYFAHFSAIQTKGYKTLDEGQQVTFDIVDGHRGLQAVNITKLP

SEQ ID NO: 18522 - protein, 416 aa, Streptococcus uberis 0140J
MLTTKQEEIVIVGAARTPVGAYLGDLKTVPVEVLGEVALKEAVNRANLSVEDIDEVIVGHVTGSQTTNNLGNIIAINSGLKDTSTGMTVNRICGSGIQSAVSASLELLHSNKKIIAAGGAESLSRAPYQLPDSARYQAFRMGDVQMIDANLEGHRSASGRNSGIAHMGNTAENVVRKYNISREKQDQFAFESQQKAAEAISNGRFAQEIVPVEVPGRKGQVTIVEKDGHPRPDTTMESLAKLRPAFEKDGTVTAGNASGLNDGAAFEIFTTESLAKEKGLEIMAKVVDYQISGCAPETMGLGPVYAINDLLERQGLDLVKDIDVLEINEAFAGQTIGCLMELGIDMDTDFYKHKFNPHGGAVALGHPLGMSGARIITSLLYEFKNNPDKRYAIASACIGGGQGIALLLENGYYTGK

SEQ ID NO: 18523 - protein, 324 aa, Capsicum annuum
MAFSKNNTPIVFLFLVVVNLLIVSSSAQLSTNFYSKSCPKLFQTVKSTVQSAINRETRMGASLLRLFFHDCFVNGCDGSLLLDDTSSFTGEKRAAPNVNSVRGFEVIDNIKSAVEKACPGVVSCADILAITARDSVVILGGPNWNVKLGRRDARTASQGAANSSIPPPTSNLNQLISSFSAVGLSTTDMVALSGAHTIGQARCTSFRARIYNETNNIDSSFATTRQRNCPRNSGSGDNNLAPLDLQTPTKFDNNYFKNLVSKRGLLHSDQQLFNGGSADSIVTSYSNNPSSFSSDFVTAMIKMGDNRPLTGSNGEIRKNCRTRN

SEQ ID NO: 18524 - protein, 1520 aa, Synechocystis sp.
CGVGFIANLRGKPDHTLVEQALKALGCMEHRGGCSADNDSGDGAGVMTAIPRELLAQWFNTRNLPMPDGDRLGVGMVFLPQEPSAREVARAYVEEVVRLEKLTVLGWREVPVNSDVLGIQAKNNQPHIEQILVTCPEGCAGDELDRRLYIARSIIGKKLAEDFYVCSFSCRTIVYKGMVRSIILGEFYLDLKNPGYTSNFAVYHRRFSTNTMPKWPLAQPMRLLGHNGEINTLLGNINWMAAREKELEVSGWTKAELEALTPIVNQANSDSYNLDSALELLVRTGRSPLEAAMILVPEAYKNQPALKDYPEISDFHDYYSGLQEPWDGPALLVFSDGKIVGAGLDRNGLRPARYCITKDDYIVLGSEAGVVDLPEVDIVEKGRLAPGQMIAVDLAEQKILKNYQIKQQAAQKYPYGEWIKIQRQTVASDSFAEKTLFNDAQTVLQQQAAFGYTAEDVEMVVVPMASQGKEPTFCMGDDTPLAVLSHKPRLLYDYFKQRFAQVTNPPIDPLRENLVMSLAMFLGKRGNLLEPKAESARTIKLRSPLVNEVELQAIKTGQLQVAEVSTLYDLDGVNSLEDALTNLVKTAIATVQAGAEILVLTDRPNGAILTENQSFIPPLLAVGAVHHHLIRAGLRLKASLIVDTAQCWSTHHFACLVGYGASAICPYLALESVRQWWLDEKTQKLMENGRLDRIDLPTALKNYRQSVEAGLFKILSKMGISLLASYHGAQIFEAIGLGAELVEYAFAGTTSRVGGLTIADVAGEVMVFHGMAFPEMAKKLENFGFVNYRPGGEYHMNSPEMSKSLHKAVAAYKVGGNGNNGEAYDHYELYRQYLKDRPVTALRDLLDFNADQPAISLEEVESVESIVKRFCTGGMSLGALSREAHETLAIAMNRLGAKSNSGEGGEDVVRYLTLDDVDSEGNSPTLPHLHGLQNGDTANSAIKQIASGRFGVTPEYLMSGKQLEIKMAQGAKPGEGGQLPGKKVSEYIAMLRRSKPGVTLISPPPHHDIYSIEDLAQLIYDLHQINPEAQVSVKLVAEIGIGTIAAGVAKANADIIQISGHDGGTGASPLSSIKHAGSPWELGVTEVHRVLMENQLRDRVLLRADGGLKTGWDVVMAALMGAEEYGFGSIAMIAEGCIMARVCHTNNCPVGVATQQERLRQRFKGVPGQVVNFFYFIAEEVRSLLAHLGYRSLDDIIGRTDLLKVRSDVQLSKTQNLTLDCLLNLPDTKQNRQWLNHEPVHSNGPVLDDDILADPDIQEAINHQTTATKTYRLVNTDRTVGTRLSGAIAKKYGNNGFEGNITLNFQGAAGQSFGAFNLDGMTLHLQGEANDYVGKGMNGGEIVIVPHPQASFAPEDNVIIGNTCLYGATGGNLYANGRAGERFAVRNSVGKAVIEGAGDHCCEYMTGGVIVVLGPVGRNVGAGMTGGLAYFLDEVGDLPEKINPEIITLQRITASKGEEQLKSLITAHVEHTGSPKGKAILANWSDYLGKFWQAVPPSEKDSPEANNDVSLTGEKTLTSV

SEQ ID NO: 18525 - protein, 578 aa, Arabidopsis thaliana
MVSHKCVEEFGYASYLVPSNARAPRSARKRRSIEKRISKEDDNMCAIDLLATVAGHLSFESGSSLMSIDKLIEDHRVKEEFPEEEKPLMPVALSPYRGSLSPCGFSSVINGKVENEVDGFSYSGGSDACQVGNFSQEVKPDIDGDAVVLDARPNVVVSLGSSSRTEVPSIGNCVSHGVRDDVNLFSRDDDENFSKYIHPRVTKHSPRTVPRIGDRRIRKILASRHWKGGSRHSDTKPWRNYYLHQQRSYPIKKRKNFDHISDSVTDDYRMRTKMHRGSRKGQGASFVASDSHVKLRIKSFRVPELFIEIPETATVGSLKRMVMEAVSTLLSDGHRVGLMVQGKKVRDDNKTLHQTGISQDNSHLDSLDFSLEPSSEMPQLLTSHPLGHACEELLPVCQATKIDNVLESDHHDSALFPSDSLGNNNVTEDSKAMISVALNELSSQSQPPSRKSRRSEQQQQQAAQRRIRRPFSVAEVEALVQAVEKLGTGRWRDVKLCAFEDADHRTYVDLKDKWKTLVHTAKISPQQRRGEPVPQELLNRVLNAHGYWTQQQMQQLQQNVNKLEQETQSQTTEGLLLL

SEQ ID NO: 18526 - protein, 294 aa, Arabidopsis thaliana
MATTMNAAVSLTSSNSSSFPATSCAIAPERIRFTKGAFYYKSNNVVTGKRVFSIKAQITTETDTPTPAKKVEKVSKKNEEGVIVNRYRPKEPYTGKCLLNTKITADDAPGETWHMVFSHQGEIPYREGQSVGVIADGIDKNGKPHKVRLYSIASSALGDLGNSETVSLCVKRLVYTNDQGETVKGVCSNFLCDLAPGSDVKLTGPVGKEMLMPKDPNATVIMLATGTGIAPFRSFLWKMFFEKHDDYKFNGLAWLFLGVPTTSSLLYQEEFDKMKAKAPENFRVDYAISREQAN

SEQ ID NO: 18527 - protein, 457 aa, Arabidopsis thaliana
QMDQEEEEIEIPNYFICPISLEIMKDPVTTVSGITYDRQNIVKWLEKVPSCPVTKQPLPLDSDLTPNHMLRRLIQHWCVENETRGVVRISTPRVPPGKLNVVEEIKNLKKFGQEALGREETLQKLEVLAMDGNNRRLMCECGVHKSLILFVVKCTSEDEDGRRRIKGLDESLRLLHLIGIPSNDAKTILMENDRVMESLTWVLHQEDFLSKAYTIVLLRNLTEYTSSHIVERLNPEIFKGIIGFLKDVVNSVNRTSPTVRETVQSSSRPSLGKTEPSKLDHSLVIKQAVTAALMILLETSSWSRNRSLLVDLGAVSELIELEISYTGEKRITELMLGVLSRLCCCANGRAEILAHRGGIAVVTKRLLRVSPAADDRAISILTTVSKFSPENMVVEEMVNVGTVEKLCSVLGMDCGLNLKEKAKEILKDHFDEWKKFPCIDITLLTKLLSISPKGPKI

SEQ ID NO: 18528 - protein, 284 aa, Arabidopsis thaliana
EAANKYGIAVGNTPGVLTETTAELAASLSLAAARRIVEADEFMRGGLYEGWLPHLFVGNLLKGQTVGVIGAGRIGSAYARMMVEGFKMNLIYFDLYQSTRLEKFVTAYGQFLKANGEQPVTWKRASSMEEVLREADLISLHPVLDKTTYHLVNKERLAMMKKEAILVNCSRGPVIDEAALVEHLKENPMFRVGLDVFEEEPFMKPGLADTKNAIVVPHIASASKWTREGMATLAALNVLGRVKGYPIWHDPNRVDPFLNENASPPNASPSIVNSKALGLPVSKL

SEQ ID NO: 18529 - protein, 409 aa, Arabidopsis thaliana
RPQDELVELLWRDGQVVLQSQTHREQTQTQKQDHHEEALRSSTFLEDQETVSWIQYPPDEDPFEPDDFSSHFFSTMDPLQRPTSETVKPKSSPEPPQVMVKPKACPDPPPQVMPPPKFRLTNSSSGIRETEMEQYSVTTVGPSHCGSNPSQNDLDVSMSHDRSKNIEEKLNPNASSSSGGSSGCSFGKDIKEMASGRCITTDRKRKRINHTDESVSLSDAIGNKSNQRSGSNRRSRAAEVHNLSERRRRDRINERMKALQELIPHCSKTDKASILDEAIDYLKSLQLQLQVMWMGSGMAAAAASAPMMFPGVQPQQFIRQIQSPVQLPRFPVMDQSAIQNNPGLVCQNPVQNQIISDRFARYIGGFPHMQAATQMQPMEMLRFSSPAGQQSQQPSSVPTKTTDGSRLDH

SEQ ID NO: 18530 - protein, 212 aa, Arabidopsis thaliana
FEAIESYAITLGLNKKYGSIDLEKLRCLAVVVDIEAAQDVANVVELLQWLTTIGVKQVGLFDSQGLLKKSKDLILETVPGSMLLEEIEKDVTPDGKRIALEFISSSDNKEAVMKAANILLQRYLKSSHPEDDKGEDFFTESHLNDALRVVGENVHVPDLLLVYGPIRSHLGFPAWRLRYTEIVHMGTLKYMRYGSLLKAIHKFTGVHQNYGT

SEQ ID NO: 18531 - protein, 253 aa, Arabidopsis thaliana
FTTEGEVPYREGQSIGVIPEGIDKNGKPHKLRLYSIASSAIGDFGDSKTVSLCVKRLVYTNDGGEIVKGVCSNFLCDLKPGDEAKITGPVGKEMLMPKDPNATIIMLGTGTGIAPFRSFLWKMFFEEHEDYKFNGLAWLFLGVPTSSSLLYKEEFEKMKEKNPDNFRLDFAVSREQTNEKGEKMYIQTRMAEYAEELWELLKKDNTFVYMCGLKGMEKGIDDIMVSLAAKDGIDWLEYKKQLKRSEQWNVEVY

SEQ ID NO: 18532 - protein, 252 aa, Eucalyptus camaldulensis
MCPIDSGRSFDTSLSLGLGCYGDPEDHEIKIKKPLAKLSGNSTCLTIGLPGGEACGLGSASGDEVRNIPSRSASSFSNSSSAKREKAEQGEEEAVERGTGSPRATINIEDEDEFSPRKKLRLSKAQSSILEESFKAHTTLNTKQKHDLANRLNLRPRQVEVWFQNRRARTKLKQTEVECEMLKKCCETLKEENRRLKKELQELNSLKPTASVYRQIPAAALPLCPSCERIAHPEFPFSTESRLWPAHPSAAC

SEQ ID NO: 18533 - protein, 231 aa, Prunus salicina
MRRGRGAAARAAAATPAEPAGSRPNIANEVRYRGVRKRPWGRFAAEIRDPWKKTRVWLGTFDSAEDAARAYDAAARILRGPKAKTNFPISCAYPPPFYNNPTDQAIETKLFGSGYGFQDHPVVDPQRPTSSSLSSTVESFSGPRPPPQSTTIAAESSRRKRQPRTPPVVPEDCHSDCDSSSSVVLDDGDFAASSSFRKTLLPFDLNFPPLDEEGELGGGDGQDLRCTALCL

SEQ ID NO: 18534 - protein, 381 aa, Prunus salicina
MCGGAIISDFIAPTRSRLTADYLWPDLKKPSSGKRFSKPLRPEIVGLGDDFEADFQEFKDESDVDEDDEMVEAKPSAFSAGKPSSARGSTTVKSVEFNGQAEKSAKRKRKNQYRGIRQRPWGKWAAEIRDPRKGVRVWLGTFNTAEEAARAYDSEARRIRGKKAKVNFPDETPRSSAKRSVKASQKMLPKTNMNAIQPNLNQNINFVHDPNQDYYNAMGFLDEKPATNDFGFMSTFPANGEVVLKSSAPSDAVPLYFSSDQGSNSFDCSDFGWGEQGSKTPEISSVLSSVMEESDDSLFLEDANPTKKLKSNPEDLVPVQDNAGKTLSDELSAFEMKYFQTPYLGGSWDASVDAFLSADATQDGGNSVDFWSFDDLIGGGF

SEQ ID NO: 18535 - protein, 261 aa, Prunus salicina
MIMSDNNQSLMPCLTEQWGNLPFKVDDSEDMIVYSSLNDALSFGWFPDHSLYEYVKPEPLLYDPFDHHHALPNLFTQFQQYHDVNNAPIILPFEHHHRDDQKQVQVVDAADQNKAPKSGVARGRHYRGVRQRPWGKFAAEIRDPAKNGARVWLGTYETSEEAALAYDRAAYRMRGCKALLNFPHRIGLNEPPPVRVTGKRKEPEAEAAAAAADASTTTPKSAKRTKASSVAEHDHHQANVLRTRQKNSMGLLPLGEQLLVS

SEQ ID NO: 18536 - protein, 282 aa, Prunus salicina
MFGQSGTDADITLLDSIRRHLLGETDLRIGNSMANSVTGPIFSRSSSFSSLYPCLTENWGDLPLKEDDSEDMVLYGVLRDAVNVGWVPSLGSGSADTCSLNFSVKSEPEVLTPVSEVPEKKPSPVQPVRPAKQPAQAGPAVVPAKGKHYRGVRQRPWGKFAAEIRDPAKNGARVWLGTFETAEDAALAYDRAAYRMRGSRALLNFPLRVNSGEPEPVRVTSKRSSPEPSSSSSESGSPKRRKKVAVLDPAQAGLEMGAGIGQQQVGGQVVVSCTRGEQLLVS

SEQ ID NO: 18537 - protein, 563 aa, Saccharomyces cerevisiae
MSEITLGKYLFERLKQVNVNTVFGLPGDFNLSLLDKIYEVEGMRWAGNANELNAAYAADGYARIKGMSCIITTFGVGELSALNGIAGSYAEHVGVLHVVGVPSISSQAKQLLLHHTLGNGDFTVFHRMSANISETTAMITDIATAPAEIDRCIRTTYVTQRPVYLGLPANLVDLNVPAKLLQTPIDMSLKPNDAESEKEVIDTILALVKDAKNPVILADACCSRHDVKAETKKLIDLTQFPAFVTPMGKGSIDEQHPRYGGVYVGTLSKPEVKEAVESADLILSVGALLSDFNTGSFSYSYKTKNIVEFHSDHMKIRNATFPGVQMKFVLQKLLTNIADAAKGYKPVAVPARTPANAAVPASTPLKQEWMWNQLGNFLQEGDVVIAETGTSAFGINQTTFPNNTYGISQVLWGSIGFTTGATLGAAFAAEEIDPKKRVILFIGDGSLQLTVQEISTMIRWGLKPYLFVLNNDGYTIQKLIHGPKAQYNEIQGWDHLSLLPTFGAKDYETHRVATTGEWDKLTQDKSFNDNSKIRMIEVMLPVFDAPQNLVEQAKLTAATNAKQ

SEQ ID NO: 18538 - protein, 227 aa, Mycobacterium tuberculosis
GSHMDEILARAGIFQGVEPSAIAALTKQLQPVDFPRGHTVFAEGEPGDRLYIIISGKVKIGRRAPDGRENLLTIMGPSDMFGELSIFDPGPRTSSATTITEVRAVSMDRDALRSWIADRPEISEQLLRVLARRLRRTNNNLADLIFTDVPGRVAKQLLQLAQRFGTQEGGALRVTHDLTQEEIAQLVGASRETVNKALADFAHRGWIRLEGKSVLISDSERLARRAR

SEQ ID NO: 18539 - protein, 201 aa, Listeria monocytogenes str. 4b F2365
  misc_feature (2)..(2): Xaa can be any naturally occurring amino acid
  misc_feature (154)..(154): Xaa can be any naturally occurring amino acid
  misc_feature (161)..(161): Xaa can be any naturally occurring amino acid
  misc_feature (175)..(175): Xaa can be any naturally occurring amino acid
  misc_feature (178)..(178): Xaa can be any naturally occurring amino acid
  unsure (1)..(201): unsure at all Xaa locations
GXDKQAILDNIHQTWQEEANAISRLPEVTSEEALVKTVEKIAECTGKIVVAGCGTSGVAAKKLVHSFNCIERPAVFLTPSDAVHGTLGVLQKEDILILISKGGNTGELLNLIPACKTKGSTLIGVTENPDSVIAKEADIFFPVSVSKEPDPFNXLATASTXAVIASFDAVIVCLXTYXNYTKEQFSVIHPGGAVGNKLLNK

SEQ ID NO: 18540 - protein, 376 aa, Mycobacterium sp. JS623
MGPWQPPSHLRAPRAHRPRSRPPPTGMTGEHYTMGDTVTVQPFGETFPVEPGETVLSAILRNGRFVKYGCKHGGCSTCRAEVVEGDFTQSDGTSFSLSDADRDAGVVLLCSTYPEGDLVVDVSDTMDDLTDEEYNAGQNIVEFTGTVDRIVDYTHDIAGIEIKLDEPSNITFVPGQYIEVQVPGSDDEWRSFSMANPPSISSRVHLVVRVIPGGRFTSQVGKEIAEGTTMKLRGPLGQFAIRLSYRPIIFIAGGSGIAPVLSMLADLIESNNERPATFLYGARTAADLPMVDKLRELENEHDWFTFIPALSDPDDTPWDGETGLITEVLKRHFPSTKGHESYLCGPPAMIDAALDVLTSSGCKDRHIFFDRFVPSG

SEQ ID NO: 18541 - protein, 507 aa, Garcinia mangostana
MSPFILYSILIAILVYVLIKLGSLSSGRRLPPGPRPLPLVGNLPHLGSMPHQSIASLVKKYGPLMYLRLGYVDVVVAASASVAAQIFKNHDANFSSRPPNSGAKYVAYNYHDLVFAPYGPRWRMLRKISSVHLFSNKALDDFRHIREAELAVLTQTLASAGKAPVNLGQLLNVCTTNALGRVMVGRRVFNDGVDPKASDFKDMTLELMQLAGVFNIGDFVPALEWLDLQGVASKMKRLHKRFDDFLTTIVEEHRNGGQEKHVDLLSTLISLKDNADGDGGKLTDTEIKALLLNFFTAGTDTSSSTVEWAIAELLRHPKILTQVQRELDSVVGRDRLVSDLDLPQLTYLSAVIKETFRLHPSTPLSLPRMAAESCEIDGYHIPKGATLLVNVWAIARDPDVWAEPLVFMPERFLPGGEKAKVDVRGNDFELIPFGGGRRICAGLSYGLRVVYLMAATLLHAFDWELANGLIPEKLNMDEAYGLTLQRAAPLMVHPKPRLSPQAYKAKN

SEQ ID NO: 18542 - protein, 242 aa, Garcinia mangostana
MRRPCCDKQGNNKGAWSKQEDQKLIDYIRAHGEGCWRSLPKAAGLHRCGKSCRLRWINYLRPDIKRGNFAQDEEDLIIKLHALLGNRWSLIAGRLPGRTDNEVKNYWNSHIKKKLINMGIDPNNHKLNQVLQRPQLGHNSPNINATTSPSLEASLNHSTKPKKPKVENGGVSDSGSCLDDDDDDDDDESNSDSSYLNLDLTIGVPSTSFNSSENKQVVEIDQQVITSGQLGSEPLPTLLLFR

SEQ ID NO: 18543 - protein, 284 aa, Garcinia mangostana
MESQITSTFSYPYGGYQTDEDNMDIRKGPWTEEEDSLLTEYISIHGEGRWNTAARFAGLKRTGKSCRLRWLNYLRPDVRRGNISLQEQLLILQLHSRWGNRWSKIARFLPGRTDNEIKNYWRTRVQKLAKQMKCDVGSKQFTDTMRCVWIPQLIERINASSYSSSLSETSSGQPATTIHTNDPTNKSTQLAPQNNWESISKWANPVGFIPGPSPDSFNGQVSSNTTSNDEGYYNGMQNGSGQCPGIDESGCWDGLLLDGLDQLSEIERLWINDENNWPSRYIFG

SEQ ID NO: 18544 - protein, 284 aa, Garcinia mangostana
MERSSGIRKGTWTVEEDKLLRMCVEKYGEGKWHQIPKKAGLNRCRKSCRLRWLNYLKPNIKRGDFLADEVDLMLKLHKLLGNRWSLIAGRLPGRTANDVKNFWNTHLKKRTVSPPEDEENLKSPTPQKIVTRGNIFKPRPRKFSNCSCPFDASRKKSDIGINSLQSYQLSNNSKSVISLQNHPLVPPISTEENPAWWETMLFEENLEENKLDTKANGWCEQDDQFLTSFFNGEITQGTTVEGSTKNDESGHWPDLGFDEAAWSLFSPEQMANMSPSNTMFDMQM

SEQ ID NO: 18545 - protein, 797 aa, Micromonospora echinospora
MRVRGVAAKALESLGISLEGVRQQVEEIIGQGQQAPSGHIPFTPRAKKVLELSLREALQLGHNYIGTEHILLGLIREGEGVAAQVLVKLGADLNRVRQQVIQLLSGYQGKEPAAAGAAAGEAAPSTSLVLDQFGRNLTQAAREGKLDPVIGREKEIERVMQVLSRRTKNNPVLIGEPGVGKTAVVEGLSQKIIKGEVPETLKDKQLYTLDLGALVAGSRYRGDFEERLKKVLKEIRTRGDIILFIDEIHTLVGAGAAEGAIDAASILKPMLARGELQTIGATTLDEYRKHLEKDAALERRFQPIQVGEPSLAHTIEILKGLRDRYEAHHRVSITDAALVAAATLADRYISDRFLPDKAIDLIDEAGARMRIRRMTAPPDLRDFDERIAQVRRDKESAIDAQDFERAAQLRDKEKQLLGQKAQREKEWKAGDLDVVSEVDDEQIAEVLGNWTGIPVYKLTEEETSRLLRMEDELHKRVIGQEDAVKAVSKAIRRTRAGLKDPKRPSGSFIFAGPSGVGKTELSKALAEFLFGSEDALIQLDMSEFHDRYTVSRLVGAPPGYVGYDEGGQLTEKVRRRPFSVVLFDEIEKAHPDVFNTLLQILEDGRLTDGQGRIVDFKNTVIILTTNLGTRDVAKAVSLGFQASEDSESNYDRMKQKVNDELKQHFRPEFLNRIDDTIVFHQLRENEILSIVDIMIARIETQLRNKDMGLELTDNAKKYLAKKGFDPVLGARPLRRTIQRDIEDNLSERILFNELTPGQIVVVDCEGDPSNTAKSKLVFRGADKPPTGPVPDAGAVTA

SEQ ID NO: 18546 - protein, 70 aa, Shewanella violacea
MSNSTTGLVKWFNEEKGFGFITQDNGGDDVFVHFRSITSDGFKTLAEGQKVSFEVEQGQKGLQAANVVAL

SEQ ID NO: 18547 - protein, 70 aa, Shewanella violacea
MSDSNTGTVKWFNEDKGFGFLTQDNGGADVFVHFRAIASEGFKTLDEGQKVTFEVEQGPKGLQASNVIAL

SEQ ID NO: 18548 - protein, 183 aa, Oryza sativa Japonica Group
MARSLSLLLLLVACFLVAGATAARPAPSTSGAAAISSFVRSCADGSPSALPRNATSAVRSIAARSSSSHLPPVAAEAAGDCASELGDGVDALRRCVDAMARVAVGEESSSTAAAARRKVRFEVDNVRTWASAALTDDNMCMEGFKGEAAGGGGAREAVRGHIMGLLHLTANALGILNAMAKQI

SEQ ID NO: 18549 - protein, 184 aa, Oryza sativa Japonica Group
MAVGNGAAAAQQRQAFDAYAQYQPGHGLTFDVPFTRGEAAAAVLEASLGLGGAGAGGRNPATSSSTIMSFCGSTFTDAVSSIPKDHAAAAAVVANGGLSGGGGDPAMDREAKVMRYKEKRKRRRYEKQIRYASRKAYAEMRPRVKGRFAKVPDGELDGATPPPPSSAAGGGYEPGRLDLGWFRS

SEQ ID NO: 18550 - protein, 486 aa, Oryza sativa Japonica Group
MPVAGGAFSYLRVTFGELAAFLTGANLIMEYVFSNAAVARSFTAYLGTAVGVDAPSKWRIAVPGLPKGFNEVDLIAVGVILLISVCICYSTKESSVVNMVLTAVHVAFILFIIVMGFWRGDTRNLTRPVDLAHNPGGFFPHGAAGVFNGAAMVYLSYIGYDAVSTMAEEVERPSRDIPVGVSGSVVLVTLLYCLMAASMSMLLPYDAIDTEAPFSGAFKGSSGWGWVSNVIGAGASLGILTSLMVAMLGQARYLCVIGRSGVMPAWLAKVHPCTATPVNASAFLGVFTAALALFTELDVLLNLVSIGTLFVFYMVANAVVYRRYVAADDDDADHRRAWPTLVFLAAFSLVALCFTLLWQFAPAGRARTGLLAACGAAAVATVGAFRALVAEARRPELWGVPAMPWVPAASVFLNVFLLGSLDRPSYVRFGFFTAAAVLVYVLYSVHARYDAEEGGGRRGRGRRARRRQGAGRGCRLQGVAGCVVDR

SEQ ID NO: 18551 - protein, 451 aa, Oryza sativa Japonica Group
MGKAAAMEVSASAAAEAGMMVGHGEWRDDDGRARRMGTVWTASAHIITAVIGSGVLSLAWAIAQLGWVAGPAVMLLFAFVIYYTSTLLAECYRSGDPCTGKRNYTYMDAVRANLGGSKVRLCGVIQYANLFGVAIGYTIAASISMLAIKRADCFHEKGHKNPCRSSSNPYMILFGVVQIVFSQIPDFDQIWWLSIVAAIMSFTYSTIGLSLGIAQTVANGGFMGSLTGISVGTGVTSMQKDTIKAPPPSEAKVMKRATMVSVATTTVFYMLCGCMGYAAFGDKSPDNLLTGFGFYEPFWLLDVANAAIVVHLVGAYQVFVQPIFAFVERWAAARWPDGGFISRELRVGPFSLSVFRLTWRTAFVCATTVVSMLLPFFGDVVGLLGAVSFWPLTVYFPVEMYIAQRGVRRGSARWLCLKVLSAACLVVSVAAAAGSIADVVDALKVYRPFSG

SEQ ID NO: 18552 - protein, 2957 aa, Oryza sativa Japonica Group
MLALERGFGRVRDPAVHWGPRALDLDLLLYGTQVLDQPGLQVPHPYLHERAFVLVPLAEIAPDLAIPGHGSVRDAVHMSTHADSKPWTVPALAEAKRNGQKLVMLTAYDAGFARTFDANGVDLILIGDSLGMVVQGHDSTLPVTVADMVYHTRAVARVLQRALLVADLPFGADATPERALDASLQLLQAGAEMVKIEGAGFKVDIIRYLVEREIPVCAHLGLTPQSVLRLGGFKIQGRGDAARQLVEDARAVAAAGASIMVLECVPTPVAAEVTAAVDVPTIGIGAGPQCDGQVLVLHDFLGLDSGHRRPKFVKDFLAEGGSVAGATRAFADATFNELGALRGQIAQWKREGLRVALVPTMGNLHGGHHSLVALARQYADKVVASIFVNPTQFGPNEDFSRYPRTPEADVAGLEQAGCDAVWLPSVEAMYPLGVDKTTRMHAPGVSEVLEGASRPGHFDGVCTVVARLFLQVQPDVAVFGRKDYQQLAVIKQMVAELSFPVQIVGAEIVRDEDGLAKSSRNQYLSAEQRPVATTIHRTLLGMREGYVAGQARERIEAEATAALQAAGFQVDYAVLRTPELAEPTFDGGGRVALIAARLAPSMHLSLLKTKIHRATVTHSELNYEGSIAIDDNLLAATGIREFEQVHIWDVTNGARFSTYAIRAEAGSGVVSLNGGAARHVQVGDIIIIAAFASMTEQEADSFKPKLRLKGASIPSLLAAEPGRVQDLALRVGPLYVNFARQKYDAAALQALLALAADRDVGGAITRLFRGEQVNLTEGRAALHTALRGDVVDAPVAAEAYATARGIRQRMGVLVRALEDSGVTDVVSVGIGGSDLGPRLVADALRPVTGARLRVHFVSNVDGAAMQRTLATLDPAKTAGILISKTFGTQETLLNGQILHDWLGGSERLYAVSANPERAAKAFAIAADRVLPMWDWVGGRYSLWSAVGFPIALAIGFERFEQLLEGAAQMDAHALDAPLERNLPVLHGLTDIWNRNLLGHATHAVMTYDQRLALLPAYLQQLVMESLGKRVQRDGQPVTVDTVPVWWGGAGTDVQHSFFQALHQGTSIVPADFIGCVHNDDPYTINHQALLANLLAQTEALANGQGSEDPHSDYPGGRPSTLILLDALTPQALGALIAMYEHAVYVQSVIWNINAFDQFGVELGKQLASGLLPALQGEDVAAADRRHCIGHFHFAIVGRAVVLLTEGAQDHRHRGRLRQVIIRAQLDRLHCGGDAGIAGHQQDAHVRAQCAQRLDQRQAGIAAQLQVDQRERRRMLAGQCQGTGGILCGLCFQALAGQAALQGTQRQAEADAAAGPLGRAHPHLAVEAFDGGMGQGQADAHALALAAAEQLARQHGGTGVETMAVVAYFADQVVALDAQVQVHARPAGLLAGIGGIVEQDHQQMAYARVEWQPQRRIVVAMQVDGRPHQAPLLQHLLGAGVAATRCIGRSRGGQCQHALAALNQQLAQGLHVLAHFRLFAALGDIVGEQGHGRQRRVQFMCHRGGMGGQGDDALVAGEALTQRRQFQFALPQGQCQAGGEGQHHCGGNQEVGDHAPAIEVLSAEIGGVTVGGGKPVVVQSMTNTDTSDVASSVKQVAELWRAGSEMVRLTVNTVEAAAAIPRIVDKLAMMGIDVPLIGDFHYNGHQLLTAEPACAEALAKYRINPGNVGFGKKKDLQFAQLIEFAIRYNKPVRIGANWGSLDQALAARLMDENNLREQPWDAGRVLREALIRSALDSAEQAVELGLPRDRIVLSAKVSGVQELIAVYRDLAQRSDFALHLGLTEAGIGSKGIVASSAALSVLLQEGIGDTIRISLTPEPGQSRTQEVIVAQELLQTTGQRAFTPLVTACPGCGRTTSEFFQELAKVVQNHVREKMPLWKIHHPGAENMTLAVMGCIVNGPGESRHANIGISLPGTGETPAAPVFVDGEKKRADLLIRNATVVDVEHASTLAGQSVVIRGEDIVAVGPDAQLRSQWSAARQIDAKGKYLIPGLWDMHVHFGGGPALIEENKALLPLYIAHGITTVRDCSGDLPEQVLQWRGEIAKGTLFGPRLLSSGAKIEGIKPVWKGTIEVGSEADADKAIARLQHDKVDFVKITDSTLKPELFLYSASAARKAGFKASGHIPMALTVEQAVDAGLASIEHLDYAFKAGSKDEAQIAADFEAGRIDRAEANRRLDASFDRDTAMRAYRDFAKRGVFVTPTLNGGRILDFLDQDDHANDPYLAYIGPGLRATYQWRVDRAAKATPAQIEARHAQYHQVAAVLPLLQEAGVTIIAGTDAGFLNSFNFPGIALHQELQLFVKEGLSAPQALSAATRSGPAWFGQMDRYGGVAQGKAADLVLLTANPLQDIAATEKIDSVILRGNVYDRAALDRMLADTKAKRGRRHDDARYFGQRQRDHARFVDRAHPHRAVDAFCNEIRTPIFKDPLQAQLRMPGEECEHGRQQLRLAEGMRHHHPQTAAQCFRLAVEFGLQRLPFVDHALRMALAAQAILGQLQAMGGAQQQAQAELPLQCLQASADRWLGGAQLRGCGREAAGIDDAQEAYYRRWANAGRIRPLLPPDSPMSTPSLSVAAAPATAPSTPLVLAMAAGAGFSVASLYYSQPMLGLIAQDLGAGERAAGLVPTLTQLGYAMGILLLAPLGDRFDRRNLILLKSALLALALGAAAMAGHLPGLLMASLLVGLMATLAQDIVPAAAVLAPDAQRGQIVGRVMTGLLLGILLSRVVSGVVAEAWGWRTQFVLAAVSVAAMGAVMARALPRFAPTSTLRYPALLGSLLALWREQPQLRRAVASQSLLAVGFSAFWSTLALMLHARLGLGSAAAGAFGIAGAAGALAAPFAGRFADRLGCHAVARLAIAVALLGFGLLLAESWLPAVALLPLLVVSALLFDFGFQSALVAHQTLVYGLVPPARSRLNALLFTGMFIGMAAGGALGSLALAQWGWHGVAWLAVVCAGGSLLLRLK

SEQ ID NO: 18553 - protein, 495 aa, Oryza sativa Japonica Group
MAAMATAPCFPATPGLPARGAVAARSRMAAGGSRSQRRRSSSGVFLCRSSTTGSTRMEDYNTAMKRMMRNPYEYHHDLGMNYAIISDSLIVGSQPQKPEDIDHLKDEEKVAFILCLQQDKDIEYWGIDFQTVVNRCKELGIKHIRRPAVDFDPDSLRTQLPKAVASLEWAISEGKGRVYVHCTAGLGRAPAVAIAYMFWFENMNLKTAYEKLTSKRPCGPNKRAIRAATYDLAKNDPHKESFDSLPEHAFEGIADSERRKPREQIQQEPEESVDQETGTRESTGGLGCPAAIINQRINNISVFRQKGINLIEFENDESMSASEGTSPARRSTRSPGVGVSASAPVRNDAHVVSPASDVTQSVGDEPPPPLPGMPGIKVPGGVVCDDLPHGGGSEPPAGGDSGRAGTDDDDGGGDGFGGAARGDGLAPGNPGKRWRLPGKPGKRRTRASDETKAAAAFLLGLIASDGVAIITEATTTSKTTAARLDAGDAIIFFFA

SEQ ID NO: 18554 - protein, 177 aa, Oryza sativa Japonica Group
MSMSRDPLVVGSIVGDVVDHFGASALLRLFYNHREMTSGSELRPSQVAGEPAVQITGGRDGRALYTLVMVDPDAPSPSNPSKREYLHWLVTDVPEGGDTSKGTEVVAYESPRPTAGIHRLVFIVFRQTVRQSIYAPGWRSNFNTRDFAACYSLGSPVAAAYFNCQREGGCGGRRYRS

SEQ ID NO: 18555 - protein, 512 aa, Oryza sativa Japonica Group
MARRGRRSLASPAVAIALFVFLAYGGGGGGGGVCEAAPASAVVKSVPGFDGALPSKPLRPGTYVTVEEQHGRNLFYYLVESERDPAKDPLVLWLNGGPGCSSFDGFVYEHGPFNFESGGSAKSLPKLHLNPYSWSKVSSVIYLDSPAGVGLSYSKNTSDYNTGDLKTAADSHTFLLKWFQLYPEFLSNPFYIAGESYAGVYVPTLSHEVVKGLHDGVKPTINFKGYMVGNGVCDTVFDGNALVPFAHGMALISDDIYQEAQTACHGNYWNTTTDKCENALYKVDTSINDLNIYDILEPCYHSKTIKKVTPANTKLPKSFQHLGTTTKPLAVRTRMHGRAWPLRAPVRAGRVPSWQEFARGSRPSGVPCMSDEVATAWLNNDDVRAAIHAQPVSSIGSWLICTNVLDFIHDAGSMISYHKNLTGQGYRAFIYSGDHDMCVPYTGTEAWTRSLGYGVIDSWRPWHLNGQVSGYTQGYEHGLTFATIKGAGHTVPEYKPQESLAFYSRWLAGSKL

SEQ ID NO: 18556 - protein, 271 aa, Oryza sativa Japonica Group
MPAPEGWTKKFTPQRGGRFEIVFVSPTGEEIKNKRQLSQYLKAHPGGPASSEFDWGTGDTPRRSARISEKVKAFDSPEGEKIPKRSRNSSGRKGKQEKKEATENEEAKDAEADKEAPSEDAPKETDVETKPAEEAKEAPSEDAPKDTDVEMKTAEDASKTADADTPAPAPAGTEKEDAKPAESEAAPPAPSEGGEKKEDAKPAEPEAAAAPPSNPTEPSAPKAAAAAPVENSADKGPHQDSQPPSAAAPAKESSPVNNGQLPAGASAVKCT

SEQ ID NO: 18557 - protein, 302 aa, Oryza sativa Japonica Group
MRDPIPSPASNLLRLPLPLRLPLRRTQAANPPPSTRLLLRRPPVSHPPLSSLPPRELDLLGLTSSHPTMAANVGESTSGSSSGGADSGGSFECNICFELPQEPIVTLCGHLFCWPCLYKWLHIHSHSPECPVCKAVVEEDKLVPLYGRGKDRVDPRSKNVPGADIPNRPAGQRPATAPQANPNTHFPNANPNPWFMGGGIPLANARWGNYTFSAAFGGLFPLLSFQVHGFPDATAYGQPAGFPYGYGHGHGHGHGHAFHGGHAHAAAAPRHGPPGQQQQADVYLKALLILVGFLVIASLITF

SEQ ID NO: 18558 - protein, 927 aa, Oryza sativa Japonica Group
MERSLLPWLLLLLCFADGVFQSRAQPDSKGFISIDCGIQPNTSYVHNTTKISYVADDDFTDGGSNYNVSPEYIKPQLSQRYYNLRAFPDGARNCYTARSLAPGIKYLIRASFLYGNYDGLNKLPVFHLYIGVNFWTMVNITSLGLGGSRYEEAIVVVPDDFVQVCLINTGTGTPFISSLELRPLDKRLYPQVNATLGLLQLNASTLARLITASYTSSLWKEISTASRVDNLDGDIFDAPTAVMQTAVTPRNASGNIYFFWEPWPQPNDPTPPYTVIFHFSELEILTNNASRQFYINLNGEPLIDTAYEPTYLTARYLYGLEPLERTSRYNITINATANSTLPPLINAAEIFSIISTAVIGTDSQDASSMMAIKDKYQVKKNWMGDPCMPKTFAWDKLTCSYPNSSGARIISLNLSSSGLSADISSAFGNLKALQYLDLSNNSLTGSIPDVLSQLPSLRVLDLTGNQLSGSIPSGILKRIQDGSLNVRYGNNPNLCINGNSCKAAKKKSKLAIYTVIPAVLVVLIASVTTLFCLLRRKKQGPMNNSLEQQNEMSTSTSHVLINSGYGDNVSLRLENRRFTYKELEKITNKFKRVLGRGGFGYVYHGFLEDGTEVAVKLRSESSSQGAKEFLIEAQILTRIHHKNLVSMISYCKDGIYMALVYEYMPEGTLEEHIGKTKKGKYLTWRERLNIALESAQGLEYLHKGCNPPIIHRDVKATNILLNTRLEAKIADFGLSKASSYDNITHVSTNALVGTLGYVDPEYQMTMQATTKSDVYSFGVVLLELVTGKPAILHEPNPISVIHWTRQRLARGNIEDVVDTCMPSDYDVNGVWKAMDIAFTCTAQASTQRLTMTEVVMQLQECLELEDARCAIGDAHNEFYPDPRSDHNLSYNTYVSDRSNDVSQNSGVSMMEHNFGRVPTMASGPAAR

SEQ ID NO: 18559 - protein, 420 aa, Oryza sativa Japonica Group
MDVVVESPPVRDEKKVDVAAIGGAPPIVFESFAPSTQRDSTIIKKKLVINYVVIIVTGGEDGGSEGRKLGKVKGGDERLKTMLTRIVSDYKSLHTHFLDVVKASRRALPPMPVLNLSSDSSGDAAGAGAGEPTQPNKASRSSSGGGDGADDEVLQQQQAKKARVSVRVKCDTPTMNDGCQWRKYGQKISKGNPCPRAYYRCTVAPNCPVRKQVQRCADDMSILITTYEGTHSHPLPPAAAAMASTTSAAAAMLTSGSTNSTMHGSGGVHHHLPFASAVGGGGGVGLLGPTTISTATSCPTVTLDLTAPHSLLHPSSASPYAAARRGPYYAKGVAPSPFGHHFGMMGMAAAAARPAPEQLFGGQTTSPYLQRAIGGGGVAPAAVTDTIAKAITSDPSFQSVLAAAITSYMGRGGGAAAPNK

SEQ ID NO: 18560 - protein, 362 aa, Oryza sativa Japonica Group
MGWSSSRAMLVARAVALAVVFLAAEAQLSPGYYNATCPGVVSIVRRGMAQAVQKESRMGASILRLFFHDCFVNGCDASILLDDTANFTGEKNAGPNANSVRGYEVIDAIKAQLEASCKATVSCADIITLAARDAVNLLGGPNWTVPLGLRDARTTSQSAANTNLPPPGASLASLLSMFSAKGLDARDLTALSGAHTVGWARCSTFRTHIYNDTGVNATFASQLRTKSCPTTGGDGNLAPLELQAPNTFDNAYFTDLLSRRVLLRSDQELFGSGAGNGTTDAFVRAYAANATTFAADFAAAMVRLGNLSPLTGKNGEIKHHRNEKESKYNTRFTRLNPDQKNAQLAGHTPLLRAAEMGAYYDG

SEQ ID NO: 18561 - protein, 1585 aa, Oryza sativa Japonica Group
MLASRIPLKRCTAAAVVPLPGELEMEEGPTPPAGGGEGSGAAVVPAKRRRERVVPSRFRDSVVSLPLPPAKKGRPAKKAAAREGGDGEVYDVEVRAVEQQGATAAAFGAVETAVWPGDERPAQTEEELYRACRNIRRSSSSSGFSGSVVKSLSNAGGSVPPEGKPRGVLYFFASQDYGWIKQGMIFPFVDYLDRFQGQALYKLKANRFRQAIEEAFLAERGFCELEMDEGCSLEKSVNDQSVPDGLQEGSGSNNDQECQSEAQVVGKSTGCCDSCGNRVPPKIAKKKKQAGEQLLCRHCDKLLQSKQYCGICKKIWHHTDGGNWDLENADYFCPDCKSKRKTVPPVEQMNTPNSSECASTSKEKLPEMIPVFCFGMDGMYLPKKHMILCQCNSCKERLMSLSEWERHTGSRKKNWKMSVKLKSNGDPLVTLLDDIPCANVKSSTPSINKEELLKLLANSFRPVNARWTTERCAVCRWVEDWDYNKIIICNRCQIAVHQECYGARDVQDFTNWVCRACELPKQKRECCLCPVKGGALKPTDIDQLWVHVTCAWFQPKVSFPVDETMEPAMGILSIPSEYFKKACVICKQMHGACTQCYKCSTYYHAMCASRAGYRMELQYSEKNGRNITRMVSYCAFHSTPDPDNVLIVKTPEGVFSTKFLPQNNEKQSGTRLVRKENLQEKVLPAKISDCPAARCLPYEMLKNKKEPGEAIAHRIMGPRHHSQESIEGLNACMDQKDEKSFATFRERLRYLQKIENKRVSCGRSGIHGWGLFAAKKIQEGQMVIEYRGDQVRRSVADLREARYHREKKDCYLFKISEDVVVDATEKGNIARLINHSCMPNCYARIMSVGDEKSQIILIAKRDVSAGEELTYDYLFDPDESEDCRFFSAVQFQFQIGREWRCCSHPRVETDLKTLARRFWKVAAPYWWSEDKVQARLRLAAVFALTLATTGISVGFNFLGRDFYNALADKDQEQFTKQLLYYLGGFAVGIPIVYTRIISHITRFSFFVLRDYARETLSLRWRSWMTSYYMKRYFKNRTFYKIQSQSLIDNPDQRINDDLSAFTGTALAFSLTFLNAAVDLISFSNILYGIYPPLFIVLIVYSLGGTGISIFLGKNLVNLNFMQEKKEADFRYGLVRVRENAESIAFYGGEENELQLLLDRFRRAFENLSELLIASRNLEFFTNGYRYLIQILPAAVVAPMYFSGKIEFGVINQSVSAFNHILSDFSLIVFQFQSISAFSAVIDRLGEFDDLLDGNGSSLSKPDNIDGINIIFKSTGPTVLSSNGSPTQSNPSMVLEICNLTLLTPRSGNILITDLTMELKEKDHLLVMGPSGSGKTSLLRALAGLWTSGTGDIIYHVRGSMELQTSNSGPDEPSNIQSNGEELLQSSKQRRDNGIFFVPQRPYMVLGTLRQQLLYPTWTEDVCHSSNNDPQSTDPLTFEVSTSDGVGSKSEMPTTDELIRVLEAVKLGYILPRFNGLDSMHDWASVLSLGEQQRLAFARLLLAKPTLVLLDESTSALDDMNERHLYSQIEAAGITYISIGHRKTLHKFHNKVLYISNSDSTDSNPRNWYLKPTEQMSIEESSSFAS

SEQ ID NO: 18562 - protein, 705 aa, Oryza sativa Japonica Group
MITSYGKTLKGLLGQDQDIQSLSPRILQENQDYGYKYTDLVVKRGLILTSQVDDHDKFLIRRSQRDTCRSDGNDFAELLWENGQAVVHGRKKHPQPAFPPFGFFGGTGGGGGGSSSRAQERQPGGIDAFAKVGGGFGALGMAPAVHDFASGFGATTQDNGDDDTVPWIHYPIIDDEDAAAPAALAAADYGSDFFSELQAAAAAAAAAAPPTDLASLPASNHNGATNNRNAPVATTTTREPSKESHGGLSVPTTRAEPQPQPQLAAAKLPRSSGSGGGEGVMNFSLFSRPAVLARATLESAQRTQGTDNKASNVTASNRVESTVVQTASGPRSAPAFADQRAAAWPPQPKEMPFASTAAAPMAPAVNLHHEMGRDRAGRTMPVHKTEARKAPEATVATSSVCSGNGAGSDELWRQQKRKCQAQAECSASQDDDLDDEPGVLRKSGTRSTKRSRTAEVHNLSERRRRDRINEKMRALQELIPNCNKIDKASMLDEAIEYLKTLQLQVQMMSMGTGLCIPPMLLPTAMQHLQIPPMAHFPHLGMGLGYGMGVFDMSNTGALQMPPMPGAHFPCPMIPGASPQGLGIPGTSTMPMFGVPGQTIPSSASSVPPFASLAGLPVRPSGVPQVSGAMANMVQDQQQGIANQQQQCLNKEAIQGANPGDSQMQIIMQGDNENFRIPSSAQTKSSQFSDGTGKGTNARERDGAET

SEQ ID NO: 18563 - protein, 1434 aa, Oryza sativa Japonica Group
MRWVIRSRGITHSLCTLEFEDHRPLYDWCVDNVDFAHDDALTQPLVDAGLPREAAKPRQIEFSRLNINYTVMSKRKLMALVTEQLVDGWEDPRMPTLQGLRRRGYTPAAMRLFAERVGISKQNSLIDFSVLEGALRKDLDSAAPRRMAVIDPVKLVLTNLPEGPRRTADPSATTRRTRASAAAKYRSHAKCGSTARTSPKYRRRPGSPLFPGGEVRLPAAGNYPLRLSDQGFRRRHHRAARLAGSESRPGMEGANRKVKGTIHWVSAVHGVPAEIRLYDRLFSVANPDDESEGKTYRDYLNPESRRTVTGYVEPAAASAAPEQSFQFERTGYFVADRRDHTEAKPHPLLTFFSAMVLAGLVSWWRRFPGYAIVVFPLAMLNIFLGHFLNAAFLNVVGERGEAVIVKSERTSSTMNEQYIWRYEAVLRTAEGRDVEVVFHTNTASLWPLENAIRIPAPDQPFVVKYTPGFPRNFVILTNESPHGIAQARATARERVEVAARKLHFSPGNADPQALPGCFTPSTHRPDMTTTSAALLPLLQQVLQDAGIASRVDGGALLLDSGLRLTPHAMAAHARDNGGWQTSTVIEIEHPVLFADGLFEYQHANGADEQASLLSGFQTWGRVDLATLQTAIGAEDAQGLPMLGLTYPASDDGEEHERTVVLGPLAHYRAQEVDASTCSEDDHGSCPCCLFTRSMDAFDELLKARQFLAIRLFASRDADGLCEADCRVNGHDFAGALPLLRAYAASWPQAGLEFRKQPVQLHCAPVSQATALSSIPLRGTPAMLYAQVHLTLPAWIHDQIDLDRRYPGDEAKVALAIELSRLNVEHASGGPFGAVVFGPDDKVIAAGVNRVMPHATSLAHAENMAYMLAQQRLQTPRLNAVLSPVTLATSSQPLLPVLRRHRMGRHRPPADRRQLGRRRGTDPVLADAPRFGDLWVEHPDSDAGKPLSGLARAFGNALRPALRKAGKLTDKPNTRLPRLHVVFVDGTHAFVCVADPADSAPWALGIPRLKLLPEAPSRSALKLDEALLTLLTPEEREALAKPGMRAADLGAAPGGWTWVLTPPAHARTEHRQRSAAPARAGHRPGRAPARRWLPLASGAAAGLDGLRHGRAAAARGRAHGHLVPRRLVPARDLQPEAADEEALGRNPLVPGPVPGPGRQAAGAAPAMAQHLPHTPAQSQPLGPTGGAIRQQPLDAGRVSGSVEIAQPAGEAQVTTPEGAQASLVDSVKVIDGHQLVCKLAIEGKKGKQSQQQQQQSGPGGAQPPQMLQGGPPDMPGSGLGLGGPQMGAQYGGPGSLSSYGAFGGVGAGLGGPNPYANLPSSMGGGGAGLGSLGNQMPSGMGGAGAGAYGPGGLGGGSFGGSSQFGAGGMGAYGGLGMGGASSLYRMQQGSGGLPSGGYGEGNYPLPGPGFRGQEGGMSPGPGGRAPMYPNVPPYF

SEQ ID NO: 18564 - protein, 224 aa, Oryza sativa Japonica Group
MCGRAGEPAVRKGPWTLEEDLILVSYISQNGEGSWDNLARSAGLNRNGKSCRLRWLNYLRPGVRRGSITPEEDMVIRELHSRWGNRWSKIAKHLPGRTDNEIKNYWRTKIHRKPRGRSQLLQEPCEDAMGMGMSTTTSEAASTSASSGQSQASPGVWDEYMQASSFLNPELVSFAADHHLEMAGVGEVAAAAAAQFVPTEFGFNDGFWNFVDNFWETMPVSDVV

SEQ ID NO: 18565 - protein, 1032 aa, Oryza sativa Japonica Group
MIFKRNQRSEILSLRRFNAGGGAGVGEDDGNGGERRPKRRRGDEFFPVELLGDVPVAGIPYAAFGFRWCEEAEVASPAAASRAAAAAAAASRPPVVRTSRGRAQVLPSRFNDSVLIDPWKKDKPAKPPVPAKAVQLVPKSEVLYRKGAIADRSLTMSELDENGDDDYEEGHNFVASRKYSMSLSTVTSVHGEPYSYYHRKGLMKRQYDDDDDDDDDDDDDDDDEDEEAEEEEEEEEEEEEELSYWRNDFVYGDIVWARLGKRQPVWPGVVVDPAQPAAAQALPPQPRSGAVLCVMLFGWAAEFGDEKKFIWVRQGGIFPFVDYMDRFQGQTELSSCKPGDFQRALEEAFLADQGFFEVPMDGNTTGQPARYKRALQCESCGNCFPNKDPSMMVYVMEQLACRQCAKILRSKEYCGVCLKSWQHKCGGRWVCCHGCESWVHAECDKKCSNLKDLRDNSYFCPYCRVKQNSNLSSKKTKSYEHRTDNSTQKSSKPDKVAVICFGMEGTYLRDLELISCHCGPCKGQKFLFNEWERHAGCRSKNWKSSIKIKDTLMPFGKWIEQHQSSSYSTNPAKRSSQKMKKQKLLDLLSEPYDTVNVKWTTERCAVCRWVEDWDYNKIVICNRCQIAVHQECYGVRGKQDFTSWVCRACETPDQKRECCLCPVKGGALKPTNVDNLWVHVTCAWFQPQVAFASDELMEPAIGILNITPLLFMKMCVICRQIHGSCTQCYRCSTYYHAICASRAGYRMEIRCLEKNGKQTTNKISYCAHHRAPNPDNVLIIQTPAGTISSKKLVQSNGTVAASRLIRKDLPKDSVSEVEISENLSAARCRFYVKKELKRSREGAIAHRVRGSCQHRWDEIDSLNPPREERDPESFSTFKERLHYLQKTEHTRVCFGRSGIHRWGLFARRGIQEGEMVLEYRGEQVRRSVADLREEQYRVQGKDCYLFKISEEVVVDATDKGNVARLINHSCTPNCYARIMSVGHDESRIVLIAKKNVSAGEELTYDYLFDPDEADDRKVPCLCQTANCRKFMN

SEQ ID NO: 18566 - protein, 797 aa, Oryza sativa Japonica Group
MEGSRVDAVAGGRRWGEGEEGGRRGGGGGGGGGGGGTGGGGGGGGRRGGEDGGEVSLREWLDRPGRAVEAPECLHVFRQVAESVAIAHAQGVAVGSARPSCFVVSPPFARVAFIESASGSDVSGSCSGSDGSEEADPEPSPPRRRRDGASGGEDRGGKTFPLRSVLAMELTWYTSPEEADDRGGATFASDVYRLGVLLFELFCTFETMEEKMRAMANLRHRVLPPQLLLKWPKEASFCQLLMHPVPETRPKMSDVLQSEFLNRSRNSLEEREAALRLREEIEEQELLLDFLLQLQRRKQDIADNLQDTVAFLSSDINEAHQQSALGQCGNFSFELDKEVCSETVEDQSDCGSRKRFRPELPAVDMEEQNRSLEECSGTVPSSVLIQESVLSKSSRLMKNFKKLETAYFLTRSKLAKQVGNPVSSCHQVVKRTTGSPVVTEGSSIDDFALEGHYGTRQRGWMNSFLEGLCSYLSFSKLKVKAELKQCDLLNSSNLVCSVGFDRDKEFFATAGVNKKIKVFEYNMIVNEHCDIHYPVVEMSNRSKLSCICWNSYMKSHIASSDFEGIVQVWDVTRSQVFVEMREHERRVWSVDFSLADPTKLAGSVGTIRTRANVCSVQFQPDSARSIAIGSADHKIYCYDLRNIRAPYCTLVGHTKTVSYVKYVDASTIVSASTDNSLKLWDLSMSQARIIDSPLRTFTGHTNTKNFVGLSISDGYIATGSETNEEYFGSLTLVRKVFVYHKAFPMPVLAYKFSVTDPISGQEIDDPSQFISCVCWRGQSSTLLSANSSGNIKILEMD

SEQ ID NO: 18567 - protein, 276 aa, Oryza sativa Japonica Group
MARISSMLFGRSFGTSDGSYQLIKPLAIAPRGRGAPTRDGTTTPVRPSDLGLMENRVGESSATAVDGGGGAKDSGSFECNICLELAQDPVVTLCGHLFCWPCLYEWLHVHAHSRECPVCKAGLEEEKLVPLYGRGKASTDPRSRSVAGVQIPSRPAGQRPATASQPDHHHDHLPHHDPWFMGGAGAPVAGGRWGNYTFSAAIGGLFPLLSFQVHGFPQAAAYGPAAGFPYGYGHSFHGWHGHGFPHQAPQGQHVDVFLKVLLVLVGVLVIASLIVF

SEQ ID NO: 18568 - protein, 384 aa, Oryza sativa Japonica Group
MSKNVKVTDDQEVTSQERDQSGGTKVGGEEEIAPLARQSSILSLTLEELQNSLCEPGRNFGSMNMDEFVANIWNAEEFQATTGGCKGAMEEAKVVDSGSGSGDAGGSGLCRQGSFSLPLPLCQKTVEEVWTEINQAPAHTSAPASALQPHAGSGGVAANDRQVTLGEMTLEDFLVKAGVVRGSFTGQAAMGSGMVNGPVNPMQQGQGGPMMFPVGPVNAMYPVMGDGMGYPGGYNGMAIVPPPPPAQGAMVVVSPGSSDGMSAMTHADMMNCIGNGMMIENGTRKRPHREDGCAEKTVERRQRRMIKNRESAARSRARKQAYTVELEAELNYLKQENARLKEAEKTVLLTKKQMLVEKMMEQSKEKMNANRGGSQLRRSGSCMW

SEQ ID NO: 18569 - protein, 449 aa, Oryza sativa Japonica Group
MDVEKVERKEVAVDDDGRVRTGTVWTATTHAITAVIGSGVLALPWSVAQMGWVLGPIALVVCAYITYYTAVLLCDCYRTPDPVHGKRNYTYMDVVRSCLGPRDVVVCGIAQYAILWGAMVGYTITTATSIMSVVRTNCHHYKGPDATCGSSGTMYMVLFGLAEVVLSQCPSLEGVTLISVVAAVMSFTYSFVGLFLSAAKVASHGAAHGTLLGVRVGAGGVTASTKAWHFLQALGNIAFAYTYSMLLIEIQDTVKSPPSENVTMKRASLYGIGVTTVFYVSIGCVGYAAFGNAAPGNVLTGFLEPFWLVYAQPVFACYEKWLASRWPESAFFHREYAVPLGGGRAVRFTLCKLVLRTAFVAVTTVVSLVLPFFNAVLGLLGAVAFWPLTVYFPVTMYMAQAKVQRGSRKWVALQALNVGALVVSLLAAVGSVADMAQRLRHVTIFQTQL

SEQ ID NO: 18570 - protein, 552 aa, Oryza sativa Japonica Group
MEDDEEEEEQLVSVSWAGLAAAAAAAKAGDWRLRRRPADDSARCRAKGVGAAAAAAETLGGIGVGGGDQLSVVMKFGGSSVSSAARMREVAGLILAFPEERPVVVLSAMGKTTNLLLLAGEKAVGCGVIRVSEIEEWNLIKDLHIKTVEELALPRSVIHTMLDELEQLLKGIAMMKELTLRTTDYLVSFGECMSTRIFAAYLNKIGVKARQYDAFDIGFITTDDFGNADILEATYPAVAKRLHGDWIRDPAIPIVTGFLGKGWKSGAVTTLGRGGSDLTATTIGKALGLREIQVWKDVDGVLTCDPNIYPNATTVPYLTFEEAAELAYFGAQVLHPQSMRPAREGDIPVRVKNSYNPKAPGTLITKQREMDKVVLTSIVLKSNVTMLDIVSTRMLGQFGFLAKVFSIFEDLGISVDCVATSEVSISVSLDPSKIWSRELIQQASAPIYMQNQELDHVVEELEKIAVVHLLQQRAIISLIGNVRRSSLILEKAFQVLRKSGVNVQMISQGASKVNMSLIVHDSEAKQCIKALHQAFFEDDVLTEVEEEALHMS

SEQ ID NO: 18571 - protein, 932 aa, Oryza sativa Japonica Group
MAPLCCCLLRARRLLFFFFFFFFFFFAVAVVLFSSVSVAQIPGFQSIDCGGSGNYTDEVGLEWTGDEAYVGGGAGTTASISSISGQGRRPYRTVRYFPADGRKYCYRVSVKARTRYLVRASFLYGNFDGSRVFPEFDLYVGASRWSTIVIYDESKVVTREMVALAQSGPSLSVCLANATTGHPFISTLELRPLNASLYHTAFEAAFFLSLAARINFGAPTADPVRYPDDPYDRVWESDMARRPNFLVDAAPGTIRVATDNPVFVASGERPPQKVMQTAVVGTLGALTYRLDLNGFPGSGWACSYLAEIEDDAAATARRFKLYIPGLAEVSKPTVDIGENAPGKYRVYQPGYDNISLPFVLPFAFRKTDDSARGPILNAMEIYSYIPILPASPDAVAMDALAARYQQQQHSWAREGGDPCVPAPWSWLTCTSSRVIAIRLDNNMLTGPIPDLSACTNLTVIHLENNQLEGGVPSYLSGLPKLSELYSGNKHVRVGKQEEEERNVIIGICALMGIGLLLAAALCYAYNVSVSGRKQLQGASAGGNSKSKSIVVSAEQKKKATPVAGGGGGEIDNMMAAMAARGPLEFEVRELEEATSKFARKIGSGGFGVVYYGRLGDGREIAVKVASSNESIQGKKQLANEVALLSRIHHRNLVAFLGYCWERDSSSYMLVYEYMHNGSLKEQLQMMSISWLRRLQVAEDAAKGIEYLHCGCTPAIIHRDIKTSNILLDAHMRAKVSDLGLSKSNKATNSTTNTITTHVRGTLGYLDPHYYVSQQLTHKSDLYSFGIILLELISGRPPILLTPGAGAMASLGPWAKSHYESGDIEAIVDPSLRGRYRDVHSVWKVAETAVRCIDADPRGRPSMPEVVKDIQEAIALEMPSSESERPAASFFSPGAGAAGARSSATVRSHDLVMDNLMYDSSFCDSLNLPRTPR

SEQ ID NO: 18572 - protein, 271 aa, Oryza sativa Japonica Group
MAAAAAGMGGGGGVQHQETTTTVVQVAAEASRKKVEVRSAGRRGRREMRRIEDATSRQVTFSKRRSGLLKKAFELSVLCDAEVALIVFSPRGRLYQFASASSDLQRTIDRYLNHTKNSSAHEEGEESCVQKWRSEATTLGKKIEAIEGYKSKLLGEGLGSCSVQELQELEVQLEKSLCSIRQKKQKMLMDQILELREKEMNLLKENMVLRDQCKALSSPWSTSVGELKNKQADDDVHRHEDYSGGGVRDDDDRRMMEDVETDLVIGRPGSI

SEQ ID NO: 18573 - protein, 427 aa, Oryza sativa Japonica Group
MRCEQKKRHHQLRTVLCGRCKLLSHGHMITAVGGHGGYPGGKQFVSADQLRDKLSYLRHEKALIIKLVDIVDFNGSFLARVRDFAGANPIILVITKVDLLPRDTDLNCIGDWVVEAVVKKKLNVLSVHLTSSKSLVGVTGVISEIQQEKKGRDVYILGSANVGKSAFISAMLRTMAYKDPVAAAAQKYKPIQSAVPGTTLGPIQIEAFLGGGKLYDTPGVHLHHRQAAVIHADDLPSLAPQSRLRARCFPANDTDVGLSGNSLFWGGLVRIDVVKALPRTRLTFYGPKKLKINMVPTTEADEFYEREVGVTLTPPAGKEKAEGWVGLQGVRELQIKYEESDRPACDIAISGLGWVAVEPLGVPSSNPDESAEEEDNESGELHLRVHVPKPVEIFVRPPLPVGKAASQWYRYQELTEEEEELRPKWHY

SEQ ID NO: 18574 - protein, 290 aa, Oryza sativa Japonica Group
MGGLRRVACPKMRPVFCGNLDYDARQSEIERLFSKYGRVERVDMKSGFAFVYMEDERDADEAIHRLDRIEFGRKGRRLRVEWTKEDRSGGRRGNSKRSPNNTRPTKTLFVINFDPINTRTRDLERHFDQYGKISNVRIRRNFAFVQYELQEDATKALEGTNGSTLMDRVISVEYALRDDDEKRNGYSPERRGRDRSPDRRDYRGRSASPYGRGRERGSPDYGRGRERGSPDYGRGGDRGSPDYHRGASPQGGNKGDERGSPPNNYDRERREASPGYDRPRSRSPARYERE

SEQ ID NO: 18575 - protein, 334 aa, Oryza sativa Japonica Group
MQQWYDDQYAVIDRVVDVAMRCKKIDQLRAVNGIPPYAPVSNRSLLSPVTLPIIRDANIKNDTRLRIFSGTANPSLSQEIASYLGLELGKINIKRRASAKNITAVIPYFGYARADRKSQGRESIAAKLVANMITEAGANRVLVCDLHSSQAMGYFDIPVDHVYGQPVILDYLASKTICSDDLVVVSPDVGGVARARAFAKKLSDAPLAIVDKRRHGHNVMNLIGDVRGKVAVMMDDMIDTAGTIAKGAELLHQEGAREVYACCTHAVFSPPAIERLSSGLFQEVIITNTIPLKEDKSFPQLTILSVANLLGETIWRVHDDCSVGHEPYSSLDID

SEQ ID NO: 18576 - protein, 220 aa, Oryza sativa Japonica Group
MQISYSPMILKLILGLLWCLVHLVISFFGSLSHLKNDLECYLISFKLLPKYRNLHLERLAYLGVVVDSREAKNALKVKQLLRWFSTIGINYLILYDIEDTKASCYRHGGMFMECLSSSDGKEAIAKVANLLYSTCCNSDNKSEIAFTEADMTHALKAVGTGGPEPDLLLVYGPGRFHLGFPAWRLRYTEIMYVGPLESMKYGTIVKALYRFSRKYQNYGK

SEQ ID NO: 18577 - protein, 267 aa, Oryza sativa Japonica Group
MQEQATSSRPSSSERSSSSGGHHMEIKEGKEAPLRSLLLPFLDFHFTVPLSGMESDEEIGRVPELGLEPGGASTSGRAAGGSIQEPLLRNRVSAQQARERKKAYLNDLEVKVKDLEKKNSELEERFSTLQNENQMLRQILKNTTVSRRGPVLLKIPKSGLREAAPAGCGGLREAEGDEKFVLNGFTAANLSFDGMATVTPNGLLMLTNGTNQLKGHAFFPALLQFHRTPNSMAMQSFSTAFVIGIISAFEDQGSGSPAAAGGSGRAA

SEQ ID NO: 18578 - protein, 463 aa, Oryza sativa Japonica Group
MEMEVEVAGDDEAVPEAPERSVVLISAGASHSVALLSGGVVCSWGRGEDGQLGHGDAEDRPVPTVLTAAFDDAPGGVASVVICGADHTTAYSDEELQLYSWGWGDFGRLGHGNSSDVFNPQPIQALQGVRITQIACGDSHCLAVTVAGHVHSWGRNQNGQLGLGNTEDSLLPQKIQAFEGVRVKMIAAGAEHTAAVTEDGDLYGWGWGRYGNLGLGDRDDRLIPEKVSSVNGQKMVLVACGWRHTITVSSSGSIYTYGWSKYGQLGHGDFEDHLVPHKLEALKDTTISQEEAVELIFFFLGDEGFRVGGGIQWALAADGKLYGWGWNKFGQVGVGDNEDHCSPVQVNFPNEQKVVQVACGWRHTLALTEAKNVFSWGRGTSGQLGHGEIVDRNIPKMIDALSSDGSACKQLESSKAVPMSAKVWVSPSERYAIVPDEKAGKGIPAGNGTETHVPQGDVKRMRV

SEQ ID NO: 18579 - protein, 349 aa, Oryza sativa Japonica Group
MELELSLGDSPAPVKATIAPTPVLIPTCMGDEEDLELVLGVRATRRDEQDDQTTCTQSSEEAMEGEEDETRPHGEAPVESLSFPLFVSSAETGSANSEMCTRGFDVNTRPADGGAEAGRPSSPSSMQEASTRQQVADQEAADDEDNGGGGARKKLRLSKEQSSFLEDSFKEHSTLTPKQKSDLANRLNLRPRQVEVWFQNRRARTKLKQTEVDCEHLKRCCERLTRENRRLQREVAELRGTLRTTTSSYPPLYGLHHLPAAAGTVFRVCPSCEHSKVVAAAASESFSPRVFAGGGAPAAITAAAAVPSPGAGSPPSSSAALFGAKRPHLAPLPPPSSRRLLRRQPSATS

SEQ ID NO: 18580 - protein, 393 aa, Oryza sativa Japonica Group
MAAMDEPPQLFLCPISMELMEDPVTVSTGVTYDRRSIEEWLFVYGRTTCPATMQPLSNFDLTPNHTLKRVISSWLDRGSSSSSSSSPSTSTLSSPIHELATPLSRALEQERLLAALAELEETPFKVTKLKSMRARMAGDVAMQGEFVASGGVRVVGRVMAQALAESGGDFSAFAACEEAAAVLAALPLSDEASVRVVLAPERATGPPGVDIDDVIKSLLELLSDEASTRLSSRALDVLLDVVERARGARAKAVEVGAVHVLVELLADADDRRVTERVLLLLKRLCKCPEGRLAFAEHDLSVAAVARTMLRVSELSTQLAVKVLWLVSVVAPSEKVLEDMMLTGAVAKLLGLLHVESSPSTKQKTVRMVRIHGVVWRQYACFPTDFRDYLRLLD

SEQ ID NO: 18581 - protein, 425 aa, Oryza sativa Japonica Group
MGGAGEGDGQTEPLLEKLSNSSSSEIDKGTGTAWTATAHIITAVIGSGVLSLAWSVAQLGWVGGPAAMVLFAGVTLVQSSLLADCYIFHDPDNGVVRNRSYVDAVRAIQKANCYHREGHDAPCSVGGDGYYMLMFGLAQVVLSQIPGFHDMAWLSVLSAAMSFTYSLIGFGLGVAKVITNGVIKGGIGGIAMVSATQKVWRVSQAIGDIAFAYPFASVLLEIEDTLRSPPPESETMRTASRASIAVTTFFYLCCGCFGYAAFGDATPGNLLTGFGFYEPYWLIDFANLCVAVHLLGGYQARTGFEISGYSQPFFGAVDRRMGGPGAGLLKVPFPAAVPWPVPFPARLPLKRVKAVIPDGVVGLLGAFTFWPLSIHFPVEMYLVQKKVAPWTPRWLAVRAFSAACLATGAFASVGSAVGVFSSKTS

SEQ ID NO: 18582 - protein, 476 aa, Oryza sativa Japonica Group
MRLQSNSSGSFHGLYQYTYISPTLTKEWKQTHHYPGRIPLNSTVEQKARKVAVLVALSASGSAPVLYRTMDALCDFCREQRSMVYCRSDAASLCLSCDRNVHSANALSRRHTRTLLCDRCVGQPAAVRCLEENTSLCQNCDWNGHGAASSAAGHKRQTINCYSGCPSSAELSRIWSFSMDIPTVAAEPNCEEGINMMSINDNDVNNHCGAPEDGRLLDIASTALMSDLPTGDKFKPLIGSSSGDGMNLLPLNSDQPAEPVSTTPKAPCVTDKDMFNDGSVYGDFCVDDADLTFENYEELFGTSHVQTEQLFDDAGIDSYFEMKDVPADESNEQPKPVQPECSNVASVDSGMSNPAARADSSHCIPGRQAISNISLSFSGLTGESSAGYFQDCGVSSMILMGEPPWHPPGPESSSAGGSRDNALTRYKEKKKRRKFDKKIRYASRKARADVRKRVKGRFVKAGEAYDYDPLSQTRSY

SEQ ID NO: 18583 - protein, 306 aa, Oryza sativa Japonica Group
MENQSGWFYVTISKESQKRRRKREAQEFQSIPGLAGRLFGGAAAADIRRAQAQQGPASRCGGIPSPEAVKCPRCESTNTKFCYYNNYNLSQPRHFCKSCRRYWTKGGVLRNVPVGGGCRKTKRSGSSSAASSAPSTPTAATDNAKNQRRASASSPRSSSGGSGNTSPTAAAATTPTTPATPSSNTIAVINHATTTTTTTNPFPTDVPPPAPIFADQAAALASLFAPPPPPPLPVFSFAAQAKTEDGIASVLLAGQTTAPTAATVADMTPFTSLDAGIFELGDVPPAAYWNAGSCWTDVPDPNVYLP

SEQ ID NO: 18584 - protein, 501 aa, Oryza sativa Japonica Group
MEGGIKELAKMPMEEIEADKLSKEDIDVRLKWLGLFHCHKHQYGRFMMRLKLPNGVTTSEQTRYLASVIEAYGKDGCADVTTRQNWQIRGVTLPDVPAILDGLNAVGLTSLQSGMDNVRNPVGNPLAGIDPDEIVDTRSYTNLLSYITSNFQGNPTITNLPRKWNVCVIGSHDLYEHPHINDLAYMPAVKDGKFGFNLLVGGFISPKRWEEALPLDAWVPGDDIIPVCKAVLEAYCDLGTRGNRQKTRMMWLIDELGMEVFWSEVEKRMPNGVLERAAPEDLIDKKWQRRDYLGVHPQKQEGLSYVGLHVPVGRVQAADMFELARLADEYGSGELRLTVEQNIVIPNVKDEKVEALLAEPLLQKFSPQPSLLLKGLVACTGNQFCGQAIIETKQRALLVTSQVEKLVSVPRAVRMHWTGCPNSCGQVQVADIGFMGCLTKDSAGKIVEAADIFVGGRVGSDSHLAGVYKKSVPCDELAPIVADILVERFGAVRREREENEE

SEQ ID NO: 18585 - protein, 342 aa, Oryza sativa Japonica Group
MTPLPLARQGSVYSLTFDEFQSTLGGVGKDFGSMNMDELLRSIWTAEESHAVGAATTTTATTASVAAAEHAAVGAPPVQRQGSLTLPRTLSQKTVDEVWRDMMCFGGGGASTAPAAAEPPPPAHRQQTLGEITLEEFLVRAGVVREDMSVPPVPPAPTPTAAAVPPPPPPQQQTPMLFGQSNVFPPMVPPLSLGNGLVSGAVGHGGGGAASLVSPVRPVSSNGFGKMEGGDLSSLSPSPVPYVFKGGLRGRKAPGIEKVVERRQRRMIKNRESAARSRQRKQAYMMELEAEVAKLKELNDELQKKQDEMLEQQKNEVLERMSRQVGPTAKRICLRRTLTGPW

SEQ ID NO: 18586 - protein, 275 aa, Oryza sativa Japonica Group
MLLPSSSSYSYASKGDSFRRTVDGPMRSTLTFDNNHSVVPSQNIDYGQPMACISYPYNDSGSGVWASYSSRSVLYLKQFHPQIVGGGTSPRVPLPSLEIADDGPIYVNPKQYHGILRRRQLRAKLEAQNKLVKTRKPYLHESRHRHAMKRARGTGGRFLNTKQLQLQQQSHTTSTKTTTDSQNSSGSVHLRLGGGAIGDQTPFPFKAMDSQANIKRAAASASTFTVTSAAQKDDAFFDRHGHHLSSFSGHFGQASAQGGVGSMHNGSQQRVPAMR

SEQ ID NO: 18587 - protein, 659 aa, Oryza sativa Japonica Group
MAAAAALRCNPRPSAAVALRGAAAAPQVGNEAAFELLVGATEPCLRGRRRGAGIRCQRSAAASAVVVEKKSRAVEPAREGANAGHTESELTVVMKFGGSSVASAERMREVADLILSFPEERPVIVLSAMGKTTNKLLMAGEKAVGCGATNVSELDELTFIKELHFGTIDQLGLDRSIVSGSLYQYQLKLEAFHQAMKMAVTLFGRGGGVATASGIRRRQMERRCIRPQKVGYGGRRHGVDSEPVSCWLSCQPPCSDESVDDGRSRGLSDELEQLLKGIAMMKELTLRTRDYLVSFGECMSTRIFAALLNKLGVKARQYDAFEIGFITTDDFTNADILEATYPAIAKRLHGDWVTGPAIPIVTGFLGKGWKTGAITTLGRGGSDLTATTIGKALGLREIQVWKDVDGVLTCDPNIHPNAKPVPYLTFDEAAELAYFGAQVLHPQSMRPAREGDIPVRVKNSYNRRAPGTLITKARDMSKTVLTSIVLKSNITMLDIVSTRMLGQYGFLAKVFSIFEDLGISVDCVATSEVSISLTLDPSKLWSRELIKQELDHVIEELEKIAVVHLLQHRSIISLIGNVQRSSLILEKAFNVLRTNGVNVQMISQGASKVNISLVVHDSEAKQCVQALHSAFFESGFLPEVNDILQDDSVAHSNGTVYRH

SEQ ID NO: 18588 - protein, 124 aa, Oryza sativa Japonica Group
MGFVSFAGRVLFASVFLLSAYQEFSEFGADGGPAAKALRPKYNVFTKNISAHLGVAVPHVELKHIVAATIGLKGLGGLLFILSSSFGAYLLNLALFGALLFFLGMKNSIPKRQAKKKAPKSKTN

SEQ ID NO: 18589 - protein, 272 aa, Oryza sativa Japonica Group
MTESHERDTEVTRWQVHDPSEGMNGSRQMELHYINTGFPYTITESFMDFFEGLTYAHADFAIADAFHDQANPYWAMMHTNSYKYGYSGAGNYYSYGHVYDMNDYMHRADGGRRIWDNATPVNNTESPNVVLQGGETPHANTSSTTEECIQQQVHQNSSSPQVIWQDNIDPDNMTYEELLDLGEAVGTQSRGLSQERISLLPVTKYKCGFFSRKKTRRERCVICQMEYRRGNLQMTLPCKHVYHASCVTRWLSINKVCPVCFAEVPGDEPKRQ

SEQ ID NO: 18590 - protein, 201 aa, Oryza sativa Japonica Group
MCGGAILAEFIPAPSRAAAATKRVTASHLWPAGSKNAARGKSKSKRQQRSFADVDDFEAAFEQFDDDSDFDDAEEEDEGHFVFASKSRVVAGHDGRAAARAASKKKRGRHFRGIRQRPWGKWAAEIRDPHKGTRVWLGTFNTPEEAARAYDVEARRLRGNQGQGQLPRPRPPPLAHAAATREPTPVPPPATAPGRRPRRAD

SEQ ID NO: 18591 - protein, 638 aa, Oryza sativa Japonica Group
MEPMASESSVPIGTAFADLLLQGPEHPSLWNDLTGMFRKAFRWQGADKRFTLSVYVMSVLQGLFPILDWWKTYNLKFFRSDLMAGLTLASLSIPQSIGYATLAKLDPQYGLYTSVVPPLVYAVTGSSREIAIGPVAIVSLLLSSMIQKIVDPSVDPAFYRKMVFTVTFLTGVFQFAFGLFRLGFLVDFLSHAAIVGFMGGAAIVIGLQQLKGLLGLSHFTNRTDVVSVTKAVWVSVHETWHPENVFIGCSFFMFILAMRFIGRKYKKLFWVSAIAPVLSVALSTLFVYATRADKHGVKIIQKVNSGINASSVEQIDLKGGYAAECAKIALVCAVIALTEAVAVGRSFSAINGYRLDGNKEMVAMGFMNIAGSLSSCYVATGSFSRTAVNFAAGCKTTVSNIIMAATVMVALELLTKLLYYTPVSILASIILSALPGLINVQEVCFLWKVDKMDFLTCMGSFLGVLFGSVEIGLSVALLVSFAKIIIQSIWPQVEILGRLQGTEIFCNVKQYPVVHETPTVLTVRIETSFLCFVNSSSIKEKIMGWVTDEREAFCSVVLDMSNVVNMDTSGLVALEELHKELACLGIQMAIAKPGWQVIHKMKLARLVDGIGEGWFFLTVGEAVEACLANKAGNALECC

SEQ ID NO: 18592 - protein, 283 aa, Oryza sativa Japonica Group
MGWYIRASRVHPRPGRAAFVANEIPLFMNQSPPHMSRPSVIIKLILGLLWFIVHLAISLCSLWFDLIYSIECYLISFGLIPKYRKFQLDRLKHLAVVVDSREAKNVAKINQLLCWLSNVGVKYVCLYDIDGVLKKTFAPAMNGSRYGNSGKYLDVGANTKALTCCHKEMTIECISGSDGKDGIAKAASLLCSTCVNGNRNTCGNGEIVFTEADMSGALKAIGCGGPEPDLLLVYGPARCHLGFPAWRLRYTEIMHMGPLNSMKYGAIVKAFYKFSKKYQNFGK

SEQ ID NO: 18593 - protein, 682 aa, Oryza sativa Japonica Group
MESGGGSHVAEMPRVPKSARGKRSIRKKESQGQVMCAFDLLATVAGKLLDEGEGSLGNASSGTPAVDASPKDVRVKQEQCDEEAKHFKNEVMDQDSCNESALVSHIAFQRPVNHHGRKGEDPEGSHAVIEDPKAKSEALDKESSMISCTKAELGCNFAAIADRWSPESVESGAFTGDAAAIAMPATTSGFHKNAPDMYNLLDPMDVDVKPPPLVSSDSTGEMPLYGNKIRRSTSFPRVPKGGAGFTVDRDEDDDDKSSGCTHPSTATNRGFRPNCTAGHSRVKKLLACKHRKVAPARMHKGDLSYSDVDRKPSFRNKKMYYTRQRTQRSTFKRRKMFDRHSAQVSEEYAKANTKFAARDSHAVSLEANKGTNSTAFQKSQESSDCHVKLRIKSFKVPELLIEIPETATVGSLKKTVLEAVNAILGGGLRVGVLHHGKKVRDDNKTLMQAGISHDEVLDNLGFSLEPNCAPHPSQLSPPEDNEFMETVDTTEPLARIAPADSSSKHGEVDASQELALAPLSANYQGSDHDFVHSPGGMSSPDKASTNSRAIVPVTPADSNAGAIVPANKAKRSPEQGQRRIRRPFSVAEVEALVLAVEKLGTGRWRDVKLRAFDNAKHRTYVDLKDKWKTLVHTASISPQQRRGEPVPQELLDRVLAAQAYWSQQQAKLQPKTPPLAEALLLT

SEQ ID NO: 18594 - protein, 233 aa, Oryza sativa Japonica Group
MVSERVKGTVKGFDATNGFGFITPDDDGEDLFIHQSSLKFDDYRSLNDSDVIELSVGSGNDGRNKAVDVTALGGDTHTGGFRPSCGHIPAAGCPLVVSWPLMCYYFLLCVVHHRSSSPRCLPASCVWTTRSSSTRVTSGELTRVVPELSRCRTGLPPPHSELSPVQPMPLWPKACIELSRWSSTPSALHRCSPLLGPQQRALCRHPFATTVVVYHWPCRCCCPPSAARCRPHH

SEQ ID NO: 18595 - protein, 601 aa, Oryza sativa Japonica Group
MCGILAVLGAADWLKHRGPDWSGLYQCEGNFLAQQRLAIVSPLSGDQPLYNADRTIVVVANGEIYNHKKIRKQFASKHTFSTGSDCEVIIPLYEEYGEDFVDMLDGVFAFVLYDTRTKTYMAARDAIGVNPLYIGRGSDGAVWISSEMKALNEDCVEFEIFPPGHLYSSAAGGLRRWYKPQWFAENVPATPYQPLLLREAFEKAVIKRLMTDVPFGVLLSGGLDSSLVAAVTKRHLIKTEAAEKFGAELHSFVVGLEGSPDLIAAREVADHLGTIHHEFHFTVQDGIDAIEEVIYHDETYDVTTIRASTPMFLMARKIKALGVKMVLSGEGSDELLGGYLYFHFAPNKEEFHKETCRKVKALHQYDCLRANKATSAWGLEVRVPFLDKEFINVAMSMDPEWKMYNADLGRIEKWVMRKAFDDEEHPYLPKHILYRQKEQFSDGVGYNWIDGLKAFTEQQVSDEMMKNAAKVYPHNTPVNKEAYYYRMIFERLFPQVTDVYSSVVQYRIGEGDGAVGPEHRVQHAGGDRVGGAVEGVARPIRPLIASHNSASASANHTNHANANANGNSNGKANGNCAMAANGTNGVGLVVANGTANGKMEA

SEQ ID NO: 18596 - protein, 569 aa, Oryza sativa Japonica Group
METHIGSVDGAAAAADNGAVGCPASAVGCPMTSARPAPVSAGEASLGRHLARRLVQVGVSDVFAVPGDFNLTLLDHLIAEPGLRLVGCCNELQRRNLPVICIAGGPNSNDYGTNRILHHTIGLPDFSQELRCFQTVTCHQAVVTNLEDAHEQIDTAIATALRESKPVYLSISCNLPGLPHPTFSRDPVPFFLAPRLSNKMGLEAAVEATVEFLNKAVKPVLVGGPKLRVAKAGKAFVDLVDASGYAYAVMPSAKGLVPETHPHFIGTYWGAVSTAFCAEIVESADAYLFAGPIFNDYSSVGYSFLLKKDKAIIVQPERVIVGNGPAFGCVMMKEFLSELAKRVNKNTTAYENYKRIFVPEGQPLESEPNEPLRVNVLFKHVQKMLNSDSAVIAETGDSWFNCQKLKLPEGCGYEFQMQYGSIGWSVGALLGYAQGAKDKRVIACIGDGSFQVTAQDVSTMIRCAQNSIIFLINNGGYTIEVEIHDGPYNVIKNWNYTGLVDAIHNGEGKCWTSKVKCEEELTEAIGMALGEKDCLCFIEVIAHKDDTSKELLEWGSRVSAANSRPPNPQ

SEQ ID NO: 18597 - protein, 1128 aa, Oryza sativa Japonica Group
MASGGGGRADAAESVSKAVAQYTLDARLHAVFEQSGASGRSFDYTQSLRASPTPSSEQQIAAYLSRIQRGGHIQPFGCTLAVADDSSFRLLAYSENTADLLDLSPHHSVPSLDSSAVPPPVSLGADARLLFAPSSAVLLERAFAAREISLLNPLWIHSRVSSKPFYAILHRIDVGVVIDLEPARTEDPALSIAGAVQSQKLAVRAISRLQALPGGDVKLLCDTVVEYVRELTGYDRVMVYRFHEDEHGEVVAESRRNNLEPYIGLHYPATDIPQASRFLFRQNRVRMIADCHAAPVRVIQDPALTQPLCLVGSTLRSPHGCHAQYMANMGSIASLVMAVIISSGGDDDHNISRGSIPSAMKLWGLVVCHHTSPRCIPFPLRYACEFLMQAFGLQLNMELQLAHQLSEKHILRTQTLLCDMLLRDSPTGIVTQSPSIMDLVKCDGAALYYHGKYYPLGVTPTEVQIKDIIEWLTMCHGDSTGLSTDSLADAGYPGAAALGDAVSGMAVAYITPSDYLFWFRSHTAKEIKWGGAKHHPEDKDDGQRMHPRSSFKAFLEVVKSRSLPWENAEMDAIHSLQLILRDSFRDSAEGTSNSKAIVNGQVQLGELELRGIDELSSVAREMVRLIETATVPIFAVDTDGCINGWNAKVAELTGLSVEEAMGKSLVNDLIFKESEETVNKLLSRALRGDEDKNVEIKLKTFGPEQSKGPIFVIVNACSSRDYTKNIVGVCFVGQDVTGQKVVMDKFINIQGDYKAIVHNPNPLIPPIFASDENTCCSEWNTAMEKLTGWSRGEVVGKLLVGEVFGNCCRLKGPDALTKFMIVLHNAIGGQDCEKFPFSFFDKNGKYVQALLTANTRSRMDGEAIGAFCFLQIASPELQQAFEIQRHHEKKCYARMKELAYIYQEIKNPLNGIRFTNSLLEMTDLKDDQRQFLETSTACEKQMSKIVKDASLQSIEDGSLVLEKGEFSLGSVMNAVVSQVMIQLRERDLQLIRDIPDEIKEASAYGDQYRIQQVLCDFLLSMVRFAPAENGWVEIQVRPNIKQNSDGTDTMLFLFRFACPGEGLPPEIVQDMFSNSRWTTQEGIGLSICRKILKLMGGEVQYIRESERSFFHIVLELPQPQQAASRGTS

SEQ ID NO: 18598 - protein, 310 aa, Oryza sativa Japonica Group
MDMAHERDASSEEEVMGGDLRRGPWTVEEDLLLVNYIAAHGEGRWNSLARSAGLKRTGKSCRLRWLNYLRPDLRRGNITPQEQLLILELHSRWGNRWSKIAQHLPGRTDNEIKNYWRTRVQKHAKQLKCDVNSQQFKDVMRYLWMPRLVERIQAAAAGQQQQQEGGTDTPPLSWQHGGSDGLYESPELPAPDASCWPAEYCAAAGGAQSGGTPAPELLNHHGRADGAEWFTTACDASSATGGVAMRDTELELAQPPCQGGQTWTTSESSLPGLTFPDLAVADFEIGGFDVDSFWTSMEDDQLWCPTQAAV

SEQ ID NO: 18599 - protein, 898 aa, Oryza sativa Japonica Group
MRGLRSRILRTLQSFPNAVNVQPGLLLPAPDVQPSPPPPPKAPCRSQEEQPDGGGGGGGDDKENVSPEVAPRKAKKMRVSLGAAEDEAAAYYRRPDPATATLFDPDLLAAFRGAVDAYARALQEAKRRDDDDNDGFFLLDEEEGCGVAGGVGFGVDEDPLEGFETRCPPGGERAVVLYTTSLRGVRKTFEDCATVRRLLEGLRVAFLERDVSMHAPYRDELRALLVGLDDAAVPPPAVRGRPVSGRRQRGGHPARSRRAFGPGVPAGGKPRRGRRRVRRLRRRLAANRGPKIKPSILGTASLNLADYASAAEENIEIILPLSVPNGSAESAPSLHLTLGMVELRAFQETSDASQRSAMAAPLSPSSGDSAPVGKDEVSVIRAGLRKVKILTDLVSTRRSKKTSQDDESSEEKCYVNSDGAEYPCDIESLDDDLDDRAQQDEVGDSTVRKSFSYGSLQSVNYVGGLVYAHAKIDGEHEDWIYYSHRKSDAGYHVEGKPSSTVEETMLPTVKRSILPWRKRKLSLRSLKAKGEPLLKKAYGEEGGDDIDYDRRLLTSSDGSVSEGSRGEDGSINGMVSEFGDDNFVVGNWELKEIVSRDGHLKLSSHVFFASIDQRSERAAGESACTALVAVIADWFQSNQDIMPIQSQFDSLIREGSLEWRNLCENLMYRERFPDKHFDLETVLQAKIRPLTVSSSKSFIGFFQPEGADDMHRFDFLDGAMSFDSIWAEISKAAEYSSSDNPNLYIVSWNDHFFLLKVERDAYYIIDTLGERLYEGCNQAYILKFDNDTMIHKLPEKAPSSPNSSGPLKDSSRSSSVEQDSEDGTEENILVSKGKESCKEYIKSFLAAIPIRELQVDIKKGLMASTPLHHRLQIEFHYTASSPKEITSAPQILTIEAPF

SEQ ID NO: 18600 - protein, 726 aa, Oryza sativa Japonica Group
MAKLFITGLSTVIAYSSAVVFKGAAMAVVLLLMLVQLPGYLSCLLLCAIRAAVERAVAATFAAAGDAVSAAADAAVGVFVRVANGAKGGRKTKGPVIGIDLGTTYSCVGVYRNGHVDIVANDQGNRITPSWVAFTDDERLVGEAAKNQAALNPDRTIFDIKRLIGRRFDDEEVQRDVKYLPYKVVDKGGKPYVEVRVKAGEVKVFSPEEISAMILAKMKETAESYLGQRVTDAVVTVPAYFNDAQRQATKDAGTIAGLNVPRIINEPTAAAIAYGLDRKGAGEMTNVLVYDLGGGTFDVSVLSLDHGVFEVLATSGDTHLGGEDFDRRVMDHFIRLVKRQHGRDIGGDGRALGKLRRECERAKRALSRQHQVRVEIEALFVGVDFSETLTRAKFEELNMDLFKKTLGPVRKAIADAKLKKSDIDEIVLVGGSTRIPKVQELLKEMFDGKEPTKGINPDEAVAYGAAVQGSIISGEGGAETKDILLLDVTPLTLGIETAGGVMTKLIPRNTRIPVKKSQVFTTYEDHQTTVSIKVFEGERSLTKDCRELGRFDLSGIAPAPRGVPQIEVTFEVDENGILHVTASDKAAGRSKSITITNDKGRLSQEEIDRMVREAEEFAEEDRRVRERVDARNRLENYVYRMRSAVRDGGMAGKIGDDDRERMESALTEALEWLEDNDGGARTAEKEDYEEKLKEVEQVCGPIIKQVYKKSGDASAGAGDDDDVNEL

SEQ ID NO: 18601 - protein, 490 aa, Oryza sativa Japonica Group
MGWRRREGGGAVAGAASRLRFAPSSNHLLVSSWDSGLRLYDADACELRMEAKSEAALLDCCFQDEAVALTGGSDGSITRYDLHSGAQGTIGQHHEVVSCIEFSQITGQVVTATLDKKLMFWDSQTRNVNPNSIKNLDSDVASLSVCEMYILAAIEREVYIYDMRNLIGPVKVKDSPVEYHLRSLHSSPEWKGYAAGSVDGVVAVKYFDRGTDGDMGDKTFVTGDNEGYVIAWDAQSKKKLHEFPIYSGSVASIAFNHNGQIFAVASNSNYQESDKICNHVMGRGAPDIFRNEAALLRRYIVTGDKHAKVGFWGRLEMSDSEEHHFESKADAGASKTYPQQAGTIRKNGHIVIKNRPCKWSGNHASLLVDTKVVEVSTSKTGKHGHAKCHFVAIDIFNGKKLEDIVPSSHNCDVPHVNRTDYQLIDISEDGFVSLLTESGGTKDDLRLPSDEALLTQIKDGFAEGKDLIVTVMSAMGEEQICALKDIGPKN

SEQ ID NO: 18602 - protein, 489 aa, Oryza sativa Japonica Group
MPNPSSLLASPSPPHRNSSSSSSISIISTPATIQPDAAHGPCSLLTTSKYALRDTRGSKSSYTRLCCCCTAAPKAEQEEETLQQELLLFGLVQVGELLEEGGIASTDNELVELLWHNGGVVAQPQAAQARVVSSSGRGQSASVLTGDDTETAAWFPDTLDDALEKDLYTQLWRSVTGDAFPAAAAAGPSSHHAPPPDLPPPAARPPMRSGIGSSWTGDICSAFCGSNHIPETAAQRCRDAGAALPPERPRRSSTHDGAGTSSSGGSGSNFGASGLPSESASAHKRKGREDSDSRSEDAECEATEETKSSSRRYGSKRRTRAAEVHNLSERRRRDRINEKMRALQELIPHCNKTDKASILDEAIEYLKSLQMQVQIMWMTTGMAPMMFPGAHQFMPPMAVGMNSACMPAAQGLSHMSRLPYMNHSMPNHIPLNSSPAMNPMNVANQMQNIQLREASNPFLHPDGWQTVPPQRKRRRRRMMQPGALAEPGQ

SEQ ID NO: 18603 - protein, 409 aa, Oryza sativa Japonica Group
MPASPSTDAPKSPRRRSDKGKRSGVKKVSYKRNYDGSVALPMGGHGGDVVVYADEAEETLLRFHEKARYCAKRGGNVGATGTLSSRMHNGFAGETLRIPVPVGTVVKRKKGAVLADLAHPGDEVIVARGGQGGISLIDVPEYRRRKAMVLSPNIMRDVSDRVLIHGQPGEEVSLELILRVVADVGLVGLPNAGKSTLLSAITLARPDIADYPFTTLMPNLGRLGGDPALGALQFSSEATLADLPGLIEGAHLGKGLGRNFLRHLRRTRVIVHVVDAAADDPVDDYKIVREELRMYNPQYLERPYVVVLNKIDLPKAQDRLSSLAFEISSIGCEECDGNNTSEDSLNGNTGEHNTSSETKVEGGEKELRDYPRPQAVVGASVLKHIGIDEMLKEIRAALRKCFDHRLPEP

SEQ ID NO: 18604 - protein, 998 aa, Oryza sativa Japonica Group
MGAAVEPLDPTAVASVVRYGLAADSLVRRATGDALVYSQLYPFDGLLNYTSAIIHHVRLQGLEPGTEYFYQCGDPAIPAAMSDIHAFRTMPAVGPRSYPGKIAIVGDLGLTYNTTSTVEHMVSNQPDLVLLLGDVSYANLYLTNGTGTDCYSCSFANSTPIHETYQPRWDYWGRYMEPVTSRIPMMVVEGNHEIEEQIDNKTFASYSSRFSFPSTESGSFSPFYYSFDAGGIHFIMLAAYADYSKSGKQYKWLEKDLAKVDRSVTPWVIAGWHAPWYSTFKAHYREAECMRVAMEELLYSYAVDVVFTGHVHAYERSNRVFNYTLDPCGPVHISVGDGGNREKMATSYADEPGRCPDPLSTPDPFMGGGFCGFNFTSGPAAGSFCWDRQPDYSAYRESSFGHGILEVKNETHALWRWHRNQDLYGSVGDEIYIVREPDNLQPVQLGGGGGGRRRGGGGAGMVSLAAYSPCSTVAGVPKNKGNGAASSTHKESIMRHVVVQCATSWDTPRTSTTNGSHAEPSAVVKAGTAPLIQALKSTANQDVSCFHFPGHNRGKASPPSLSELIGSRTFLHDLPELPELDDLFSPKGVILDAQKRAAELFGSFKTWFLVNGSTCGIQASVMATCSPGDYLIIPRNCHISVISALVLSGAVPKYIVPEYNSGNIQGIVNVCHLQGIPVIVDEAHGAHFRFHRNFPSSATEQGADLVVQSTHKVLCSLTQSSMLHMAGDLVDADKVSQCLQLLQSSSPSYLLLSSLDAARAQLSENAESFDEPVSMALETKHQLRIIPGISVLDLSSFLSDFPAIDPLRITLSASDLQLSGYEADDFLAEEHQIVSELVGTQAVTFAVNLGTRRHDVQRLVHSVKHLSEKYFSENGSSSRKENPASSPLDKFSIKLTPREAFFLKKRRVSIEDSLGEICGELICPYPPGIPVLIPGEIVTQDSLSYLMDVRDNGIAISGAADGELKSIMLSSPERKRKPQSEHSIRYKFAHLHGSPEAC

SEQ ID NO: 18605 - protein, 181 aa, Oryza sativa Japonica Group
MAITRRHPPLLLLFLAVAAAATIAGASQSTRPRPAVSPAAAADFVRRSCRATRYPQVCKRSLMPQAPAVGRSPRLLAQAAGGAVGDCADTLRDAEERLRQSAAEMSRMGRSGSPRFAWRLSNVQTWASAALTDASTCLDSLATYAAPGIDVDALRKRVGAVSQATSNALALVNNLDPHHHL

SEQ ID NO: 18606 - protein, 249 aa, Oryza sativa Japonica Group
MVIDVMRRVSAAERYVRRGLWPVQGDYPLGSKVSGKRVGIIGLGNIGSLIAKRLEAFGCVISYNSRNPKRSLPYTYYADVRALSADSDVLVVSCALNSETRHIVGGEVLDALGEGGVVVNVGRGANVDEAALVRALREGRIAGAGLDVFEGEPKVSPELREMENVVLTPHVAVWTAESRSDLRDHTVANLDAFFSGDPLLTPEGLVEGGTLVDGDGCAKGSVLLGDSGGELGTEEVEGGAEHAEVGAAA

SEQ ID NO: 18607 - protein, 320 aa, Oryza sativa Japonica Group
MAPPATQDGSSSKPIVLLADPLIPEFEQELAPSYRLLPAADADEAAAASARALLTVDLPAVTAAQIDALPALELVVASSAGVDHINLGACRRRGIAVTNAQNAFSADAADYAVGLLVAVLRRVAAADAYVRRGAWAAAAGDYPLASKVSGKRVGIVGLGSIGGLVARRLAAFGCVIAYNSRSPKASAPYKFYPSVRELAAESDVLVLSCALTEETRRMVGREVMEALGKGGVLVNVGRGGLVDEAELVRCLREGVLGGAGLDVYENEPEVPPELWGMDNVVLSDHRAVITPESIQGVVDVVKANLDAFFSGKPLVSQVQL

SEQ ID NO: 18608 - protein, 370 aa, Oryza sativa Japonica Group
MDQLLALAVAVPLFALASALAAASATPVNKSCLNGSTGAAVSIGYGGASASAGAGAGVSLGTDAYWLACPLAEEIVRDVVERAVAADPRMAASLLRLHFHDCFVNGCDGSVLLDDKPLFIGEKTAGPNANSLRGFEVIDAIKAELENACPETVSCADVLAIAARDSVVASGGPSWQVEVGRKDSRTASLQGANTNLPAPTSGVATLVQKFRNVGLSAKDMVALSGAHTIGKARCTTFSARLAGVGASAGGGATPGDLSFLESLHQLCAVSAGSALAHLDLVTPATFDNQYYVNLLSGEGLLPSDQALASAGAAAAGAEDVAGLIAAYAFDALLFFDDFAFIYATDGEAGAGSGHRLRRGPPQLPGGELAS

SEQ ID NO: 18609 - protein, 609 aa, Oryza sativa Japonica Group
MSSSQSLLLLAAPLSPPTLPRLVPPPPTSAPRLPRLAANLSRPPPLAISSPGCDGGGGGGGGGGGGGWWRQGGSGPPDPGDGWWRWLQSLHPELLLLFVLLHSGAFAAIPAALAEAIGGSGGREGASVWEVRGGARTLLVPDPTGTSYVVAGDGRRKQAEGEDAEKAGAGRAELAALRRQLELSWRRCATVAVQLLLPDGYPDSVSSDYLQYSLWRGVQGIASQISGVLSTQALLYAVGLGKGAIPTAAAVNWVLKDGLGYLSKILLSKFGRHFDVNPKGWRLFADLLENTAYGLEILTPVFPHLFVPIGAAAGAGRSAAALIQTIFTHFMLENANHMRKAATRSCFYAGFAVQRNFAEVIAKGEAQGMVSKFLGIMLGIALANRIGSSVSLALISFAGVTAVHMYCNLKSYQSIQLRTLNPYRASLVFSEYLLSGQVPSVKEVNDEEPLFLNLSIGTSRKESKILSPQAKDAAEIICRRLQLGSKLSEIIENKEDACALFDLYKNEQYLLTEYKGKFCVILKEGSSPEDMLKSLFHVNYLYWLEKYLGIKPSDVASACRPGGRLEASLDYTQREFSHVKLDGSNGGWVMDGLIARPLPVRIRIGDAPS

SEQ ID NO: 18610 - protein, 253 aa, Oryza sativa Japonica Group
MYSRRILLHTPFSGQPSGPSQPVSGATIVEGGSPGSNFDANIVMILAVLLCALICALGLNSIVRCALRCSSRMVVDPEPSRVTRLAQSGLRRKALRSMPILLYSTGLKLNTVSPMCAICLSDFEDGEHVRVLPKCNHGFHVRCIDRWLLARSTCPTCRQSLFGAPQKASGCSESEGSQAEPAPARPVLAPLRPEELTGGSTADYALCTLAILCCLLQKLERPHQEDTLRVFEKDVSTAVALTRKEGQWLIEFI

SEQ ID NO: 18611 - protein, 388 aa, Oryza sativa Japonica Group
MAVHHSLEVAAAGGDGGGGRCYDDDGHPARTGKKHTWACGLLQYASLYGCGVAYTITTATSMRAILRSNCYHTHGHDAPCKYGGSYYMLMFGAAQLFLSFIPDFHDMAWLSVLAAVMSFSYSFIGLGLGLANTIANGTIKGSITGAPTRTPVQKVWHVSQAIGDIAFAYPYSLILLEIQDTLKAPPAENKTMKKASIISIVVTTFFYLCCGCFGYAAFGSDAPGNLLTGFGFYEPYWLIDFANACIILHLLGGYQVYSQPIYQFADRFFAERYPASRFVNDFHTVKLPLLPPCRVNLLRVCFRTVYVASTTAVALAFPYFNEVLALLGALNFWPLAIYFPVEMYFIQRHVPRWSPRWVVLQSFSVLCLLVSAFALVGSIQGLISQKLG

SEQ ID NO: 18612 - protein, 462 aa, Oryza sativa Japonica Group
MAAAAMAPSPPEPALPRELSLGDLRAVSMLGRGAKGVVFHVVPAAAGEEEASMALKAVSREAARHKKNGSGGEDGHRRIWFERDVLMSLATPAAPLPPRRPRHRRRRRVRIDRCGGGDLNSLRRRQTEKMFSDSVIRFYAAELVLALDYLHSLGIVYRDLKPENVLIQDSGHIMLVDFDLSTRLPTPPPPPEEQDATIADSMPEPPPSSPSPNRAKGKRQPGAASCFPFCSVGATKPAASADSPSPTSTSRTASASSSSSSSTATTASSSTAAGVRSPAKSNSFVGTEDYVAPEIIAGSGHDFSVDWWGLGVVLYEMLYGRTPFRGLNRKETFYRVLSKQPELVGEKTPLRDLIARLLEKDPEKRIGARGIKAHPFFNGVDWDRILRVARPPFIPPPPEDEDEAGEVLDVEKVVNEVFAANDGGAAAGVVEKPSPEAGGTLAVGDGEQRRDPSKEGDFSVFF

SEQ ID NO: 18613 - protein, 304 aa, Oryza sativa Japonica Group
MLVLSQASFCVGYLIFISNTMAHLYPVGDSSPSSPLLTAKAIFIWVMLPFQLGLNSIKTLTLLAPLSIFADVVDLGAMGVVLGQDVSTWLANKPPVFASAGPTEILYGLGVAVYAFEGIGMVLPLEAEAADKRKFGGTLALSMAFIAVMYGLFGAMGYLAFGAATRDIITTNLGTGWLSVTVQLGLCINLFFTMPVMMNPVYEVAERLLCRKRYAWWLRWLLVMVVGLMAMLVPNFADFLSLVGSSVCVLLGFVLPAAFHLKVFGAEVGWPGLAGDVAVIVVGTALAVSGTWTSLAQIFSSSDV

SEQ ID NO: 18614 - protein, 544 aa, Oryza sativa Japonica Group
MDPTVLVAEKLGAAGLELLRGFANVDCSYGLSPEELRAKIPLCDALIVRSGTKVGRDVFEASGGRLRVVGRAGVGIDNVDLAAATEHGCLVVNAPTANTVAAAEHGIALLTAMSRNIAQADASLKAGKWQRNKYVGVSLVGKTIAILGFGKVGSEVARRAKGLGMHVIAHDPYASADRAHAIGVELVSMEDALTTADFISLHMPLTPATNKMLNDETFAKMKKGVRIINVARGGVIDEDALVRALDSGIVAQAALDVFTKEPPAPDSKLVLHENVTVTPHLGASTVEAQEGVAIEIAEAVIGALKGELAASAVNAPMVPAEVLSELAPYVVLAEKLGRLAVQLVAGGGGIKSVKVTYASARAPDDLDTRLLRAMITKGLIEPISSVFVNLVNADFTAKQRGVRITEERILLDGSPETPIDYIQVHIAHVESKFPSAISESGEITVEGKVKDGIPHLTKVGSFQVDVSLEGSLILCRQVDQPGMIGAVGSVLGEENVNVSFMSVGRIAPRKHAVMAIGVDEEPKKSTLTKIGEIPAIEEFVFLKL

SEQ ID NO: 18615 - protein, 1129 aa, Oryza sativa Japonica Group
MAALLFSAVVSAQLSTDFYDETCPDALDIIESAVRDAVSKESRMGASLLRLHFHDCFVNANIIQKFRVDADGSVKQVGCDGSVLLDDTAAITGEKNAKPNKNSLRGFEVVDDIKSQLEDACEQVVSCADILAVAARDSVVALGGPTWDVELGRRDGTTASLDAANNDLPPPTSDLADLIKSFSDKGLTASDMIALSGAHTIGQARCTNFRGRLYNETNLDATLATSLKPSCPNPTGGDDNTAPLDPATSYVFDNFYYRNLLRNKGLLHSDQQLFSGGSADAQTTAYATDMAGFFDDFRGAMVKMGGIGVVTGSGGQPAPRRGSGAPTRGSPHLGRVRELHRGEGRPAAEQEAAARGLLALLLPSHSGSFDFRVISADQCGGKACFIVDNHPLFDGEGTPQVLLLGTSGVEISAGLHWYLKHYCAAHVSWDKTGGAQLSSVPRPGSLPRLPSGGILIQRPVGWSYYQNAVTSSYSFAWWDWERWEKEIDWMALQGINLPLAFTGQEAIWQKVFQRYNISKSDLDDFFGGPAFLAWSRMANMHGWGGPLPQSWLDDQLALQKKILSRMYAFGMFPVLPAFSGNIPAALRSKFPSAKVTHLGNWFTVDSNPRWCCTYLLDASDPLFVEIGKLFIEEQIREYGGTSHVYSCDTFDENTPPLSDPNYISSLGAATFRGMQSGDDDAIWLMQGWLFSYDPFWEPPQMKALLHSVPVGRMIVLDLYAEVKPIWINSDQFYGVPYIWCMLHNFAADFEMYGVLDMVASGPIDARLSANSTMVGVGMSMEGIEQNPIVYDLMSEMAFHHRQVDLQVWVETYPTRRYGKSMVGLQDAWKILYQTLYNCTDGKNDKNRDVIVAFPDVEPFVIQTPGLYTSSSKTYSTKLSKNYIAVDASNDEYEHPHLWYDTDAVIRALELFLRYGDEVSDSNTFRYDLVDLTRQTLAKYANQVFVKIIESYKSNNVNQVSNLCQHFIDLVNDLDTLLASHEGFLLGPWLESAKGLARDKEQEMQYEWNARTQITMWFDNTKTKASLLRDYANKYWSGLLRDYYGPRAAIYFKYLILSMEKKEPFALEEWRREWISLTNNWQSDWKVFPTTATGDALNISRTLYKKYLHDADLIQPEGIIRLRNLKNTPW

SEQ ID NO: 18616 - protein, 246 aa, Oryza sativa Japonica Group
MATTTARLLLLLTVAGFCLCHTTCQEAAPPPPPYCGSLRTAVEARNIIGWKTVPPPCAKYVADYITGERYGRDADVVINEAIAYAESLKLSGTGKEIWVFDVDDTALSTVPYQANHGYGVQPFDNQSFLKYVVQGSAPALQSTLRLYRRLLQLGIKPVFLTDRTEDQRTVTTNNLIKQGYCNWEKLVLQPVRLQTSTLAFKTCERQKLVNDGYIIVGNIGDQWNDIRRSPDGCRTFKFPNPMYYVD

SEQ ID NO: 18617 - protein, 252 aa, Oryza sativa Japonica Group
MVTAARLLPLILFLTAVAVGCSAWEMNIRLPTERLAYGGGEAVVAPIIHALRPLLGSGRQLAARAGVACDSWRLGVEAHNVIDWRTVPAECEGYIGHYMLGEHYRRDFAVVVDEAVAYAETLKLAGNGKEIWVFDIDETSLSNLPYYAKHGFGATPYNATSFRRTEDQRTITVTNLHRQGFSGWEKLLLKPAVHATGELQGSAVEYKSGERQKLQDAGFIIVGNIGDQWSDILGAPEGARTFKLPDPLYYIG

SEQ ID NO: 18618 - protein, 300 aa, Oryza sativa Japonica Group
MAHFQGQQHGHPAARVDEYGNPVAAGHGITRDARGRRRRAGYGATGTGTHDAAGYGGSGQPAYGATGTGVHDAGGLMPGHTAGHGTTGTGVHHGAGAGLPAGQTAGYGTTGVTGAQHGAGGLGTGHTAGYGTTGAHHGAGGLGTRHMAGHGATTTPDTMAYGTTGTGAPHGATAGTGAYPHAGGQFQPAREEHKTGGILRRSGSSSSSSSSEDDGMGGRRKKGIKEKIKEKLPGGNKGGQQQPTATAATGGYGAGTGHTAAAGTTTDAGGTAYTPTTQPTHEKKGMMEKIKEKLPGGGHH

SEQ ID NO: 18619 - protein, 641 aa, Oryza sativa Japonica Group
MARGATWTRRLHLHGLFLAVLLLLTLPAGSTAAAGGGGGTGNRITPSWVAFTGGGERLIGEAAKNQAAANPGRTVYDAKRLIGRRFADAEVQRDMRLLPFAVVDKGGKPHVRVEVRGGDVRLLSPEEVSAMVLARMKETAEAYLGEEVTRAVVTVPAYFNDAQRQATKDAATIAGLAVERILNEPTAAALAYGVGKEGAGGKNVLVFDLGGGTFDVSVLAIDGGVYEVLATNGDTHLGGEDFDQRVMEHFVELVRRKHGRDIAGDARALGKLRRECERAKRALSIQHQVRVEVESLFDGVDLSEPLSRARFEELNNDLFRKTMAPVRKAMADARLSNADIDEIVLVGGSTRIPKVRQLLRDYFGGKQPNQGVNPDEAVAYGAAIQANIVGGDTDNKTRDMVVLDVTPLTLGLETAGGVMATLIPRNTPVPTKRAQLFSTYKDKQTTVTVKVFEGERSMTRDNRLLGRFDLAGIAPAPRGAPQIEVAFEVDADGILSVSAADRATGRSERITISGDDRKTSREEIDRMLGEAEEFADEDRRHRERAGARNSLEAYVYGVKNAVVGGEMAGAMDGGEKEKVEAAVMEAYEWLDGNQDVGKEEYEEKLRELEDVCNPVMSAVYQRSGGSRRDGDGGGDDDHDEL

SEQ ID NO: 18620 - protein, 658 aa, Oryza sativa Japonica Group
MQLGLLLAALLLFTSSLAGSVAAAAPPPPAGAKGWWCQERRRRRHRDRDRPRHDVLGNRITPSWVAFTDGGERLIGEAAKNQAAANPERTIYDAKRLIGRQFSDAEVQRDMKLLPFAVVDRNGKPHVRVEVKDGDVRVFSPEEVSAMVLTRMKETAEAYLGEKVTRAVVTVPAYFNDAQRQATKDAGVIAGLTVDRIINEPTAAAIAYGIDKKGAEKNVLVFDLGGGTFDVSILAIDNGVFEVLATNGDTHLGGEDFDQRLMDHFVKVIRRKHGRDIAGDARALGKLRRECERAKRALSNQHQVRVEIESLFDGVDFSEPLSRARFEELNGDLFKKTMVPVRKAMADAGLGKGDIDEIVLVGGSTRIPKVQQLLKDYFGGKEPNRGVNPDEAVAYGAAVQASIISGHVDENTESMILLDVAPLTLGLETAGGVMTKLIPRNTVVPTKKTQVFTTYKDRQTTVTIQVFEGERSMTRDNRLLGKFDLTGIAPAPRGAPQIAVTFEVDANGILSVLAADKATGRSEKITISGDDRKISQEEIDRMVREAEEFADEDRRHREQVDARNSLEAYVYNVKSTLGGKMADAMEGEEKEKVEEAVREAHEWLDGNPDAGKEEYEEKLRELEDVCNPVMSAVYQRSGGGGGAPEDGNVDDEDDHDEL

SEQ ID NO: 18621 - protein, 324 aa, Oryza sativa Japonica Group
MEPNYSDYHPNSVPFDAYYEHGHGHLDDHGHGHHHLIPAHPEPSYSYGNWSFLHADATATSSSESSSASASSGAAHIVGASGPSASFVRQLHFGGEYYDDDAADISALMEAASISCWTTNGGAGASTSQTTGLEGVEVMRRAAAPAPDNGSSDKEEAARPLIGVRKRPWGKYAAEIRDSTRNGARVWLGTFNTPEQAALAYDQAALSVRGPGAVLNYPLHRVRESLRTLELGAAAAASESPVLTLKRRHRIRKRSTTKKALAGKEADEAPATTSSEGKKKRQVNTTSHSHDGKQDQTSSPCVLELEDLGTDYLEELLALSEEQP

SEQ ID NO: 18622 - protein, 576 aa, Oryza sativa Japonica Group
MTAAPGSLPLVNSRPVSLSLAASRSSFSSLLSGGAGSSLNLMTPPSSLPPSSPSSYFGGVSSSGFLDSPILLTPSLFPSPTTTGALFSWITTATATAAIAPESQVQGGVKDEQQQYSDFTFLPTASTAPATTMAGATATTSNSFMQDSMLMAPLGGDPYNGEQQQPWSYQEPTMDADTRPAEFTSSAAAGDVAGNGSYSQVAAPAAAGGFRQQSRRSSDDGYNWRKYGQKQMKGSENPRSYYKCTFPGCPTKKKVEQSPDGQVTEIVYKGAHSHPKPPQNGRGRGGSGYALHGGAASDAYSSADALSGTPVATPENSSASFGDDEAVNGVSSSLRVASSVGGGEDLDDDEPDSKRWRRDGGDGEGVSLVAGNRTVREPRVVVQTMSDIDILDDGYRWRKYGQKVVKGNPNPRYVACELLQVHDGRVPRAEARERASNDLRAVITTYEGKHNHDVPAAPGSAAAALYRATPPPQASNAGMMPTTAQPSSYLQGGGGVLPAGGYGASYGGAPTTTQPANGGGFAALSGRFDDDATGASYSYTSQQQQQPNDAVYYASRAKDEPRDDGIMSFFEQPLLF

SEQ ID NO: 18623 - protein, 227 aa, Oryza sativa Japonica Group
MSPAAAATGLALGVGGVAGAAAVGTGQHFRGVRKRPWGRYAAEIRDPAKKSRVWLGTFDTAEEAARAYDAAAREYRGAKAKTKFPYPNGAPAAGVNSGSSNSSTVESFGSDVQAPMKAMPIPPSLELDLFHRAAAAAAAGAGGMRFPFEGYPVSHPYYFFGQAAAAAAASGCRMLKIAPAPVTVAALAQSDSDSSSIVDLAPSPPAALAKKAIAFDLDLNCPPPMEV

SEQ ID NO: 18624 - protein, 334 aa, Oryza sativa Japonica Group
MALKSALDLGIADAVHRHGGAATLAEIASEVALHPSKIPCLRRLMRALTVSGVFAAAVKPGDGGGGEPVYELTPSSRLLVGSSNLSGIMSMILHPTLVVPFLGVGEWLRRDREPPEEDPYCIFKQAHGRSLWELAGRDAAFDALINDGMVSDSRVIMDYVVREHGEVFRGIASLVDLAGGLGAAAQVISKAFPEVRCSVMDLGHVVAKAPAGTDVEYIAGDMFESVPPADAVFLKWVLHDWGDNDCIKILKNCKKSITPRDKGGKVIIMDIVVGAGPSDQKHREVQALFDMYIMLVNGIERDEQEWKKVFVEAGFSGYKIMPILGFRSMIEVYP

SEQ ID NO: 18625 - protein, 306 aa, Oryza sativa Japonica Group
MVVEEAVVAAGNEMSLSNMVLGFYEEAELQSSPPGDCAAAAGDDDDGSDDEGSGGAAKCRAFWKEQQSQLYEALAKMSSAESRIQADAEEAMRQMRAAAAGACSCASRGAAAAAAGSGGCRSCTLRFLAERLRDAGYNSAICRSKWPRSPEIPSGEHSYVDVVAPTRSGKAVRVVVEPSFRGEFEMARGGAGYRALVASLPEAFVGRADRLRGVVRVMCAAAKQCARESGMHMAPWRKQRYMEAKWLAKPERVAPPGKAGGAGEPVAVGLPLLPLLPGMTNRQMQPKFRASMLTLDFGGRTAVEVV

SEQ ID NO: 18626 - protein, 940 aa, Oryza sativa Japonica Group
MAARSWLLLLCFVAVATAGVLQARAQPDSNGFISVDCGLPGKTGFVDDKTKISYAADDGFTDGGACHNISAEYITPGLAKRYHTLRSFPDGKRNCYTLRSLVAGLKYLFRTTFFYGNYDGLNKLPVFDLYVGVNYWTMVNITGPGDAVIVEAIVVVPDDFVQVCLVNTGAGTPFISGLDLRPLKNTLYPQSNATQGLVLLGRLNFGPTDYTDVIRYPDDPHDRIWFPWVDSTKWSQISSTKKVQDLDNDMYETPTAVMQTAITPRNASRNIEFSWDPVPLPNDPTPGYIAIFHFSELQLLPGNAVREFYINLNGKPWSLTAFKPEYLYNDATFNRNPFLRYPQYNISINATANSTLPPLINAVEVFSVIPTATIGTDPEDVAAITAIKEKYQVVKNWMGDPCVPKMLAWDKLTCSYAISNPARIIGLNLSSSGLSGEVSSYFGNLKAIQNLDLSNNKLTGPIPDALSQLPSLTFLDLTGNQLSGSIPSGLLKRIQDGSLNLRYGNNPNLCTNGDSCQPAKKKSKLAIYIVIPIVIVLVVVIISVAVLLCCLLRRKKQAAMSNSVKPQNETVSNVSSNGGYGHSSSLQLKNRRFTYNELEKITNNFQRVLGRGGFGYVYDGFLEDGTQVAVKLRSESSNQGAKEFLAEAQILTRIHHKNLVSMIGYCKDGEYMALVYEYMSEGTLQEHIAGKNNNRIYLTWRERLRIALESAQGLEYLHKACNPPLIHRDVKATNILLNTRLEAKIADFGLSKTFNHVNDTHVSTNTLVGTPGYVDPEYQATMQPTTKSDVYSFGVVLLELITGKPSILREPGPISIIQWARQRLARGNIEGVVDAHMHGDHDVNGVWKAADIALKCTAQTSTQRPTMTDVVAQLQECLELEDRRCGMEDTYNNFYAGNNNDPNSSYNMYNTDQSTDVSQNNTMEHNFERVPTMATGPVAR

SEQ ID NO: 18627 - protein, 943 aa, Oryza sativa Japonica Group
MAARSSLFLLCLATATAGVLQARAQPDSKGFISVDCGLPGKTSYIDDKTKISYASDDGFTDGGKHYNVSPEYIKPAVTARYYNVRSFPDGARNCYTLRSLVAGLKYLIRATFMYGNYDGLNKLPVSFDLHIGPVNREAIVVVPDDSVQVCLVNTGAGTPFISGLDLRPLMNKLYPQVNATQGLLQLARLNFGPSDETSIRYPDDPHDRVWFPWFDAAKWNEISTTNRVQNIDNDLFEAPTAVMQTAVTPINASNNIDFFWNSQPQPNDPAPGYIAIFHFSELENLPNNATRQFYININGILFDDGFTPSFLYAEASYSSKPFVRHPQYNITINATANSTMPPLINAVEVYSVISTANIGTDSQDVSAIMTIKAKYQVKKNWMGDPCLPRNLAWDNLTCSYAISNPARITSLNLSKIGLSGEISSSFGNLKALQYLDLSNNNLTGSIPNALSQLSSLTIFTGGEDDDGWLMVDNNDGAAGGRQRQRWRTVEGAARAVEGRRRREQRDLTGNQLNGTIPPGLLKRIQDGFLNLRYGNNPNLCTNGNSCQPPKNKSKLAIYIVVPIVLVLAIVSVTTLLYCLLRRKKQVPFFTYKGSMNNSVKRQNETMRYGPTNNGSGHNSSLRLENRWFTYNELEKITNKFQRVLGQGGFGKVYDGFLEDGTEVAVKVRTESSNQGDKEFLVEAQILTRIHHKNLVSMIGYCKDEKYMALVYEYMSEGTLQEHIAGKGNDGRYLTWKERLRIALESAQGLEYLHKGCNPPLIHRDVKGTNILLNTRLEAKIADFGLSKVFNPENGTHVSTNKLVGTPGYVDPEYQSTMQPTTKSDVYSFGVVLLELVTGKPAILRDPEPISIIHWAQQRLARGNIEGVVNASMHGDYDVNGLWKVADIALKCTALSSAHRPTMTDVVAQLQECLELEDKHQVSDINNGFYNGNSGDLNSNFYTT

SEQ ID NO: 18628 - protein, 701 aa, Oryza sativa Japonica Group
MSRYPDDPRDRVWTPWDSPSNWTEISTTRPVQQTYDDLFEVPTAVMQTAIVPMFATDNIELAWVAYTQPKDPSPGYIAIMHFSELELSPPSRDVREFYINLNGNMMYSKGYKPVYLYAHAIYNTNPFLRYPQYNISINATYNSTMRPFINAMEVYSVFSTTTIGTYGQDASAMMVIKEKYQVKKNWMGDPCIPTEFTWESLTCSYENSKHVIKINLSSSGLSGEISSSFGDLKALQYLDLSNNNLTGSIPDALSQLPSLTVLYGNNPNLCTNDNSCQAAKHKSKLAIYIVAPVVLVLVIVSVTILLFCLLGQKKKQGSMNTSIKPQNEANYVPTNDSDGHGSSMQLENRRFTYKDLEKITNNFQRVLGRGGFGKVYDGFLEEGTQVAVKLRSESSNQGDKEFLVEAQILTRIHHKNLVSMIGYCKNGKYMALVYEYMSEGTLQEHIAGKRNNGRHLTWRERLRIALESAQGLEYLHKWCNPPLIHRDVKATNILLNARLEAKIADFGLSKSFNLENGTHVSTNTLVGTPGYVDPEYQATMQPSTKSDVYSFGVVLLELVTGKSAVLRDPEPISIIHWAQQRLAQGNIEEVVDACMCGDHDVIGVWKVADIAFKCTAQVSARRPTMTDVVAQLQECLELEEEHCAVNDANNNFYTSNNSKPNSSYDTYAADHSIDVSQNSVAFEMEKNFGRMPSTAPGPATR

SEQ ID NO: 18629 - protein, 915 aa, Oryza sativa Japonica Group
MAAWSWLILLCLVAAATAGVLQARAQPDSKGFISVDCGLPGKTSYVDDKTKISYAADDGFTDGGSFHNISAEYITPALSARYHNVRSFPDGARNCYTLRSLVAGLKYLIRATFMYGNYDGLSKLPIFDVYIGVNFWMMVNISDPSGATLLEAIVVVPDDFVQVCLVNTGTGTPFISGLDLRPLEKKLYPQANDKRGLSLFGRWNFGPISTTEFIRYPDDPHDRIWMPWVSPSYWVEVSTTRPVQHTDEDVFDAPTKVMQTAIAPLNASSNIEFAWVPYTQPKDPAPGYITVMHFSELQLRSSNATRQFYINLNGNMVFSQGYTPAYLYADAIFNSNPFLRYPQYNISINATANSTLPPIINAIEVFSVFSTATVGTDGQDASAMMVIKEKYQVKKNWMGDPCVPKTLAWDKLTCSYDSSKPARITDINLSSGGLSGEISSAFANLKALQNLDLSNNNLTGSIPDALSQLPSLAVLYGNNPNLCTNDNSCQPAKHKSKLAIYVAVPVVLVLVIVSVTILLFCLLGRKKKQGSMNTSVKPQNETASYVPTNGSHGHGSSMQLENRRFTYNDLEKITNNFQRVLGEGGFGKVYDGFLEDGTQVAVKLRSESSNQGDKEFLAEAQILTRIHHKSLVSMIGYCKDGKYMALVYEYMSEGTLREHISGKRNNGRYLTWRERLRIALESAQGLEYLHKWCNPPLIHRDVKATNILLNAKLEAKIADFGLSKTFNLENGTHVSTNTLVGTPGYVDPEYQATMQPTTKSDVYSFGVVLLELVTGKPAVLRDPEPISIIHWAQQRLAQGNIEGVVDARMHGDHDVNGVWKATDIALKCTTQVSAQRPTMTDVVAQLQECLELEEGRCAISNANNNFYTDNNSNSNSSYDMYATDHSIDVSQNSAAFETERNFGRMPSTATGPAAR

SEQ ID NO: 18630 - protein, 888 aa, Oryza sativa Japonica Group
MAARWWLLLLLGLAVAGVVRGQGGAPDTSGFISIDCGLPEKTSYVDDATKLKFTSDDAFTDAGTIHNVSSEFATPTTTTDRSLYNVRSFPAGARNCYTVPSVVPGSKYLVRAKFLYGNYDGLNKPPVFDLHLGVNFWQTVTVPSADWLGNAEVIAVVPDDFLQVCLVNTGAGTPFISGLDLRPLPSSLYAPANATQGLVLLDRRNFGASGSTVIRYPDDTYDRVWWPWSNPPAEWSDISTADKVQNTIAPVFDVPSVVMQTAITTRNSSIPIQFSWDTKPNHVYPDPGSIFTLYVTELELLAGNAVRQFNVTINGVIWTKAPYKPVYLSTDAMYNGDRPYRGITRYNFSLNAAGSSTLPPILNAAEAFSVISTADLATDAQDVSAITAIKAKYQVNKNWTGDPCAPKTLAWDGLTCSYAISTPPRITGVDLSHNNLTGSIPNVISQLQFLAVLDLTGNQLNGSIPSSLLKRSQDGSLTLRYGNNPNLCSNSSSCQLPQKKSNSMLAVYVAVPVVVIGAVAVFLIFFIRKKKNKSKGAVKPQILGNGVQSHSQNGSGGSLLELHNRQFTYKDLAVITNNFQRVLGKGGFGPVYDGFLKDGTHVAVKLRDESSSQGYSEFLTEAQTLTKIHHKNLVALIGYCKDEIHLALVYEHMSEGTLEDKLRGKDRKGRSLTWRERLRIVLESAQGLEYLHKACSPRFVHRDVKSSNILLNANLEAKVADFGLTTAFKCDGDTHVSTVRVVGTYGYLAPEYATALQVSEKIDVYSFGVVLLEVITGQPPIIKLPEPTTIIQWTRQRLARGNIEGVVDVNMPDDRYDINCIWKVADVALKCTAHAPGQRPTMTDVVTQLKECLELEETSFKGDTSSSYMSGSSIDPNSSYNTYTTEMS

SEQ ID NO: 18631 - protein, 524 aa, Oryza sativa Japonica Group
MANSEYEYVKREFELDSLLPPSNWIVVRIDGCHFHRILFVRFSKIHTFEKPNDERALRLMNACATSMLEKFPDIVFAYGVSDEYSFVFREETEFYQRRESKILSLCVSYFTSVYVMKWKDFFPNKELKEPPYFDGRVVCYPNLKTIRDYLAWRQVDCHINNQYNTCFWSLVKSGKTEKEAQQALKGTFSKDKNELLSQQFQINYDDEPAIFRKGSCVYRDKVETMVKTDRCGNPIKRTRLVITNANVDIIGPEFWENHPYILREEKCRYENVKKFDINHRLPPCNWTVVRIDICKFEQFSLIHSFDKPNDEAALRLMNASASLMMESFPDIVFGYGFSNEYSFVFQDKTELYQRQESLILSSCTSRFTLFYMMKWKDFFPNKDLVEPPHFEAELLCYPKQKILCDYLSSRQAECHTTNQYSTCFWMLVKSGKSENEAREILKGTLSKDKNELLFQQFHLNYNNEPAVFRKGSCTYRQKVEESADAEGRENTTRERWDVIVAHADMGTEFWRKHPYILRKLDLLG

SEQ ID NO: 18632 - protein, 423 aa, Oryza sativa Japonica Group
MELGLALRLVAPPPRLPCRALQPPPMPCFSPCAARRSRIRSSRLERRVGVVVSGGSMASLAMEEEEEEEWEEAEEEAEGWQEEEAAVVTTRPRLELIEKPDRSLCLLDEYESEELGTSHCANHRSGYVAVLGKPNVGKSTLINQIVGQKLSIVTDKPQTTRHRILGICSEPEYQIILYDTPGVIKKEMHKLDTMMMKNVRSAVGSADCVLVVVDACKMPEKIDEILEEGVGNKDTELPVLLVLNKKDLIKPGEIAKKLEWYQKFTNADDVIPISAKFGHGVDDIKEWILSKLPLGPAYYPKDIASEHPERFFVGEIVREKIFLQYRQEIPYACQVNVISYKSRPTAKDFIQVEILVEKESQRSIILGKDGKAIKMLATASRLDIEDFLQKKVYLEIMVKVKENWRQDELLLKRYGYGGEIQAL

SEQ ID NO: 18633 - protein, 222 aa, Oryza sativa Japonica Group
MARPTMLACCKLYISESRNAAALRAIEHAACIFGAVVVNRFTDDAYNRWPTFLFGAVHREGRTPGLHQEAARLLQAQLLRRPMAGVTPETDAPARCTGRPARKRLPRSKGVVVVGATGWVDNYNVPVRTGDVEAARRIARAVSERGGGLPSVQAMGLAHGGGVVEVACNLLDPARVGAEQVQGMVERLAAGEGLSVGKGYFTDYSQDKIVELYFKSAANTEG

SEQ ID NO: 18634 - protein, 908 aa, Oryza sativa Japonica Group
MAAARAPWLWWWVVVVVGVAVAEAASGGGGGGDGEGKALMGVKAGFGNAANALVDWDGGADHCAWRGVTCDNASFAVLALNLSNLNLGGEISPAIGELKNLQFVDLSGNLLYGDIPFSISKLKQLEELGLRGNSLTGTLSPDMCQLTGLWYFDVRGNNLTGTIPESIGNCTSFEILDISYNQISGEIPYNIGFLQVATLSLQGNRLTGKIPDVIGLMQALAVLDLSENELVGPIPSILGNLSYTGKLYLHGNKLTGVIPPELGNMSKLSYLQLNDNELVGTIPAELGKLEELFELNLANNNLQGPIPANISSCTALNKFNVYGNKLNGSIPAGFQKLESLTYLNLSSNNFKGNIPSELGHIINLDTLDLSYNEFSGPVPATIGDLEHLLELNLSKNHLDGPVPAEFGNLRSVQVIDMSNNNLSGSLPEELGQLQNLDSLILNNNNLVGEIPAQLANCFSLNNLNLSYNNLSGHVPMAKNFSKFPMESFLGNPLLHVYCQDSSCGHSHGQRVNISKTAIACIILGFIILLCVLLLAIYKTNQPQPLVKGSDKPVQGPPKLVVLQMDMAIHTYEDIMRLTENLSEKYIIGYGASSTVYKCELKSGKAIAVKRLYSQYNHSLREFETELETIGSIRHRNLVSLHGFSLSPHGNLLFYDYMENGSLWDLLHGPSKKVKLNWDTRLRIAVGAAQGLAYLHHDCNPRIIHRDVKSSNILLDENFEAHLSDFGIAKCVPSAKSHASTYVLGTIGYIDPEYARTSRLNEKSDVYSFGIVLLELLTGKKAVDNESNLHQLILSKADDNTVMEAVDSEVSVTCTDMGLVRKAFQLALLCTKRHPSDRPTMHEVARVLLSLLPASAMTTPKTVDYSRLLASTTTAADMRGHDVTDIGDNSSSDEQWFVRFGEVISKHTM

SEQ ID NO: 18635 - protein, 878 aa, Oryza sativa Japonica Group
MGDRPDMGAGVALRFSHNDWTLEEDSKALHFLQPDLVLFTGDYGNENVQLVKSISDLQLPKAAILGNHDCWHTYQFSEKKVDRVQLQLESLGEQHVGYKCLDFPTIKLSVVGGRPFSCGGNRIFRPKLLSKWYGVNDMAESAKRIYDAATNAPKEHAVILLAHNGPTGLGSRMEDICGRDWVAGGGDHGDPDLEQAISDLQRETGVSIPLVVFGHMHKSLAYGRGLRKMIAFGANRTIYLNGAVVPRVNHAQSSRQPAISTSEKTGLEGLTGLMVPTSRAFTIVDLFEGAVEKISEVWVTVGDARTELEQELVLYKQPHKSVPSNIAIWSSMGWLTKFFRGSTHKISEGQYHSKPAEETIWNGPSNSAVVTMVYPLESTFGQLDLLLLATDLRQLVIDDVDCCKLRQQAQPVLHLMYSQLQLLQTSHAHQHGDVPSEFDNEDIARAISLSLLEEEQRKAKAIEKDMHLEEDEQLARAIQESLNVESPPRARENGNANGGNMYQPLPFMFSSGFRTCAGCHSEIGHGRFLSCMGAVWHPECFRCHACNQPIYDYEFSMSGNHPYHKTCYKERFHPKCDVCKQFIPTNMNGLIEYRAHPFWLQKYCPSHEVDGTPRCCSCERMEPRESRYVLLDDGRKLCLECLDSAVMDTSECQPLYLEIQEFYEGLNMKVEQQVPLLLVERQALNEAMEGEKTGHHHLPETRGLCLSEEQTVSTILRRPRMAGNKVMEMITEPYRLTRRCEVTAILILYGLPRLLTGSILAHEMMHAWLRLKGYRTLSPDVEEGICQVLAHMWIESEIIAGSGSNGASTSSSSSASTSSKKGGRSQFERKLGDFFKHQIESDTSMAYGDGFRAGNRAVLQYGLKRTLEHIRLTGTFPF

SEQ ID NO: 18636 - protein, 498 aa, Oryza sativa Japonica Group
MASVDLELGRPLSAAAAAYPPPLRRSINDDDVDDDGKPKRTGTEWTASAHIVTAVVGSGVLSLAWSTAQLGWVAGPATLVVFAVITYYTSVLLADCYRAGGDQVSGKRNYTYMDAVESYLGGRQVWFCGLCQYVNLVGTAIGYTITASISAAAVYKSNCFHKNGHSADCSVFTTSYMVVFGVVQVFFSQLQSLHEVAWLSVLAAVMSFSYSAIAVGLSLAQTISGPTGMTTMSGTVIGIDVDLSHKIWQALQALGNIAFAYSYSLVLIEIQDTIRSPPAESKTMRKANALAMPVITAFYTLCGCLGYAAFGNAAPGNMLTGFGFYDPYWLVGLANACIVVHLVGAYQVMSQPVFTAVESWASSRWPRCGFFVTGGGGTRLISVNAFRLAWRTAYVVACTAVAAVVPFFNDVLGLLGAVGFWPLTVYFPVEMYIRRRKLERSSKRWVALQSLNAVCFVVTLASAVASVQGIRRIDGALCTVQVKVVKGKKKNGLCTICC

SEQ ID NO: 18637 - protein, 615 aa, Oryza sativa Japonica Group
MSTSSNPSYHQLGLDAISCCFVAGGGGAEAAAPFFGFGFGDVDGEFLVASPVAAVGDELACAVPLRRPQGSVSEEEVNAASVAAAAAGGAESCSTVHSVLGSVEFGCGTSSGVTIAQASRMGRLAGEAPCGDAGGGGWIYGGSGIAPLHGAYYLSGFSSGAGAGFLSPFAASSVAAAAPAASELSLRLGATKCSSPSSMANASSEVSCSGLTHVSSGGGLGYHQAAAAGAGEALFHPTHGDDAAAAAAGELRQAYHSRAPPHFSQVVSRSAVLAHVAQELLNGFVACLLQDVAADAASGVDGGEASQALSSGFSARITTAPTEDASPGSGGARWAAEAQRLRKLLQLVDEKCNQCVEEMQSTAARFNSMVRSTGGGGGGLTAAFAGRAVAAAYRRVRRRVMGQLVAAATARSSSSAAAAALEEKERSWESSFIQKHWAMQQLRRGDQQSWRPQRGLPEKSVAVLKAWMFENFLRPYPKDSEKDMLAARSGLSRSQVSNWFINARVRLWKPMIEDMYEELKKTSGGSDGAAEIEHLSSKDVLSLERSKKPSHLAVQCDGKHHDRFAVTQMEGVFEEKGIEEIGKIRKTRSHACMCMDVDSSGYTRNKGWIGTPFIS

SEQ ID NO: 18638 - protein, 348 aa, Oryza sativa Japonica Group
MGDSGGSVVSVDVERISFGGKEHHIQTNHGSVSVAVYGDHDKPALVTYPDIALNHMSCFQGLLFCPEASSLLLHNFCIYHISPPGHELGAAPVSPSSPVASVDELADQVSDVLDFFGLGPVMCLGVTAGAYILTLFATKYRERVLGLILVSPLCRTPSWTEWFHNKVMSNLLYYYGMCNMVKDCLLQRYFSKGVQGCSAVPESDIVQASRSFLDQRQSMNVWRFIHTINERHDLTESLKELQCRTLIFVGQNSQFHAEAVHMTSKLDERYSALVEVQGCGSVVTEEQPHAMLMPLEYFLMGYGLYRPSQISCSPRSPLNPFCISPELLLPESMGVKLKPIKTRANLEV

SEQ ID NO: 18639 - protein, 447 aa, Oryza sativa Japonica Group
MAAGRKKRVGRYEVGRTIGQGTFAKVNFAVDADTGAAVAMKVLDKDTILNHRKVHQIKREISIMKIVRHPNIVRLNEVLAGKTKIYIILELITGGELFDKIARQGKLRENEARKYFQQLIDAINYCHSKGVYHRDLKPENLLLDSRGNLKVSDFGLSTLAQKGVGLLHTTCGTPNYVAPEVLSNNGYDGSAADVWSCGVILYVLMAGYLPFEEDDLPTLYDKITAGQFSCPYWFSPGATSLIHRILDPNPKTRITIEQIREDTWFKKTYVAIKRGEDENVDLDDVQAVFDNIEDKYVSEQVTHNDGGPLVMNAFEMITLSQGLDLSALFDRQQEFVKRQTRFVSRKPAKTIVATIEVVAETMGLKVHSQNYKLRLEGVSSNRMSPFAVVLQVFEVAPSLFMVDVRKVAGDTLEYHRFYKNLCNKMESIIWRPIEVSAKSALLRTATC

SEQ ID NO: 18640 - protein, 760 aa, Oryza sativa Japonica Group
MRGGTVRRGGGVGLRALVVVAVAAAALVVARADTAAADVSAINGLYISLGSPKLPGWSGNGGDPCSELWQGVVCTGSSITSVTMNAANLGGQLGGLGNFTSIVTINLSNNKIGGTIPEDLPVTLQHIFLSANQLTGSIPSSLAKLKNLADMSLNDNQLNGQLPDAFGSLTGLVNLDISSNNLTGVLPPSMKNLSSLTTLNIENNLFSGPVPPKLQSIPNFKKDGNPFNTSIAPSASPPSTPGGPAPTPTPTRPAPSPSPTGPPTPSPTNPNLEPSPPPPSSSAPPSRTPSNSSDGPTTRDNISSSKKQNSSTLKIVGFVFLGVVLFIVTVLLVIFCLSKYQERRSRYDYNRSQLARVHHTVEHRINPSIVQPRDDAKKDQQSLAAVPKKPLESQREHIIDLEHPNNLARTNSELFAVDPPPPPPPPFLPPFPVEKVTVNPVVPPEKRYISPPRINKPTSATSFSVASLQQYTSSFREENLIRKSRLGKVYLAEFPEGKFLEVMKIDNTNGRISVDEFLDLVQLVSDIRHPNIHELVGYCAEYGQRLLVYNHFSTKTLDDALHDREGVDSTLSWNARLQVALGSGKALEYLHESFQPPIVHQNFEPANVLLDNKFSVRVAECGLEKLLASSSVTQLADRMHSLLNYEPPEFRESGIVTEQGDVYSFGVVMLEILTGRKPYDSSLPRAEQHLVRWANSQLHDIESLSRMVDPSIQGQCSEKALSRFADIISGCIREPQFRPPMSEVVQDLARMVNETGEESE

SEQ ID NO: 18641 - protein, 791 aa, Oryza sativa Japonica Group
MDKAEEGQSSEPADSAAPAQDDSVQTASGHNSRRPNLSLQIPARTLDNQIGTSARINISPSPSSTRAGLPPRPNSTRTKSSLKSIIPQQSFRARSSAQEGDRAILLVPGTPSEGQQDNTSTLRSFSFRKVINSLSAKRTHSLPVTPIATSDKTSSPANQINNLPTTDDQDVQARIRRSLSVPGNRKNRSLRRADSLGVIRVIPTTPRPIPVNTTASSDGIEETVDVPGDGGKDIPEEEAVCRICLVELNEGGETLKMECSCKGELALAHQDCAVKWFSIKGNKICDVCKQEVQNLPVTLLRIPTQTANRRVTNGAHQRASQQYRFWQDIPILVMVSMLAYFCFLEQLLVTDLLSHALAISLPFSCVLGLLSSMIASTMVTKSYLWAYASFQFAIVILFAHIFYNVLKVNPVLAVLLSSFTGFGIAISANSMLVEYLRWRSRRNQQLAQTVDDGQRQEPGSNAVNENNGDRQQAQHRESGDNINVGFIGLGNMGAHMARNLVMAGYKVTVHDVNENTMKKFSDDGIPTKLSPLEVSKSSDVVITMLPSSAHVLDVYNGRNGLLANGGCLGPWLYIDSSTVDPQTSRKISMDISRCTLKEKKAYAEKPMMLDAPVSGGVPAAEAGKLTFMVGGSEEAYLAAKPLLLSMGKKTIYCGGAGNGSVAKICNNMAMAISMLGVSEAFALGQNLGIKASVLTDIFNCSSARCWSSDTYNPVPGVMMDVPSSRNYDGGFTSKLMTKDLDLAMASASGVGFNCPFGSQALEIYRKLCADGCELKDFSCAFRHNYAGKDEN

SEQ ID NO: 18642 - protein, 639 aa, Oryza sativa Japonica Group
MGQCYGKGASGRTADDEGGVVTEHQSPPPANGLPSTPPRQQAQAQAQQVGTPRRRGSKSGSTTPGHQTPGVAWPSPYPSGGASPLPAGVSPSPARSTPRRFFKRPFPPPSPAKHIKATLAKRLGGGKPKEGTIPEEGGVGAGGGGGGAADGAETERPLDKTFGFSKNFGAKYELGKEVGRGHFGHTCSAVVKKGEYKGQTVAVKIIAKAKMTTAISIEDVRREVKILRALSGHNNLVKFYDACEDGLNVYIVMELCEGGELLDRILARGGRYTEEDAKAIVVQILSVVAFCHLQGVVHRDLKPENFLFTTRDENAPMKLIDFGLSDFIRPDERLNDIVGSAYYVAPEVLHRSYSMEADIWSIGVITYILLCGSRPFWARTESGIFRSVLRADPNFDDSPWPTVSAEAKDFVKRFLNKDYRKRMTAVQALTHPWLRDEQRQIPLDILIFRLIKQYLRATPLKRLALKALSKALREDELLYLKLQFKLLEPRDGFVSLDNFRTALTRYLTDAMKESRVLEFLHAPYNQSYYDELMAIIAFWEPLAYRRMDFEEFCAAAISPYQLEALERWEEIAGTAFQQFEQEGNRVISVEELAQELNLAPTHYSIVQDWIRKSDGKLNFLGFTKFLHGVTIRGSNTRRH

SEQ ID NO: 18643 - protein, 485 aa, Oryza sativa Japonica Group
MERPQEKVATTTTAAFNLAESGYADRPDLDDDGREKRTGTLVTASAHIITAVIGSGVLSLAWAIAQLGWVIGPAVLVAFSVITWFCSSLLADCYRSPDPVHGKRNYTYGQAVRANLGVAKYRLCSVAQYVNLVGVTIGYTITTAISMGAIKRSNWFHRNGHDAACLASDTTNMIIFAGIQILLSQLPNFHKIWWLSIVAAVMSLAYSTIGLGLSIAKIAGGAHPEATLTGVTVGVDVSASEKIWRTFQSLGDIAFAYSYSNVLIEIQDTLRSSPAENEVMKKASFIGVSTTTTFYMLCGVLGYAAFGNRAPGNFLTGFGFYEPFWLVDVGNVCIVVHLVGAYQVFCQPIYQFAEAWARSRWPDSAFVNGERVLRLPLGAGDFPVSALRLVWRTAYVVLTAVAAMAFPFFNDFLGLIGAVSFWPLTVYFPVQMYMSQAKVRRFSPTWTWMNVLSLACLVVSLLAAAGSIQGLIKSVAHYKPFSVSS

SEQ ID NO: 18644 - protein, 148 aa, Oryza sativa Japonica Group
MGTSLLRTAPARWWRFLPRRLVSTVMPSVTLLPRILFLHPTTVMFHMNRTNYQLIDISEDGLFVSLLTESGNTKDDLGLPTYDNLLGQIKTGFGEGKDVVVTVMSAMGRSRSDFTDKGLIPVFEDRTSPTKEIEISILLMALRVVSIH

SEQ ID NO: 18645 - protein, 317 aa, Oryza sativa Japonica Group
MGAWWIRQSCERRRAVAGRRQPAPLGGGRQLDRVGLRPSAVLGGGTEAARAGSGGVAVSAAGVEQPEKDVACAAPTVAAVAPAIATMMMDSPSSSRRVRARGSAPRRHRCTSSSSSATTAAATTAKSVAWLFDDYPAAVARFCRPPGCIIGSRPYDGVVAPPSLFRRNTGAGGLTFDVSLGERPDLDAGLGLGGGGGRHAEAAASATIMSYCGSTFTDAASSMPKEMVAAMADDGESLNPNTVVGAMVEREAKLMRYKEKRKKRCYEKQIRYASRKAYAEMRPRVRGRFAKEPDQEAVAPPSTYVDPSRLELGQWFR

SEQ ID NO: 18646 - protein, 877 aa, Oryza sativa Japonica Group
MGAITSAELNFLIFRYLQESGFIHAAFTLGYEAGIHKGGIDGNLVPPGALITIVQKGLQYIELEANTDENDEDLAKDFALLEPLEIITKNVEELQQIVKKRKREKTQSDRDKDKGKEKERMEEHERRPGGERERERHDQEKELEKEKDRAERDRDQDKEKEKLHTERIDKVKAEEDSLAGGGPTPMDVSTTAHEISSADVTVLEGHSSEVFACAWSPAGSLLASGWGGFHAGFSWKPNVSKRVQFPCMSGWSGDSTARIWTIPDGPCGSITQSSPPGVHVLKHFKGRTNEKSKDVTTLDWNGEGTLLATGSYDGQARIWNSDGELKQTLFKHKGPIFSLKWNKKGDFLLSGSVDKTAIVWDTKTWECKQQFEFHSAPTLDVDWRNNNSFATCSTDNMIYVCKIGDQRPVKSFSGHQSEVNAIKWDPTGSLLASCSDDWTAKTVSVMTFYTNPIPSVVQSYFILSLGGVRARDNFVSDHGRNLHCQTTASGTLVPSTSCRTMVDVLASISLLASKIDMVDLSRSVAVATSRITALEQFQVASSTSTSNNAPWLPTRQPTPATIELWRTAGLQHGDAGGNVPRFYKLEFPKFDGKDDSLKTIASSSSRAKRPTTVTVSGWQLTISSVRRKTGTSTTSSSRDRRIGTRSRSSVMVNSVLPYAIILSGLRFVMANGDRLVSPGLCRNLALNIDGEAFSVDCFALDLCAVDIILGMQWLQTLGPILWDFKNMRMAIWRSTREIWSMKQDKCVYDFKEHTKEIYTIRWSPTGPGTNNPNQQLLLASASFDSTIKLWEVEQGRLLYSLAGHRQPVYSVAFSPGGEYLASGSLDQCLHIWSVKEGRILKTYRGSGGIFEVCWNKEGSKIAACFSNNTVCLMDFRM

SEQ ID NO: 18647 - protein, 568 aa, Oryza sativa Japonica Group
MIIESIPFFFNVCINKSEKSLTVTFIAAAQGSSVVPSSAKVDFLKLQNGSDIRGVAVGGVEGEPVNLTEPVTEAIASAFAAWLLNKKKADGWRRLRISVGHDSRISAHKLQDAVTLGITTAGHDVLQFGLASTPAMFNSTLTEDEINHCPVDGAIMITASHLPYNRNGLKFFTSAGGLNKADIKDILERASRIYEDSSHGSTQELEQASKGEVSNVDYMSIYASDLVKAVRKSAGNKEKPLEGLHIVVDAGNGAGGFFVDKVLKPLGAITTGSQFLEPDGMFPNHIPNPEDKTAMKAITQAVADNKADLGIIFDTDVDRSAAVDSSGRELNRNRLIALMSAIVLEEHPGTTIVTDSVTSDGLTTFIENKLGGKHHRFKRGYKNVIDEAIRLNTIGEESHLAMETSGHGALKENHWLDDGAYLMVKLLNKLAAARILNPNVGSKVLTDLVEGLEEASVTVEIRLKIDQNHADLKGGSFRDYGEAVLKHLENAISKDEYLCKAPKNYEGVRVSGYGGWFLLRLSLHDPVLPLNIEAPSKDDAIKLGLAVLTAVSEFPALDITALNKFLQQ

SEQ ID NO: 18648 - protein, 768 aa, Oryza sativa Japonica Group
MVKSKSLPMIASAAVFLLLLSAALPLSQSYTYEQDVFAINGLYTALGSPSVPGWITNGGDPCNEGWQGVECVVSNITSITLNAANLGGQLGNTLGNFTSLITLDLSNNNIGGTIPDNLPITLQRFFLSGNQLSGSIPSTLSTLTLLTGLSLNNNHLSGEIPDAFSTLTGLANLDFSSNNLTGPLPPSMGNLTALTSLHIQNNQIIGLLNVLQDLPLQDLNIENNLFSGPVPVKLENIPNFKKDGNPFNTSIAPSALPPAAPTPLPSVSPPAGHVPTKEPSNSSIAPAGNAPSRKNNVSAMKFVGYILVGVVSAVVLVLMVMFCLSKYKERKSRDDVYTKNQLGRSPQKLGEPKIKEVSDIKEPPVKLKNNAGKASNVISHTREEQKLNVSTAAASDAVYDSREERKPGSSMSAAPRVVTMEQKEHVIDMEKKDNFVDEQLHPPQSAVLRTEKVTVHPSVRTRKGRVPSAGKLDLTTTVKSFSIASLQQYTNSFNEENLIRDSRFGKLLEVLKIDAANSRIPADAFLELVVNISELTHPNILGLVGYCAEFDQRLLVYEHCSKMTLHDELHYVDDSNKGLSWNARLQVAVGAAKALQYLHDGCQPPIVHQNFEPSIVLLNSTLVVHISECGLAALSSRSVSQLSGRMRTLFHYEAPEVHESGLLSDRSDVYSFGVVMLELLTGRKPYDSSRPRAEQHLVRWATSQLYDIDAISKMVDPSIRGQCSEKALSRFVDIISSCIQHEPEFRPSMSEVVQDLTRMVSDATKASM

SEQ ID NO: 18649 - protein, 173 aa, Oryza sativa Japonica Group
MAWFEREGLAKIGMSDSEEHHFESKADAGASKTYPQQAGTIRKNGYIVIKNRPCKVVEVSTSKTGKHGHAKCHFVAIDIFNGKKLEDIVPSSHNCDVPHVNRTEYQLIDISEDGFVSLLTESGNTKDDLRLPTDDSLLGQIKTGFGEGKDLVVTVMSAMGEEQICALKDIGPK

SEQ ID NO: 18650 - protein, 1631 aa, Oryza sativa Japonica Group
MKEYKLNKSSPLQNPVKNPSHGPPMRPSPGPTKSPQKAIKSVQSNYNSAFKKNHTNPTASPPLPTSSLSHPFGGPPRSAPFLPSRLSPLALACDSPCAREGIRIRHPPLVVVFLVAADLNEILSERGACGVGFVANLKNEPSFNIVRDALVALGCMEHRGGCGADNDSGDGSGLMSGIPWDLFNDWANKQGLAPLDRTNTGVGMVFLPQDENSMEEAKAVVAKVFTDEGLEVLGWRTVPFNVSVVGRYAKETMPNIQQIFVKVAKEDNADDIERELYICRKLIERATKSASWADELYFCSLSSRTIVYKGMLRSEILGQFYLDLQNELYKSPFAIYHRRYSTNTSPRWPLAQPMRLLGHNGEINTIQGNLNWMRSREATLQSPVWRGREHEIRPFGDPKASDSANLDSTAELLLRSGRSPAEAMMILVPEAYKNHPTLSIKYPEVIDFYDYYKGQMEAWDGPALLLFSDGRTVGACLDRNGLRPARYWRTSDDFVYVASEVGVIPMDESKVVMKGRLGPGMMITVDLQTGQVLENTEVKKSVASANPYGSWLQQSTRSIKPVNFQSSVAMDNETVLRHQQAFGYSSEDVQMVIETMASQGKEPTFCMGDDIPLAVLSQKPHMLFDYFKQRFAQVTNPAIDPLREGLVMSLEVNIGKRRNILEVGPENADQVTLSSPVLNEGELESLLNDSKLKPKVLSTYFDIRKADAAVRNGSQLLVLSDRSEALEPTRPAIPILLAVGAIHQHLIQNGLRMSASIVADTAQCFSTHQFACLIGYGASAICPYLALETCRQWRLSNKTVNLMRNGKMPTVTIEQAQRNFIKAVKSGLLKILSKMGISLLSSYCGAQIFEIYGLGQEVVDLAFCGSVSKIGGLTLDELGRETLSFWVKAFSEDTAKRLENFGFIQSRPGGEYHANNPEMSKLLHKAVREKSDNAYTVYQQHLASRPVNVLRDLLELKSDRAPIPIGKVEPATSIVERFCTGGMSLGAISRETHEAIAIAMNRIGGKSNSGEGGEDPIRWSPLADVEDGYSPTLPHLKGLQNGDTATSAIKQVASGRFGVTPTFLVNAEQIEIKIAQGAKPGEGGQLPGKKVSAYIARLRNSKPGVPLISPPPHHDIYSIEDLAQLIYDLHQINPKAKVSVKLVAEAGIGTVASGVSKGNADIIQISGHDGGTGASPISSIKHAGGPWELGLSETHQTLIQNGLRERVVLRVDGGFRSGLDVLMAAAMGADEYGFGSVAMIATGCVMARICHTNNCPVGVASQREELRARFPGVPGDLVNYFLFVAEEVRATLAQLGFEKLDDIIGRTDILKAKHVSLAKTQHIDLKYLLSSAGLPKWSSSQIRSQDVHSNGPVLDETILADPDISDAIENEKEVSKTFQIYNVDRAVCGRVAGVIAKKYGDTGFAGQLNITFTGSAGQSFGCFLTPGMNIRLVGEANDYVGKGMAGGELVVVPVEKTGFVPEDAAIVGNTCLYGATGGQVFVRGKTGERFAVRNSLGQAVVEGTGDHCCEYMTGGCVVVLGKVGRNVAAGMTGGLAYILDEDDTLVPKVNKEIVKMQRVNAPAGQMQLKGLIEAYVEKTGSEKGATILREWEAYLPLFWQLVPPSEEDSPEACAEFERVLAKQATTVQSAK

SEQ ID NO: 18651 - protein, 586 aa, Oryza sativa Japonica Group
MPPKRQRSAAGPSGEAPVNSLDDGCLMHIFSFLSPIPDRYNTALVCHRWRFLACHPRLWLRVERPIRNTIEPGVYPNLESAVSAARPGDTILIAAGGTHVARNIQIKKPLCIIGGGELPDDTVLTCSRGSDNALEFHSTCKIANLTIRAELGCCLLHRSGRLTIEECLLQCEQNPLDYLSFPIISTAIEYDSFSSLKEQGHGVTVVRTRIEGGAKAVRTNGTLALQHVRAIYSRSSVFFWFEVGERHLARDTVHFDIKLLWAQPDVPASSSEVSMMDSISIGLSMASVTYLDDAHSEVIDPPKNEEMLDVTELVDDHTQHSPKPNAMVSGNVRELLECPVCLNAMYPPIHQCSNGHTLCSGCKPRVHNRCPTCRHELGNIRCLALEKVAASLELPCKYQNFGCLGIYPYYCKLKHESQCQYRPYTCPYAGSECTVAGDIQYLVSHLKDDHKVDMHNGSTFNHRYVKSNPHEVENATWMLTVFSCFGQYFCLHFEAFQLGMAPVYIAFLRFMGDDAEAKNYSYSLEVGGSGRKMTWQGVPRSIRDSHRKVRDSYDGLIIQRNMALFFSGGDKKELKLRVTGRIWKEQ

SEQ ID NO: 18652 - protein, 666 aa, Oryza sativa Japonica Group
MAPAVAVVAAAAAFPFRLFSAEARRNTKGSRSKRGSARPLKPSPPPRPSASSSAAGGGGATTFTRLPLRNAPASVEVTLDRFPTANPEPRASTFTRRNGERLGDDEEDEEEEEDEVELGLRGATTFARLPLRDSPDGGDLTIGHFDAGVAPQEGLRSRAISRQLVEHLDDVEEEEEEQVVSRLDIFEGAKGREARAFLPDEDDEDDDVVVFDPEYDGYSDDEEFVATAVEQSPRGDAIAVAELEKLKYDNDDDDDDDDEVVVFHPDDDEEVDVFEDYDDDEEEETKEKGFPALMRCFETAKIYGKGGDRRNRPGGISARERALLLPGGRGGRGNAAFKSGTNKAPRIAEKGEKGPEMWIDLELKLVADVGIVGAPNAGKSTLLTAISAAKPTIANYPFTTLLPNLGVVSLDFDATMVVADLPGLLEGAHRGYGLGHEFLRHSERCSVLVHVVDGSGEQPEYEFEAVRLELELFSPSLVDKPYIVVYNKMDLPEASERWNKFQEKLQAEGIEPYCISAMNRQGTEDVVLAAYKVLQKDRQRMKDDEEWNGPENLNHVADAIKRERRAPMNEFEIFHDKGTNTWNVVGAGIERFVQMTNWQYSESLKRFQHALEACGVNKTLIKRGVKEGDTVVVGEMEMVWTDEPSKTRSSKTMNSKDDSVRWPEFG

SEQ ID NO: 18653 - protein, 309 aa, Oryza sativa Japonica Group
MAKATCISLLVVVALATAASAQLSATFYDTSCPRAMSIIKSAVTAAVNSEPRMGASLLRLHFHDCFGCDASVLLSGNEQDAPPNKDSLRGYGVIDSIKAQIEAVCNQTVSCADILTVAARDSVVALGGPTWTVPLGRRDSTGASAALAISDLPPFTASLQELVDAFAKKGLSVTDMVALSGAHTIGQAQCSTFRGRIYNETNIDSAFATQRQANCPRTSGDMNLAPLDTTTANAFDNAYYTNLLSNKGLLHSDQVLFNNGSTDNTVRNFASNAAEFSSAFATAMVNMGNIAPKTGTNGQIRLSCSKVNS

SEQ ID NO: 18654 - protein, 339 aa, Oryza sativa Japonica Group
MERENRVETISRLAQWRIDTFGPSSYRRSDSFKIGIWNWYLSVEKARYVYVRLFPEPGRVAKERPPLARFLLRACWSGPPRRSCVSPVHEHLLRSSEDFFWQLDTMYAGRFTIDVEFLDLKIASNNASIHLLSSKLAAESSTSIWPNESIAVQNIASKSSLGCLSRMLTESIHADVTINTTDGVLKAHKAILASCSPVFESMFLHDLKEKESSTININDMCLESCSALIGFIYGTIKLDQFWKHRLSLLAAANKYSISDIKDCCEESLLEDINSSNVLERLHVAWLYQLQKLKKGCLTYLFVFGKIYDVREEINSFFQHADRELMLEMFQEVITAWKPI

SEQ ID NO: 18655 - protein, 196 aa, Oryza sativa Japonica Group
MEAPGADIQALIQRLRLHRPRPSPYPEHMRSVLAGRFLCQEEKAEEGDADDAATALREAKEEIGLDPASVTVVASLEHFLSKHLLVVVPVVGILSDIQAFKPVLNVDEVDSIFDVPLEMFLKDEKRTSEEREWMGQEFTIHYFNYEKGSEKYVIWGLTAGILIHAASVVFQRPPDFPARTVQFNLPKYSKECSSMP

SEQ ID NO: 18656 - protein, 920 aa, Oryza sativa Japonica Group
MVSKSYSNLLEMSCGDGVDFRQPFKSLPRVVTSPGIISDPDWDTRSDGDSVGSASSVERKIIVANFLPLNCTKDEAGQWSFSRDDDALLMQLKDGFSNETDVIYVGSLKVQVDPSEQDQVAQKLLRDYRCIPTFLPPDLQQQFYHGFCKQQLWPLFHYMLPICLDKGELFDRSLFQAYVRANKLFADKVMEAINTDDDHVWVHDYHLMLLPTFLRKRLHRIKLGFFLHSPFPSSEIYRSLPVRDEILKSLLNADLIGFQTFDYARHFLSCCSRLLGLHYESKRGYIGIDYFGRTVSLKILSVGVHVGRLESILKLPATVKKVQEIEQRYKGKMLMLGVDDMDIFKGISLKLLGLELLLDRNPKLRGKVVLVQIVNPARSTGKDVEEAITESVSVAERINLKYGSVDYKPVVLIDHRIPFYEKIAFYAASDCCIVNALRDGMNLVPYEYTVCRQGNEEIDNARGSDTNCHHTSTLIVSEFVGCSPSLSGAFRVNPWSVDDVADALHHATDLTESEKRLRHEKHYRYVRSHSVAYWAHSFAQDLERACKDHYSRRCWAIGFGLNFRVIALSPGFRKLSLEHFASSYNKATRRAIFLDYDGTLVPQSSINKAPSDELITILNSLCDDPKNDVFIVSGRARSLLDEWFAPCQKLGIAAEHGYFVRWNKAAEWESSYPNHDFEWKHIAEPVMQVYTETTDGSSIEPKESALVWHYLDADHDFGSCQAKELLGHLERVLSNEPVVVKCGHYIVEVKPQGVSKGLVVDKVIHRLMNNGKTPDFVVCIGNDRSDEDMFKSIDSMTSSSAFPAVPEVFACSVGQKPSKAKYYVDDAGEVVRLLKNVAGISSHPGGRQPWTCDLQGCDGLCGVNHLIFVTSKLVYIPMSSSRFGQKHESSPPLGQLQECKRKLCIFSLGDVYSYVGNFDS

SEQ ID NO: 18657 - protein, 400 aa, Oryza sativa Japonica Group
MSSQQQHAGEAPASAAAAARARLRWTGQLHERFVLAVAELGGADRATPKSVLRAMAVPGLTLYHLKSHLQKYRQAVSRGGNGGGGGSGSLNDRSSSSERQPADHDGDSAADEPRTIAYDGDSDGDAKEGLRDSSRSMVKRHLQLRMEAQGRYLQSVLRRAQQVLADHSLASSPEAATAELSELASAVDIECMSSSSPPRHHRQSAATDSCVTTTSSSEAESKAAGSKRLHTSDCTVEQPVQGKRAFNFLQRHNQADQEEEQEEEYAGAEDGSSSEIDLNRCKLTSTGVSSQLEAICLENLPALARLELPSDADADAAARIHRFHGRPVLPSAGLRNRPWTPAAALAGVDELTSGLGLGLGRGRAAGVAGGGFGGRPEVGGGEHGDPRGGGAVLRTRFCWA

SEQ ID NO: 18658 - protein, 528 aa, Oryza sativa Japonica Group
MSPAELLAKVAQFDALIVRSGTKVTREVLEAGRGRLRVVGRAGVGIDNVDLQAATEAGCLVVNAPTANTVAAAEHGIALLASMARNVSQADAALKAVYSRTLTVFTAQGKWQRTKYVGVSLVGKTLAVMGFGKVGSEVARRAKGLGMHVIAHDPYAPADRARAIGAELVSFDEAIGRADFISLHMPLTPATSKVFNDESFSRMKNGVRIINVARGGVIDEDALVRALDSGKVAQAALDVFTEEPPAKDSKLVLHENVTVTPHLGASTVEAQEGVAIEIAEAVVGALRGELAATAVNAPMVPAEVMSELAPYVSLAEKLGKLAVQLVAGESGGIKGVKVVYTTARGPDDLDTRLLRAMVTKGIVEPVSSTFVNLVNADYTAKQRGLRITEERVSHESPAAEAPLESIQVRLSHVQSKFAGAISDGGDIVLEGRVKYGVPHLTVVGPYEVDVSLEGNLILCRQIDQPGMIGKVGNILGQTNVNISFMSVGRTFRGKQAIMAIGVDEEPDKETLEHIGHIPAIEEFVFLEL

SEQ ID NO: 18659 - protein, 272 aa, Oryza sativa Japonica Group
MEALNSSEERHEDRDSRASGTRTGSVADSSENEAESHSTPVERKDGGGKSRHCRSLSVDSFIEKLNFDESPKLPLPSPSGGLSRSGSGSLDGGAASLFGAEFANGEFTEAEKKKIMANERLAEIALTDPKRVKRILANRQSAARSKERKMRYIQELEHKVQVLQTEATTLSAQLTMLQRDSTGLATQNNELKIRLQAMEQQAQLRDALNEALTAEVQRLKLATGEITDGRMSKGLQQQMNSQLIQLQQLQIQQQQSSQTTQQGQQQQPQKSA

SEQ ID NO: 18660 - protein, 869 aa, Oryza sativa Japonica Group
MDADGFLSIDCGLEGDKNGYTDNSNGIVYTPDGAPYVDTGVTNNVSAQYVNTWDRALNTLRSFPLTLFGERNCYALPTVPGAIYLVRLRFAYGNYDNMNSESVQFDLFLGVNKWDEVYIANKDKEYSSEAMFVAWASWASVCLVNTYQGTPFVNTVELRQLDSMLHFRKIMGNSSIYLYERRNMGPSSRDNPIISFRDLDSITLREFVRYPNDTYDRFWYPWGSEDDPTYSNLSAPSTLIIPPSPSYAVPSPVLETAVVPADNNKSVLSIIQTNDKEIHEYLVLVHYADFQSTLQRQFQAYSNGDPIQGTGGPYVADYTGQTVGTIDWISAETSGKYNITLAATDSSQLPPIVNAFEVYGRIPLDNPSTFPTDFDAIMTIKFEYGIKKNWMNDPCFPSNLVWNGVRCSTGSDNTMRIISLDLSNSNLHGSISNNFTLLTALEYLNLSGNQLSGTIPSSLCENNAGSFVFRYVSDEDMCNTAGTPVQSKKRSAILALAVVIPVLVAAILILAYLTWRARRKPNNFVHLDSTYGPEFLNAPGSTKNHWDHMQKTENRRFTYEELEKYTDNFERLIGHGGFGQVYYGCLEENIEVAVKMRSESSQHGLDEFLAEVQSLTKVHHRNLVSLVGYCWENDHLALVYEYMSGGNLCDHLRGKISVGESLNWATRLRILLEAGQGLDYLHKGCNLPIIHGDVKTNNILLGQNLKAKIADFGLSKTYHSDTQTHISATAAGSVGYIDPEYYNTGRLMESSDVYSFGVVLLEVVTGEPPIIPGHGHIVQRVKQKIVTGNISSIADARLDAYNVSSMWKVVDTAMMCTADVAAQRPVMATVVAQLKEGLALEEAHEERVDLENIASDIVSSVSTFGPSPR

SEQ ID NO: 18661 - protein, 466 aa, Oryza sativa Japonica Group
MNLAGFLATPATATATRHEMPLNPSSSASFLLSSLRRSLVASLRKASPAAAAALSPMASASTVAAENGAAKGAAEKQQQQPVQVAKRLEKFKTTIFTQMSMLAIKHGAINLGQGFPNFDGPDFVKEAAIQAINAGKNQYARGYGVPELNSAIAERFLKDSGLQVDPEKEVTVTSGCTEAIAATILGLINPGDEVILFAPFYDSYEATLSMAGANVKAITLRPPDFSVPLEELKAAVSKNTRAIMINTPHNPTGKMFTREELEFIATLCKENDVLLFADEVYDKLAFEADHISMASIPGMYERTVTMNSLGKTFSLTGWKIGWAIAPPHLTWGVRQAHSFLTFATCTPMQAAAAAALRAPDSYYEELRRDYGAKKALLVNGLKDAGFIVYPSSGTYFVMVDHTPFGFDNDIEFCEYLIREVGVVAIPPSVFYLNPEDGKNLVRFTFCKDDETLRAAVERMKTKLRKK

SEQ ID NO: 18662 - protein, 222 aa, Oryza sativa Japonica Group
MGEESPAAGGGAAAAAAGKPSGTALPRRGKSCKGCLYYSSMLRSRGFNPVCVGIPRSIPQGLIGESHETVVVWFGAPVPSYVVDEPREEAAAQGHDLRQFKYACAGYSMFVVDNKDGRSGEKEGKTLLPYCQGLELLVDSRLVEKKSPNNEPATASYRKEAATSSRQQGQRPGQLTGQDFYARFRKSAGLVASGVAKNLNKTAIYIKENVADILYPDRRPPK

SEQ ID NO: 18663 - protein, 865 aa, Oryza sativa Japonica Group
MEVGMAGFLCGAGSLNSEGNLTCMEEGDPQPSISLARTPSEGAAAAVDLDLLEQLLSADNAWLEVAANTSRSPNFFATPSNCLTDASVATTTPANSWWIQPSGASTSVRERFDQALAYIRETQSDADVLVQLWVPVKGNDGQLVLTTSGQPFTLDQRSNSLIQFREVSTKYQFSADVASGSSPGLPGRVFIGRLPEWSPDVRYFTSYEYPRINHAQYLDVHGTMGLPVFERGNYSCLGVIELIMTKQKLNFTSELNTICSALQAVNLTSTEVSSIPRAKLNSASYKDALPEILEVLRAACITHKLPLAQTWVTCAQQGKRGSRHSDENYKYCISTIDAACYVNEPRMQSFHEACSEHHLLRGQGVAGKAFTTNQPCFLPDIGSSTKLEYPLSHHAKIFNLKGAVAIRLRCTRTGIADFVLEFFLPTDCEVLEEQKAVLDSLSGTMRSVCQTLRVVTDKEMEDEAMREMNELNSFSPRGKNKVEELSFGDNTRGDREEASWTTLVGTSQKGSDLAELHTHGMLSHGGHGSSQAGDQTSKEGSKVKRRTKTEKTVSLQVLRQYFAGSLKDAAKSLGVCPTTLKRICRQHGINRWPSRKIKKVDHSLRKLQQIIDSVHGAETAFQLNTLYKDLTNTSVSSDNNLSGSVTVPLANQNNLDFEMHQHHRLSSNIPSTSLSHSSCSQSSDSSPSCSGGATKHSPQVGADQVRSGCLPQHSPVQTLQTEAASINEHFSGQEAPIDLLQDVAEKANGEQHMSQSPSSPKQTANVGMRVKVTFGSEKVRFRLKPECDFQELKQEISKRLSIADMNSLIVKYLDDDSEWVLMTCDADLHECFHVYKLADIQTIKISVHLAASPTTRITIGHTGFS

SEQ ID NO: 18664 - protein, 250 aa, Vitis labrusca x Vitis vinifera
MESLGVRKGAWIQEEDVLLRKCIEKYGEGKWHLVPLRAGLNRCRKSCRLRWLNYLKPDIKRGEFALDEVDLMIRLHNLLGNRWSLIAGRLPGRTANDVKNYWHGHHLKKKVQFQEEGRDKPQTHSKTKAIKPHPHKFSKALPKFELKTTAVDTFDTQVSTSSKPSSTSPQPNDDIIWWESLLAEHAQMDQETDFSASGEMLIASLRAEETATQKKGPMDGMIEQIQGGEGDFPFDVGFWDTPNTQVNHLI

SEQ ID NO: 18665 - protein, 247 aa, Vitis labrusca x Vitis vinifera
MESLGVRKGAWIQEEDVLLRKCIEKYGEGKWHLVPLRAGLNRCRKSCRLRWLNYLKPDIKRGEFALDEVDLMIRLHNLLGNRWSLIAGRLPGRTANDVKNYWHGHHLKKKVQFQEEGRNKPLTHSKTKAIKPHPHKFSKALPRFELKTTAVDTFDTQVSTSSKPSSTSPQPNDDIIWWESLLAELDQETDFSASGEMLIASLRAEETATQKKGPMDGMIEQIQGGEGDFPFDVGFWDTPNTQVNHLI

SEQ ID NO: 18666 - protein, 307 aa, Vitis labrusca x Vitis vinifera
MESLGVRKGAWIQEEDVLLRKCIEKYGEGKWHLVPLRAGLNRCRKSCRLRWLNYLKPDIKRGEFALDEVDLMIRLHNLLGNRWSLIAGRLPGRTANDVKNYWHGHHLKKKVQFQEEGRDKPQTHSKTKAIKPHPHKFSKALPKFELKTTAVDTFDTQVSTSSKPSSTSPQPNDDIIWWESLLAEHAQMDQETDFSASGEMLIASLRAEETATQKKGPMDGMIEQIQGGEGDIIWWESLLAEHAQMDQETDFSASGEMLIASLRTEETATQKKGPMDGMIEQIQGGEGDFPFDVGFWDTPNTQVNHLI

SEQ ID NO: 18667 - protein, 253 aa, Vitis labrusca x Vitis vinifera
MVRAPCCDKVGLKKGPWTTQEDQNLTAYVLQHGHGNWRALPKQAGLLRCGKSCRLRWINYLRPDIKRGNFSREEEDTIIELHEKLGNKWSAIAASLPGRTDNEIKNVWHTHLKKRLKKKLATPDSKGHFTPAASACDSDSFNSSGKMSPQPSSSEFSSFTDSSTRTMETHSTGVKNEQMEEYSPESFPEIDESFWSDALSSDNSSMASDFPAVADELQLQTPELACGQISNMMDDGMEFWYDVFIRAGGLQEL

SEQ ID NO: 18668 - protein, 253 aa, Vitis labrusca x Vitis vinifera
MVRAPCCDKVGLKKGPWTTQEDQILTAYVLQHGHGNWRALPKQAGLLRCGKSCRLRWINYLRPDIKRGNFSREEEDTIIELHEKLGNKWSAIAASLPGRTDNEIKNVWHTHLKKRLTKKLATPDSKGHFTAAASTCDSDSFNSSGKMSPQPSSSEFSSFTDSSTRTMETHSTGVKNEQMEEYSPESFPEIDESFWSDALSSDNSSMASDFPAVADELQLQTPELAYGQISNMMDDGMEFWYDVFIRAGGLQEL

SEQ ID NO: 18669 - protein, 355 aa, Campylobacter lari RM2100
MSAKILFIDRDGTLIDEPKNDFQIDSLEKLEFEKGAINALLKLKNFGFKFVMVSNQDGLGTNSFPRENFDKVHEKMLSVFQSCGIEFEDIFICPHFEHENCACRKPKTAMLENYIKNKLYDKNKSFVIGDRDSDMLLAQNLKIQGLKYDKNDFNWEQIADFILQNYRSAYIERNTKETQIQVKIAFNEKAKANIKTNIAFFDHMLEQIATHANISLEIKCKGDLEVDEHHSVEDVALALGEAIKSALDQKIGIARYGFVLPMDECLASCAIDFCNRPHLVYKAKFKKEKLGELSTEMIEHFFYSLSYAMGASLHLKVKGKNDHHKAEGLFKAFARALKMAIKIENENLASSKGVI

SEQ ID NO: 18670 - protein, 347 aa, Campylobacter lari RM2100
MFIDNVKLVLSSGNGGKGAVSFRREKHVPLGGPDGGDGGNGGDVYFICDNNTHTLAHFKGKKELKAQNGQPGLGRNKNGKRGESLELIVPQGTQVIDAQSGEVLLDMLVEGQKELFLKGGKGGLGNTHFKNSTNQRPDYAQSGVAGKTLSVRLELKLIADVGLVGFPNVGKSTLISVVSNARPEIANYEFTTLTPKLGMVEVDDYNSFVMADIPGIIEGASDGRGLGLEFLRHIERTSFLLFVLDPLRDMSLKEQFCILRKELEKFSSKLYTRNFGLMLSKSDSINLGEEFAQKMEDDYNELKAYLQSQNNPQSFFIKVSSLEKTGLKELKFMLLEEVKKIRNQNNL

SEQ ID NO: 18671 - protein, 318 aa, Campylobacter lari RM2100
MSQIDAIKIAKEVFEIESKTILDLCDTLNEEFSKAVELILSIKGRCVVSGMGKSGHVGAKIAATLASTGTPSFFMHPGEALHGDLGMIASEDVLLAISNSGETEEVLKLIPVIKKRKIPLIVMAGDQNSTLAKQADVFINIAVKKEACPLQLAPTSSTTATLAMGDAIAVALMKARNFKPDDFALFHPGGSLGRKLLTKVGDLMVSSNLPIVSPNSEFNELVDVMTSGKLGLCIVVENEKLVGIITDGDLRRALRANDKPRFDFKAKEIMSESPKTIEASAMASEAEELMLKHKIKEIVVTQNEKIAGIIQLYAIGNV

SEQ ID NO: 18672 - protein, 493 aa, Campylobacter lari RM2100
MEVVQINTQIAIMFVAYSALMLFIGFYFYKQNKNSEDYFLGGRSMGPVVSALSAGASDMSGWLLMGLPGALYVSGLAESYIAIGLSIGAFLNWAFVAKRLRIYTSVIANSITIPDYFETRFDDDKHILRVVCAIVILIFFTFYVSSGLVGGAKLFEATFGIQYDYALTTGTVIIVAYTFLGGYKAVCWTDLIQGLLMMSALIIVPIVMVYHLGGFSEAVNIVKEIKPNTFSMGEGLSFLGIVSALSWGLGYFGQPHILVRFMSIRSTKDIPTATFVGISWMVISLIGACLIGVLGIAYVSKFELSLQDPEKIFIVMSQLLFNPWIAGILLSAILAAIMSTASSQLLVSSSTIAEDFYKRIFNKEASNKMVMTLGRFGVLAVAVIAFVISTDKNSSVLSIVAYAWAGFGASFGSVMLFSLFWSKMTRYAAIAGMITGAVVVVAYKNFLAEWFNFPIYEIIPGFLAASIVIVLVSLVTKVRPGTKAAYETMLKHL

SEQ ID NO: 18673 - protein, 492 aa, Campylobacter lari RM2100
MNLQSVELSYPIVITFITYAFLMLFIGLYFYKKNQNSKDYFVGNASMGPVISALSAGASDMSSWLLMAFPGALYAAGLGQIYIAIGLSFGMFLNWTFVAKRLKIFSQIAKECITIPDFFESRFHDDKHILRSICAVVILVFFTIYISAGLVSGAKLFESVFDLPYIFALSIGFLVIVLYTFLGGYKAVCWTDMIQGLLMMSSLIIIPFVMIFELGGFGEAFSTINDVKPQAFGLDGGGWLVVASTLAWGLGYFGQPHILIRFISIKNVKEIPTATFIGITWMVISLFGAAMIGFLGIAYIAKFNLTLNDPERIFIVMSQVLFNPWVAGILLSAILAAIMSTASSQLLVCASSLVQDFYTQILKRKTNDKNITLLSRLGVLAVACVAFILSLDTQSQILSIVSYAWAGFGASFGSVILFSLFYKNMSKEGAVAGMVSGALTVIFYKHFGSNFIAIYEIIPGFLVASCFIVIFSIIFKAKKHTIKHYEKMLKEI

SEQ ID NO: 18674 - protein, 171 aa, Campylobacter lari RM2100
MKTKALFLDRDGIINIDKKYVHKISDFEFCDGIFELCEFFQKQNFLIFVATNQSGIARAYYSEKDFEILSSYMLDEFLKRKIRIEKIYHCPHLENCECRKPKPGMLLKAQKEFNIDFSQSFFIGDNLSDMQAGINAGVKNLFLINENYNDDKNYKVFKNLKELLHYLKDRK

SEQ ID NO: 18675 - protein, 526 aa, Campylobacter lari RM2100
MSENLSQQKRILIAVVLSFLFFVVYDYFFIPKAPQTEQNITQIEQNNSAPQSTINANTQAPKTELSVNQKEEIAVVKSEHFEAHIDSLGRIAKFYLSDEKYKDENGKSINLVDTSLSPLPLEIRFSDTKINQEAFNTPYTTSQKTINVSDENTTLILTQNLNNLVVTKKITFHKYGNYDLEVNLSKDAAYFITPGYRPNIAVDSYTVHGVLILDKDDKITMLEDGDVENDESFSNVTLMAASDRYYSAFFYNFEKPLSAVVTKDNHENSIVFASASNTFKASGYIGSKEHDILRNIDPRLDNVVEYGWFTFIAKPMYEFLDFLHGYLGNWGWAIVIMTLIVRIILFPLTYKSMISMNKLKDLAPKMKEIRERYKGDPQKMNLHMMELYKKHGANPMSGCLPILIQIPIFFAIYRVLLNAIELKAAPWAFWITDLSVMDPWFILPIFMGLTMFIQQLITPMAIQDPMQEKIMKFLPLIFTFFFLTFPAGLTLYWCVNNICSLIQQVIVNKLFKNHKKEEIAKHEHRS

SEQ ID NO: 18676 - protein, 388 aa, Campylobacter lari RM2100
MLSQRSQNLGESLTLVMTDIAKTLKANGEKVISFSAGEPDFDTPEIIKKAAIEAIEKGCGAYTPVVGIKEVIEAIQYKFKNDNNLEYKASEIITNVGAKHSLFMAIECLVEEGDEVIIPSPYWVSYPEMVKFAGGTPVFIEGDAKNGFKITPEQLKQAITPKTKVLMFNSPSNPTGAIYSKDEIIALAKVLEGSKIVVLSDEIYEKLVYDGEFFAFAQASEDASNRTVTINGLSKCGAMPGWRFGYMASKMSEFNKAIKKLQGQSTSNICSIVQHAALPALLGKANDDIEMMRQAFLKRRNLACEILSKCEKIKLEQIPQGAFYLFISCKELDNDSMRFCKRLLEEQKVALVPGVGFGMEGYFRLSYATSENDIKEGCEKIINFVKNY

SEQ ID NO: 18677 - protein, 489 aa, Campylobacter lari RM2100
MKSMFLINCVDEKFLTQSLEKVQGKIAFYFPVFCEKNKEKIALICSKTNFKLDFFSSFEKNNYQSKFTQNSNDFFKKIIQDYEKLKKENDFVIVVGVDDFGLMGDLSLNIALAKELNAPLYAKSQDENHTMLNFLLSQKLSDFVLLKESEDFTQDLLQEYTYKTQARFSYELFEKAKADKKIVVLPESFDERVLKASEFLMQNEIVDLILLGDSNEICAKANSLNINIDGVRIINPKNSQYNEEFEELLYEARKSKGMSKEEAKKLVQDKTYFATLLVHTQKAHAMVSGASTTTAETIRPALQIIKTKPDVSLVSGMFFMSLEDKVLVFADCAVMPNPSPEQLAEIAYVSANSAKAFGLEPKVALLSYSSGDSGSGASVDAIKEASKIAKEKYPQLELEGPIQFDAAYDMLTAKSKMPNSKVAGRANVYVFPDLNAANICYKAVQRTANSLAIGPILQGLKKPINDLSRGCLVEDIVNTVILSAIQAQE

SEQ ID NO: 18678 - protein, 394 aa, Campylobacter lari RM2100
MKILVLNSGSSSIKFKLFEKDEALASGLVEKIGEQNSKIELKDLKSGQKYKKELAIKDHEQGIELVNELFAQSGILHDLNELDGCGHRIVHGGPNLTKHCLVDDEILKEIDRVAHIAPLHNPAHLIGIKTMIKAAPKVPNVTVFDTAFHQSMPDYAYMYALPYEFYEKHQVRKYGFHGTSHSYVSKQAAYILGKNINEFNAISAHLGNGASVCAIENGKCVDTSMGFTPLEGLIMGTRCGDIDPAVLPFLAKELNLNPSDLDTMMNKKSGVYGICGFNDFRDIEAQIEQNNEKARLALDMFCYRLSKYIGSYFAILPRVDALIFTAGIGENDDIVRAKVCQRLAHLGFDIDLDKNAQLRNGEISKKDSKIKILIVPTEEELEIAKITTELIKNK

SEQ ID NO: 18679 - protein, 400 aa, Campylobacter lari RM2100
MLIVQKYGGTSVGTLERIDEVAKRVAKSKKTCDKLVVVVSAMSGVTNELIDFAHHFSKNPSGREMDMLLSSGERVTSSLLAIALNEMGLKATAFSGRNAGIITDDVYTKARIERIDTANINKALDEGYIVVVAGFQGIDKMGNVTTLGRGGSDLSAVALAGALNADLCEIYTDVDGVYTTDPRIEPKAKKLDKISYEEMLELASLGAKVLQNRSVELAKKLNVKLVTRSSFNENEGTIITKEENMEQALVSGIALDKNQARVTLRNIDDKPGIAAEIFGTLANENINVDMIIQNVGVDGATNLGFTVPENELDLATNAMKKVLGANAIIETDSAVVKVSVVGVGMKSHSGVASAAFKALANENINIQMISTSEIKISVIVHEKYGELAVRVLHEVYKLDI

SEQ ID NO: 18680 - protein, 275 aa, Campylobacter lari RM2100
MKKIFLLSFLMALFFGACSNSGSNENSIEKIKQQGVIRIGVFGDKPPFGYLDAQGKNQGYDVYFAKRIAKELLGDESKIQFVLVEAANRVEFLQSNKVDLILANFTKTPEREVVVDFALPYMKVALGVVAPKNSDIKTIDDLKSKTLILNKGTTADAYFTKNMPEIKTIKFDQNTETFAALIGKRGDALSHDNALLFAWAKENPNFEVVIKELGNHDVIAPAVKKGDEAMLKFINNLIVKLQNEQFFHKAYDETLKPFFSDDIKADDVVIEGGKI

SEQ ID NO: 18681 - protein, 857 aa, Campylobacter lari RM2100
MANIQDFLTDSMLSNIESAISLAIHSKNSEIKPLHLLWALSVDSSSLLNQVFNKLNVSKEAFELEVKSKISSFPTSSNVNKDNIKFSNEFINSLEKAKGLALENKDNYLAVDMWLVSESTSGVIKELLSKFVDLNEFKKELEFIRAGVKIETKTSDETLDSLSKFGIDLTMKAKNNELDPVIGREEEIQRLMQILIRKTKNNPILLGEPGVGKTAVVEALAQRIVKKDVPTSLQNKKVIALDMSALIAGAKYRGEFEDRLKAVVNEVIKHKNIILFIDEIHTIVGAGANEGSMDAANILKPALARGELHTIGATTLKEYRKYFEKDAALQRRFQPVNVAEPSVNEALAMLRGIKEKLEIHHNVTINDSALVAAAKLSKRYIANRFLPDKAIDLIDEAAAELKMQIESEPNSLRKVRKQIESLEVENEALKMEENEANEKRLEEIKKELANLKEEQIKLNAKFENEKAVFNGISAKKKEIDTLKNEAILAKNKGDFQKAAEIEYGKILECEKEVLNLEEKWKQMTQEGVLLKNQVDEDLVAGILSKWTGISVQKMLTSEKQKYLHIQEYLQESVVGQDEALSALARAIKRNKAGLNQATKPIGSFLFLGPTGVGKTESAKALAKFLFDDEKAMVRFDMSEFMEKHSISRLLGAPPGYIGHEEGGELTEAVRRKPYSVILFDEVEKAHKDVFNILLGILDDGRATDSKGVTVDFTNTIIILTSNIGANFIMELKGEEREKAIKEALRSFFRPEFLNRLDDIITFNPLGESEAEKIVKLLFNTLQKSLENRGIKASLSDNAARLIAKVGFDVDFGARPLKRALYDMVEDKLSDMILSDELNENDEIIIDSKDDEIVIIKQ

SEQ ID NO: 18682 - protein, 406 aa, Campylobacter lari RM2100
MKKDIKKVVLAYSGGLDTSIILKWLQDEYKSEVVTFTADIGQGEELEPARKKALSLGVKEENIFIKDLKDEFVKDYVFAMFRANAIYEGEYLLGTSIARPLIAKALVEIANKTNADAISHGATGKGNDQVRFELGALALNPNLAIIAPWREWDLNSREKLLAYAQKHGIDIVKKADKSPYSMDANLLHISYEGLVLEDPAAKPEADMWRWVRDLKQTPNESEVIELEFSKGDLCAINGEKMSPAQLLAKLNELGAKHGIGRLDIVENRYVGMKSRGCYETPGGSILLKAHRAIESITLDREAAHLKDELMPKYASLIYNGYWFSPERLMLQALIDESQKHVNGKVKLELYKGNVMVIGRESANDSLFSEAYCTFEEDSVYDQKDAAGFIKLNALRFIIAGKNGRKF

SEQ ID NO: 18683 - protein, 290 aa, Campylobacter lari RM2100
MKSGFVSIVGRTNAGKSSILNSLLEEKIAMVSHKQNATRRKINAIIMHEKNQVIFIDTPGLHASSKAINQLMIDLAIKSIADCDVILFVASIYDDIIDYENFLKLNPKVPHIVLINKVDLADKKTLLSKLAQYNQFSSYFSAIIPYSIKQKFHKKILLDELVKYLPEHPYYFDPEFITTTNEKDIYRDFILEAIYENLSDEIPYTTEVRIDKIKELKTIYYINATIISSTNSHKGMILGKDGATIKRIGKEARVKIEKLAQKKVMLKLFVQLEKNWHKNEQNLKKILYDE

SEQ ID NO: 18684 - protein, 402 aa, Campylobacter lari RM2100
MKFDFYATLVTMVIVLLLGVFVIKRVKFLRDYNIPEPVVGGGIAAIILLILHSSFSLNIKFDESMKDPLMLAFFSSIGLLADFASLKKGGRKLAVFLVVVVGLLFAQNIVGIGVATAMGQNPLMGLIAGSVTMSGGHGTGAAWAAEFIKEPYLYSSATTVAIACATFGLISGGIIGGPVARYLVNKHKLVVPKQNDDKDAILNFQSPEKERLITPSSFIESLALIALCLLIGSALSTYIKANTGFTLPTFVYCLFVGVVLRNVLSATKIHHVFDREVSVLGNVSLSLFLALALMTINLWDLVTLALPMLVILVVQVAMMAAFAIFVTFRVCGKDYDAAVLAAGHCGFGLGATPTAMVNMQTVTNHYGMSHMAFIIVPLVGAFFIDIVNALVINAFLYLPFFH

SEQ ID NO: 18685 - protein, 622 aa, Campylobacter lari RM2100
MSKVIGIDLGTTNSCVSVYERGESKVIPNKEGKNTTPSVVAFTDKGEILVGDSAKRQAVTNPEKTIYSIKRIMGLMINEDAAKEAKNRLPYHITERNGACAIEIAGKIYTPQEISAKVLMKLKEDAEAFLGEKVEDAVITVPAYFNDAQRKATKEAGTIAGLNVLRIINEPTAAALAYGLDKKESEKIVVYDLGGGTFDVTVLETGDNVVEVLATGGNAFLGGDDFDNKLIDYLASEFKDETGIDLKNDVMALQRLKEAAENAKKELSSANETNVNLPFITADASGPKHLTKTITRAKFESMIDGLVAETISKINEVVKDAGLDKSEVKEIVMVGGSTRVPLVQEEVKKAFGKDLNKSVNPDEVVAIGAAIQGAVIKGDVKDVLLLDVTPLSLGIETLGGVMTKIIEKGTTIPTKKEQTFSTAEDNQSAVTINVLQGEREFSRDNKSLGNFNLEGIPPAPRGMPQIEVTFDIDANGILTVSAKDKATGKAQEIKITGSSGLSEEEINNMVKDAELHKEEDRKRKEAVEARNSADSLVHQVEKSLSELGEKVSDEDKANIQKALDDLKETLKNANASKEEIESKMKTLSEVSHKLAENMYKKDEKPSDDKKKKDDDVIDAEVE

SEQ ID NO: 18686 - protein, 343 aa, Campylobacter lari RM2100
MVARKITHLSFFIIALAFLFISPYFFNDYKIGILSNIAIFVILAVSYNLINGVTGQFSLEPNGFVAIGAYVAALVLLTSESKIDQFSLEDPSSFILMIHSPSFIVALLAAGLCAMLLSLILAFAVFRVRGDYLAIVTLGFGIIIKLMAINFASVTNGSLGLNDIPKHTTLYWSGGIAIFSVIIILNIVSSKFGRAMKAVRDDEDAALAMGINTFNIKTLAFSTSAFLEGVGGGLLACALASVSPEQFDFLFTFQLLIIIVLGGLGSTTGAIIGAILVIGGSEYLRFLDESMNIFGYETPAMPGLRMVVFSIVLILVMLFARRGIMGDKELTDILFKFSKRKKK

SEQ ID NO: 18687 - protein, 125 aa, Campylobacter lari RM2100
MKLLVVDDSSTMRRIIKNTLVRLGHKDVLEAEHGVEAWDLLSQNDDIKVLITDWNMPEMNGLELVKKVRAEEKYADMPIIMVTTEGGKAEVITALKAGVNNYIVKPFTPQVLKEKLEDVLGTNEG

SEQ ID NO: 18688 - protein, 640 aa, Campylobacter lari RM2100
MNKKPNEPKDNPNNNNFFNKNPIFIFAIFAIVMILLFKGFSDDGSMGIMGGENTKKVTYSELKTLIENNQIAQVNIGQTTIKAVSKAGNMVYITKKVPNDATFVPLLDSKGVSYGAFNESNWFIDILLSWVLPVFIFFGIWMFLASRMQKNMGGSILGIGSSKKLVNSEKPKVKFNDVAGVEEAKEEVKEIVDFLKYPERYISLGAKIPKGLLLVGPPGTGKTLLAKAVAGEADVPFFSVSGSSFIEMFVGVGASRVRDLFENAKKEAPAIVFIDEIDAIGKSRAASGMMGGNDEREQTLNQLLAEMDGFGTESSPVIVLAATNRPEVLDAALLRPGRFDRQVLVDKPDFKGRCDILKVHMKDVKISPEVKVEDIARLTAGLAGADLANIINEAALLAGRDSKKHVEQKDLVEAVERAIAGLEKKSRRINDKEKKIVTYHECGHALIAETTKGAKKVSKVSVIPRGLAALGYTLNTPEENKFLMQKHELLAEVDVLLGGRAAEEIFIKEISTGASNDLERATDIIKAMISMYGMSDIAGLMVLEKQRNTFLSGGQTIKDYSDKMAQDLDEYVKKTLDERYAGVKEILKTYSGAIETMVKALYEEETIDGAKVREIIKNYEEENNLPTRLEEKEQEVIKDN

SEQ ID NO: 18689 - protein, 309 aa, Campylobacter lari RM2100
MRGYKIFSGSANEEFAKKISKYLSLPLSNAGVKRFSDGEISIQIDESVRGKDVFIIQSTCAPTNDNLMELLIMTDALRRSSASSITAIIPYFGYARQDRKASPRVPITAKLVANLIESAGVDRVATIDLHAGQIQGFFDIPVDNLYGSIIFNDYIKNKNYKNPIIASPDIGGIARARSVAKALGLDIVIVDKRREKANESEVMNIIGDVKDKEVILVDDIIDTAGTIVKAAEVFKNKGAKSVIACCTHAVLSGVAYERIAKDSLDELVVTDTIPLKQQMDKIKVLSVAPIFGEVIRRVYHNESVNSLFV

SEQ ID NO: 18690 - protein, 647 aa, Campylobacter lari RM2100
MLKTSFKKAVFLPSISIIVVLSLSCIFLPKLTNDFINHIKSGIFANFSWFYILSVSFFVCFMLALALSKFGDIKLGDDDEKPHFKFTSWLAMLFATGMGVGLMYFGVAEPLIHKKALQISDEEAMLHTIFHWGIHPWAIYGVCALAMAYFGFRYKMPLSLRSAFYPLLKDKIYGFWGNLVDMLALIVTVFGISTTLGYSASQLNAGFLNLGILNEQSFLEQSVIIIIIISLATLSSISGLTKGLKILSEANLVFAVCLMLFVLFSTSTIQILSQFSSNIGNYLQNLISLSFKTYYYEKEHIEWFNNWTIYYWAWWLSWSPFVGFFIAKISRGRTIREFIFGVLVVPTSFNILWFSIFGNSALNFNDILSPFTSAPESLLFYFLQNFSFSYFSSLLALLVLALFFITSADSGIFVLNSLSSGGAHEPFKWQNILWGFVLALLATSLLYSGGLGAILSITMIVALPFAFLLCLMCFSLLKGLIVDVNYSLTKLSQSSVYFSGEFWQERLARILKQSKEQDIQNFLNAKVKNAMESLSQSLKNYGLKTQIVQEKSSISLIIKKEFAKDFIYGVQVVKKQASQSIIDDKFMPTYSKEFIFEPQTFFADSRNGYNIEYLNEQEIIVDILKQYERYLQLLFDDKNEIFTKAYD

SEQ ID NO: 18691 - protein, 392 aa, Campylobacter lari RM2100
MKVYLDNNATTKLAPEAYELMKPFFEENYGNPNSLHQWGSATHPALKEAMDKLYAGLGASDLDDIIITSCATESINWVLKGVYFDRILNSDRNEVIISSVEHPAVAASAMFLKSLGVKVIELGVDHEGVSSVKDLKEAISDKTALVSIMWANNETGMIFPIEEMAQITHEYGALFHTDATQAVGKIKVNFAKAGVDFASFSAHKFHGPKGVGGLYIKKDIELTPLLHGGEHMGGRRSGTLNVPYIIAMAEALRIANTMLDFENSHIRRLRDKLEDLILAMPDTSVVGDRSRRVPNTILASIKGVEGEAMLWDLNKNGIAASTGSACASEALESNPIMEAIGAENDLAHTALRLSLSRFNTEDEIDYAAEQIKKATQRLRAISSTYAYKPDNI

SEQ ID NO: 18692 - protein, 142 aa, Campylobacter lari RM2100
MTQEQIQIIKDCVPILQKNGEVLTKEFYKIMFEEYPEVKPMFNMEKQASGEQPKALAMAILMAAKNVENLENMRSFVDKVAITHTNLNVKEEHYPIVGACLLKAIKVVLNADETTLKAWEEAYKAIAKFYIDIEKEIYAKNK

SEQ ID NO: 18693 - protein, 668 aa, Brassica rapa subsp. pekinensis
MGCSTPFCYSINPSPSKLDFTKTHAFSPVAKQFYLDLPSFAGKSGGGLSGLRKRRALVGVKAATLLAEEEKRETVTESKKKPRVLVAGGGIGGLVFALAAKKKGFDVLVFEKDLSAIRGEGQYRGPIQIQSNALAALEAIDIGVAEEVMEAGCITGDRINGLVDGVSGTWYVKFDTFTPAASRGLPVTRVISRMTLQQILARAVGEEIIRNESNVVDFEDSGDKVTVVLENGQRYDGDLLVGADGIWSKVRNNLFGRSEATYSGYTCYTGIADFVPADIESVGYRVFLGHKQYFVSSDVGGGKMQWYAFHEEAAGGVDAPNGMKKRLFDIFEGWCDNVLDLLQATEEEAILRRDIYDRSPSFTWGKGRVTLLGDSIHAMQPNMGQGGCMAIEDSFQLGLELEQAWKQSVETNTPVDVVSSLRRYEESRRLRVAIIHGMARMAAIMASTYKAYLGVGLGPLSFLTKFRVPHPGRVGGRFFIDIAMPLMLNWVLGSNSEKLEGRPPSCRLTDKADDRLREWFEDDEALERTINGEWYLIPHGNECSVSETLRLTKDEEQPCIVGSEPDQDFPGTHIVIPSPQVSKMHARVIYKDGAFFVMDLRSEHGTYLTDNEGGKYRVTPNFPARFRPSDIIEFGSDKKAAFRVKVIRTTPKLTRRDEKSDGKLLQAA

SEQ ID NO: 18694 - protein, 372 aa, Sinapis alba
MLKPESYNISNRENNRGARACDTCQLTICTVYCHADSAYLCTSCDAQVHSANRVASRHKRVRVCESCERAPAAFMCEADDVSLCTACDSEVHSANPLARRHQRVPVVPITGNSCSSLATHHTTVTEPEKRAVLVQDDQEGKEDAKETASWMFPYSDKSNHNHNNNNNNQNNELLFSDGYLDLADYNSSMDYKFTGQYNQHQNKQDCTVPQTNYGGDRVVPLQLEETKGNLRHKEHNITYGSSGSQYNYNGSINHNAYNPSVETDYVPEPTARDTTVSHQKTPKGAIHKQPEPLIQILSPMDREARVLRYREKKKRRKFEKTIRYASRKAYAERRPRINGRFAKMSETEAEDQDFNTMLMYYDTGYGIVPSFY

SEQ ID NO: 18695 - protein, 175 aa, Sinapis alba
MSVNHRDPLVVGGVIGDVLERFTRSIDLRVTYGQREVSNGLDIRPSQILNKPRVEIGGEDLRNFYTLVMVDPDVPSPSDPHLREYLHWLVTDIPATTGTNFGNEVVSYENPRPTSGIHRIVMVLFRQLGRQTVYEPGWRPQFNTREFAALYNLGLPVAAVYFNCQRDNGCGGRRS

SEQ ID NO: 18696 - protein, 378 aa, Helianthus annuus
MNMDEFLNSIWTAEENQAHTQAHPPTAATIGGGISTSAAMATNGASSSGQFLMGINANSAEPNMIARQVSLSRQGSLTLPGPLSRKTVDEVWSEIQKTRQDHQQPSNDNNSCNEQVPGAQRQPTYGEMTLEDFLVKAGVVREQNHPNAPPVPQQVPASFGLYPTNGNNRIIGPPPSSAHMVRPMLGLSTGGGASVIPPYSPLIRETPGYPGGKRAGNYQQQPPPYGGIGGNAGGVAGGYGQGLGIGSPPSPVSSDGIATTQLDSGNQYALEMGGIRGGRKRIIDGPVEKVVERRQRRMIKNRESAARSRARKQAYTVELEAELNMLKEENAQLKQALAEIERKRKQQFSEEIRMKGVTKCQKVRDKSRMLRRTSSCPT

SEQ ID NO: 18697 - protein, 307 aa, Thermosynechococcus elongatus BP-1
MEAIASIPVAPAGFRSGFVALVGRPNVGKSTLFNHLLGQKVAITSPVAQTTRNRLRGILTTATAQFIFVDTPGIHKPHHRLGEVLVHNAKGVLKRVDAIVFVVDAASPPGRGDRYVADLLTTTPAPVLMAINKIDLLPPEAREQRQQDYQTLGPWPAYPCSALTGEGVGLLQSAIAAQLPLGPYYYPPDMVTDQPERFIMAELIREQILHHTREEVPHSVAVTIEQVQQERNLTRVHAVIYVERPTQKAIIIGQGGQLLKQIGTAARQEIETLIGGKIYLELFVKVRPRWRQDRLRLAELGYRIEKD

SEQ ID NO: 18698 - protein, 397 aa, Thermosynechococcus elongatus BP-1
MRGDCLRGFLGRLGMRPIYLDGLATTPVDPQVLAAMLPYFSDRPGNPSNRGHAYGWEAAAAIDVARETIAAAIHAHPEEIIFTSGATEANNLAIKGVAEAYHSRGRHIITVQTEHNAVLAPCRYLESLGFRVTYLGVNEKGFIDLAELEQAFTPETLLVSVMAANNEIGVLQPLAEIGRRCRDRGVLFHTDAAQALGKIPLDVQALQVDLMSLTAHKLYGPKGIGALYVRRDRPRVQLAPQLHGGPQEQGWRSGTLATPLIVGFGAAVQLAQERQATDIPYLWHLKERLWQGLVSLGDIYLNGDWQQSLPNCLNVSIAGVDGNVLLRSIYPYVALSTGAACSSEKPTPSHVLLALGRSPTLARASLRFGLLRTTTEADIDTALEQIGRSIWQLRHSK

SEQ ID NO: 18699 - protein, 111 aa, Thermosynechococcus elongatus BP-1
MAYAIIETGGKQLRVEPGRFYDVERLPIEPEGTIDLEQVLLVQTDSQVHVGQPYVSGAVVSGTVMEHRRGPKVIVYKMRPKKKTRRKKGHRQELTRIMINEIRLNGESLGG

SEQ ID NO: 18700 - protein, 507 aa, Thermosynechococcus elongatus BP-1
MKLRSILRRGFRLQHPLTQILYLPTRRTLLTFAVMIGVLSATAALGQDTAASAAVPEKVQVALNTLWVILAGVLVFFMNAGFGMLETGFCRAKNAVNLLSKNLIVFALASISYWAIGFALMFGDGNGVLGSSGFFLLGADNSPATGEAYRGVYSSLSWAAVPLSAKFFFQLVFAGTAATIVSGAVAERIKFYAFFIFSLLLVGISYPITGHWIWGGGWLQQLGMWDFAGSTVVHSVGGWAALMGAALLGPRLGRFLPDGSVAAIPGHNFAIATLGCLILWLGWFGFNPGSTMAADPGAIAHIAVTTNMAAAFGGVTATVVSTLYFGKPDLSMIINGILAGLVAITASCAFVTIESAALIGAIAGTIIVFSVVTIDRLKIDDPVGAISVHLVNGVWGTLAVGLFADGPGRFYEAGAGPLKGLLWSGDFTQFGYQLVGVLAVGGFTVAFSTAVWLLLNATIGIRVSPEEEIEGLDIGEHGMEAYAGFLLREEVKGFVDLLKRMSGSGRS

SEQ ID NO: 18701 - protein, 660 aa, Thermosynechococcus elongatus BP-1
MCGLTGFWQPCGCPTDEVSATIQRMADTLVHRGPDDVGVWVDTEVGIALGHRRLAILDLSPAGHQPMVSATGRYVIAFNGEIYNHLELREELSKVGAGGTAPVWRGHSDTETLLAAFAALGIEKTLKRVVGMFAIALWDRETRTLTLARDRMGEKPLYYGWVRDALVFGSELKALRAYPGFDNAIERRSLALFMRYDYIPAPWSIYENIWKLPPGCFVQFRAASHGGEPLAVGSRGNIKPYWSVRDVAERGLANPFTGREADAVEELERLLRQSIAGQMMADVPLGAFLSGGIDSSTVVALMQAQSSRAVKTFTIGFHEQDYNEAKHAKAVACHLRTNHTELYVTPQEAMAVIPKLPSLYDEPFADSSQIPTFLLAQLARQQVTVSLSGDGGDELFGGYTRYFLTHSLWQRLAWIPLPMRKLAEQGVLAISPQTWNRVFALLAPVLPERLRFRLPGDKLHKAAALFVTRRPEDIYLRFVSHWHDPTSLVIGTEEPRTALTEPATVLEGADFEARMMYLDSITYLPDDILVKVDRAAMGVSLETRVPLLDHRIVEFAWQLPHYFKIRRGQSKWLLRQVLYRYVPKELIERPKMGFGIPLDQWLRGPLREWAEDLLSEERLKREAFLNPELVRQKWQEHLLGRRNWAYHLWNVLMWEAWLAA

SEQ ID NO: 18702 - protein, 378 aa, Thermosynechococcus elongatus BP-1
MLIALILAAAIALCNGLSSAQLAASHPVSGGTYEYGYHYLSPPFGFTAGWMFLVAKSASAATAALGSVAYLYQWLGLEDSSGRWQVMAALGLLAVLTGVVLLGIRRSTQVNLGILLVTFTSLLLFVGIGHLQQRGGSPWLATSQPLSLKHLLQATALLFVAYAGYARIAVLAEEVKTPRQTIPRAIVLTIVIALLLYLSVAWVVLGSHHSGNLTTAASLAVVASRFGVPWLPPLMALGAIAALVGILLNLLLGLSRVVLAMARRRDLPPTLAQIPPQGKQPVAAILAVSGGIALLILLGNVQTTWSFSAFSVLIYYAITNLAALQLQEPQFPRWLAVAGLIGCLGLAFWVEVQVWVSGCGLLLLGLAWHYWMRRAKAL

SEQ ID NO: 18703 - protein, 527 aa, Thermosynechococcus elongatus BP-1
MPKVLVSDPIEQVGLDLLAQVAQVDVKIGLSEEELIKIIPEYDALMIRSGTKVTKDVIEAANQLKIIGRAGVGVDNVDVPAATRKGIIVVNSPEGNTIAAAEHTLAMMLSLARHIPDANAAVKAGQWDRKRFTGVEIYKKTLGIIGLGKIGSHVATVARAMGMKLLAYDPYLSTERAEQLGCRLVELDVLFAESDFITLHLPKTPETQHLINAKTIAKMKPTARIINCARGGIIDEVALVEALKSGRLAGAALDVFENEPLEADSPLRSLGMEAILTPHLGASTEEAQVNVAIDVAEQIRDVLLGLPARSAVNIPGLRPDVLEKLAPYMQLAETLGNLVGQLAGGRVESLEVRLQGELATNESQPIVIAALKGLLSPALRERVNYVNAGLEAKERGIRVVETRDESQRDYAGSLTLIAKSPSMTRSVSGALLSHNELRITSIDDFPISVAPTRYMLLTLHRDMPGIIGKIGTQLGSFNVNIASMQVGRKMVRGNAVMVISLDDPLPEGLLEEILKVPGIRDAYIVNL

SEQ ID NO: 18704 - protein, 349 aa, Thermosynechococcus elongatus BP-1
MSNKGSSDLRLLLSTLVISGLVAGLAYWQLSQHWTRSPDQNAGSPLHTPTSKWQKIALAMTLRGHEDEVNAIALSPDGNFLVSAGDDRRLYFWNLATGTALGQAKGHTDWIYALVMTPDGQTVISGSKDKTIKLWGVGDRQLQATLSGHQDFVNGLALSPDGRTLASASYDHTVKLWNVPSRQEITTLKANEGIMLSVAISRDGRFLATGGVDKLIRIWDLPSRRLLRTLEGHTSDVNSLAFTPDSSQLVSGSDKDGIKLWNLTTGELQQQFGTEGGQVFSVAVSPDGSTLASGHGDQTVKLWSLSGQLLRNLKGHSGAVYSVVFGQDQLISASEDKTIKVWRLFPETP

SEQ ID NO: 18705 - protein, 314 aa, Thermosynechococcus elongatus BP-1
MAGWLGTYDFLLVSMTLGAMLALSLYLPLMSGQLSLASPAFYAIGGYIAALLSTRVFAGLNPYPLPLVLGEMVVAALVCGLLGWGLGVPVLRLRGIYFAIATIAFSEVLRVLALNLEVTGGAVGIFGIPQPFSTPLGYLWLTLPLLILVAIAIGRLEQTRAGKAMQAIRGDELVAQTLGIDTTRYKVLGFALGAILAGVAGVLAAHLLNTWNPRQGTFDTGVLALTAVLVGGNRTFVGAIAGGMLFTALPELLRGLADQAYLPPAVANFCRDGRLMLYGLLIILGTRFFPRGLCQPPRWRSLWSILLGPQPRKM

SEQ ID NO: 18706 - protein, 401 aa, Thermosynechococcus elongatus BP-1
MDFGIGFLSNNVMLPILDFFYGIVPSYGLAIVALTLVVRFAVYPLSAGSIRNMRRMKVVQPIMQKRMQEIQQKYKDNPAEQQKAMAEVYREFGNPLAGCFPLLLQLPILFALFATLRGSPFADVNYQINLQIVPPDQPVLAQPFATKPQNIYVDEGVHFPIQAVVPSGTRIPVGQMVDLQFQTKEGKPFSELVAAYPNSHLQPKWQIIRGQERATIDREGHLQALQPGEVTVQGTIPGIAADKGFLFISALGHVGVIDQGELFITLPDGARQFNWGAIHWDILVMILGFGVSLYVNQLLSGQGSSNNPQQQTVNQLTPIIFSGMFLFFPLPAGVLLYMLIANIFQTVQTFILQREPLPENLQKLVEEQERAEAIKNRAPLPFEGKGAKGAKATKAKGNPSS

SEQ ID NO: 18707 - protein, 384 aa, Thermosynechococcus elongatus BP-1
MKVGVVKEREVGEQRVALIPEVVAKLVQQGYHLWVESGAGDMAHFSDDDYRAAGAEIGYSIEEVWGSVDVLLKVAPLRDREVEWIRPGTTLMSFLNPLGNPWQMQHLAERHITAFALECIPRTSRAQSMDALSSQAAVAGYAAVLLAASHLPRFFPMLTTAAGTIPPAKVFVIGAGVAGLQAIATARRLGAVVEAFDIRPAVKEEVQSLGAKFVEVNLEEETGAAGSYAKEVSEAAKHKTQEAIAAHVHSADVIITTAQVPGKPAPLLITERMVASMKPGSVIVDLAAEQGGNCACTEPGRSICHQRVTIIGPINLPSTMAVHASQMYAKNISTLLKYVAPKGELVLNFGDDIVDAACVTHEGQVRNPRVLQLLHPAQTLAPML

SEQ ID NO: 18708 - protein, 401 aa, Thermosynechococcus elongatus BP-1
MGRAEKVILAYSGGVDTSVCIPYLQHEWGVKEVITLAVDLGQGDELEPIRQKALDAGASASLVADAKAEFIRNYAFPAIQANALYENRYPLSTALARPLIAKLLVEAATQYGADAVAHGCTGKGNDQVRFDVAIAALNPNLKVLAPAREWGMSREETIAYGERFGIPAPVKKSSPYSIDRNLLGRSIEAGPLEDPWMEPLEEVYWMTQAIEHTPNSPEYVDIGFEAGVPVSLDGRPLDPVTLVSELNERVGRHGFGRIDMIENRLVGIKSREIYEAPGLLVLIDAHRDLESLTLTADVMHYKRGIEETYSRLVYNGLWYSPLKEALDAFIQQTQQRVTGTVRVKLFKGTARVVGRQSPYSLYTPDLATYGAEDQFDHRAAEGFIYVWGLPTRVWAEKLRQG

SEQ ID NO: 18709 - protein, 631 aa, Thermosynechococcus elongatus BP-1
MKVSWKTVLLWSIPLLLIGILLWQGVSNFMLNQSQPPLNTASTRMSYGRFLSYLDAGRISKVDIFDNGRTAIVDVSDPELINGRPLRVRVDMPGTAPEVISKLREQHVEIDVHPARNDGALWGLLGNLLFPILLLGGLFFLFRRSSNVPGGPGQAINFGKSRARFQMEAKTGVMFDDVAGVDEAKEELQEVVTFLKKPEKFTAVGARIPKGVLLVGPPGTGKTMLAKAIAGEAGVPFFSISGSEFVEMFVGVGASRVRDLFRKAKENAPCLIFIDEIDAVGRQRGAGIGGGNDEREQTLNQLLTEMDGFEGNTGIIVIAATNRPDVLDAALLRPGRFDRQVIVDAPDIKGRLAILKVHARNKKLAPEVSLEAIARRTPGFTGADLANLLNEAAILTARRRKPAITMLEIDDAVDRVVAGMEGTPLIDGKSKRLIAYHEVGHAIVGTLLKDHDPVQKVTLVPRGQARGLTWFMPSEDSGLISRSQLMARMAGALGGRAAEYVVFGDAEVTTGAGNDLQQVTAMARQMVTRFGMSDLGPLSLETQNGEVFLGRDLVSRTEYSEEIAARIDAQVRELVQHSYELAIKIIRENRVVIDRLVDLLVEKETIDGEEFRQIVAEYTVVPDKERFVPQL

SEQ ID NO: 18710 - protein, 651 aa, Thermosynechococcus elongatus BP-1
MGKIIGIDLGTTNSCVAVLEGGNPVVIPNAEGGRTTPSIVAFGKSGERLVGQLAKRQAITNAENTIFSIKRFIGRRWEETAQERARVPYACVPGRDGMVDVQIRDRTYTPQEISAMVLQKLKQDAEAYLGEPVTQAVITVPAYFSDAQRQATKDAGAIAGLEVLRIINEPTAASLAYGIDKQDQDQTILVFDLGGGTFDVSILQLGDGVFEVRSTAGNNHLGGDNFDECIVDWLLACFKEQEGIDLSKDKMALQRLREAAEKAKVELSGTLSTSINLPFITADETGPKHLEMELTRSKFEELCAHLVQATLEPMQQAIADAGLTVEEIDRVLLVGGSTRIPAIQELVKQFCGKNPDRSVNPDEAVAIGAAIQGGILGKETTVKDLLLLDVTPLSLGLETLGGVFTKIIERNTTLPTSKTQTFSTASDGQTVVEIAVYQGERPIAKDNKQLACFELTGIAPAPRGVPQIDVTFDIDANGILSVSAVDRATGRQQSVRITNRGGLSSMEIERMRQEAQIYAQVDQIKKEIAELRNQADALLYSYESTIKNHGITLSPELRARIEPVVQSMQAAMVDDNITPDEIRKRMEALQQALVTLGSVVYQQTAGGSMMTSTPTMGRATMSSQATQVLDSEATIISDNEETVVSDYEAVD

SEQ ID NO: 18711 - protein, 121 aa, Thermosynechococcus elongatus BP-1
MQFCNWSTQEEKRTMTPELHAKIDNLVKSNKIIVFMKGSKLMPQCGFSNNAVQILNALGVPYETVDVLEDFEIRQGIKEYSNWPTIPQVFINGEFIGGSDILIELYQSGELQQLVEVALAS

SEQ ID NO: 18712 - protein, 389 aa, Thermosynechococcus elongatus BP-1
MQLYFDYGATTPCRAEALAAMAAAYEQQWGNPSSTHEWGQRAAIALEQARMQVAALIHAQADEIIFTSGGTEADNLALWGVCQRYRQPQHFIISAVEHSAVAKPAAALEAQGWQVTRLPVNHWGQVEPAQLRQALQPNTVLVSIIYGQSEVGTLQPITELAAICQEVGVLFHTDAVQVAGRVPLDVRRLGVDLLSLSSHKIYGPQGAGALYVRSGVALEPLLRGGGQELGLRSGTQAVPTLVGFGVAAEWAATELATEPMRLAQLRDRLWQQLQDHPQVEQTGHPWQRLPHHLSLIVRDRHGQPLNGKTVVRQLNLAGIGISAGSACQSGQTQPSPTLLAMGYDPETAKAGIRITLGRETTAADVDWLAMVLRQYLAEAIAPPLVVSIP

SEQ ID NO: 18713 - protein, 386 aa, Thermosynechococcus elongatus BP-1
MYNATNSRSRMFRYEVVGLRQTAETEKTNYAIRNSGSQFFNVPYDRMNQFMQQITRWGGKIVSIQPLNGTVAPLAATTEPAANNGAAPVKEKKVDIPVNIYRPNNPCIGKVISNEELVREGGEGTVKHIIFDISGTELRYLEGQSIGIIPAGTDANGKPHKLRLYSIASTRHGDFQDDKTVSLCVRRLEYKDKETGETIYGVCSSYLNQLQPGDEVKITGPVGKEMLLSDDPEATIIMLATGTGIAPFRAFLWRMFKENNPDYQFKGLAWLFFGVAYTANILYKDELEAIQAQYPDHFRLTYAISREQKTPDGGKMYIQGRIAEHADEIWQLLQKKNTHVYMCGLRGMEPGIDEAMTAAAAKNGADWQEFLKGTLKKEGRWHVETY

SEQ ID NO: 18714 - protein, 602 aa, Thermosynechococcus elongatus BP-1
MQATGAYILIDTLCRHGVKHIFGYPGGAILPIYDELYRAESKGIIQHILVRHEQGAAHAADGYARATGQVGVCFATSGPGATNLVTGIATAHMDSIPLLVITGQVPRSAIGTDAFQETDIFGITLPIVKHSYVVRAAKDMARIIAEAIYIATTGRPGPVLVDIPKDVGLEVCEYEPVEPGQVKLRGYRPTIRGNARQIAQAVQLIREAKRPLLYVGGGAITAGAHEEVLKLAELFQIPVTTTLMGKGAFPESHPLSVGMLGMHGTAYANFAVSECDLLIAVGARFDDRVTGKLDEFASRAKVIHIDIDPAEVGKNRVPDVPIVGSVKPVLQQLLKHIEDSGQAVEPQTQAWLERITIWKQDYPLIVPQPSGELSPQEVIVAFGRHAPDAYYTTDVGQHQMWAAQFLKNGPRRWISSAGLGTMGFGMPAAMGVKVALPDQQVICISGDASFQMNSQELATLAQYGIAVKTVIINNFWQGMVRQWQQAFYEERYSHSNMAEGMPDFVKLAEAYGVKGLRVSDRQDLDAIVQEVLAYDGPVLLDAHVTRDENCYPMVAPGKPNSQMLGLPEAKVLEKAAELVYCANCGAKTISTHRFCPECGSKL

SEQ ID NO: 18715 - protein, 416 aa, Thermosynechococcus elongatus BP-1
MVGYLISLGIFTATFALFSLGLNLHWGYTGLINFGHVGFLAIGSYTTILLGIAGVPMFFAVLAGVVLAMGLGFLMGMATLRLREDYLAIVTIGMAEIVRLIALNEDWLTRGGRGVYGFPLPLAQFNPNIPTKLGMIALFWAVVAGAGWQWWQWLQRQYGRSHPRWLLPSYATLLIAGSLSLWATLLPLSLGGGIAILPLVLTLVTLGGAIALLSNYCPPERRAVFPIALNTLAAALVGLVVKALTLGLWEFSYRAGLLWLLVLVLALVVWQLERWIHSPWGRVLKAIREDEEVAKALGKNVFAYKMQSLLLGGAIAAVAGSFYAWQLTFINPDGFVSLITFQAWTIVVLGGAGNNMGPLLGAALFWAYTALTRFIPLDGGRLEALRMMLIGLVLILLMMWRPQGILGKKEELSLGR

SEQ ID NO: 18716 - protein, 519 aa, Thermosynechococcus elongatus BP-1
MSNKIEAIKKEKDGLAVKQELEKFAAMGWENIPEADRDVRLKWLGIFFRPVTPGRFMMRLRVPNGILTSQQLRTLGAIVDRYGENGNGDITTRQNIQIRGLPIEDIPEIIEQLQACGITSVQSGMDNVRNLTGSPVAGIDAAELIDTRPLIMKLQAMITNNGQGNPEFSNLPRKFNIAIEGGRDNSVHAEINDVAFVPAYRQGRLGFNVLVGGFFSARRCAAAIPLDAWVPPDDAVVQLSRAILEIFRDHGPRGNRQKARLRWLIDEWGIEKFRAAVVAKLPFELLSAAAKDEIDWDKRDHLGVHRQKQRRLNYVGLHVPVGRLYATDFYELARLAQVYGQSEVRLTVEQNVIIPHVPDAVLPSLLREPLLSKFRPEPPPLERALVSCTGAEFCNFALIETKNRALALARWLDQQLVLPQPVRIHWTGCPNSCGQPQVADIGLMGTKTRRNGETVDAVDLYMGGKVGKDAKLGTCVKKAIPCDELPEVLRQVLIEQFGAQPRGSERPPVATPAVAMMVS

SEQ ID NO: 18717 - protein, 439 aa, Thermosynechococcus elongatus BP-1
MANFSRRRFLMTAAATTAVTLISHGCGNSQQSTDVVQPTTVAETPEVTGAKLGFIALTDAAPLIIAKEKGLFAKYGMPDVEVLKQASWGTTRDNLVLGSANGGIDGAHILTPMPYLMTVGKITGGKPVPMYILARLNTNGQGILLANAYKDLNISTDSRPLKEAFAKTRAERRARNQNEEIKVAVTFPGGTHDLWMRYWLAAGGIDPEKDVSMIVVPPPQMVANLKTGTMEAFCVGEPWPLQTVNQKVGYGAITTGELWQDHPEKSFALRADWVDQHPKATKALLMAVIEAQQWCDQDANKPEMAKILSKREWFKVPVEDILDRSLGKFDFGNGRILEDKNLMQKYWRDNASYPYQSHDLWFLTEDMRWGYLPPDTDAKALIQKVNREDIWREAAKTIGVSAAEIPTTTSRGVETFFDGVAFDPQNPQAYLNSLNLRKV

SEQ ID NO: 18718 - protein, 1541 aa, Thermosynechococcus elongatus BP-1
MQQSTVSSPVHPVGYHGQPWLVAERDACGVGFVAHRKGVASHRILTQALEGLTCLEHRGGCSADRDSGDGAGIMTAIPWELLPEFGIPRQRIGVGMIFLPQGAATAAAKAIVEKVLSENELRLLGWRPVPVNPSVLGVQAKQNQPQIEQLFVASSKASGDELERQLYLTRKRIERAIAHTKADWQRDFYICSFSTRTIVYKGMVRSVVLAQFYDDLRNPKYITPFALYHRRFSTNTMPKWPLAQPMRMLGHNGEINTLLGNINWMRARSAQLSHPYWGEAFTDLLPIVNAENSDSANLDNVLELLVQSGRQPLQAMMMLVPEAYQNQPDLADHPEVVDFYEYYSGLQEAWDGPALVAFSDGKIVGATLDRNGLRPARYILTSDDLVIVASEAGTIQIDEARVIAKGRLGPGQMIAVDLEHQELLTNWEIKQRVAQQQPYGEWLKAYRQELAPQPYGEAPTLDPQTCLQQQMAFGFSAEDVEMIIEAMAKEGKEPTFCMGDDIPLAVLSQQPHLLYDYFKQRFAQVTNPAIDPLREKLVMSLVTRLGKRGNLLVESPEHARLLQLNSPLINEAELEEILKAPFGATRLSTQFAIAQGPAGLEAAVDRLCEQAAAAVKGGAEILVLSDRHNLAGEPHLLDAETSYIPPLLAVGAVHHHLIAQGIRRRASLVVETAQCWSTHHFACLIGYGAGAVCPYLTWETIRQWWHSDRTQSLMAKGKLPQLTLQQVQANYRKAVEEGLLKILSKMGISLIASYRGAQIFEAIGIGDDLLNKAFIGTTSRVGGLTLQDLAQETIAFHHKAFPELTAKKLENFGFVQFRPGGEYHMNNPEMAKALHKAVSSNSYDHYEIYRRQLTGRVPTALRDLLDFQSDRPSIPLEAVEPASEIVKRFCTGGMSLGALSREAHEVLAIAMNRLGAKSNSGEGGEDPIRFQVLTDVDAEGHSPQFPHLRGLRNGDTASSAIKQVASGRFGVTPEYLINAQQIEIKIAQGAKPGEGGQLPGSKVSPYIAMLRRSKPGVSLISPPPHHDIYSIEDLAQLIFDLHQINPQAQVSVKLVAEIGIGTIAAGVAKANADVIQISGHDGGTGASPLSSIKHAGSPWELGLTEVHRVLLENQLRDRVILRVDGGLKCGWDVVMGALMGAEEFGFGSVAMIAEGCIMARICHTNNCPVGVATQKEDLRKRFPGLPEHVVNFFLFIAEEVRSILAKLGYRTLNEIIGRADLLVPRQNVTLTKTGPLNLACLTKLPDTRSDRRWLQHEPVHSNGTVLDDAILARPEVQAAIEKQQTVELELPIANTDRTVGARIAGVIAKKYGNTGFEGQITLNFRGSAGQSFGAFNLPGMILKLTGEANDYVGKGMHGGEIIIQPPANAPYAAADNVIIGNTCLYGATGGFLFANGRAGERFAVRNSKAYAVVEGTGDHCCEYMTGGVVVVLGTTGRNVAAGMTGGLAYILDEAGNFPAKVNPEIVKLQRVTSAIGAAQLKQLIIAHHERTGSAKAATILERWEQYLPLFWQVVPPSEANTPEVVGEAAPQTDSKVLSPLS

SEQ ID NO: 18719 - protein, 396 aa, Thermosynechococcus elongatus BP-1
MQVKGITKLPLSMTKKHPPIVGIAIAPLVKMMTSKFPLAINSILGEWLPKLEMIRSKSKRTPSWGDAVIHTAPLPTTTPSHTSDHSRLKLFSGSANIALAQEIARYLGIDLGPMVRKRFADGELYVQIQESIRGCDVYLIQPCCRPVNDHLMELLIMVDACRRASARQVTAVIPYYGYARADRKTAGRESITAKLVANLITQAGASRVLAMDLHSAQIQGYFDIPVDHVYGSPVLLDYLRSKNLEDIVVVSPDVGGVARARAFANKLDDAPLAIIDKRRQAHNVAEVMNVVGDVKGKTAVLVDDMIDTAGTILEGARLLRREGAKEVYACATHAVFSPPAIERLQGGDFEEVIVTNTIPVPETQRFPQLTVLSVASILGETIWRIHEDSSVSSMFR

SEQ ID NO: 18720 - protein, 285 aa, Thermosynechococcus elongatus BP-1
MATATILKPRPFLKWAGGKSQLLSQMAPYLPRQCRCYAEPFCGSAALYWYLFGQAQQGQFQFQQAWLSDRNPELINCYQIVRDRVEDLIQQLTEYRQQHSEAFYYHIRSWDQRQLDPLTRAARLIYLNKTCFNGLYRVNRAGQFNVPMGRYRNPQIFDPEALRQASIALQDVILSVADFQEVLTWATAGDFIYFDPPYYPLSKTASFTSYTDQPFGEAEQIALANVVAELAQRGCYVMLSNAWVEPMLQLYRSWRCIELKASRVINSNRHKRGKVSELLVVTYRC

SEQ ID NO: 18721 - protein, 304 aa, Thermosynechococcus elongatus BP-1
MGDLSVPRPFLKWAGGKTQLADALLEHKPVYFNTYHEPFVGSGAIFFRLYRENQVRRAILSDINAELIDTYLAIRDRVAEVIVLLSEFPHSEDFYYEIRAKDPWKLSLSERAARMIYLNKTGYNGLYRVNRQGKFNVPFGRYKAPKYLDKDNLLAVSHALRNVEILCAPFDTVTERAKPGDWVYFDPPYVPISQTSNFTSYYADGFGLQDQERLRDICITLSQNNVYITVSNSDTAIVRSLYKFPHFAIDEVLANRTINCNGARRGKITELVITNYPVNQAVQLHLTQSRLLSGAVKEILKNGG

SEQ ID NO: 18722 - protein, 243 aa, Thermosynechococcus elongatus BP-1
MPTGPYAIATLSIESPWIDRRLMNKDGPLAPVFRHMASGLFPSTTETYERGKTIFFPGDPAEKVYFLLKGAVKLSRVYEAGEEITVALLRENTVFGVLSLITGTRSDRFYHAVAFTNVELLAVPIEQVEKAMHEDPDLPMFMIQGLSSRILQTEMMIETLAHRDMGSRLVSFLLILCRDFGIPTSAGVTVDLKLSHQAIAEAIGSTRVTVTRLLGELRDQKMISIHKKKITVHNPLMLSQQFT

SEQ ID NO: 18723 - protein, 640 aa, Thermosynechococcus elongatus BP-1
MAKVVGIDLGTTNSCVAVMEGGKPTVIANAEGFRTTPSVVAYTKNGDRLVGQIAKRQAVMNPENTFYSVKRFIGRRFDEVTHEATEVSYKVLNVNGNVKLDCPALGKQFAPEEISAQVLRKLKEDASKYLGEEVTQAVITVPAYFNDSQRQATKDAGKIAGLEVLRIINEPTAASLAYGLDKKANETILVFDLGGGTFDVSILEVGDGVFEVLATSGDTHLGGDDFDKKIVDYLAESFRAQEGIDLRKDRQALQRLTEAAEKAKIELSSVMQTEINLPFITATQDGPKHLDMTLTRAKFEELCSDLIDRCRVPVEQALKDAKLSKDQIDEVVLVGGSTRIPAIQELVKRLLGKDPNQSVNPDEVVAVGAAIQAGVLAGEVKDILLLDVTPLSLGVETLGGVMTKIIPRNTTIPTKKSEVFSTAVDGQTNVEIHVLQGEREMAADNKSLGTFRLDGIPPAPRGVPQIEVTFDIDANGILNVTARDKGTGKQQSISITGASTLPKEEVERMVREAEMNAAADKAKREKIETKNQAEQLCYQAEKQLNELGDKVSTSDKDRLTSLIANLRSEIGTEAEKKPIDAIDFGRVKSLMQDLQQALYSVGSSVYQSAQSSDGTGSSSSGGSGSGGDDEVIDAEFSETK

SEQ ID NO: 18724 - protein, 552 aa, Thermosynechococcus elongatus BP-1
MPAIAHPMNTAELLVKCLENEGVEYIFGLPGEENLDVLHALHRSRIQFITTRHEQGAAFMADVYGRLTGKAGVCLSTLGPGATNLMTGVADANLDGAPLVAITGQVGTDRMHIESHQYLDLVAMFSPVTKWNAQIVRPSITPEIVRKAFKIAQNEKPGAVHIDVPENIAAMEAEGAPLKPSSPEKTYASFQSILKAAELINAAENPLILVGNGAIRAHAAAALTHFAEKLNIPVANTFMGKGVIPYQHPLALWTVGLQQRDYISCGFDHADLVIAVGYDLIEYSPKSWNPEGRLPIIHIAATPAEIDSSYIPVVEVVGDISDSLYEILKRADRQDKPTPYAVQLRQEIVADYYQYAQDESFPVKPQKLIYDLRQVMGPEDIVISDVGAHKMWIARHYHCDRPNTCLISNGFAAMGIAVPGAMAAKLVYPQRHVVAVTGDGGFMMNFQELETALRMGTNFTTIIFNDGGYGLIEWKQQRYFGESAYVHFSNPDFVKLAESMGLKGYRIEETTDFIPTLKTALAQNVPTLIDVPVDYSENLRFNQRLGELSCTP

SEQ ID NO: 18725 - protein, 644 aa, Thermosynechococcus elongatus BP-1
MSMKYAQRLCQRLSQLALVVGFSLAPTNIGLAQSSNNNTVSYTQFLNALKAGEVRSVELYQEQGLAKFRRKNQPEQSPPQEVRLFDRNPELVELLRQVSSRYDTTVRVVASGNESAVVGLVSNLMLGFLLLIVFLMILQRVSNAPGGPGQILNFGKSRARFQMEAQTGVTFGDVAGIEEAKEELQEVVTFLKNSEKFTSIGARIPKGVLLIGPPGTGKTLLAKAIAGEAGVPFFSISGSEFVEMFVGVGASRVRDLFRKAKENAPCLVFIDEIDAVGRQRGAGIGGGNDEREQTLNQLLTEMDGFEGNTGIIVIAATNRPDVLDAALLRPGRFDRQITVDLPSYKGRLQILQVHARNKKIAPEVSLEAIARRTPGFSGAELANLLNEAAILTARRRKPAITNAEIDDAIDRVTIGMTLTPLLDSKKKWLIAYHEVGHALLMTLLKHADPLNKVTIIPRSGGVGGFAQQIFDEERVDSGLYTRAWLLDEITILLGGRAAEVEIFGDAEVTVGASSDLRAVANLAREMVTRYGMSDLGHLALETTGNEVFLGRDLMPRAEYSEAVAVQIDHQVREIVMHCYEIARKLIREHRVAIDKLVELLLEKETIDGDEFRALVRQYTTLPVKDPPWKATATPVSFRQDAERS

SEQ ID NO: 18726 - protein, 599 aa, Thermosynechococcus elongatus BP-1
MGLIVQKYGGTSVGSVERIQAVARRVKATVAAGHQVVVVVSAMGKTTDSLVQLAYAISDRPSQREMDMLLSTGEQVSIALLTMALHALGEPAISLTGAQVGIVTEPAHTRARILHIETQRLERHLKAGQVVVVAGFQGITAATDFEVTTLGRGGSDTSAVALAAALRADCCEIYTDVPGILTADPRLVPNAQLMSEITCDEMLELASLGAKVLHPRAVEIARNYGVDLVVRSSWTDDPGTRVIAPARPPRPVENLELGKPVDGVALDTDQAKVALLRVADRPGVAAQLFGELARQNLDVDLIIQSIHEGQTNDIAFTVQKSVLKQAEAIAVAFYPRLSPRVEETDVLVDADIAKVSITGAGMIGRPGVAAQMFSALAAAGINLQMISTSEVNVSCTVAAADAGRAIAVLSQTFDVEAATTVPQNPPAAPPVRGVALDPKQARIAIRDVPDRPGMAAAIFQTLADAAISVDMIIQSQRSRSLGGVMTRDIAFTVASTDAEDATELLRKVQAQLGYGDVLVDTAIAKVSIVGVGMIHRPGIAAQMFAALARENINIQMIATSEIRVSCVVAESEGVRALRAVHRAFGLDGEAPVAIPDVGK

SEQ ID NO: 18727 - protein, 437 aa, Thermosynechococcus elongatus BP-1
MEPLLRALWGTALEQDLSELPGLDNLAQPTGVLAEAQAVVAATVGSDRAWFLVNGATGGLLAALLATVGPGDRVLVGRNVHRSVIAGLVLAGAKPVYLGVGVDPQWGLPWPVTRDVVAAGLAAYPDTKAVVLVSPTYEGLCSPLLEIAQCVHNHGVPLIVDEAHGSHFAYHPAFPVTALAAGADVVVQSWHKTLGTLTQTAVLHLKGERVSAERLSQALNLVQTSSPNYWLLAALEGAGVQMAQQGEQIYGRLLQWVKTFEWPLPRWQPPGIPQDPLRLTLGTWPIGLTGFALDELLQPQIIAEFPSGRSLTFCLGLGTTQTMLETLADRLKSVYTEYCHNAPLPPLAIPSIPSCQEPALSPREAYFCPQRSIPLRAALNEISAETIAPYPPGIPTVIAGERFTESVIATLQTLQELGAEMVGASDPTLQTLRICKV

SEQ ID NO: 18728 - protein, 205 aa, Thermosynechococcus elongatus BP-1
MGSNYQNQQNSDEQPWEEEDFAEEMEQLRLYDDEGRFLDCYVEFRLNVQGETYALLRPVDYPVEIFAVVAENDEEETLVPLEEEEIDQVFDTARAILEEQNLTLKRTALTLTVAGELPDLDEDEILTVEVEADDGIEEYQPLGSSFFYEAREYSVYTPLSPTLYVARLVPGQEPQLLSPHEFQHLQPLLEQHLVTHLLEEEDWED

SEQ ID NO: 18729 - protein, 260 aa, Thermosynechococcus elongatus BP-1
MIRPDSEVILEVRELTASVEDTPILKGLNLTIRAGEIHAIMGPNGSGKSTFSKILAGHPDYTVTGGEVLYKGKNLLDLPPEERAREGVFLAFQYPLEIPGVSNLDFLRVAYNAKRKHQGLEELDAFDFDDLVRQKIELVKLEEGFLQRGVNEGFSGGEKKRNEILQMALLEPTLAILDETDSGLDIDALRIVANGVNQLTRPDNCILLITHYQRLLDYIVPDYVHVMEGGRIVLTGPKELALELEARGYDWVREEEVAAS

SEQ ID NO: 18730 - protein, 481 aa, Thermosynechococcus elongatus BP-1
MKAMSKLKLKRARRQKRPLLNLDWQPNFRWRSPALVACIPLALIIVAVWGVAAQAQDKPLTPEDVQGVLNTIWVLVAAILVIFMNAGFGMLETGFCRQKNAVNILAKNLIVFALATLAYWAIGYSFMFGTEGNAFIGWGGFFLSSEDPATYGLNPFPKGLPISVAFLFQAAFAGTAATIVSGAVAERIKFVDFLIFSLLLTGISYPITGHWVWGGGLLSSIGFLGENVAFKDFAGSTVVHAVGGWSALMGAAFLGPRIGKYAADGTPQALPGHNMGFAMLGCLILWIGWFGFNPGSQLAADEAVPYIAVTTNLAAAAGGVAATITAWLAIGKPDLSMIINGILAGLVSITAGCAGVSYWSAVIIGTIGGVIVVYSVLFFDRIKIDDPVGATSVHLVCGTWGTLAVGLFDKELGLFSGYGVTQLIAQIIGILTIGGFTVLLTSIFWLALKQTLGIRVSEEEEIKGLDIGEHGMEAYSGFLKE

SEQ ID NO: 18731 - protein, 382 aa, Thermosynechococcus elongatus BP-1
MRTSFSLFVPVTAAFSSLCIAPAHVYRGWSILSQAGEAIAQLGHHPLLVVSPQRYQQLEQEWQAIARSHDLSFTVGTFHGECSESTLAQLRQEAQGSDLIIGIGGGKALDTAKLLGHQLHLPVVTIPTSAATCAAWTALANIYTEAGAFAYDVALRQCPNLLLLDYALIQTAPKRTLLAGIGDALAKWYEASVSSGHRQETLIVAAVQQARVLRDILLQQSAEALANVGSPAWENVVDASVLMAGIIGGLGGAQCRTVAAHAIHNGLTQLPQSKGTLHGEKVAYGILVQLRLEEMVQGSQLATSARHQLCQFYEQVGLPLSLEDLGLQEASLAQLQHAATVACGPNSDIHYLPFPVTPDLVLEAMVSTVVGYRDKVLDGSAR

SEQ ID NO: 18732 - protein, 363 aa, Thermosynechococcus elongatus BP-1
MRIGVPKEIKDQEFRVGLTPAGVQSLRERGHEVLIESGAGVGSGFLDEAYVAAGAQIVPTAQAAWDAQLVVKVKEPLPSEYRYLRSGQFLFTYLHLAASRELTVALLESGTTAIAYESVEETHHDQRSFPLLTPMSMIAGRLAVQFGARFLERTQGGRGVLLSGVPGVRPGRVVILGGGVVGTEAARMAVGLGAQVSILDINIERLKYLETLFGARVEYLYSSSHVIAERLPEADLVIGAVLVPGRRPPCLVPKSLVQRMQPGAVIIDVAVDQGGCVETLRPTTHSNPTYTAFGVVHYGVPNMPGAVPWTATQALTNSTLPYILCLADHGDRALEISPALAKGLVVKQHHLVHPDVRVVFPDL

SEQ ID NO: 18733 - protein, 196 aa, Thermosynechococcus elongatus BP-1
MPRPAVFLDRDGVLNQEVGYIHRLEDLQLIPGVAQAVRRLNDAGWFCCLASNQSGPARDYYSIDHVHALHHRLQELLAASAGAVLDAVYFCPDLSRPEGGVVADYAGWTTWRKPNTGMLVAAAWDHDLDLSRSVMVGDKATDIDLARNAGCYGILVQTGFGDRVLEGSYQHASQPDYIAEDLAAAVEWICTHLAPR

SEQ ID NO: 18734 - protein, 415 aa, Thermosynechococcus elongatus BP-1
MITVLVLNAGSSSLKASLYRLAPEIGATAVRPPAPLWQGLLDWGQNPTVARLKVTTANQHYEANLTHPEGGIAGLRDWLKSLLDTLTSGQTKLLENLAEITIIGHRVVHGGSRYQAPVRVDAQVKAAISELSEYAPLHNPANLLGMELMADICPQTPQVAVFDTAFHAQLPAVARTYAIPYELTTAGIQRYGFHGISHQYVSERAATLLQRPLAELHLITCHLGNGCSLTAVKGGVSVETTMGFTPTAGVMMGTRCGDIDPGILLYLLRRGWTVAELDRLVNRQSGLLGVSGVSNDLRQILAAIDQGNPQAQLAYDCFIYSLQRGIASLLPALGRLDGLVFTAGIGENAPGVRRDICRGLGWLGIELDSTANEKGQGDRNIALPTAPVSVLVVQTQEDWAIARACGQLLSLPISS

SEQ ID NO: 18735 - protein, 333 aa, Thermosynechococcus elongatus BP-1
MQFIDLAEIHVKAGKGGDGIIAFRREKYVPAGGPSGGNGGNGGSVILKAVSNLQTLLDFRYAHVFKAENGQRGGPNNRTGACGADLVIEVPCGTMVWDAETGELLGDLTTPGQTLLVAKGGKGGLGNKHFLSNHQRAPDYALPGLEGEERHLRLELKLLAEVGIIGLPNAGKSTLISVLSAARPKIADYPFTTLVPNLGVVRQPNGDGTVFADIPGLIAGAHTGLGLGHEFLRHIERTRLLLHLIDATAEDVVAAYQTIRDELVAYGHGLGDRPQIVALNKIDALDASQITTLQETLAAYVGQRVFAISAVARQGLEPLLEAVWQELGVSVSH

SEQ ID NO: 18736 - protein, 387 aa, Thermosynechococcus elongatus BP-1
MDWATRVMRVTPSVTLAIDAKAKAMRAAGEDVCSFSAGEPDFDTPAHIREAVKTALDQGKTRYGPAAGEPALRQAIATKLNRDNHLPYRAENILVTNGGKQALFNLMLALINPGDEVIIPAPYWVSYPEMVHLASGTPVIVATTPETGYRITPAQLEDAITPKTRLVVLNSPSNPTGMVYTPEEIRELAAVIVRHQLWVVSDEIYEKILYDGAEHLSIGAVSGAAFERTIVCSGFAKAYAMTGWRVGYLAGTTEIVKVATKIQSHSTSNVCTFAQYGALAALEGSQDCVAEMVAAFRERRAYMYAGICEIPRLRCLKPKGAFYLFVDIGDTGIGSVEFCDRLLEEEKVAAVPGKAFGMDDHIRLSYATDLATIEKGLTRLAKFVQRL

SEQ ID NO: 18737 - protein, 251 aa, Thermosynechococcus elongatus BP-1
MSVTLETHKEKILVVDDEASIRRILETRLSMIGYTVVTAADGEEALTKFRQEQPDLVVLDVMMPKLDGYGVCQELRKESDVPIIMLTALGDVADRITGLELGADDYVVKPFSPKELEARIRSVLRRIEKTSTSGIPSSGVIQVGNIRIDTNKRQVYKGDERIRLTGMEFMLLELLVGRSGEPFSRAEILEQVWGYTPERHVDTRVVDVHISRLRAKLEEDPSNPELILTARGTGYLFQRITEPGEASNKNQ

SEQ ID NO: 18738 - protein, 163 aa, Thermosynechococcus elongatus BP-1
MYKKILVAVDDSELGEQVFQTALDLAQHYQARMMLIHVLSPTHESYPDPIFTTPLASGVYVGLHEEVMRAYAEQWENFEQKGLDMLRNLTQIATEKGVPTEFTQALGDAGRAICDLAKDWESDLIVLGRRGLKGLSEFFLGSVSNYVLHNAHCCVLTVQRRRD

SEQ ID NO: 18739 - protein, 510 aa, Thermus thermophilus
MEFKDFPLKPEILEALHGRGLTTPTPIQAAALPLALEGKDLIGQARTGTGKTLAFALPIAERLAPSQERGRKPRALVLTPTRELALQVASELTAVAPHLKVVAVYGGTGYGKQKEALLRGADAVVATPGRALDYLRQGVLDLSRVEVAVLDEADEMLSMGFEEEVEALLSATPPSRQTLLFSATLPSWAKRLAERYMKNPVLINVIKDEPVTYEEEAVPAPVRGRLEVLSDLLYVASPDRAMVFTRTKAETEEIAQGLLRLGHLAQALHGDLSQGERERVLGAFRQGEVRVLVATDVAARGLDIPQVDLVVHYRLPDRAEAYQHRSGRTGRAGRGGRVVLLYGPRERRDVEALERAVGRRFKRVNPPTPEEVLEAKWRHLLARLARVPEKDYRLHLDFAGRLFSEGRVEVVAALLALLLGGAPKEKSLLTGEEGWRTYKATGPRLSLPRLVALLKGQGLEVGKIAEAEGGLYVDLRPEARPEVAGLRLEPARRVEGLLEIPSRTRRPARA

SEQ ID NO: 18740 - protein, 153 aa, Lupinus luteus
GVLTDVQVALVKSSFEEFNANIPKNTHRFFTLVLEIAPGAKDLFSFLKGSSEVPQNNPDLQAHAGKVFKLTYEAAIQLEVNGAVASDATLKSLGSVHVSKGVVDAHFPVVKEAILKTIKEVVGDKWSEELNTAWTIAYDELAIIIKKEMKDAA

SEQ ID NO: 18741 - protein, 153 aa, Lupinus luteus
GALTESQAALVKSSWEEFNANIPKHTHRFFILVLEIAPAAKDLFSFLKGTSEVPQNNPELQAHAGKVFKLVYEAAIQLEVTGVVVSDATLKNLGSVHVSKGVADAHFPVVKEAILKTIKEVVGAKWSEELNSAWTIAYDELAIVIKKEMDDAA

SEQ ID NO: 18742 - protein, 330 aa, Arabidopsis thaliana
MEARCDFCGTEKALIYCKSDSAKLCLNCDVNVHSANPLSQRHTRSLLCEKCSLQPTAVHCMNENVSLCQGCQWTASNCTGLGHRLQSLNPYSDCPSPSDFGKIWSSTLEPSVTSLVSPFSDTLLQELDDWNGSSTSVVTQTQNLKDYSSFFPMESNLPKVIEEECSGLDLCEGINLDDAPLNFNASNDIIGCSSLDNTKCYEYEDSFKEENNIGLPSLLLPTLSGNVVPNMSLSMSNLTGESNATDYQDCGISPGFLIGDSPWESNVEVSFNPKLRDEAKKRYKQKKSKRMFGKQIRYASRKARADTRKRVKGRFVKSGETFEYDPSLVM

SEQ ID NO: 18743 - protein, 1123 aa, Glycine max
MVPPVIHQICFGHSNAAVNNGKSLVDFVEHKTDEELWLSIELALVRMILHIFYCNNGVISLRRWLQRWWWASTPVRNRTKLSHSGENPNPTRMNLVRDGDVPEQDDVVVVEDLAVTTVVGAEQQRVTFQVVQEGVILERFSQCSGNLIQRSGLFYPGDFMVDSLLAQFLCNATKRFKESDIVCDSTKIEFEEHGGVERVKTKLRSMESGIHGSLGCGEVGHGGLEAVQAGERFDICHGRATEKGAALSMDTTDTRIALGSILILLLMCLSNLSIAEVIYSPDELLSINCGSSSNFSSRDGRNWTVDINFLIAESRVNSVAAPALTPTTQEGPYTYARLSRSQFTYSFPVTAGPKFLRLFFHSTSYHNFDRPNAYFSVKAGSYTLLRDFNASLNADADDGPGQTDILFREYCINLEDGQKQLNITFIPSKTAQHPYSYAFINGIEIVSMPPYLYYTNPDVDISGEPQIVGGGTSTIENNSALETMYRLNAGGRTIPSSEDTGMLRTWDADDKYLTIKPTSLSVDYGKSTKLSFTAMVPNYTAPDEVYRTVRGMGTNFSVNMGFNLTWKLPVDSRFTYLFRLHFCQLDPQVTDAGDLEFYIYIEDQLVNDRADVLFWTDNQKGVPVVRDYIVTITGNQKKSNLSLKLHPHPQSMFKDANINAIELFKMDDSTGNLAGPNPDPPLQAPDHNGSLENSKKKSSGTTRTLAAVAGAVSGVILLSFIVASFLVKRKKNASVHKGSKQNYGTSRGGGSSSLPTNLCRHFSIAEIRAATNNFDELFVVGVGGFGNVYKGYIDDGSTPVAIKRLKPGSQQGVQEFMNEIEMLSQLRHLHLVSLIGYCYESDEMILVYDFMDRGTLSDHLYDSDNSSLSWKQRLQICLGAARGLHYLHTGAKHMIIHRDVKSTNILLDEKWVAKVSDFGLSRIGPTGSSMTHVSTLVKGSIGYLDPEYYKRQRLTEKSDVYSFGVVLLEVLCGRQPLIRTAEKQKMSLVDWAKHHYEKGFLGEIVDPSLKGQIAAECLRKFGEVALSCLLEDGTQRPSMNDIVGMLEFVLQLQDSAVNGVVPLLVSGGDCEDSEDMFSSTHSSIQLSDYSNSTGLNTSSYGSKESDRLIRENVFSEIKDPKGR

SEQ ID NO: 18744 - protein, 875 aa, Glycine max
MQHGISVEVENPNGRSMLQYQKRRDFPIDSNKKYCYTLSTEERRRYLVRATFQYGSLDSGDTYPQFQLYLDATKWATVSIYDASRVYVKEMIIRAPSNSIDVCMCCATTGSPFISTLELRPLNLSMYATDFEDNFFLEVAARINFGAPTEDAVRYPDDPYDRIWDSDLIKRQNYLVGVAPGTERISTTKNIDIETREYPPVKVMQSAVVGTKGVLSYRLNLEDFPANARAYAYFAEIEDLGQNESRKFKLKQPYIADYSNAVVNIAENANGSYTLYEPSYMNVTLEFVLSFSFVMAPDSTRGPLLNALEISKYVQIASKTDKQDSTVVTAFQLLSAESSQTNEGDPCVPTPWEWVNCSTTTPPRITKIILSRRNVKGEISPELSNMEALTELWLDGNLLTGQLPDMSKLINLKIVHLENNKLTGRLPSYMGSLPSLQALFIQNNSFSGEIPAGLISKKIVFNYDGNPELYRGNKKHFKMVVGISIGVLVILLILFLVSLVLLLKTRRKASQKKREEKGISGRTNSKPGYSFLRGGNLMDENTTCHITLSELKEATDNFSKKIGKGSFGSVYYGKMRDGKEIAVKSMNESSCHGNQQFVNEVALLSRIHHRNLVPLIGYCEEECQHILVYEYMHNGTLRDHIHESSKKKNLDWLTRLRIAEDAAKGCNPSIIHRDIKTGNILLDINMRAKVSDFGLSRLAEEDLTHISSIARGTVGYLDPEYYASQQLTEKSDVYSFGVVLLELISGKKPVSSEDYGDEMNIVHWARSLTRKGDAMSIIDPSLAGNAKTESIWRVVEIAMQCVAQHGASRPRMQEIILAIQDATKIEKGTENKLKSSSFSGSSSSKPQHSSRKTLLTSFLEIESPDVSNGCLPSAR

SEQ ID NO: 18745 - protein, 882 aa, Glycine max
MQHGISVEVENPNGRSMLQYQKRRDFPIDSNKKYCYTLSTEERRRYLVRATFQYGSLDSGDTYPQFQLYLDATKWATVSIYDASRVYVKEMIIRAPSNSIDVCMCCATTGSPFISTLELRPLNLSMYATDFEDNFFLEVAARINFGAPTEDAVRYPDDPYDRIWDSDLIKRQNYLVGVAPGTERISTTKNIDIETREYPPVKVMQSAVVGTKGVLSYRLNLEDFPANARAYAYFAEIEDLGQNESRKFKLKQPYIADYSNAVVNIAENANGSYTLYEPSYMNVTLEFVLSFSFVMAPDSTRGPLLNALEISKYVQIASKTDKQDSTVVTAFQLLSAESSQTNEGDPCVPTPWEWVNCSTTTPPRITKIILSRRNVKGEISPELSNMEALTELWLDGNLLTGQLPDMSKLINLKIVHLENNKLTGRLPSYMGSLPSLQALFIQNNSFSGEIPAGLISKKIVFNYDGNPELYRGNKKHFKMVVGISIGVLVILLILFLVSLVLLLKTRRKASQKKREEKGISGRTNSKPGYSFLRGGNLMDENTTCHITLSELKEATDNFSKKIGKGSFGSVYYGKMRDGKEIAVKSMNESSCHGNQQFVNEVALLSRIHHRNLVPLIGYCEEECQHILVYEYMHNGTLRDHIHESSKKKNLDWLTRLRIAEDAAKGLEYLHTGCNPSIIHRDIKTGNILLDINMRAKVSDFGLSRLAEEDLTHISSIARGTVGYLDPEYYASQQLTEKSDVYSFGVVLLELISGKKPVSSEDYGDEMNIVHWARSLTRKGDAMSIIDPSLAGNAKTESIWRVVEIAMQCVAQHGASRPRMQEIILAIQDATKIEKGTENKLKSSSFSGSSSSKPQHSSRKTLLTSFLEIESPDVSNGCLPSAR

SEQ ID NO: 18746 - protein, 751 aa, Glycine max
MEIISVAESGVTHVCLVNKGAGTPFISGLELRPLNSSIYSTEFGESASLSLFKRWDIGSLNGSGRYEDDIYDRIWSPFNSSSWESVSTSTPINVNDDGFRPPFEVIRTAARPRNGSDTLEFSWTPDDPSWKFYVYLYFAEVEQLEKTQLRKFNISWNGSPLFDDSLVPRHLFATTLSNSKSLVANEHRISIHKTKDSTLPPILNAVEIFVARQLDALATFEQDVDAILSIKESYRIQRNWVGDPCEPKNYSWEGLKCNYSTSLPPRIISLNMSSSSLSGIITSAISNLSSLESLDLHNNSLTGTMPQFLEELKSLKYLDLKDNQFSGSVPTILVERSRDGLLTLRVDDQNLGDSGGNNKTKEIVIPIVVSVSVLVIVVAFILFWKLRRNERSDEEISTLSKGGTTVTTKNWQYSYSEVLDITNNFEMAIGKGGFGTVYCGKMKDGKQVAVKMLSPSSSQGPKEFQTEAELLMTVHHKNLVSFVGYCDNDNKMALIYEYMANGSVKDFILLSDGNSHCLSWKRRIQIAIDAAEGLDYLHHGCKPPIIHRDVKSANILLSEDLEAKIADFGLSREFRTDNQDQQSQVIHSDATNEKSAVMGTTGYLDPEYYKLGTLNEKSDIYSFGIVLLELLTGRPAILKGNGIMHILEWIRPELERQDLSKIIDPRLQGKFDASSGWKALGIAMACSTSTSTQRPTMSVVIAELKQCLKLESPSDTSEKFVAPPKQVYGEFYSSSEAFSYDSQSITYPFPR

SEQ ID NO: 18747 - protein, 898 aa, Glycine max
MRMSRSFLVAFLGCLLLAVPIQAQDQSGFLSIACGAPAGVNFTVPITGLNYTSDANFINTGVKSTIVSELRDQFQRHVWNLRSFPEGKRNCYKINITRGSKYLIRASFLYGNYDGLNMLPQFDLLLGANRWRTVNIKNASVSRHFEIIYVPSLDYVHICMVDTGLGTPFISAIELRSLRNDIYETEFGSLEKYIRRDLGSNKGYRYDDDVYDRYWNYDDADTWYDNVDKWKQLNFPIDADSLVQKQYQPPAVVMSTAVTPANVSAPLVISWEPYDPKDSFYVYMHFTEIQVLAKNQTREFNITLNGKLWYENESPRYHSVDTIYTPSGISGKLINFSFVMTETSTLPPIINAIEIYRVKEFPQQDTYQGDVDAITTIKSVYGVTRDWQGDPCSPKDYLWEGLNCTYPVIDSPRIITLNLSSSGLSGKIDPSILNLTKLEKLDLSNNSLNGEVPDFLSQLQYLKILNLENNNLSGSIPSTLVEKSKEGSLSLSVSQNPYLCESGQCNFEKKQKNIVTPPIVPSISGALILIVAVAILWTLKRRKSKEKSTALMEVNDESEILRLRSTKKDDSLAQVKKQIYSYSDVLKITNNFNTIIGKGGFGTVYLGYIDDSPVAVKVLSPSAVHGFQQFQAEVKLLIRVHHKNLTSLIGYCNEGTNKALIYEYMANGNLQEHLSGKHSKSTFLSWEDRLRIAVDAALGLEYLQNGCKPPIIHRDVKSTNILLNEHFQAKLSDFGLSKAIPIDGESHVSTVVAGTPGYLDPHYHKFSRLTQKSDVFSFGVVLLEIITNQPVMERNQEKGHISGRVRSLIEKGDIRAIVDSRLEGDYDINSAWKALEIAMACVSQNPNERPIMSEIAIELKETLAIEELARAKHCDANPRHLVEAVSVNVDTEFMPLAR

SEQ ID NO: 18748 - protein, 1009 aa, Glycine max
MEVALLLAFVGKLRRHFLLLVVGMVLVLFLSPFVSPLGDEGQALMKIKSSFSNVADVLHDWDALHNDDFCSWRGVLCDNVSLSVLFLNLSSLNLGGEISPAIGDLVNLQSIDLQGNKLTGQIPDEIGNCAELIYLDLSDNQLYGDIPFSISNLKQLVFLNLKSNQLTGPIPSTLTQISNLKTLDLARNRLTGEIPRLLYWNEVLQYLGLRGNMLSGTLSSDICQLTGLWYFDVRGNNLTGTIPDSIGNCTNFAILDLSYNQISGEIPYNIGFLQVATLSLQGNRLTGKIPEVIGLMQALAILDLSDNELIGPIPPILGNLSYTGKLYLHGNMLTGPIPPELGNMSRLSYLQLNDNQLVGQIPDELGKLEHLFELNLANNHLEGSIPLNISSCTALNKFNVHGNHLSGSIPLSFSRLESLTYLNLSANNFKGSIPVELGHIINLDTLDLSSNNFSGHVPGSVGYLEHLLTLNLSHNSLQGPLPAEFGNLRSIQIIDMSFNYLLGSVPPEIGQLQNLVSLILNNNDLRGKIPDQLTNCLSLNFLNVSYNNLSGVIPLMKNFSRFSADSFIGNPLLCGNWLGSICDLYMPKSRGVFSRAAIVCLIVGTITLLAMVTIAIYRSSQSTQLIKGSSGTGQGMLNIRTAYVYCLVLLWPPKLVILHMGLAIHTFDDIMRVTDNLNEKYIVGYGASSTVYKCVLKNSRPIAIKRLYNQHPHSSREFETELETIGSIRHRNLVTLHGYALTPNGNLLFYDYMENGSLWDLLHGPSKKVKLDWEARMRIAVGTAEGLAYLHHDCNPRIIHRDIKSSNILLDENFEARLSDFGIAKCLSTARTHASTFVLGTIGYIDPEYARTSRLNEKSDVYSFGIVLLELLTGKKAVDNDSNLHHLILSKADNNTIMETVDPEVSITCMDLTHVKKTFQLALLCTKKNPSERPTMHEVARVLASLLPAPPSKNIFVPSSKTIDYAQFVIQKGKQNNLHPLQMDRLQPQQFSNDQWFVRFEDVVSNNSL

SEQ ID NO: 18749 - protein, 117 aa, Mangifera indica
IRFNKVFNKGMSDHSTITMKKILETYTGFEGLKSLVDVGGGTGAVINTIVSKYPTINGINFDLPHVIEDAPSYPGVEHVGGDMFVSIPKADAVFMKWICHDWSDEHCMKFLKNCITS

SEQ ID NO: 18750 - protein, 420 aa, Saccharomycetales
  misc_feature (113)..(113): Xaa can be any naturally occurring amino acid
  misc_feature (115)..(115): Xaa can be any naturally occurring amino acid
  misc_feature (128)..(128): Xaa can be any naturally occurring amino acid
  misc_feature (156)..(156): Xaa can be any naturally occurring amino acid
  unsure (1)..(420): unsure at all Xaa locations
KIKDPKILGIDPNVTQYTGYLDVEDEDKHFFFWTFESRNDPAKDPVILWLNGGPGCSSLTGLFFELGPSSIGPDLKPIGNPYSWNSNATVIFLDQPVNVGFSYSGSSGVSNTXAXKDVYNFLELFFDXFPEYVNKGQDFHIAGESYAHGYIPVFAXEILSHKDRNFNLTSVLIGNGLTDPLTQYNYYEPMACGEGGEPSVLPSEECSAMEDSLERCLGLIESCYDSQSVWSCVPATIYCNNAQLAPYQRTGRNVYDIRKDCEGGNLCYPTLQDIDDELNQDYVKEAVGAEVDHYESCNFDINRNFLFAGDWMKPYHTAVTDLLNQDLPILVYAGDKDFINNTLGNKAWTDVLPWKYDEEFASQKVRCWTASITDEVAGEVKSYKHFTYLRVFNGGHMVPFDVPENALSMVNEWIHGDFSL

SEQ ID NO: 18751 - protein, 507 aa, Pholiota nameko
MDTRDVLNTSSGRIVASTYDRADLAFIAVAGAMVFFMVPGLAFLYSGLSRRKSALSLIWAVAASNAIVIFQWYFWGYSLAFSSTATNGFIGNLKNFGLMGVEDDPAPGTPLIPEILYSFFQMEFTCVTAGILMGGLAERGRVLPAMVFIFCWVTIVYCPLACWIWSTHGWAFKWGALDFAGKFLRGGPVEIGSGVAGLAYSWVLGRRNERELLNFRPHNVSLVGLGTFILWFGWLGFNGGSAFGANLRAFFAIWNTMVAAAFGGMVWCLLDFRIERRWSMVGFCSGTIAGLVAATPSSGYVRPWGSVVIGILAGGICNFATKVKLIMGIDDALDLFAEHAVGGIVGLIMNAFFASGTITGMDDVNVGVLGGWVDHNWKQLYIQIAYVAATCAYTFVMTAIVAKSIDMIPGLHLRSTPEGELVGMDEVEIGEFATDYIELRRDVADCSTFGFSRGPQFKAGDAMEERHAQNTALNGNGAAHHETDSSDDSSRLDTITEKPENGTVTHA

SEQ ID NO: 18752 - protein, 353 aa, Methanothermobacter thermautotrophicus str. Delta H
MRIVEEDEKNGVIELVPETLDDLWHLSHIIEEGDLLSARTTRRIQDTSGEKIRSDRGVKKTFYLGIRVETVSFHIYTGRLRATGVIERGPEDLVPMGSHHTLEVKLNTPLRIQKEHWSRWTLKRLRMAVRASKNLKAIILVMEDDVAELGLIRQYGVEYRGPITGHIPGKRIQQRDRGKLRREFYESIVESLQKYGDLETIIIAGPGFYKSDFYDYLMERYPEIAKKAVLENTGTGGRAGISEVLRKGTVERVSSEKRIASEIRNVNEFLEKLARDPDSVVYGKVEVMDAINMGAVEKLLVLDRVVSREDIEGYLDMVESMGGSVVLISSEHEGGKQLESLGGLAGILRFKIQ

SEQ ID NO: 18753 - protein, 511 aa, Staphylococcus aureus
MLTMGTALSQQVDANWQTYIMIAVYFLILMLLAFTYKQATGNLSEYMLGGRSIGPYITALSAGASDMSGWMIMGLPGSVYSTGLSAMWITIGLTLGAYINYFVVAPRLRVYTELAGDAITLPDFFKNRLNDKNNVLKIISGLIIVVFFTLYTHSGFVSGGKLFESAFGLDYHFGLILVAFIVIFYTFFGGYLAVSITDFFQGVIMLIAMVMVPIVAMMNLNGWGTFHDVAAMKPTNLNLFKGLSFIGIISLFSWGLGYFGQPHIIVRFMSIKSHKMLPKARRLGISWMAVGLLGAVAVGLTGIAFVPAYHIKLEDPETLFIVMSQVLFHPLVGGFLLAAILAAIMSTISSQLLVTSSSLTEDFYKLIRGEEKAKTDQKEFVMIGRLSVLVVAIVAIAIAWNPNDTILNLVGNAWAGFGASFSPLVLFALYWKGLTRAGAVSGMVSGALVVIVWIAWIKPLAHINEIFGLYEIIPGFIVSVIVTYVVSKLTKKPGAFVETDLNKVRDIVREK

SEQ ID NO: 18754 - protein, 165 aa, Lotus japonicus
MPPSSNSPLHSTAGAFLSAPPHPLLAANVSSSSLGISENEADEYDCESEEGIEALGEEVRTKSVPSSRSSSKRTRAAEVLNLSGKRRRSRINENMKALQNLIPNSNKTDKAFMLDEAIDYLKQLQLQVQMLSLRNGLSLHPICLKFLYKFDGKYLKDVLERNIRI

SEQ ID NO: 18755 - protein, 309 aa, Lotus japonicus
MSSLEDELLQPHINTTTLHQETSFSVTETSSVDQSSKITISDSELSVEKNQSPETSMVVASMEKKRRSRNGSPLSKDPKGGSKKQKKGNGGVKEEDMAKEEKKDKKKGPEEPSTGYIHVRARRGQATDSHSLAERVRREKISERMNMLQQLVPGCDKVTGKALVLEEIINYVQSLQHQVEFLSMKLASVNPMLFDMAMDLDNLLVRPEQKVNSLASPPLVLPCVPLCNPNPGTTFADTSTLNPSTSFPTANHDYLLDYPCSDFLQGQQRPNFLCENLQSFGIIVVLSFIVIVVNCSQTLVFPPTMERDP

SEQ ID NO: 18756 - protein, 368 aa, Streptococcus suis 89/1591
MEELFCIGCGAQIQTLDKAVAGFTPQSALEKGLETGQLYCQRCFRLRHYNEISDVNISDDDFLKLLHSVGESDALVVNVIDIFDFNGSVIPGLPRFISGNDVLLVGNKQDILPKSVKTGKVTQWLTERAHEIGMRPVDVVLTSAQNKQAIKDLIEKIEQHRKGRDVYVVGVTNVGKSTLINAIIQEITGDKDVITTSRFPGTTLDKIEIPLDDGSYIYDTPGIIHRHQMAHYLTAKNLKYISPRKEIKPKTYQLNPEQTLFLAGLGRFDFVAGERQGFTAFFDNELQLHRTKLQGASEFYQKHAGSLLVPPISKELKEFPELVRHEFTINEKTDVVFSGLGWIRVNEKAKIAAWAPKGVDVVIRKAII

SEQ ID NO: 18757 - protein, 266 aa, Streptococcus suis 89/1591
MKKILALAATVLAGLTLVACSSTSSQSALDKIKEKGTLVVATSPDYAPFEFQALVDGKNEVVGADIMLAQKIADELGVKLEVSAMSFDNVLSSVQNGKADIAIAGLSYSEERAKVFDFSESYYQISDVLLIKKDSDNSLTSIDAMSGKTLAVQKGSTQESYAQENISQANLISLTLMGEAVNELKSGKVDAILMDSPVAAGYVSQNSDLAVASVEFPTIDENSKVIALPKGSTELKTAIDKVIAEVKASGEFDTFLEKAATYTSVE

SEQ ID NO: 18758 - protein, 324 aa, Streptococcus suis 89/1591
MKIFEQLATKLEGKKVRIVLPEGEEPRILQATKRLVNESDVVPVLLGNPDRIKIYLDIEGITEGFEIIDPAHYDRYDEMVAALVERRKGKVSEEQAHELLKDVNYFGVMLVYMGVVEGMVSGAIHSTASTVRPALQIIKTEPGVSKTSGAFLMVKGEERYIFGDCAINIDPDAQTLAEIAINSARTAKMFGIDPKVAMLSYSTKGSGAGPKVDKVVEATKIAQKLRPELDLDGELQFDAAFVPTTGKLKAPGSSVAGQATVFIFPGISAGNIGYKIAERMGGFAAVGPVLQGLNQPVNDLSRGCNPDDVYNLTLITAVQALEHR

SEQ ID NO: 18759 - protein, 325 aa, Streptococcus suis 89/1591
MVQPLGEHNIKLFSLNSNRDIAEKIADSAGIPLGKLSSRQFSDGEIQINIEESVRGVDVYIIQSTSYPVNNHLWELLIMIDACKRASANTITAVIPYFGYARQDRTASPREPITAKLVANMLVKAGVDRVLTLDLHASQIQGFFDIPVNNLLTEPLFAAYYMEKGLCGEDVVIVSPKNSGIKRARNIAEFLNAPIAIIDYAQDDSERSEGYIIGDVAGKKAILVDDILNTGRTFSQASKIVQEGGATEIYAVASHGLFAGTATQLLDEAPIKEILVTDSVASKEQHPKNIAFLTASDLIADAIHRIQEHQPLSPLFKFTSPEKEN

SEQ ID NO: 18760 - protein, 371 aa, Streptococcus suis 89/1591
MIYLDNAATTALSPTALQRMMEVAQENYGNPSSIHQSGRKANQRLRQSRQEIAQILSASPEQIIFTSGGSEADTLAIQGYALAHQSKGKHLITTAIEHHAVLHTMQYLEERFGFEVTYIQPVDQVITAQQIQDALRPDTILVSVMFANNETGQLLPIKEIGELLADHQAVFHVDAVQAIGKIAISPSNYGIDLLAASAHKFHGPKGTGFLYSKVHKFDSLIHGGKQEQQHRAGTENLPAIAAMATALTEQYESLDTHHQHVSELRQHIIEGLSGLDYYLNQAGPHLPHVLNIGFPGKLNEQLLMQLDLAGIAVSSGSACTAGVVQNSHVLEAMYGKDSHRLKESIRISLSEINTKEEIDTLIIELKKILGG

SEQ ID NO: 18761 - protein, 276 aa, Streptococcus suis 89/1591
MTLKPFTKWTGGKRKLLTQLHEHLPFEYNRYFEPFVGGGALFFDLAPENAVINDFNEELINTYLQIRDNPEALLDLLHIHQENNSKEYYLDVRSVDRDGRIETMSDVERAARILYMLRVDFNGLYRVNSKNQFNVPYGRYKNPKIVDSELILSVSRYLNDNNILIMQGDFVTAVEEADAGDFVYFDPPYVPITATSSFTSYTHEGFSDQDQRRLRDTFIDLDRRGVNVMLSNSSSPVVEELYAGFNISRVDVSRTNGASNSSRGKIQEIIVRNYGE

SEQ ID NO: 18762 - protein, 392 aa, Streptococcus suis 89/1591
MDLLNRFNKNLNRIEVSMIRQFDQSISDVPGILKLTLGEPDFTTPDHVKEAAKAAIDANQSYYTGMAGLLELRQAAAEFVAEKYNLHYNPENEILSTIGATEALSASLVAILEAGDTVLLPAPAYPGYEPIVNMVGADIVEIDTTANDFVLTPEMLEEAIIEQGDKLKAVILNYPANPTGVTYSREQIQAFADVLRNYPVFVLSDEVYAELTYTGQPHTSIAEFLPEQTILIQGLSKSHAMTGWRIGLIMSQAPIIAQIIKSHQYLVTAASTAMQYGAVEALKNGKDDALPMRAEYVKRRDYIIEKMTDLGFKIIKPDGAFYIFAKIPAGYNQDSFSFLQDFARKKAVAFIPGAAFGQYGEGYVRISYAASMEKIQTAMACLKEYLEENGTN

SEQ ID NO: 18763 - protein, 462 aa, Streptococcus suis 89/1591
MSLFRKKQAVGRHSQMRRHLGLVDLIFLGIGSMVGTGIFTVTGLAAAQYAGPALIISIVIAAISVGLTALFYAEFASRIPTNGGAYGYLYSVFGEFPAWIAGWLTIMEFLTAVSSVASGWGAYLKGLLANFGIAMPTALNGTFNPAAGTYVDLLPVLVLIFVVGVVLLNSKAALRFNSALVVLKFSALALFILVGLFFIKPENWSNFSPFGFGAIYGGQAGIMAGASLMFFAFLGFESISLAIDEVKKPEKNVPKGIVLSLSIVTILYIVVTLVLTGMVHYTKLNVADAVAFALREVGLDWAASYISIVAILTLITVCISMTYALSRMVYSISRDGLLPKSLSRLTQTSKVPKNATILVGIFAAICAGIFPLASIASFLNICTLAYLIMLALGIIRLRQVEGLPKDGQFKTPLVPLLPILSIIICLSFMFQYSLDTWLAFGVSVVIGILIYFCYGYRHSEAK

SEQ ID NO: 18764 - protein, 222 aa, Streptococcus suis 89/1591
MEFMLDTLNIEEIRKWAEVLPLAGVTSNPTIAKKEGDIDFFERLHLIRDIIGPNASLHVQVVAKDYEGILADAKKIRELAPENVYIKVPVTPAGLAAMKTLKAQGYQITATAIYTVFQGLLAIEAGADYLAPYYNRMVNLNIDSNAVIAQLSEAIDRECSESKILAASFKNVEQVNQAFANGAQAITAGADIFEAAFSMPSIEKAVNDFADDWSAIHGRYTI

SEQ ID NO: 18765 - protein, 364 aa, Streptococcus suis 89/1591
MKVFASPSRYIQGKHVLFQGAEAIGKLGTKPLILCDDLVYGIVGEKFLSYLVEEGMQVYRVAFNGEASDKEIQRVVEIGKEQASDVVIGLGGGKTIDSAKAIADLLGVPVVIAPTIASTDAPTSALSVIYSEEGAFERYIFYKKNPDLVLVDTAIICQAPPRLLASGIADGLATWVEARAILQSNGTTMAGGGQTLAGIAIAQTCEQTLFEYGLQAMASCEAKVVTAALENIVEANTLLSGLGFESAGLAAAHAIHNGFTALEGDIHHLTHGEKVAYGTLTQLFLENRPKEELEKYIRFYQALNLPTTLEELHLADAGYEDLLKVGQQATIEGETIHGMPFAISAEDVAEALMAVDYYVRSLDK

SEQ ID NO: 18766 - protein, 437 aa, Streptococcus suis 89/1591
MSMFLDTAKIKVKAGKGGDGMVAFRREKYVPNGGPWGGDGGYGGNVVFVVDEGLRTLMDFRYNRRFKADDGEKGMTKGMHGRGAEDLIVRVPQGTTVRDADTGKIITDLVENGQEFVIAHGGRGGRGNIRFATPKNPAPEISENGEPGEERNLELELKVLADVGLVGFPSVGKSTLLSVITAAKPKIGAYHFTTIVPNLGMVRTKSGESFAVADLPGLIEGASQGVGLGTQFLRHIERTRVILHVLDMSASEGRDPYEDYVAINNELETYNLRLMERPQIIVANKMDMPEAAENLEEFKKKLAANYDEFEELPQIFPISGIAHQGLKNLLEATAELLEKTPEFLLYEESDFQEEEAYYGFNPDEPEFDISRADDASWVLSGDKLEKLFTMTNFDRDESVMKFARQLRGMGVDEALRARGAKDGDIVRIGKFEFEFVD

SEQ ID NO: 18767 - protein, 67 aa, Streptococcus suis 89/1591
MVQGTVKWFNAEKGFGFIAQENGPDVFAHFSEIQSNSFKSLEEGQKVTFEVEQGQRGLQATNITKIG

SEQ ID NO: 18768 - protein, 279 aa, Streptococcus suis 89/1591
MDKKKINIFFAIRLLVFGLILFVFAKQPVAQTETPASITNSDQVQAIIDRGVLRVGVKQDVPNFGYKNPDTGEFEGMEIDIARKIADELGVDIEFTPVTAQTRGPLLDNGQVDMVIATFTITEERKLLYNFTTPYYTDAVGFLVNKDSGIKTFTDLDGKTIGVAQGSITRTLISKLADKYGISVNFAELGSYPELSVSLRAHRTDAFSVDQSILSGYISSKSELMDFSFSASDYGIVTKLSNKDLNNYLNSLVEKWTADGSLQSIYDANGLKPVTETDE

SEQ ID NO: 18769 - protein, 394 aa, Streptococcus suis 89/1591
MKKVAIVSAYRSAIGSFGGSLKDIEIADLGAQVLETALANKNIPADSVDEVIFGNVLSAGQGQNIARQIAIRAGIPQTASAYAVNKVCGSGLKSVLLAAQSIMLGDNDVVVAGGIEIMSQAPYLSKTSRFGSKFGHISLEDSMLTDGLTDAFNDYHMGITAENVAERYHVSRAEQDAFTYSSQEKAAKAIAEGRFVDEIVPIRLKNRKGETIFATDEYPRLTPIEKLATLRPSFKKEGTVTAANASGINDGCAVLVLMSDEKASELNIQPLAYIEAYATSGLDPALMGLGPITASQKALQKLNKTVEDIDLFELNEAFAAQSIPVVKQLGIDPAKVNVNGGAIALGHPIGASGSRILVTLIHELIKQEKELGLCSLCIGGGQGISLIVSNAQTN

SEQ ID NO: 18770 - protein, 395 aa, Streptococcus suis 89/1591
MSKTIAINAGSSSLKWQLYQMPEETVLAAGIVERIGLNDSISTVKYDGKKESEVLDIPNHTVAVKILLEDLLKHNIIVAYEEITGIGHRVVAGGEVFKESAVIGPKEVEQIEELSALAPLHNPAHVAAMRAFEEVLPEVLNVAVFDTAFHTTMPKHAYLYPIPQKYYTDHKVRKYGAHGTSHYYVAHEAAKVLGRPIEELKLITAHIGNGVSITANYHGQSVDTSMGFTPLAGPMMGTRSGDIDPAIIPYLIANVDELKDAADVVNMLNKQSGLLGVSGYSSDMRDIESGLEAKNPDAVLAYNIFIDRIKKFIGQYFAVLNGADALVFTAGMGENAPLMRNDVVEGLSWFGVEIDPAKNVRGANGDISTPESKVRVLVIPTDEELVIAREVERLK

SEQ ID NO: 18771 - protein, 567 aa, Streptococcus suis 89/1591
MQEIQLDQPRSGSYLILDTLHQLGVDLVFGYPGGAVLPLYDAIYQYEGIQHILARHEQGAVHEAEGYAKSSGKVGVAIVTSGPGATNAITGIADAMGDSVPLLVFTGQVATRGIGKDAFQEADVLGMTMPITKYNYQIRDTADIPRVITEALHIATTGRPGPVVIDVPKDIQERVVDFYHDPTLHLPSYQPTIEPNGLQVKKILKQLSQAQKPVILAGGGVNYADANKELVAFAERYRIPVVSTLLGLGAMPIEHELSLAMGGMHGSYAANMAMDQADYIINIGARFDDRLTGNPTTYAPNATVAHIDIDPAEIGKVVKTAIPVVGDAKATLKALLALETVETGYAEWTAQVLENKRRAPFWYDEDKKVIKPQAAIELIGQLTQGDAIVVTDVGQHQMWAAQFYPYKHARQLVTSGGMGTMGFGIPAAIGAKLANPDKEVIIFVGDGGFQMTNQELAILNGYGVPIKVVLINNHSLGMVRQWQESFYEKRRSQSVFDDEPNFQLLAEAYGISHYSFDNPATLSEDMKVILEDKPMLIEVHISNREHVQPMVPAGKSNAEMLGVKFNA

SEQ ID NO: 18772 - protein, 656 aa, Streptococcus suis 89/1591
MNNQPNKGFIKNPFLVILVIATIVTAFQFFNAGQQVATQEISYSQVVTELKNNNVSEITYQPNSSVIEITGKYKTEQEAKDELASSIKLFQVSSKVKYKNFKSLILPSETNLSELQALANENGVKVTIKPESSNGLWLNIVFNLLPLIIAGVFFMMMMNQGGGARGAMNFGRNKAKALEQSNIKVRFSDVAGAEEEKQELVEVVEFLKDPKRFTKLGARIPAGVLLEGPPGTGKTLLAKAVAGEAGVPFFSISGSDFVEMFVGVGASRVRSLFEDAKKAAPAIIFIDEIDAVGRQRGVGMGGGNDEREQTLNQLLIEMDGFEGNEGIIVIAATNRSDVLDPALLRPGRFDRKVLVGRPDVKGREAILKVHAKNKPLAADVDLKLVAQQTPGFVGADLENVLNEAALVAARRNKTVIDASDIDEAEDRVIAGPSKKDRQVSAKEREIVAYHEAGHTIVGLVLSNAREVHKVTIVPRGRAGGYMIALPKEDQMLLSKEDMKEQLAGLMGGRVAEEIIFNTQTTGASNDFEQATQMARAMVAEYGMSEKMGPMQYEGSHAMFGGQTTQKHISEQTAYELDNEVRDLLNEARNKAADIIQSNRDTHKLIAEALLKYETLDSVQIKSLYETGKMPENIERDDEDVHPLSYEEVKEKINTKE

SEQ ID NO: 18773 - protein, 817 aa, Streptococcus suis 89/1591
MKISTGLQRVFEDAQLVAQRYACDYLETWHVLLSFVINHDTVAGAVLAEYPISISDYEHATFIVTDKVYREELDSFRILPSSKRLDETASFAKKIAEVVKAKELGTEHLFMAMLLDKRSTASQILDKVGFCFEDSDDKFRFLDLRKNVEARAGFTKEDLKAIRSVMKGGKAKPANMGQMMGMPPAPQSGGLEDYTRDLTALAREGKIEPVIGRDAEIARMIQILSRKTKNNPVLVGDAGVGKTALALGLAQRVAAGDVPVSLAKMRVLELDLMNVIAGTRFRGDFEERMNNIINDIEEDGQVILFIDELHTIMGSGSGIDSTLDAANILKPALARGTLRTVGATTQTEYQKHIEKDAALVRRFAKVTIEEPTVEDSIAILTGLKGTFEKYHRVRIGQAAVETAVTYAKRYLTSKNLPDSAIDLLDEASATVQNRVKGQAEETGLTSIDKALMDKKYKTVSKLLIKTKEDAEASQNYDLEVTEEDVLETLSRLSGIPVAKLSQSDTKKYLNLEAELHKRVIGQEEAISAVSRAIRRNQSGIRTGRRPIGSFMFLGPTGVGKTELAKALAEVLFDDESALIRFDMSEYMEKFAASRLNGAPPGYVGYEEGGELTEKVRNKPYSVLLFDEVEKAHPDIFNVLLQVLDDGVLTDSKGRKVDFSNTIIIMTSNLGATALRDDKTVGFGALDLSKDHKEVEKRIFEELKKAYRPEFINRIDEKVVFHSLTESDMQDVVKVMVKPLFAVTAEKGITLKLQPSALKLLAKQGYDPEMGARPLRRLLQTKLEDPLAEMLLRGDLATGSTLKVGVKGEELKFDVVKG

SEQ ID NO: 18774 - protein, 257 aa, Streptococcus suis 89/1591
MSVLEIKDLHVEIEGKEILKGVNLTLKTGEIAAIMGPNGTGKSTLSAAIMGNPSYEVTQGEILFDGVNILELEVDERARMGLFLAMQYPSEIPGITNAEFLRAAMNAGKEDEDKISVRDFITKLDEKMELLNMKEEMAERYLNEGFSGGEKKRNEILQLLMLEPTFALLDEIDSGLDIDALKVVSKGINAMRGEGFGAMIITHYQRLLNYITPDVVHVMMEGRVVLSGGPELAQRLEKEGYVQVAAELGIDYKEDDI

SEQ ID NO: 18775 - protein, 451 aa, Streptococcus suis 89/1591
MKVIKFGGSSLASAEQLEKVFNIVQSDSERRFVVVSAPGKRNAEDTKVTDALIKYYKEYVNGKDVTASQEWIINRYQAMVDELGFTANSMKKIADSIISLASLPIDDNEFLYDAFLAAGEDNNAKLIAEYFTHRGLPARYVHPKKAGIIVSSEPGNARILPSSYDKIEELRDTDEVLIIPGFFGVTVDNQICTFSRGGSDITGSIIAAGVKADLYENFTDVDGIFAAHPGIIKNPHSIKELTYREMRELAYAGFSVLHDEALLPAYRGRIPLVIKNTNNPTHPGTRIVHKHTEQTVPVVGIAADDGFVSINLSKYLMNREVGFGRKVLQILEDLNIRWEHMPTGIDDLSIVVRERELTPIKEEEILRQLNTKMEVDKAEIEHGLSIIMIVGENMKSHVGVTATATTALSKQNVNLAMISQGASEVSVMFVVKTEEKKRALHALYEAFFNEQ

SEQ ID NO: 18776 - protein, 436 aa, Streptococcus suis 89/1591
MALPTIAIVGRPNVGKSTLFNRIAGERISIVEDVEGVTRDRIYATGEWLNRKFSLIDTGGIDDVDAPFMEQIKHQAEIAMDEADVIVFVVSGKEGVTDADEYVSRILYKTNKPVILVVNKVDNPEMRNDIYDFYSLGLGDPYPVSSVHGIGTGDVLDAIIENLPVQEAEENPDIIKFSLIGRPNVGKSSLINAILGEERVIASPVAGTTRDAIDTHFTDPEGQEFTMIDTAGMRKSGKVYENTEKYSVMRAMRAIERSDVILMVINAEEGIREYDKRIAGFAHEAGKGMIIVVNKWDTLEKDNHTMKKWEDDIRDQFQYLSYAPIIFVSALTKQRLHKLPEMIKAISESQNTRIPSAVLNDVIMDAIAINPTPTDKGKRLKIFYATQVATKPPTFVVFVNEEELMHFSYMRFLENQIRKAFVFEGTPIHLIARKRK

SEQ ID NO: 18777 - protein, 393 aa, Streptococcus suis 89/1591
MSKLSRRVLEMEESVTLAAGARAKALKAEGRDILELTLGEPDFVTPKNIQEAAIKSIEDGKASFYTVASGHPELKDAVNTYFENFYGYSIERNQVVLATGAKFVLYAFFAAVINPGDEVIIPTPYWVSYADQIKMNDGVPVFVTAREEHNFKVTVDQLEAARTDKTKVFLLNTPSNPTGMIYSREELEAIGNWAVEHDILILADDIYGRLVYNGNGFTPISSISESIRQQTIVVNGVAKAYAMTGWRVGFAVGNPEIIAAMSKIVGQTTSNLTTAAQYAAIEAFTGPQDTVETMRQAFEERLNTIYPLLAEVPGFEVIKPEGAFYLFPNVKKAMEMKGYTDVTEFTTAILEEVGVAMVTGAGFGAPENIRLSYATDMDTLKEAVARLHTFMKK

SEQ ID NO: 18778 - protein, 742 aa, Streptococcus suis 89/1591
MLCKNCNINDATIHLYTNLNGKQQQVDLCHNCYQIMKTDPNNAILRGLGDLTNPNNMDPFSEFFNHLGGYPGNTPAGKNREQTPPTQAGEHNGRGGQTPPPQQPQQPNGLLEEFGINVTEIARRGDIDPVIGRDQEITRVIEILNRRTKNNPVLIGEPGVGKTAVVEGLAQKIVDGDVPQKLRDKEVIRLDVVSLVQGTGIRGQFEERMQKLMEEIRNRREIILFIDEIHEIVGAGSAGDGNMDAGNILKPALARGEMQLVGATTLNEYRIIEKDAALERRMQPVKVEEPSVEETITILKGIQNKYQDYHHVKYSDAAIEAAAVLSNRYIQDRFLPDKAIDLLDEAGSKMNLTLNFIDPKEIDQRLIDAENRKAQATRDEDYEKAAYFRDQIAKYKEMQKATISEEDIPLITEKEIEAIVEQKTNIPVGDLKEKEQSQLVNLASDLKAHVIGQDEAVDKIAKAIRRNRVGLGAPNRPIGSFLFVGPTGVGKTELSKQLAIKLFGSADSMIRFDMSEYMEKHAVAKLVGAPPGYVGYEEAGQLTEKVRRNPYSLILLDEVEKAHPDVMHMFLQVLDDGRLTDGQGRTVSFKDTIIIMTSNAGTGKVEASVGFGAAMEGRTQSVLGQLSNFFTPEFMNRFDGIIEFQPLSKENLLEIVSLMLDDVNKRLSHNGISLHVTDKVKEKLVDLGYDPKMGARPLRRTIQDQIEDAITDFYLEHPAEKDLRAVMSSKGTIQIKAQTKTK

SEQ ID NO: 18779 - protein, 397 aa, Streptococcus suis 89/1591
MTKEKLILAYSGGLDTSVAIAWLKKDYDVIAVCMDVGEGKDLDFIHDKALSIGAIESHVLDVKEEFAQEYVLPALQAHAYYEQKYPLVSALSRPLISKKLVEMAHKTGATTIAHGCTGKGNDQVRFEVAIAALDPSLKVVAPVREWKWAREEEIIFAKENGVPVPADLDSPYSVDQNLWGRANECGVLENPWNEAPEDAFGITTSPENAPDTPEYVDIEFKAGIPVAVNGEKLSLANLIQRLNVIAGKHGVGRIDHVENRLVGIKSREIYECPGAITLLTAHKEIEDLTLVREVSHFKPIVSNELSNLIYNGLWFNPATDALKAYLAQTQAVVNGTAKVKLYKGSAKVVARKSPNSLYDEDLATYTSADTFDQDAAVGFIKLWGLPTKVNAEIHKKS

SEQ ID NO: 18780 - protein, 380 aa, Streptococcus suis 89/1591
MIYFDNAATTQVYPEVLKTYTEVATKIWGNPSSLHSLGSQATRILEASRKQIAELLGKDSKEIFFTSGGTEGDNWVIKGVAFEKAHLGKHIIVSAIEHPAVKESALWLKTQGFEVDLAPVNAQGFVDVSALESLIRPDTTLVSIMAVNNEIGAIQPIQEISQLLADKPTISFHVDAVQAIGKVPTERYLTDRVDFASFSGHKFHSVRGVGFVYVKAGKKIAPLLTGGGQESDKRSTTENVAGIAATAKALRLTLDKAVDSQKRLAAMKQILVDELGKYDDVTVFSGLEDFVPSIVTFGIKNIRGEVIVHAFEDHQIYISTTSACSSKAGKPAGTLIAMGVPQKLAQTAVRISLDDDNDMGQIEQFLTIFKQIYQNTQKVR

SEQ ID NO: 18781 - protein, 586 aa, Zea mays
MRHLLLSRFLRRGGGSGIPNGHYHHLPLLRALSSSPSPVSSDAELRKYAGYALLLLGCGAATYYSFPFPADALHKKAVPFRYAPLPEDLHAVSNWSGTHEVHARVLLQPDSLPALEGALAAAHKERRKLRPLGSGLSPNGIALSRAGMVNLALMDKVLDVDAKKKTVTVQAGIRVAELVDALREHGLTLQNFASIREQQVGGFTQVGAHGTGATLPPVDEQVISMKLVTPAKGTIELSREKDPELFYLARCGLGGLGVVAEVTLQCVERHQLVEHTFVSNADEVKKNHKKWLSENKHIKYLWIPYTDTVVVVQCNPPSKWITPKLASKYGKDEALQHVRDLYRESLKKYRTETESKDPEIDTLSFTELRDKLLALDPLDKDHVVKINKAEAEYWKKSEGYRMGWSDEILGFDCGGQQWVSENCFPTGTLAKPSMKDLDYIDKLLQLIEKEEIPAPGPIEQRWTARSKSPMSPASSSEEDDVFSWVGIIMYLPTSDARQRKEITEEFFSYRSLARSLWDDYSAYEHWAKIEVPKDKDELAELQARLRKRFPVDAYNKARMELDPNKVLSNAKLEKMFPVLEPPHQTK

SEQ ID NO: 18782 - protein, 323 aa, Zea mays
MAKSAASSVVRCLQLLTVAAVLAGAAAGGGLSTSFYSKKCPDVQSIVRAGVASAVAAEKRMGASILRMFFHDCFVNGCDASILLDDTATFTGEKNAGPNANSVRGYEVIDAIKARVEASCNATVSCADILALAARDAVNLLGGPSWTVYLGRRDARTASQSDANANLPGPGSSLATLVTMFGNKGLSARDMTALSGAHTVGQARCATFRNRIYNDGNINATFASLRQQTCPLAGGDAALAPIDVQTPEAFDNAYYKNLMARQGLFHSDQELFNGGSQDALVKKYSGNAAMFTADFAKAMVRMGAISPLTATQGEVRLDCRKVN

SEQ ID NO: 18783 - protein, 280 aa, Zea mays
MAAMANTSRLPTPCSLPTISIGAKSRRLAVAAVRCGPGGSRSHRRSLGVLLCRSSSTAGAQGSTRMEDYNTAMKRMMRNPYEYHHDLGMNYAVISESLIVGSQPQKPEDIDRLKNEERVAYILCLQQDKDIEYWGIDFQSIVNRCKELGIQHIRRPAVDFDPDSLRSQLPKAVSALEWATSQRKGRVYVHCTAGLGRAPAVAIAYMFWFENMDLNTAYQKLTSIRPCGPSKRAIRAATYDLAKNDPSKEPFENLPEHAFEGVADWERKLIHDRVRALHEA

SEQ ID NO: 18784 - protein, 372 aa, Zea mays
MAIVREEAVDTSISPRAGMDAIRNGYTRYTPNAGTLELRKAICTKLQEENGVSYLPDEVLVSNGAKQCITQAVLAVCSPGDEVLIPAPYWVSYPEMARLADATPVILPTNISENFLLRPELLTDKINEKSRLLILCSPSNPTGSVYPKELLEKIADIVKKHPRLLVLSDEIYEHIIYQPAKHTSFASLPGMWERTLTVNGFSKAFAMTGWRLGYLAAPKHFVAACGKIQSQFTSGASSISQKAGVAALNLGYAGGEAVSTMVKAFQERRDYLVKNFKELPGVKISEPQGAFYLFIDFSAYYGSEVEGFGTIKNSESLCIFLLEKAQVALVPGDAFGDDKCIRISYAASLTTLQTAMSKLKEAVALLKPCVAA

SEQ ID NO: 18785 - protein, 500 aa, Zea mays
MSSNNLSGYLPEELGQLQNLDSLILNNNSLAGEIPAQLANCFSLVSLNLSYNNFSGHVPSSKNFSKFPMESFMGNLMLHVYCQDSSCGHSHGTKVSISRTAVACMILGFVILLCIVLLAIYKTNQPQLPEKASDKPVQGPPKLVVLQMDMAVHTYEDIMRLTENLSEKYIIGYGASSTVYRCDLKSGKAIAVKRLYSQYNHSLREFETELETIGSIRHRNLVSLHGFSLSPHGNLLFYDYMENGSLWDLLHGPSKKVKLDWDTRLRIAVGAAQGLAYLHHDCNPRIVHRDVKSSNILLDGSFEAHLSDFGIAKCVPAAKSHASTYVLGTIGYIDPEYARTSRLNEKSDVYSFGVVLLELLTGRKAVDNESNLHQLILSKADDDTVMEAVDPEVSVTCTDMNLVRKAFQLALLCTKRHPADRPTMHEVARVLLSLLPPAAKPPASKAAAASAAAGDYTRFLATAADLRRGGVADDDTGDNSSSDEQWFVRFGEVISKHTLS

SEQ ID NO: 18786 - protein, 507 aa, Zea mays
MACSPSAPLARAVTAILLLASIICCCRSAPPGALVTRLPGFDGAKLPSKHYAGYVTVDEHVGSKLFYYLVESERDPARDPVVLWLNGGPGCSSMDGFVYEHGPFNFESGGSSGNLPKLHLNPYSWSKVSSVIYLDSPSGVGLSYSKNVSDYETGDLKTAADSHTFLLKWFQLYPEFQKNPFYIAGESYAGVYIPTLANQVVQGIHKGDNPVINFKGYMVGNGVCDVTFDGNALVPFAHGMGLISDDIYEQTNTACQGNYWNYSYSEKCADAVSNVDMVISGLNIYNILEPCYHGTNTKEVISRRSNNNRMPQSFKDLGVTSRPLPVRTRMFGRAWPLRAPVRDGRVPSWQELAATNNFPSVMCMNDEVATAWLNHDSVRSAIHAEPVSAIGPWILCTDQLLFHHDAGSMIIYHKNLTSQGYRAIIYSGDHDMCVPYTGSLAWTTSLRYGVIDSWRPWFVNGQVSGYTQGYENGLTFATIKGSGHAVPEYKPQEALAFYSRWLAGSKL

SEQ ID NO: 18787 - protein, 249 aa, Zea mays
MLPPHLTENGAVMIQFGHQMPDYDSPATQSTSETSHQEASGMSEGSLNEHNNDHSGNLDGYSKSDENKMMSALSLGNPETAYAHNPKPDRTQSFAISYPYADPYYGGAVAAAYGPHAIMHPQLVGMVPSSRVPLPIEPAAEEPIYVNAKQYHAILRRRQLRAKLEAENKLVKSRKPYLHESRHLHAMKRARGTGGRFLNTKQQPESPGSGGSSDAQRVPATASGGLFTKHEHSLPPGGRHHYHARGGGE

SEQ ID NO: 18788 - protein, 564 aa, Zea mays
MPSGDDSDPLLAPADGIRFAALDYRDHPADRGATGGWRSALFIIAVEISERFTFYGVSSNLINYLTGPLGEGTAAAAAAINTWNGVAQLLPLLGGALADKWLGRYRTIVVASLLYVIGAGMLAFSTLLSSGSGHQCTTAGGQTCAPSTIKVTFFYVSLYIVAVAQGGHKPCVQAFGADQFDQSDPKETVSRSSFFNWWYFGMCAGTAVTLLFLNYVQDNIGWGLGFGIPCAVMAAALAVFLLGTRRYRYYVTAGERGLFARAGEAFVEWRSRRKALQHGDRPVAEGAPGFSAGVDEEEQAAVSHDAGLVKETKDILRLFPIWATCLLYAVAFSQSSTFFTKQAATLDRRVGRHLQVPPAALQSFISITIVVFIPLYDRVLVPVARRYSGNPSGITMLQRIGTGMFLSLLSMVIAALVEKHRLRVAVDAGLVDKPMVPLPMSLWWMVPQYVLFGAADVYTMVGLQEFFYDQVPDKLRSLGLALYLSIFGVGSFISSTLVSIIDSVTTARGGSWFSNNLNRGHVDYFYWLLAALSALELLAYVFFAVTYKYKNKATVHATVVGQSL

SEQ ID NO: 18789 - protein, 339 aa, Zea mays
MDVRSKARTLSGPVDDPSKLPKWNFDGSSTGQAPGDDSEVILCPRAIFRDPFRKGQNILVMCDCYEPNGEPIPSNKRHGAAKIFSHPDVKAEEPWFGIEQEYTLLQKDTKWPLGWPLGGYPGPQGPYYCAVGADKSYGRDIVDAHYKACLYAGIDISGINGEVMPGQWEFQVGPAVGVSAGDQLWVARYILERITEIAGVVVSFDPKPIPGDWNGAGAHTNYSTKSMRSDGGYEVIKKAIGKLGLRHREHIAAYGDGNERRLTGRHETADINTFVWGVANRGASVRVGRDTEKEGKGYFEDRRPASNMDPYVVTSLIAETTMLWEPSHSNGDGKGAAAP

SEQ ID NO: 18790 - protein, 549 aa, Zea mays
MVDGSANECCERLAYYGMSTNLVNYMKTRLGQVNSVASNNVTNWQGTCYITPLIGAFFADAYMGRFWTIAIFMIIYIFGLALLTMASSVKGLVPTSCGDKDVCHPTDAQAAVVFVALYLIALGTGGIKPCVSSFGADQFDENDEREKKSKSSFFNWFYFSINIGALVASTVLVYVQTHVGWGWGFGIPAVVMAIAVGSFFVGTPLYRHQKPGGSPLTRIAQVLVACARKWNVAVPADKSRLHETVDGESVIEGSRKLEHSEQLACLDRAAVVTAEDGAEASPWRLCSVTQVEELKSVIRLLPIWASGIVFAAVYSQMSTMFVLQGNTLDQSMGPRFKIPSATLSMVDTISVIVWVPVYDRAIVPLVRSYTGRPRGFTQLQRMGIGLVVSIFSMVAAGVLDIVRLRAIARHGLYGEDDIVPISIFWQIPQYFIIGCAEVFTFVGQLEFFYDQAPDAMRSMCSALSLTTVALGNYLSTVLVTIVTHITTRHGRIGWIPENLNRGHLDYFFWLLAVLSLLNFLAYLVIASWYKYKKTADDYPGAKGEHGTEH

SEQ ID NO: 18791 - protein, 540 aa, Zea mays
MASPHLPFLSFPKTLPPLPPPLKTHAHRTSLAAAPAPPPAPPDGAGPAAPTRGDRFLGRQLATEAAARVLAPEDADRRRRRKEKRRALARKPSGLASCYGCGAPLQTAEEAAPGYVDPDTYQLKKRHHQLRTVLCGRCKLLSHGHMVTAVGGHGGYPGGKKFVSAEQLREKLSYLRHEKALIVKLVDIVDFNGSFLARVRDFAGANPIILVITKVDLLPRDTDLNCIGDWVVESVVKKKLNVLSVHLTSSKSLVGITGVISEIHQERKGRDVYILGSANVGKSAFISAMLRTMAYKDPVAAAAQKYKPIQSAVPGTTLGPIQIEAFLGGGKLYDTPGVHLHHRQAAVIHADDLPSLAPQSRLKGRCFPANDTDVELSGNSLFWAGLVRIDVIKALPRSRLTFYGPKKLKINMVPTTEADQFYETEVGVTLTPPTGKERAEGWTGLQGVRELKIKYEERDRPACDIAISGLGWISVEPSGVPSNSAEEVYDGGELHLVVHVPKPVEVFMRPPLPVGKAASQWYRYQELTEEEEELRPKWHY

SEQ ID NO: 18792 - protein, 189 aa, Zea mays
MVRGKTQMKRIENPASRQVTFSKRRNGLLKKAFELSVLCDAEVALVVFSPRGKLYEFASGSAQKTIERYRTYTKDNVSNKTAHQDIEQVKADAEGLAKKLEALEAYKRKLLGERLEECSFEELHSLEVKLEKSLHCIRGRKVSYFPHVVLCIQYMYDVLTNELKAAYIHMRIWSYVHGRLSCWRSNSIS

SEQ ID NO: 18793 - protein, 458 aa, Zea mays
MAVHHALEVLDGRCDDDGHPRRTGTAWTCAAHIITAVIGSGVLSLAWSVAQLGWVVGPACMFCFALVTYVSAALLADCYRRGDPGNGPRNRSYMDAVRVYLGKKHTWACGSLQYVSMYGCGVAYTITTATSIRAILKANCYHEHGHGAHCEYGGSYYMLIFGGAQLLLSFIPEFHDMAWLSIVAAVMSFSYSFIGIGLGLATTIANGTIKGSITGVRMRTPMQKVWRVSQAVGDIAFSYPYSLILLEIQDTLKSPPAENKTMKRASIGSILVTTFFYLCCGCFGYAAFGSDSPGNLLTGFGFYEPYWLIDFANACIILHLLGGYQVYSQPIFQFADRFFAERFPDSGFVNDFHTVRVACLPACRVNLLRVCFRALYVASTTAVAVAFPYFNEVLALLGALNFWPLAIYFPVEMYFVQRNVPRWSTRWVVLQTFSVVCLLVSTFALVGSIEGLITQKLG

SEQ ID NO: 18794 - protein, 539 aa, Zea mays
MAPPAVAASAFPFRLFSAEARRNNKSGRGKRSAARPLKSSPPPRPPSSSSVIGGGVAATTFTRLPLRDAPESTEVTLDRFPTAPANPGAPALTLGSVQRLENEEFDVGWRPNSVARIPLRDSSDGVELTIGQFEARAAGRKSTGGRGFTRQTVERLGDDGEGEELVVTSLDVFEVKNGRRDRGLVPEVLDDGDDVVVFDPDYGVDSDDEEEEFEMFPFDKSHHEEADAVPRAEIGEVEYGDENDDNDGDEVVVFYADYDEEEDSEEDGYEVENAEEGEGDVKEKGVPAVMRCFDTAKIFAKAGDGGNGVVAFRREKYVPYGGPSGGDGGRGGDVYVQVDGEMNSLLPFRKSVHFRAGRGAHGMGQQQAGAKGEDVVVKVPPGTVVRTSDGGVELLELMKPGQRALLLPGGRGGRGNAAFKSGTNKVPRIAEKGEKGPEMWLELELKLVADVGIVGAPNAGKSTLLSVISAAKPAIANYPFTTLLPNLGVVSLDFDATMVVADLPGLLEGAHRGYGLGHEFLRHSERCSVLVCSLFPSLL

SEQ ID NO: 18795 - protein, 217 aa, Zea mays
MASGGAVRDVGSPAELEAAVAGARAVAVHFWASWCEASKQMDEVFAHLAVDFPHAAFLRVEAEEQPEISEAYGVTAVPYFVFCKEGKIVDTLEGVNPASLANKVAKVAGPASVAESAVPASLGVAAGPAVLENIQKMAQQNGSSAAESTNSGSTQDALNKRLEQLVNSHPVFLFMKGTPEQPRCGFSRKVVNILKQEGVEFGSFDILTDNDVREVVN

SEQ ID NO: 18796 - protein, 390 aa, Zea mays
MSSAGISGCVPTTVNISCFLFSCVNRATLEFSIFLLVEVLQEFSLAFSPLFFDMFYFLSIQEHHIQTNHGPVSVAVYGDHDKPALVTYPDIALNYMSCFQGLLFCPEAASLLLHNFCIYHISPPGHELGAAPISPNAPIPSVDDLADQVADVLDFFGLGSVMCFGVTAGAYILTLFAAKYRERVLGLILVSPLCKGPTWTEWLYSKVTSNLLYYYGMCGLVKECLLQRYFSKEVRGFSELPESDIVQACKSLLEQRQSMNVWRFVQTMNERYDLSEHIKRLQCRTLIFVGDNSQFHTEAVHLTSKLDRRYCALVEVQACGSLVTEEQPHAMLIPMEYFLMGYGLYRPPSQVVECSPRSPLSPFCISPDLLSPESMGVKLKPIRTRVRLEV

SEQ ID NO: 18797 - protein, 468 aa, Zea mays
MDKSAVAAYDVERGDYEEEHERRGTVWTATAHIVTAVIGSGVLALAWSVAQLGWVAGTLALAGFACVTYYTSTLLANAYRAPHPVTGDRNRTYMDAVRSYLSPREVFMCGIAQYVNLWGTMVGYTITATISMAAIRQSNCFRRSGAGAHCDAPGTVLMLAFGVVQVVLSQFPGLEHITWLSVVAAVMSFAYSFIGLGLSVGQWVSHGGGLGGRIAGAAAASPTRKLWNVLLALGNIAFAYTFAEVLIEIQDTLKSPPPENRTMKKAAMYGIGATTIFYISVGCAGYAAFGSDAPGNILTAGGLGPFWLVDIANMCLILHLIGAYQVYAQPIFASVERWAASRWPEAKFISSAYTVSIPLMQRGSVTVAPYKLVLRTVLVAATTVVALMIPFFNAVLGLLGAFSFWPLTVYFPISMHIAQDKITRGTKWYLLQALSMVCLMISVAVGIGSVTDIVDSLKVSSNPLKTVS

SEQ ID NO: 18798 - protein, 403 aa, Zea mays
MLLFAFVTYYTATLLAECYRTGDPDTGKRNYTYMDAVRSNLGGAKVAFCGAIQYANLVGVAIGYTIASSISMQAVSRAGCFHKRGHAVPCKSSSNPYMILFGAVQILFSQIPDFDQIWWLSIVAAVMSFTYSAIGLSLGIAQTVANGGFKGSLTGISIGADVTSTQKVWHSLQAFGDIAFAYSFSNILIEIQDTIKAPPPSESKVMQKATRLSVATTTIFYMLCGCMGYAAFGDKAPDNLLTGFGFFEPFWLIDVANVAIVVHLVGAYQVFCQPIFAFVERRAAAAWPDSAFVSRELRVGPLALSVFRLTWRSAFVCVTTVVAMLLPFFGNVVGFLGAVSFWPLTVYFPVEMYIKQRRVPRGSTKWVCLQTLSVACLVVSIAAAAGSIADVIEALKVYHPFSS

SEQ ID NO: 18799 - protein, 994 aa, Zea mays
MPVRSSVAMTTTAARALAALVLVTAAAAAAAVADDGAALVEIKKSFRNVGNVLYDWAGDDYCSWRGVLCDNVTFAVAALNLSGLNLEGEISPAVGSLKSLVSIDLKSNGLSGQIPDEIGDCSSLRTLDFSFNNLDGDIPFSISKLKHLENLILKNNQLIGAIPSTLSQLPNLKILDLAQNKLTGEIPRLIYWNEVLQYLGLRGNHLEGSLSPDMCQLTGLWYFDVKNNSLTGAIPDTIGNCTSFQVLDLSYNRFTGPIPFNIGFLQVATLSLQGNKFTGPIPSVIGLMQALAVLDLSYNQLSGPIPSILGNLTYTEKLYMQGNRLTGSIPPELGNMSTLHYLELNDNQLTGSIPPELGRLTGLFDLNLANNHLEGPIPDNLSSCVNLNSFNAYGNKLNGTIPRSLRKLESMTYLNLSSNFISGSIPIELSRINNLDTLDLSCNMMTGPIPSSIGNLEHLLRLNLSKNDLVGFIPAEFGNLRSVMEIDLSYNHLGGLIPQELGMLQNLMLLKLENNNITGDVSSLMNCFSLNILNVSYNNLAGAVPTDNNFTRFSHDSFLGNPGLCGYWLGSSCRSTGHRDKPPISKAAIIGVAVGGLVILLMILVAVCRPHHPPAFKDATVSKPVSNGPPKLVILHMNMALHVFDDIMRMTENLSEKYIIGYGASSTVYKCVLKNCKPVAIKKLYAHYPQSLKEFETELETVGSIKHRNLVSLQGYSLSPVGNLLFYDYMESGSLWDVLHEGSSKKNKLDWVTRLRIALGAAQGLAYLHHDCSPRIIHRDVKSKNILLDKDYEAHLTDFGIAKSLCVSKTHTSTYVMGTIGYIDPEYARTSRLNEKSDVYSYGIVLLELLTGKKPVDNECNLHHLILSKTASNEVMETVDPDVGDTCKDLGEVKKLFQLALLCTKRQPSDRPTMHEVVRVLDCLVNPEPPPQPQQQQQKAHAHHQLPPQPSPPAYVDEYVSLRGTGALSCANSSSTSDAELFLKFGEAISQNMV

SEQ ID NO: 18800 - protein, 295 aa, Zea mays
MSCFQGLLFCPEAASLLLHNFCIYHISPPGHELGAAPISPNAPIPSVDDLADQVADVLDFFGLGSVMCFGVTAGAYILTLFAAKYRERVLGLILVSPLCKGPTWTEWLYSKVTSNLLYYYGMCGLVKECLLQRYFSKEVRGFSELPESDIVQACKSLLEQRQSMNVWRFVQTMNERYDLSEHIKRLQCRTLIFVGDNSQFHTEAVHLTSKLDRRYCALVEVQACGSLVTEEQPHAMLIPMEYFLMGYGLYRPPSQVVECSPRSPLSPFCISPDLLSPESMGVKLKPIRTRVRLEV

SEQ ID NO: 18801 - protein, 421 aa, Monascus ruber
MPGWKSAVVALLALAGSALSHPGHHDDGDVLVSESQREELLKKWNQEIPFAGISTFAHLKSVKCLIEPDERYDTAIIGAPFDTATSYRPGARFGPRAIRAASARQIPAGSYNARAAINPYMSWATITDCGDIPITPVDNGLAERQMYEALLELGQRPAVTPAESKYGTKGISAGKPKLLMLGGDHSIALPALRALYQIYQKPITVLHFDAHLDTWSPGRYHSYWVSEQSRFTHGSFFHLAGLEGLISNTTSVHGGLRTRLTGTGLEDYTNPGPEQAFYRIHADDIDELGPVGIVEKIIERTGLDSEQPVYLSVDIDVLDPATAPGTGTPEPGGWTTREFIRILRGIEKLNIVGADIVEVAPSYDNKGETTALAAAQVAFEILSTLVKAGAGKDLGGWYGREESVVEHGERKTGQATMGGRL

SEQ ID NO: 18802 - protein, 444 aa, Zea mays
MAAAARQRGTVKWFNDTKGFGFISPEDGSEDLFVHQSSIKSEGFRSLAEGEEVEFSVSEGDDGRTKAVDVTGPDGSSASGSRLLHDGAWRPFCIFTSTRQPEQHRGSGSDRHDGGDYNHPKPQAIAAGAHSLLLTRACLSSKSPPPSLAVGLLSVLAQRTGPTPGTTGSAASLSGSSPISLGFNPTSFLPFLQTARWLPCSDLATSSSSAPSSPPRSLAPSAPPKKALIGASTGSTGIATSSGAGAAMSRSNWLSRWVSSCSDDAKTAFAAVTVPLLYGSSLAEPKSIPSKSMYPTFDVGDRILAEKVSYIFRDPEISDIVIFRAPPGLQVYGYSSGDVFIKRVVAKGGDYVEVRDGKLFVNGVVQDEDFVLEPHNYEMEPVLVPEGYVFVLGDNRNNSFDSHNWGPLPVRNIVGRSILRYWPPSKINDTIYEPDVSRLTVPSS

SEQ ID NO: 18803 - protein, 400 aa, Zea mays
MATREEHVAAPAPAVEETPEKKQASTTELPAPSGWTKKLAPTRGGRGGRFEVIFVSPTGEEIKSKRQLTQYLKAHPGGPASSEFDWGTSDTPRRSARLSEKVKATESPEGEKTPKRARSSSKRGKKEEKVDAEDANEAGEDGAAAEGKGTDVEMKDAENAEDEKKDVPSAEKTEEVDDKKDAENVEMKDAAEKTEEVEDKKEEAPTVDAAENTVEGDDKKEEPPAEKTDEKEEAPAVDAAEKNEEGDDKKEEEPPAEKKTVEKEVVPAVDAAENTEQSTGGQAQPNDVAAPESENKGDGKPAESESAPLAFVDDAAPLVIVGEEKTEDSQAAESAVPSLASSEGEKKENGGATEPAAPPPADAEKGAENSGQVNTAPQEPTAANCDKGQIQPGASAVRCT

SEQ ID NO: 18804 - protein, 330 aa, Zea mays
MESGRLIFNAPGSGAGQMLFLDCGAGGGPGGGLFHRGGRPMLGLEEGRGVKRPFFTSPDELLEEEYYDEQLPEKKRRLTPEQVLLLERSFEEENKLEPERKTELARKLGLQPRQVAVWFQNRRARWKTKQLERDFDRLKASFDALRADHDALLQDNNRLRSQVVSLTEKLQEKEDATEGGATADTAAPAVDVEASLADDVEEPAEPAATFEVLQEVKSEDRLSTGSGGSAVVDADALLYGRFAAAVDSSVESYFPGGEDHYHDCGTMGPVNHGAGGGIQSDDDGAGSDEGCSYYADEAAAAAAAFFAGHATHHHADEDEDAGQISWWMWN

SEQ ID NO: 18805 - protein, 160 aa, Zea mays
MDARMFGLENPLVAALHHLLDVPDGDAGAGGDKAGGGATRTYVRDARAMAATPADVKELAGAYAFVVDMPGLSTGDIRVQVEDERVLVISGERRREEREDAKYLRMERRMGKFMRKFVLPDNADVDKVAAVCRDGVLTVTVEKLPPPEPKKPKTIEIKVA

SEQ ID NO: 18806 - protein, 604 aa, Zea mays
MAPTTATAAAVGTKATALGVAACERDVEKLEFIEDKTRNFDAEQVRVLAEILARNNGAEYLRRHGMEGRTDRLAFKACVPVVTYEDLRPEIERIANGDRSNIISSHPITEFLTSSGTSAGERKLMPTIEDELNRRQMLYSLLMPVMNLYVPGLDKGKGLYFLFIKSETKTPGGLPARPVLTSYYKSDHFKHRPYDPYNVYTSPTAAILCTDSFQSMYSQMLCGLVARAEVLRVGAVFASGLLRAIRFLQLHWQELAHDLRTGTLSAKVTEPSIREAVAEVLRPDAGLADLVEAECGKESWEGIITRVWPNTKYLDVIVTGAMAQYIPTLKYYSGGLPMACTMYASSECYFGLNLRPMCDPSEVSYTIMPNMGYFELLPHDPDAVPPSRDDPPPRLLDLADAEVGRDYELVITTYAGLCRYRVGDILHVTGFHNAAPQFRFVRRKNVLLSVDSDKTDEAELQAAVERAARLLAPYDAAIAEYTSQADATTIPGHYVVYWELMVREGGASPDAAVFERCCLEMEEALNAVYRQGRNGDAIGPLEIRVVRGGTFEEVMDYAISRGASINQYKAPRCVSFGPIIELLNSRVVSSHFSPACPTYSPHKK

SEQ ID NO: 18807 - protein, 468 aa, Zea mays
MALGEGGDHGAALPLIADQAKHAAAGGIVRSGSMWTAAAHVITAVIGSGVLSLAWSIAQLGWVAGPAAMLVFAAVTALQSTLFADCYRSPDPEHGPHRNRTYAKAVDRNLGSNSSWVCMLLQHTALFGYGIAYTITASISCRAILKANCYHEHGHDAHCDYDGNYYMLIFGGVQLLLSFIPDFHDMAWLSVVAAAMSFSYAFIGLGLGLARTIANGTIKGSITGVRMRTPMQKVWRVSQAIGDIAFAYPYSLILLEIQDTLKSPPAENKTMKRASMISILVTTFFYLCCGCLGYAAFGSDAPGNLLTGFGLYGPYWLIDFANACIILHLLGGYQVYSQPIFQFAERLLAERFPDSGFVNGGSYTVRFACLRACRVNPLRVCLRTLYVASTTAVAVALPYFNEVLALLGALSFWPLAIYFPVEMYFIQRNVRRWSARWVVLQTFSVVCLLVSAFALVGSIEGLISKKLG

SEQ ID NO: 18808 - protein, 912 aa, Zea mays
MNPDNFTHKTNEAIVGAHEIAVEAGHAQLTPLHLAAVLAADKGGILRQAITGASGGDGAAGDSFERVLNNSLKKLPSQSPPPDSVPASTALIKVIRRAQSAQKKRGDSHLAVDQLLLGLLEDSQISDCLKEAGVSAARVRAELEKLRGGEGRRVESASGDTNFQALKTYGRDLVEQAGKLDPVIGRDEEIRRVVRILSRRTKNNPVLIGEPGVGKTAVVEGLAQRIVRGDVPSNLLDVRLIALDMGALVAGAKYRGEFEERLKAVLKEVEEAEGKVILFIDEIHLVLGAGRTEGSMDAANLFKPMLARGQLRCIGATTLEEYRKYVEKDAAFERRFQQVFVAEPSVPDTVSILRGLKEKYEGHHGVRIQDRALVVAAQLSARYIMGRHLPDKAIDLVDEACANVRVQLDSQPEEIDNLERKRIQLEVELHALEKEKDKASKARLIEVRKELDDLRDKLQPLTMKYRKEKERIDEIRKLKQRREELQFTLQEAERRMDLARVADLKYGALQEIDAAISKLESETGENLMLTETVGPEQIAEVVSRWTGIPVTRLGQNDKERLVGLADRLHQRVVGQTEAVSAVAEAVLRSRAGLGRPQQPTGSFLFLGPTGVGKTELAKALAEQLFDDENLLVRIDMSEYMEQHSVARLIGAPPGYVGHEEGGQLTEQVRRRPYSVILFDEVEKAHVAVFNTLLQVLDDGRLTDGQGRTVDFRNTVIIMTSNLGAEHLLAGMVGKNSMKVARDLVMQEVRRHFRPELLNRLDEIVIFDPLSHEQLRKVARLQMKDVAVRLAERGIALAVTDAALDIILSLSYDPVYGARPIRRWIEKRVVTQLSKMLIQEEIDENCTVYIDAAPGKDELVYRVDRSGGLVNAETGMKSDILIQVPTSSTRSDAAQAVKKMRIMEEDEDGMDEE

SEQ ID NO: 18809 - protein, 553 aa, Thalassiosira pseudonana CCMP1335
MEQPPVQIGQYVLGKNLGIGAFGKVKLATHAITGHKVAVKILNKAKIKQLGMEEKVQREINILHLCTHPHIIRLYEVIDTPTDIFLVNEYVSGGELFDYIVSKGRLSADEARNFFHQIISGVEYCHFQKIVHRDLKPENLLLDSNLNIKIADFGLSNLMRDGDFLRTSCGSPNYAAPEVISGHLYAGPEVDVWSCGVILYALLCGSLPFDDESIPNLFKKIKSGMYSLPSHLSQLARNLIPRMLEVDPMKRITIPEIRLHPWFQHKLPPYLRHPPELMEKQERVVDPAVIDELVESAASLEDSREDGAPKVLRDLRVAYELILDHKHTRLRVMEVARAIREAASATPPAFSPGGSRGATPGGYPGSASSGPGSFGGSFDARFQNRRWYLGIQSKKDPAHVMTEVYKALMALGCEWLQLSSYRIKCRWRPNMNIDDEGKSWGESKTKCMGTNEAVDVPDLSTNEYCIKIGLTLYKVQQSIYLLDFQKMTGDAFSFMTLCANIITELKTLSAASKQQQALLAQQQAAAAAAQQQAAIAAAGRQLPLGTPQNHPRK

SEQ ID NO: 18810 - protein, 534 aa, Thalassiosira pseudonana CCMP1335
MLFLLGTIDSILDFWCIFLFGYAKENIVKGVRIDTFASIVRQEQAFFDQSNTGDLISRLTSDCGEMAGDLTWFFRFSVEAAVRITGISTYMILRSPFLGLCTVGIVPVVGVINKLYGDWLAKNAQAVQNSLAEATTSAHESLACIQTVITSASEEHECEKYTKKVNTMYALNIRQMIATGIYFMVVSTFLINTCVQAALLLLGSHFVQQGKLTPEVLLAFMLYQGQLQEYTLNLFQSYSSLIKSSGAGDRVFYLLDRHPPAPGTGNESVKSLELATDEVTTDGDITLQDVTFAYPTRPETLALNRCSLEIKSGSIVALVGHSGCGKSTIISLLERLYDPDQGSIVFGEVNLRVMNLKAHREKIGLVTQDPVLFSGSIRENIGYGASATFDEIVEAAKVANAHSFINSFPNTYDEDVGERGMNLSGGQRQRLVIARALIRKPSLLLLDEATSALDPESEAAVQEALNELLQHRAGMTTIIIAHRLQTVRNADTIVVIKKGAVVEQGSHAELVRNDQGPYRRMVDRADSMGILPET

SEQ ID NO: 18811 - protein, 302 aa, Thalassiosira pseudonana CCMP1335
MSDFMINFLAGGVSGAVAKTCTAPIERVKLLIQTQDANPKIISGEVARYTGIVDCFSRVASEQGIGAFWRGNLTNIIRYFPTQAFNFAFKDGIKALFPRADKNTEFAKFFAINMASGGLAGAGSLMIVYPLDYARTRLASDVGSGKQQFSGLADCLKKTVASSGIGGLYNGIGVSIVGIIPYRGVYFGLFDTLSGLNPYQKDTNNMLRAGSKFACAQSSAIAAGYASYPMDTVRRRLQMQSEKPKEEWVYKGTADCFAKIMKDEGTSALFKGAGANALRTVGAAMVLVLYSEITAAVAASKE

SEQ ID NO: 18812 - protein, 830 aa, Thalassiosira pseudonana CCMP1335
VEEMTSSQSEGDTLALEGSKQKRRIFIVCYHLPVIVSKNPENGSWEACWAESLLAKTSGSFDPAFEPHRVGTVTTNTPITSEADKEALSSLLATMNCTVLFFDDAIRDAHYKGFCKQVLWLAFHHVDILDMHDPATWDQSQIGPWWEAYNIVNRTFAVEVAKMVGIGDVVWVHDYHLSLLPRMLRNEEQMIQRPLTKTIFFLHIPFPVSMIFKEMECGAAVLEGMLHADVVGFHGFTDARHFLSSAKRILGLSHESLAGGLIGVKYGGRTVVVTMSSVSIEPDMVDAVMHLPSTANGEAELKAKHAGKIILSGVDVAQYLSGVGLKLAAYEQLLKDIPSGRDKLVLVQRCLITGARRLDEARTIREIRLIVKRIQKKFGEQVIDYQEFFGSALPIDQRLALWKASDILMCTDVRGGLNLWPLEFVYAQKYSDRPGIVIASEFTAVFGILNGALRISPFDMKLTLGTIDKAINMSKEEREGRHLRDIEFVSSSSSNQWMRNVLRDLRYQCSTDQTDDEKASKQKSSDILSVAEFLSNEHDEHFSKLNPSSVIYAYKSTSRRVIILDFNGTIVIKEAVDSFLKRDSLGAAGDAPPYGVIQSLEMLCADPQNTVFVVSGDNKENVEQAIGGIQGLGLAASNGSCFSPPLKYGDRSRTWLALDLGVDWESVAMPIMAKFTARTNGSFIKLAHSSIGWSYYSSDPEFGSLQARYLVIELERELAAFDVRFVHLKGIVEVVPRRLNKGIIVKKILRDIAARDCNAGVNFILCMGDDISDEKMFTVSDEMLVLAFVLCKNLDKPTYAFAVAVGKKATHASQYVDDAVDVADLLVKLA

SEQ ID NO: 18813 - protein, 413 aa, Thalassiosira pseudonana CCMP1335
WAGHLPAEGNGSDKKLFYWLFEPSNKSSSDEIPLILWINGGPGCSSMDGLWLENGPLRLKVEGTSWKIDVNPYSWHNAPAWLLYVDQPVGTGLSFTRNGNYCKNDFEVDRDFHYFLEEFFFPNTPTGDESAEWMMKRPLYFSGESHAGHYIPSMMDFILKRNDGNGAAIGNGWVDPYHQYAAADAAYGYGIIGMSQRASLEDKERSCQSQLKSGKYDSNVCFALLDDIVDQSFGKNGHTVVSQYDSRLWEQKGSARSFPLGHKDVETYLGGARSQTQIPLVVNYKEVLHAIHAEESIDAGQTYAECTDPPYYALAHQDGLGPHMLFFNGINDLICNHVGNEKVLDALPWNRNNEYMMQARHAWDSENNYVHGRPDGYIKQYENLSFLKVLESGHMVPMDQPSVALAMMKTLVY

SEQ ID NO: 18814 - protein, 396 aa, Thalassiosira pseudonana CCMP1335
EIEVLRSLDHPNIVKAYEVYENKRNIYVLMEFCSGGDLYARAPYIESDAASLVTQLCSAIAHMHKNRVVHRDLKFENIMFESKDPMAKIKVLDFGLSKKFLPGASKIMTEGVGTVYTMAPQVFKGIYTSKADCWSIGVIAFILLCQEKPFAGKKRSEMVHSIMQCRYNFKAVGWRGVSEEAKDFVSKLLVTNPSVRMSAQQALDHPWLKKKEYPVLSETDSRRQNSLLVHVKDNIMAYANMSEMRRIASMVVAHKSSTQEILEMRDAFDKYDVQRDGVISMEEFKAALSEFNYTDDELNDLFIRMVRNTTSNFPDINNNGEILYTEFIAATLELRGRVEEKRIAEAFDLIDDDDSGYISKMDLTKLLGKEVPSDKVDKLIQQADNDGDGRISFEEF

SEQ ID NO: 18815 - protein, 481 aa, Thalassiosira pseudonana CCMP1335
LTLFDLVSIGVGGTIGSGIFVLNGLIAHSYAGPATFISWIISGFAALLSGCCYAELSGRIPSAGSSYAYAYVALGELPAFVVAGMLTLEFLLSGSAVARSWGDKVVEWLRIELSASDTVINLLQPGFGINPMACLVSIVTTMLVLGGVKESKLVTDVFTWIKVGLVIFMTVGGYVLFDSSNMVPVVPPEFGASGVFRGAISSFFGYLGFDAVCCVAGEAINAERNLPLSIMITLGIVTSLYVTAAIALVGMQHYNEISTESGFPEAFKANGVEWAAQLTAAGEVLTLPVVVLISVVIQPRLQYACAKDGLLPPMFGEIDETGNPRKGALFAGVLMTIFATFIPFEYLDDFVSAGILIAFSTTNCSLVIMRRESPQSDPSLLAKLLAGYNLSSFLTCITISHGLHLVIGWLFAVLFGILCIVLVVKISRQYFSTPWVPAIPCLGIFVNYMLISQLSMFGICLLLTYCVLLVVFYFIYGARHS

SEQ ID NO: 18816 - protein, 400 aa, Thalassiosira pseudonana CCMP1335
MAPGTATSAQVAVNIFISFVGAGLLGLPYAFSRSGWLLGSMSLAAVSSGNVYAMLLLVKCRKRLEEMGHTGIKGYGDVGREVMGPRGEVLVNICLVISQAGFATAYLIFIAANVRSIIEKAGRGMIIYSCVPLLALLVQFRDMKKLSPFSLIADVANLMGLSAVIFQDFEYYTHDDDIAAVDFSGLIYVTSVCIYSLEGVGLILPLESSCADREGFPKLLKQVIFGITCLMTFFGICGYVAFGDSTISPISLNLKGESAAFVQLALCLALYLTYPIMMFPVSDVLEDLFLSDSNKPPRSYWPSRSFRVFMVFTTATVAYTLPNFGKFLELVGASICTLLGFILPCYFHIKVFGKAKLKTWELILDSSVIVLGLFFGAIGTWDAILKLMEDDEVSENTPEL

SEQ ID NO: 18817 - protein, 538 aa, Thalassiosira pseudonana CCMP1335
ITTRFPPEPNGYLHLGHAKAVSFNFAVARVFANGKGRCHMRLDDTNPSKEDEEYVQSILEDVRWIQQGENVGPWFGDVRKTSDYFQLIYDAAIYLIENGEAFVDELSAEEMREYRGTLTEPGKDSPWRTRSVEENLDLFKKMRNGDFPDGKYVLRAKIDMSSPNLNMRDPVIYRIKHESHQATGDEWCIYPMYDFSHPISDAVEGISHSLCTLEFEDHRPLYDWTAERALKAGLVDVQPRQIEFSRLNLKYTVLSKRKLIKLVEDKFVSGWDDPRMPTLSGIRRRGVPPSAIRLFCERMGISKTDSNIDFTIMEDCAREVMDGESPRAFAILDPLKVTIKNWSGSLENFEVPRHPKREELGDRTVPFGSSLYIERSDFFDLEAPKGFKRLLPDGKVRLKYAYVISCDEVVRDPTTNEPVELVCSYYPETRAGVTPEGEARVNGIIQWVEASTAARCQVMQYDRLFKTEEPGKESDNFTDDINTESLQVLDNVIVEPSVAIDALSLTYQFERSGYFALDSSSTEKNLVFNRVVTLRDTW

SEQ ID NO: 18818 - protein, 226 aa, Thalassiosira pseudonana CCMP1335
MKILYVFLIVSSAFTSAFQQGRRGRSPIKRSETQLHEMNRPILDRLASFVFKLENDRVANSSVTDSKGRTGEPIEWAEGNSFANKFSELVASNDLGYTFKQSVADLIAGEYDEDSTKNSIIDFTSSNPVAMYSFTTCPFCRKAKDYLDENSIPYTTIELDLLPDNEGNEIRAQLGRLTRRTSVPSIFIGGEYIGGCNDGPGLLPMAKENGGEALREMLKNAGVSLG

SEQ ID NO: 18819 - protein, 654 aa, Thalassiosira pseudonana CCMP1335
MSEMETSGNKRSHDGESKQRSSTPASVGEIADASDENSDKAPLMNGASTDAHAAQTEGATENGSSSPPPNGDGDDSLASASVAAATNKNNDELPQASSASHPTPSFTATSQQQPPFSAALLSQAVTTSNSPLSLTAEEVNFLIYRYLQESGFTHSAFSFAHESLVGRSRPRNSADIPPGALVLFLQKGLQYVGMEESLMREMTGRGAASGGGADGEDAVMGENEDGLQLRGNASAEETLSRMNASGSEVISSASMNGKSEGVHPMPGDKRGGGVDQEAANSAIEEEDRLKSIHPNEVVELSQHTSEVFMCAWNPVFTNLIATGSGDASARIWAINPPNASAGCQQSILLPHGVNSTDKKNKDVTTLEWSSSGELLATGSYDGVARVWSRNGELKQTLKGHRGPIFSLKWNKSGNFLLSGSYDKSTIVWDVAGDVGFVKQQFSYHFAPALDVDWKDDLTFASCSTDKTVQICCVGLARPLKTYTGHADEVNAVKWDPSGTLLASCSDDCTAKVWDFNSPDNGPKWDFKSHQQEIYTVKWSPTGAGSKNPNKPLMLATASFDGSVRLWNVVDGTCSRILSRHRESVYSVSFSPSGDYLASGSLAGQLYIWNVRDGSIIKSFKGKGDIFEVAWNAEESRVAACFSCNVVSVIDFKRP

SEQ ID NO: 18820 - protein, 406 aa, Thalassiosira pseudonana CCMP1335
MSATTPLDPRVLDKMMPFMIGSYGNPHSRSHSYGWESETVVENARQQVASLIGASPKEIIFTSGATESNNLSIKGAAHFYGMKGEGTQVKKHVITTQTEHKCVLDSCRSLEQEGYDVTYLPVVAATGMVDMQELESAIREDTLLVSVMAVNNEIGTRQPVEEIGALCRKRKILFHTDAAQMLGKLPINVNEMSIDLMSLSSHKVYGPKGIGALYVRRRPRVRLDPLFSGGGQERGLRSGTLPHTLCAGFGAACELAQKEMAVDDAWVRYLSDKLCNGIEERIPMVTRNGHPEKRYPGCVNYSFAYVEGESLLMALKNVAVSSGSACTSASLEPSYVLRALGVDDELAHGSLRFGLGRFTSEAEVDFLLDLLENHVGRLRDMSPLWEMVQEGIDLKSIQWSQDAHHH

SEQ ID NO: 18821 - protein, 152 aa, Thalassiosira pseudonana CCMP1335
MKFPVAIILGATLTTATAAAFITRGNFCNAMTRSGVFNKVFGGTSSRAGSTAAYASPAEFAKAEIAANDVVVFSKSYCPFCTSTKQLLNKMNIDAKVYELDNMDNGADIQSALLDISGQRTVPNVFVKGKHLGGNDDTQAAARSGKLEEMLK

SEQ ID NO: 18822 - protein, 475 aa, Thalassiosira pseudonana CCMP1335
MADDEADADFNSSDYELLGRPARPGRPLKVAIAGGGVGGLTAALCMLKKGFDVTVYEKTAAFARFGGPIQFASNALSVIKEIDEELFERVMDKFTFTGTRACGIKDGLRADGSFRMTNDSLDYLWNPEAPADWFVKFPLRQCADLFGLPYTGVIDRPDLQEILLDECRKIKPDFIQNGNPVNGYVSKGKGNGVTVNLADGTTAEADVLVGSDGIWSAIRAQMYGEEIKKSSNNALKRQGCTYSGYTVFAGETVLKTEDYYETGYKVYIGPQRYFVTSDVGDGRVQWYAFFALPPGTKKAPSGWGDYIKSLHQGWSDEVMTVLDSTPPDSVEQRDLYDRPPELLRSWADGNVVLIGDAVHPMMPNLGQGGCQAIEDAFVLSETLEACESTQKLEDALQDFYKKRIVRVSIVQFLSRLASDLIINAFDTPWSPHDDLGKSWKSYLTFFWKVRGVAPFYGNECQHISYSLLFSTQQPS

SEQ ID NO: 18823 - protein, 454 aa, Thalassiosira pseudonana CCMP1335
VISGVNSFYLIFAGALVFFMQVGFAMLCAGSIREKNVKNVLLWNLLDSAGGAFGFWSIGYAFAYGGDDITKGKTFIGNADFFLSGETDMEFWFFQYAFACALSSIVAGTIAERTKMMAYLCYSIFLCGFVYPVCAHAFWSQNGFLSAFAAEPLWGSGVIDFAGSGPVHMCGGVAALVMAIILGPRRGRFYDDDGVVLDEPKSMGPHSVTLQFLGTFALWFGWYGFNPGSSILIASAASGDVASLAAVNTTLGSAAGALSGMFTSTIVDERKTGVYTWDTTAAMNGCLTGLVAITAGCATVEPWAAFVIGLTAGWVYLAASALMLRFKIDDAVDAIPVHMFGGSWGVFCTGLFTSPRRLITAYGNDNNVGWFYEWGRGSGNFTLLGCQLVSILFVLGWSACIFAPFCLALKTLNWLRIDPLEEEVGMDISRHKGPAYESEGSAHSDAIEKLSASR

SEQ ID NO: 18824 - protein, 307 aa, Thalassiosira pseudonana CCMP1335
MSPIGFIGLGIMGEGMAARLLSEGVAGSEDSPLIVWNRTPSKCDDLKAKFGDKRIEVKGTAREVVESCGNVFSMLSTPEASRAVFEGEDGVLAGVSNGKWIIDCATLAEEDMKRMNDQVAAKGGQFLEAPVSGSKGPAHQGTLIFLCAGSKAIYDDATVQSALSAMGKATHFFGEEVGYGTRAKLVVNSLMGTMMAAFSESLSLSESVGLDGEKMLEVISQGAIATPMYGLKGPKMLKSDHAPNFPLQHAHKDMKLAVDMAKDAGVAYAVTETAEQLFRNAREDEELNVAEEDFSAVYEGIKKASKK

SEQ ID NO: 18825 - protein, 407 aa, Thalassiosira pseudonana CCMP1335
MMMMPPAGLDDIHNLHHLTTIMPSPDQHQVTTLLSQTTTWLSDAAAVADAAKDENSWWESYIQIYKNGLAFVHDNIVDEPLRKLGFDQTWGVSIFLFTAGVRALLVPFSIQQSKSSEYMKALKPYQQKIKEKYTDKNMQNRAISKLFEDAQANPLAGCVTSFAQIPIFLGLYRSVTRLAQEGRLDEPFLWIPSLQGPVTAETNYRGTEWLTQGWVDGVPPLSWETTLAFCVMPVLLVLGQSFTMNVLQQPDDDSQDEETKKQMESTKTILKFLPLMIGFFSLQVPAGLTIYWFTSNLFTVSQSLIIRGYYAANPPEVKLPDYWGALDKGDELTADEKRAAAMAGLSTGPTFDQLMEEAKFHYVVKRDPIRENSEAWSRVQSSGSKAIPDEMKSWVDAKVEAPATVSS

SEQ ID NO: 18826 - protein, 437 aa, Thalassiosira pseudonana CCMP1335
LGVPIEEVYDGVHDGEVLGEGITGKVRLITHKDTKIQRALKRLDLSLVTNEQDLNSLLDEVKIMCALDHPNIVCLEEVYEGDTELYLTQELCGGGDLFDRLEQKVDYSYTEAECARLVMRIISSVSYLHSKNIIHRDLKLENFLFQDNTDHSELKMIDFGLSKHFHTGEVQHESVGTPYTVAPEVISGKGYDEKADVWSIGVITYLLLSGETPFGGACEGEDLMQVRQNILSGKVSFDEPIWSSVSDLAKDFINGLLCLDPKERPSTDEARQHPWILLMKRNSSLGEEESKLDSNVVTELKKYKEYSHTMKFLCEVISFTLQPDQISGLREEFEKLDENGNGEISLEGFKYALLARPDDEFPMAEWEIEEIFNGLKTRNSSAEVTIRWHEFIAACLSQCHIDDRNVRLAFDRLDTDHKGYVTLDDLKTSMDFYGSDK

SEQ ID NO: 18827 - protein, 309 aa, Thalassiosira pseudonana CCMP1335
MGLSLEIAKLLGVNLGRATVSSFADGEINVMIHENVRGKDVYIIQPTCPPVNNNLMELLLMVSCLNRASARRVTVVIPYYGYARQDRKMQARVPISAADVARLLESMGVDRVIAVDLHCGQIQGFFGPRVPVDNLEGGIVGIDHFGGKDLHNPVIVSPDAGGVYRAKKFKEGLAYKYGWEDIGIAMIIKQRARAGSVDQMDLVGDVKDCDCIIVDDMIDTAGTLCKAADVLVAKGARRVFAFASHGLLSGPGNERIANSKLEECVILNTIPSTPQRAANEKLVELSVAPLLAQTIFNIHAKRSISALFK

SEQ ID NO: 18828 - protein, 460 aa, Thalassiosira pseudonana CCMP1335
MQAGFAMLCAGSVRKKNVTNTMLKNLLDACGAALGFYSVGYAFAYGGSVDAGKKTFIGMSNFFLQDVDNYMFWLFQFAFAATSATIVAGTLAERCQMTAYLCYSIALTGFVYPVVAHSIWSQQGFLSATAQDPLWGTGFIDFAGSTVVHLTGGFTALIATYLLGPRRGRFYDAKGKQLEVPNPMPGHSAALQMLGFFILWFGWYGFIVGSAITIIGPNQDKIISTSAVNTTLSAASSCFSALLVNYVIVERQSGEGEFSLLAAMNGCLSGLVAITGGCAVIAPWAAIIVGLFAGLLYLFTSKVLVRVRIDDAVEAIPVHMTNGIWGSFAVGLFAAPSELQLVYGKANHVGLFYSWHQGSGDGTLLGVQCLGILFVVGWVFCLMSPFFLFLNYKGWFRADVLNEIAGLDLSYHDGVDMELVTQIRNQRKNLHVNSRNRFSSNSACPHHTATHVDTSTDASL

SEQ ID NO: 18829 - protein, 775 aa, Thalassiosira pseudonana CCMP1335
ESIFIVCYHLPVILTRDPDDSTWTACWSESLIAKSETHGVSSTRKTTWIGTVSNIPAQFLADENEREAIRVVLKDMDCIPIFFVEEGAESVSELHYLGFCKQVLWPSFHNLQSDWGDRLDRWWNAYQFVNRKFSKVVAELVEGGDIVWVHDYHLALMPRMLREARNETKMVFFIHVPFPTSQVFRELEHGEALLEGMLHADVVGFHAFDHARHFLNAAKRILGLGYESLMGGLIGVRHRGTKVLVTVSNVSVETDIVDALMSFPSVQDDAEALRQKHEGRTIIAGIDVAQRLSGVSLKLLAFERLLTDYPVWQSKVVLLQRCLIPGNRRVDEADTLREVRFLVKKIEMKFGAEGENIEWIVLGSVMPIDQRLSIWRSSQVALHTPIREGLNLGPLEYVYARKEPSDPGVVIASEFSAVSSVLNGALRVNPFDVQMCVTSIDCALSMTMNERDARRGRDIDFVSTCPSGLWTRNVLRDLNDATHDDSIKMKSVGDGTPEAILARELELGLERLDVRALESAYAETKKRVIIIDFNGTLVAKEAPGNGFKPSPIAAMALSRLAKDPLNTVYVVSGDSQHNLEIAVGDIPGLGLAASNGACFADPGGRERTWQYLDFGVDWNEAAMPIISKYTARTNGSFVKLTHASIGWSYYSADPEWGSLQSSHLVPELGEALQSFDVRFVALKGIVEVVPRKLNKGHIVKKILEDAQTRNKAVDFVLCMGDDIADEKMFTSVMSFSAESHCQGAYAFNVAVGKKATNASFYIDDASDVADVLVAL

SEQ ID NO: 18830 - protein, 278 aa, Thalassiosira pseudonana CCMP1335
VLSQVTGYGVAGSVHPCIHRDTCEMYAVKCIKKSDVKRPDRIKREVEFLSEVNHPNIIRIKTVFEDDKHCNIVTEMCHGGELFDQIVAKAGPNGCFQEKEATRVIESLLSAVSYLHKHDIVHRDIKPENIMFYEQDYSELSTIKLIDFGLSIRHGARQKPLSNVVGTAYYMAPELLRGSYGRSCDVWSVGVISYVLLSGLPPFNAPNDSSIMNLIRRGEYSMSGRVWEGISDNGKDFVKRLMQVDPNKRLNASEALHHPWLRDVAMWSHNHDSKVTRS

SEQ ID NO: 18831 - protein, 926 aa, Thalassiosira pseudonana CCMP1335
MTDRTMTDATTKAIEQCLSIARDNGHALAEPIHLAAALFADDESIGSRVVAKADAGSNNTTSYQQQQQQDLIDVRQVRQAIQRAILKKPTQSPPPHEASISTSLQKVIQRAISSAKANGDSLVALDHLLVAIYDDKTTKDTLESAGLSKKIATKATEEIRGGRKVTSASAEESYEALEKYGIDLVKAADEGKLDPVIGRDEEIRRIIQILCRRTKNNPCLVGEPGTGKTAIVEGLAKRILDGDVPLTLKDVALRTLDMGALVAGAKYRGEFEERLRAVLDECKKANGRIILFVDEVHLVLGAGKSDGAMDAANLLKPMLARGELRMIGATTLEEYRQHIEKDAAFERRFQKVQVNEPSVEATISILRGLSDKYEAHHGVRISDAALITAAQLSDRYITGRFQPDKSIDLLDEAAATRRVQLDSRPEKIDVLERKIMQLEIEATALGREKDKASKKRRKEVQAEVANLREELEPLLEKWEADRGRADELKDAKEKLAGLEAKAAAAERVGNYEKAADLKYGAIPDLRSHIAKIVKEEEERKEEQSEKNDDDDSLALEVVLPKHITEIISRWTGIPANKLSQTERERLLHLGDRLKERVVGQDGAVDEVTDCILRSKAGLSRPSQPDGSFLFLGPTGVGKTELARAIFSELYDEDERHLVRIDMSEYTEPHSVARLVGAPPGYIGHDEGGQLTEAVRRKPYTVVLFDEVEKAHKQVLTVLLQVLDEGRLTDSKGRTVDFTNTVIILTSNLGASALLDYDESSDESRDLARAKVMSAVRSHFSPEFLNRLSGVVMFNSLGASQLEKICQKAMKGVKKRLAGQGIRVVLEKSGTEAILDASYDRSYGARPVERYLEQTVVTKLSKMLIAGEIANGYTVFIEGISDDDSFEIVEPAKKRAKTLSYRVEKFPADMVLNEEGELVPESVPMQT

SEQ ID NO: 18832 - protein, 271 aa, Thalassiosira pseudonana CCMP1335
MSGGASVVPDLKAPPAIYEGAVAAGAAKASASWEKIFKLGIAAGCHIGFGSYLAITVGGACPQIAEANPGLQKIIFGAFGLPFGLIMTLVTGAELFTGNTALVTAAVMEGKTTTKDLIKNWVASYAGNVVGSLILAYLAFKSGTLGNAPASVAIATAKCSLPFETAFVRGILCNWLVCMAVYMASGCASLAGKMVAVWFPISAFVALGLDHSVANMFIIPLGMMRGAQITVGDFITKNLIPVTLGNIVGGALCVMGIYGSAFGKWFKSKDE

SEQ ID NO: 18833 - protein, 785 aa, Thalassiosira pseudonana CCMP1335
SSDGLIVVSAFLPVHVTRSDNGEWSADWDYEALLSMQTHLRVTRVGTSGVPVDERHKVEAVLRPFNCVPVWVPTSLFGEMYNGFCKGVLWPILHNGPIHGDGGREAELWAAFTAVNRYFTDVIIQCFNEGDLIWIHGFHLMILPSFLTRRISMAKIGIFLHTPFPSSEIFRTLWCREDLLRGMLNADQVGFHLFEYARHFLTCCRRLLGLNYGMFPDSSGGHNLAIDTNGRHVSVTSIHAGVEPPVLHQVLNHASTVDRVLSIRNQFHGKVIFAAIDRLESLKGIPLKLLGLERFLQRCPEWAGKIVVVQVGISAFERGDDYSKTRNEVLSMVTNINNRWPGTVQFQECAESEMRLQQRMALLRAADIVMVTTIRDGLNLIPLEFTIAHLDALSEQGRNDGRKRGLCILSEFSSCTRVMRGALHVNPWKISEIATAFFQALTMSEDERMRRISIASEFVTRVTTQRWALAVMLDLKGVQKNEDAGRYAGAGLGLGFRLLGMDSKFNSLDANTVARAYRNSKSRLILLDYGGTILANDNVSFWLPTEALISTLKDLCSDKRNTVFVVSGKERHSLTKTLCHIPNLGLAAEHGMFVSWPTAKVGGKRRWETLVPDQDRSWRSIAITIMEVYTSRTHGSYIEETEMKVLWQYRDADPEFGYLQSRELEDHLSNVLCGFSVDILHGGVEEGGYVEVRPKGVNKGVVSMHIVKHLEKISYNGKLEFALVIGDDHCDEPMLSVDVSSCDDHISTQLQCFTSTVGKKPSAAANYVNDVEDVQELLESLVKVT

SEQ ID NO: 18834 - protein, 597 aa, Thalassiosira pseudonana CCMP1335
MTATSEDATIGQTVSSKLKAAVAAARVTGATTPWGSLSYLEHHTPLSKLSNEKLKRHLSARGEVTEGTKAELVERLSNSISEERERKTTQELELETKHRRIADLEEQGAVYCAGKNNAGQLGLGDWNDRQCFTVIRSTRGKHVHHVSTSNGANISFATTHQHQVFVWGGTGVGLLGFTSSSKQNVMFETPQLVEELNGEEIIKTSIGSSHACAVSKGGDLFVWGNGSFGVLGTGDTNNVDTPKCLNTLDKIAVVDVVTGEKHACIKTSQHELYAWGHCANGRLGIGNNDEAVFLSSPHPIRMPTSEKVRFIACGAEHTLACTSSTVFSWGSGDGGRLGHGSDCSDRWEPTEIVALKGSHVLDLGAGTWHSACVIAIPLMKDSGWLYTWGSGYQGQLGQGTVCKSSTPALVTGLCDAFVSAVFCGSSHNAAIASDGNLYTWGSNKHGALGRLIEEKSTAFTPHPGIVIEFGTIVNRIGRGLPRSVTCGRDYTIVATHPYHGPTENEALEFFDAKRRREEAERQLQEALLRAEEDELRQIQEQEAERMKIRYLTSKRLCTMDPKCPGFTYDTQRPSLCRTCGFSVAYHTIVVDEPNTDD

SEQ ID NO: 18835 - protein, 644 aa, Thalassiosira pseudonana CCMP1335
MGMVSPLVSAQEETKVGTTIGIDLGTTYSCVGVFKNGRVEIMANDQGNRITPSYVAFMDNGERLVGDAAKNQATINPENTVFDVKRLIGRNFSDKSVQADKKLVPYKIVSNENKPMVEVDIEGKPQRFAPEEVSAMILQKMKSTAETFLGKEIKNAVVTVPAYFNDAQRQATKDAGTISGMKVERIINEPTAAAIAYGMDKTGGESNVLVFDLGGGTFDVTLLTIDNGVFEVLATNGDTHLGGEDFDQRVMQYFIKMMKKKSNVDISGDKRALQKLRKEVERVKRALSSQQQARLEIEDLAEGFDFSETLTRARFEELNNDLFKKTLGPVGRVLEDADVSKSEVDEIVLVGGSTRIPKVQSLISEFFGGKEPSKGINPDEAVAYGAAVQGGILSGEGGDATSEILLLDVTPLSQGIETVGGVMTKLINRGTTIPTKKSQTFSTHQDNQPAVLIQVFEGERSMTKDNHLLGKFELTGIPPAPRGVPQIEVSFEVDANGILQVSAEDKGTGKAEKITITAEKGRLSEEDIERMVREAEEFAEEDKKVKERIDARNGLESYLYNLKNTLDDDEKADNISAEDKKELQDIVDETLDWMEENPEADKEDYDGKQKEVENIANPIMRNFYAGGSGGGAEDDMGDFGDDEL

SEQ ID NO: 18836 - protein, 159 aa, Thalassiosira pseudonana CCMP1335
MSDSEQYHIENADAGASATIPMEAGQIKKGGYIMIKGKPCKVLSISVSKTGKHGHAKCNFTAVDIFTGKKLEDMVPSSHGTTVPIVTRTEWEIIDIGEEGELTLMDEGGNQKTDVNLPGVPENMAQEIRDAWNDGENQVSVTVQAAVGQEQVVAYKKDS

SEQ ID NO: 18837 - protein, 329 aa, Thalassiosira pseudonana CCMP1335
KFFDTARLHVTGGDGGNGCVAFRREKGEAMGGPNGGRGGAGGSVYFVADESLNTLAGLRSRIHVRAASGRNGTGKNKDGCLGDDVMVRVPCGTIVRELHTQKVAGELRTDGETLMVARGGRGGRGNAAFMTHRRTAPKFCEHGEPGAERWLSVELRLVADVGFLGMPNAGKSTLLSVASAAKPKIANYPFTTITPNLGVCDLGEESSGLVLCDIPGLIEGASLGTGLGFSFLRHVQRCKVLLHVVDGTSEDPIGDFNILNNELKMYNDLLGKKPQVVVLNKCDVPEVQEKEEELVAQLREAAGHTRVMTISAATTKNVQELMGRLKKFV

SEQ ID NO: 18838 - protein, 505 aa, Thalassiosira pseudonana CCMP1335
MFGLLFVLVEQECITPANHCCQCTSSVDPPKRRWEIAGTSWVAGTSTRPQPLQEKEEVPLNLNMNMNISLSKPAADQCSPEKCVYLDYNGTTPIHPSVLEAMLPYLQQHFGNPSSSHHYGQEPKRAVKKARLSLMRLIQSHAPIVESLIYTGCGTESNNLAIRLALLSSLHKSDNGLLHVVTTNIEHPAISECLKAYSSGGWTPKITVAYIPVDKEGLVSAKEVIAAIQPNTALVTIMTANNEVGSIQPVFEIAKICREKHVLFHTDAAQAVGKIDLRGIADTTHGADLVTLVGHKFGAPKGIAALYIRPNCFDESERTNPENGGSILLMGGGQEGGRRGGTENVPYIVGMGRAAELLLQQRPNPMQEGSVSEGWQNNKAHMEQMREHLLSLLVNGLGKENVRTNGPLDATKRLPNTLSVGLKGVQSGALLANIGDMVACSAGSACHSTSSSTAPYSSVLKAMDVPPEDAIGTLRLSVGPGTTIEEVEFAANVIVKEAREQLGLS

SEQ ID NO: 18839 - protein, 705 aa, Thalassiosira pseudonana CCMP1335
MATFILSRFASAAGRRQKSIFYSPIVASLSSSATPSTTAAAQQASDTKRSRSISLPTALALVGGSLLGGYCLGTSHTVHWKEIQKDRELPKGERGCCSCDDGDAPTATPTPPKVELTEAQIQLSSKLSEIAGKNNVYDGMKETSKNAHFLQGARLGQGTALCIVQPGTLNETVRCLQEIVDAGCVVLPQGSNTGLTGGSVPRNDKADTRPTAIMSLKRLNTHFPIDDGNRVVCLAGCGISSLADSISQWFPDRESHSILGSTFLNPTTAAGVAFGSGGVYVRKGPARTDRALYCKVTRNKWGENVVNIVNTLGIEGLEDEDFLNGSGETASSDSKHGRAKASDADYQNKVCECTNAVSRYNADTSGEDCNRSEGKVLILATVHDTFPAPSKKRVFWVSFPDMETTLAFRREVCLNNPKDLPISCEYMNRDSVNIIDRSGRILTYMIRVLGMGDVMGMMWGVKIAIEGLPFSWSPLICDKLLHTFNNWVPSAIPNKFIQVGREYDHNCVVAVGEFGDGTLARFMERMDAFVKKYNGKAVLDANDIGKKIISVVEANSSSEVTALNAFRFVAAPAFKTYCVGEDIQGVSVDYALPKNGGTIPPLTKDAAKPLKRMRYSHFGCNVVHEDIAYPLGVDTHKEKMAFKNTVEDEGGKLPAEHGHGTEYNAPTDTKKRWMKMDPLNVMNPGVGGLSSLPKYASKREQGNVL

SEQ ID NO: 18840 - protein, 972 aa, Thalassiosira pseudonana CCMP1335
MPNSSLLDEALALLGEAKELELQAAACGENSTSKSTELLDESAKKYHEACYLMKRHVGRTKKGSDNGDTVKMQNLLMENIDHFELHAEDLTKRVKDGKLVDQLRLQQQLQNTNITEEPTPGCALERNVSPKSSWEADHSSHLQTTSAANPTPPSTSTNRPRHEYEEEVARAAGKASTLLADAIESEESGDTIAITQYTEAAQQYLKAVKLMTSAKDIQTSGGETSWQSSPSQNSQSDSDEIVTLSLKRKIKQCLDRIEELKKQSESTNASCEIDIIDMQPTVISLSDTRPVNDENTQQSLTPYEIAVLRRSSLIASGLFLPWSDEEAQTYKYFSYPKPWVDPDGLLPLSEMQKERFHKWARPSEIIDMRRSTRSIHTTTMVKSISAYTIKQYCVSDCSFIAGLCITSAFERRFQKRLVSSLIYPQDKATGMPIYNPNGVYMVKLWLNGVARRVLVDDLLPVDERGDLLCSHTVTLDGSKRNIGSSTLELWVSILEKAYMKLCGGYNFPGSNSGVDLFALTGWIPERLFFPEDSTDVKDFETPTERAWNRLYSASSYGDCLITVSTSKDLDEDKAEDVGLYTAHAYAVLGVVEACNGTRLLQLKNPWASKSWNGRYSSKDKVSWSDPTFCSEVGYDADLASRRDDGVFWISWEDVLVYFRNLHLSWNPALFQYRTTVHGFWNKDVGPSDDSYNVGDNPQYIVTLSDKAIETKATLWILLSRHVSKQEQEGAEVSDYLTLHIHRIKHSKQRVYYPSSKDCVLNGSYTNNQHVLVRYDVAGSEDKHLSIVLSQYKKSNDLGYTYSVYCTEKFKLSQPEKELKLCRELKGAWTLRNASDKAYSLCVGTAGGPPGHGSFGSNPQWSVFISQRTMIQIKCFAVKTLAVNVVLVQHHGRSESGASTSEQQQQNGKRIHHLYEQPIIDSGDYRHGFTVTEPIYVSAGDYTLVASTFEVGQVGNYIVKVLSSRDVDIKPIV

SEQ ID NO: 18841 - protein, 618 aa, Thalassiosira pseudonana CCMP1335
MTMTMMYFASRAAKCLPLTKQCNRRFSSRAFASAGATRVDNVDGQRFTLAASLGLMVSAVVYDGMNQHKSTFAEAPQVASNDDGDNDGGSTTILNWSGTHSVRLAQGTYHEPETMAELVDIVSKAYQNGTHIRPVGSALSPNGLSFDERGMLSLSNLDKVISIDKANMTVTVEAGARVSQVLEALRTHGLTLPNLASIAEQQIGGFVSVGAHGTGAAIPPCDEFVTGLTIVTPSEQGVVKMTEDSHGSMFRYARLGLGGLGVLSEVTLKVVPAHRLVEQTIVLTRSEAKEQLATLLKRHKHIRYMWIPYEDAVVVVTNDDENDLPLMGAGTEISDGKGGKKKIVTEDDIKSKYSKEEQMAPLHALLRNLANTKGIEIDEETMQGMGFGDLRDMILALGNMLDPDHIKRCNKAEREFWVKAQGIRVAPSDQLLQFDCGGQQWVYEVCFPVGTYGLPNSNSMDFMDDLLKEIESSGIPAPSPIEQRWSSSSSSPLSPTSVGPCEHESYDTKHALSSWVGVIMYLPSEDNDPTGYRREFITRSFKDRYCKLVRKVGEKYGIMCHWAKLEINEANDKEEGVTESVRRRFGPKVVEEFNAARDLYDPKRVLSCSLLDQIFGAQ

SEQ ID NO: 18842 - protein, 487 aa, Thalassiosira pseudonana CCMP1335
MSSFFKRRNGGKSTSSLATNEVASQSPPVSSNASTLTSAVTASSSRIPTSTPVVSARPASRPTYTCYTCHLAIPPNTPHIHAIRPLSGERRYHQQCFICLHCHLPIDPQSQPFCFDEVPSKDGSTRREHPLHRECFADYFGWTCVVCEQRLPSVTTGDGTNNGGSGGGTKFEFLKHPFFERERMCPSHAISRRGNLDGEGDDQQQENQQQQQVVSIASTEDEIGEIRRCAGCHRFEPIFASPNKHFIDVGDSDTGRCVCLACCRTVVTTSQDATPLWEKVIDFFEGPLGLISSTETVSGVSRQNLMSFPIMVVGLDALNDNLKEHSEGVHYGSSQIMTRGLCLSEHSPVSEESIGVTAVLCLSGLPADLTASILAHEATHAWIKLHPNFRYNKPLPLKVEEGICQLVSFLFLNDGLDPSFEEHDSSSTTDESIPSDSKLRQYFKFCIETDESVYGEGFRSAACAYAKMGLQELLYYVALNHDFPPMD

SEQ ID NO: 18843 - protein, 1047 aa, Thalassiosira pseudonana CCMP1335
KPIPYSDLTVGVLKETYPGEQRVSIAPESAKMLVDAGLSVIVESGAGEHAAFSDAAYVNVGCIVLPKESVYAQADIITKIRPPDEYEVPKLAKKTFVGMISPSINTDLYNELTEQETNVFALDCVPRMLSRAQTYDVLSSQANIAGYRAVIEAANNFPRFFAGQMTAAGKVPPAKVLVLGVGVAGLAAIQTAKNMGAIVRAFDVRAVTKEQVESMGATFLEVPLKEDGAGAGGYAKEMSDEYKAAQAQLMLEQARDVDVIITTALIPGRKAPVLVNQDMLDVMKPGSVLVDLAAANGGNVAQTEANKVITTENGITIIGYTDLPSRLASTSSTLFGNNVAKFLLSIGPQTTKQQGVFQIDMEDDAVQNMLISYNGEARWPDKITPYNPPPPPTLTSEVIEKTEDELMHELNEKQRASFVKNAGIASIAAFALLAFGYNTDSPESISMLTTFALAGLAGYQVVWGVAPALHSPLMAVTNAISGMTALGGMMLLAQGARESSGIIPDSPAHWAGAVATLLSFINISGGFLITGKMLDLFRRPEDAKDYFELYALPASFLIAGLGASYFSGDMETVSGSVAIASAVCCIAAIAGLADQKTARTGNILGIAGVTFGLAATTAEMSAAGAGASAFEQVGLLGGIGSVIGASVASVVGPTELPQTVAAFHSLVGVAAMAGAAGEYLGNSHVGQLDGGTLASIYAAVFIGGITFTGSLIAFGKLSGMMKSNALALPGRDQLNLVMVSVIALGLAAFVNPDLGALAGIDRLSPESLQLASLSMAAVLSSVLGLHLVASIGGPDMPVVITVLNSYSGWALCAEGFLLGNALLAQVGALIGFSGAILTWIMCEAMGRSIVSVIFGGAGTSVAKVSGEAAVMEGEITIGSVDNMMESLLEAKNIVIVPGYGLAVAQAQFAVADIAKKLIGMGKNVRFGIHPVAGRMPGQLNVLLAEANVPYDIVFEMDEINDDFDDTDVTIVIGASDTVNSAAQDDPTCSIYGMPVLRVWKSHLVFVLKRNVGSTGYAGMENPILYKDNVEVVLGDAHETCEALRSAI

SEQ ID NO: 18844 - protein, 547 aa, Thalassiosira pseudonana CCMP1335
GKPTGTSFLPAEAIERAAAGNPIEKTKLAKDGTSAFVDIYEYAAKFRSGEMTWEEVEAADMNTRLKFVGMLHRDKRTPGQFMMRLKVPNGIVNADQMRFYADCVEKYGEEKGVVDITTRQNIQLRGVKIEDAPDIIDGLHARNQTSFQSALDSVRNMVGNPLAGIDDQEMVDTREFCNALNDLVSLDPVTQTRGNPQWGNLPRKFNIAVSGTRDDFSHTHINDIGLQACPHATTGEMGFNVVLGGYMSIKRVAESISGDMWIPANREAVVTLSEAILRIFRDESERKDRQKARLMWLVEKYGVAEFKAEVIKEINSYDRGVTVFDAQPAPSGAYERRELLGVHKQPQEGKSRVGILVPTGRLSAKECRDIADLADAYSGGEVRLTVEQNIILPNVDDGKVNALLSEKAVGSGSRLNVNAGFIEGNVVSCTGAQFCGLALIETKSHAEAIAKKLENLVTVDRPIRIHWTGCPNSCGQVQVADIGIMGGPARKSGKMMAVPGCKIFVGGKIGEDAHLSLEPFKEGVPLEEEILIPELVDILKTQFGAVD

SEQ ID NO: 18845 - protein, 590 aa, Thalassiosira pseudonana CCMP1335
MCGIFAIFSSSLDETELRNHLIKCSSSLRHRGPDWSGYIVVKSDPSAGIPLNHGIAHERLAIMDPESGSQPLVSRDGNVIVAANGEIYNYKELFKALTSPYTPATGSDCEVILPLWAEFGASIELPNKLRGMFSFILYDKSSDTFFICRDHIGKTPLYIGWGNDGSVYVGSEMKSIVGECSKFQNFPPGCCYTNKGPNAGKFMRWYQPNWAPEMLPGLAPPKDRFQADVLRHAFEKAVTRRMMSDVPWGVLLSGGLDSSLVASICARNVARRSSSFPKLHSFTVGLEGSPDLKAAKQVADFLGTIHHAYTYTIEEGADAIREVIKSVETYDVTTIRASTPMYLMSRKIKAMGIKMVLSGEGADEVFGGYLYFHKAPNEQEFFDETVDKISRLHMYDCLRCNKAMSAWGVEPRTPFLDADFLQVAMNMDPKEKMIEDTRIEKYVIRKAFDTPDDPYLPAEILWRQKEQFSDGVGYGWVDHLKAVADKEVTDQMFASAANRYPHNTPTTKEGYRYRMIFEEFFPGESAEKTVPGGKSIACSTERAMNWDATFATRADPSGRAAGVHDSAYGGDFVADTKLDSEPPSKKAKAT

SEQ ID NO: 18846 - protein, 422 aa, Thalassiosira pseudonana CCMP1335
HNWEAVDSSSMWTDVQEDADGNILLTSSTQSLASQIRQRRHRLASTDLARSSKRLVRHMLRHVYLVLDASRWSREKDPALPPARLRLETIINLASEFVNEYYDQNPLGHLGVVICQDGEAEMLTTLGGSPKKHKLALGAALVTEMKRRGPSIGGEFSLQNGIEVAGRSLGYAPRYGSREIIVITSALATCDPGDILGETLPRLLHAGIRVSAVSLQAELHICKKLAEVTGGLAGVCMDSRHLRDLVMGHAIPPPVVNTSKADDGETTTAHNGRNHNHTMICEFVTMGFPSRDDDRRSNRLIAFARTGYVCPRCRSRCSDLPSDCAVCGLRLILAPHLARTFHHLFPVRPFEELDEALVINCDRCCFGCLKVIGCKPMDSTDGAGDEGESILRFQCPECHNAFCPDCDAYLHETLHNCPGCLV

SEQ ID NO: 18847 - protein, 368 aa, Thalassiosira pseudonana CCMP1335
MTFFVIWLAYRFGSIKLGKKDAEPEFSDASYFAMLFSAGVGVGLFFYGVSEPLWHQGSNRYAMSGYHSQNEIDQWALEITMYHWGFAAWSPYLVVAISAALASYQFDLPLTVRSTFYPIFGEYVWGWVGDFIDGWSIVMTVAGVCTSLGLGTMQIATGLQRVGWVDPEKEDLMNVYIITIWVITGFATVSVVSGLKVGIKILSLAGFCLGCLILFLCFVMEKSYYLLNLVVQTTGVYLQWSIFQVPFWTDAFASLTPGEGRAVDGKSAESWWIGAWTVFYMAWWVSWACFVGIFIARISKNRSIRSVVCGVFLAPTLYALLWFPIMGGIGLRQQRQALELKQLGADYFQDEAHYMASGSSFCYDVPQS

SEQ ID NO: 18848 - protein, 596 aa, Thalassiosira pseudonana CCMP1335
MASSTTTDTYQTCLSDLSATSSNGSSPTTDALLQCISSSFDAQTASTHASINTFFLLYAATLVFFMQAGFAMVSAGCVRTNNVQNTLLKNLLDACGAALGFYTVGYAFAWGGSLDTATTERTFIGTQNFFLMDVDSSQDSFWLFQLAFCSASATIVAGTLAERCQMVAYLAYSMTLAGFVYPVVVHSIWSPSGFLSATRETDLFLDVGMIDFAGSTVVHLTGGMTALIATIVLGPRTGRFYDLRGNPLKVPKEFAGHSLALQMLGVFILWFGWYGFNAGSILNITNDLNHTIVSHTAINTTLAASAGSIMTLFLSTVVAERFTGEIVFSLSYAMNGCLSGLVAITAGCSVVEHWAAIIIGLVGGALYLACSKFLVKKRIDDAVDGIPVHLINGIWGTLSVGLFAVPELLEQVYGRGDHAGWFYSWGQGSADAKLLGAQVVGILFVSGWVMITMFPFFCFLHYVGWLRADSLEEVVGLDAAYSQGVLQTRARAQSEEENMEHYISEYVKQREEKAFIKKINSNSTHGRTILGASMHSMNIINSSMHSRKDSLPRAIESLNNSRHSGSRGSRSINDIAIDNLHGQSEDGFAAPDEGSA

SEQ ID NO: 18849 - protein, 136 aa, Thalassiosira pseudonana CCMP1335
MFRLIASTTARRSTIAISTSRPTITLPFGFARALSSAEGDKIKGTVKWFDAKKGFGFLVPDDGSAEVFVHHSAIHANGFRSLGDGEVVEFEVMQEPNGKWKALNVTGPDGSFVQGAPRRMDGGGFGGGGGYDGDRY

SEQ ID NO: 18850 - protein, 266 aa, Thalassiosira pseudonana CCMP1335
MHLSISTFTCRSIGAVALLLCIVCQSAAFTPPHRGESRFFLDTADTNEWDELLPRGLFHGVTTNPTLLERAKEPCTIDNLHLLASKALSYTEEFMCQTWGGTVEEMYENGMRISDYDRDRVVVKVPVTVDGVVAAAMLAKSGVRICLTACYNSKQALIAASAGVEYIAPYLGRMTDNGKDGFGECQRMQNIVDGLGSDTRILVASIRDADTIARLGIEGLDTYTFSPAVARELFDEPLTDEAAAEFEKAAARGSDSETLDRQPPFL

SEQ ID NO: 18851 - protein, 466 aa, Thalassiosira pseudonana CCMP1335
LSHKGITHFTPVQAKAMSPVLAGRDVIGRSRTGTGKTLAFGMPALTRMVERAKEKGNLEQGRDGSTRMRKGRLPSMIVLCPTRELARQVEDELSAVCKPLGLFSSCFHGGVSYDPQARALRQGVDVIVGTPGRVIDHIDRGNLDLSECDTVVLDEADEMLNMGFAEDVEVILEGVGSKNREKTQCLLFSATTPPWVKEIGSHYQRDVLSIDITGEQTGSRVASTVRHTAIQVPFGADAKKAILEDIIALFGKTIVFTETKKEADELVSGSVFKTLSAQAIHGDIGQKQRDATLAAFRAGAFNVLVATDVAARGIDIKDVDLVIQFEPPRDVDTYVHRSGRTGRAGASGISVLLFQQNQARDIVRIEKSLGHGFKFELLGPPSTEAALNAAAKTSALACRGVADETAAHFKDAAVSLLASSGSPEDVVARCLAAIARRTVQVNSRSLLTGEEGYATVEMTNSKGRPV

SEQ ID NO: 18852 - protein, 286 aa, Thalassiosira pseudonana CCMP1335
YQHNMTVSIAEEMNPTRRSTMEDVHVYHPPNSWNHPTCTSATFIGVYDGHGGRSIVDYLEDHLAENVGKENETNNNSSEGQLIQKALERAFLLTDIQSRIAGHTTSGATVACCVVIPKLAGDGSKRVIEIGIHAANAGDARIVLSSGVARSTPNNNNNSNNKAMRLTHDHKSTDPTEISRIESSGGIMIRGRVLGVLAVSRSLGDHGLKEFVIGRPFLSSTVVRSASPFTDGEFLIVACDGLWDVMEDQEAVDMVRKYVEQTAQILIDEAMRRGSADNITVIVHWL

SEQ ID NO: 18853 - protein, 482 aa, Thalassiosira pseudonana CCMP1335
MLSLHTARRVLYVNSKPSAITSTIRSSSRSLSSATITDDAPPPPHQPAPSNPAHNVYMWGTSKKGTIPLNLLDASAASSSAGGMFSGDEKVIDHPMRLNLNEGALQSFLTDDGSDGKDEVALDKIFCGASGTAVVLDDGRCFIMGSNKNGELGTTRERFLPLFLYPSTHRLLFLMPSSDSIGDIKETTKPIHLAIPDPVAKASLGPNFSALLTTTGDIYSFGYGGSRVNGMGCLGQGSMDSKPTPTLVESLIEDGCLAADVQVGEYSMTVLTTEGEVLTCGSGSYGRLGNLETVDQLYLEPVEMMGAEEVVQIAGGFAFNLALNKAGILHAWGRNNEGQLGTGMGLAVDMYAMESIPRPIEGDLEGRKVTRVAAGHTHAACVTSNGELFTWGMNLTHEPKLESNLLHTRIVDVQCGQNYTLALDEEGRIYSMGKGKAGVLGLASTKATAYPIRVEGIPNEERVVSMSCGWSHVACITELKTL

SEQ ID NO: 18854 - protein, 542 aa, Thalassiosira pseudonana CCMP1335
MATETTSLTDTSSTEALVSSSSNNNSLHKHLTLFDLVCVGVGATVGSGVYAVCGLIAHSQAGPATFISWSIAGVAASVSGLCYAELGGRYPTSGSSYVYVKETFENELASVVAGACLTLEYVGSASAVARSWGDKVVEYLKAYQGEGSGWKILLFLLEPGFGINPCAFAVSAAAVLILLNGVKESKCVTNLFTVLNITLLLFVTGAALVLAKAENLTPLIVPEFGTAWILRGATSSFFGYIGFDEICCIAGESKNPVRDLPRAIILTLIIVTTLYIAASIGLAGMVPYADVSETSGFPNGFRYRGYEWAAEVAALGELIALPFVVLITIMAQPRLQYAMSVDGILPPVFVEVDSSGNLVQGLKISGLLMTVIATLVPFRHLDDLISSGILIAFTMTDMSVIMVRRTSPRNNPHLLPRLVATFIVSSFLSGFLLRIRLSNEVSDSGVSLATILACSATLFIGSRIQTKCPNKGCNEQGLFLAPFVPILPLCGIFINIYLVAQLELTGCLMIFGYLGFAVGAYLYRKNRRREIERMVSMHETRS

SEQ ID NO: 18855 - protein, 444 aa, Thalassiosira pseudonana CCMP1335
MQYAVRGEVVIRADAMAAEGRKIIYTNIGNPHAVGQKPITYYRQVLSLCDLPAECGVDNTQVAAAFPSDVIERAIEMRDAIGPAGTGAYTNSQGIGKFRDDVAHFITARDEHVALPSNIFLSNGASAAIENVLTGLIGSNRDAIMIPIPQYPIYSAIISRLGARQVGYFLERRTAAVERDGLDIRALTLINPGNPTGQVLGREDLEIICTFCAKHNIVLLADEVYQRNIYDDKKEFVSAKKVAVETPGCENLQLISFHSTSKGLIGECGRRGGYMELHNIDPYVQTQLYKLASSGLCSGVDGQMMTSLMVRPPLPGEESHELFSRQEFEIFSSLKRRAVSLVRGLNDIDGMTCTPAEGAMYAFPRVELPPKALDAAAINDQTPDNLYALSLLEETGICVVPASGFGQKEGRIGFRTTFLPPEDELNQAVVEFKRHHEWFCEKYA

SEQ ID NO: 18856 - protein, 519 aa, Thalassiosira pseudonana CCMP1335
MPGRANFDIVMGDAMATVTNSSWLGGGNSNNNSGNNAPPSSNGASNNANPASAGRNEITWTRGGRQFSSSREIYTRSLYRICLKFTTSEDEDEGKPEPATAYWTLYGNPTTIGNGVPNSQRPDDICRRMDDSMSGPAAGILSCLVDEEGEQAAMFALKAGMTCGWQIRGERGDVAVRVGRAKVFSKQQGSGGGGEDKDARLLTLDAERWVLGEGASFAAGNSVFTVEKNGSYMRLTGPYAHKGVGALTIGDEFIVGRTGFSVNRFDCGISEAIGARPFTTFAAVFDGHGGDECSNYLVDALPRHIHSGEDATSELMRRILKTAYLRADKEFITPKNAPQSGSTGATVVLLGRRLFAANVGDSRVVLARKNGACLELTSDHKPSRPDEAARVRAAGGFILHKRVMGELAITRAFGDKSFKMGIKAIPRIACTTSHHSLRSLFPQVLSHDDEFLLLACDGLFDVFKSQDAITFARQELIAHRGEPAEVARILSDQAIRVRRSRDNVSILIIVLRPFWEDVN

SEQ ID NO: 18857 - protein, 361 aa, Thalassiosira pseudonana CCMP1335
MVAAVVNALNGLAKEVVEVVDTAANTQKLLAAGAALVAGGAVLTKLTGGGAKEQNFLEAEPYWDQSNVPVNVYKNKAPFTGKVVSTKRIVGPQATGETCHIVIDHQGNFPYWEGQSWGVIPPGTREKDGKPHSVRLYSIASSRYGDDFTGNTGSLCVRRATYWCPELKADDPAKKGICSNFLCDTTAGDEVMMTGPAGKVMLMPEEDPKTDYIMVATGTGIAPFRGFVRRLFFESTPAAKAYQGQAWLFLGVANSDALLYDDEFQEAKSKFPDNFRLDYALSREQNNKKGGKMYIQDKVEEYADEVFNKLNNGAHIYFCGLKGMMPGIQDMLAEVCKSKGLDYDEWIKELKGKKQWHVEVY

SEQ ID NO: 18858 - protein, 402 aa, Thalassiosira pseudonana CCMP1335
MQAGFAMVSAGCVRTNNVQNTLLKNLLDACGAALGFYTVGYAFAWGGSLDTATTERTFIGTQNFFLMDVDSSQDSFWLFQLAFCSASATIVAGTLAERCQMVAYLAYSMTLAGFVYPVVVHSIWSPSGFLSATRETDLFLDVGMIDFAGSTVVHLTGGMTALIATIVLGPRTGRFYDLRGNPLKVPKEFPGHSLALQMLGVFILWFGWYGFNTGSILNITNDLNHAIVSYTAINTTLAASAGSIMTLFLSTVVAERFTGEIVFSLSYAMNGCLSGLVAIGAGCSVVEHWAAIIIGLVGGALYLACSKFLVKKRIDDAVDGIPVHLTNGIWGALSVGLFAAPEHLEQVYGRSDHAGWFYSWGQGSADAKLLGAQVVGILFVSVWVIVTMYPFFWLLHYIGYLR

SEQ ID NO: 18859 - protein, 312 aa, Thalassiosira pseudonana CCMP1335
MASVAMVHAYADIPYDRSSFHLAGRSDCVANVASSLIVNALREIDVDLDSSSTANTEVKRHPFVGLVDHVSIMPLSSTTPSPAAEAAREIGNTLTTSNLVNVHYYGLACPNNTPLAKVRRESTGFFSSGGAIDYNNHNAKDGELTSASAKKGATTVGTPASFVENFNIRLTPNISFDRARTLTQFLRGRNIIAKGYGVEGVEALTLPYHVEGKETMYEVACNLTNPSVGSVDKVKAAIGDWIEMQKQQLMEERDKDTADERYGYEYFIDEAYPVGTTETQCIDVLAMKSGDEEAFRDLYDEEVYHNFQRYLK

SEQ ID NO: 18860 - protein, 72 aa, Thalassiosira pseudonana CCMP1335
FDTAKGFGFIVPDDGTKDVFVHQTSIKVEGFRSLAENEAVEFRVETDTNGRLRALDVTGPDGSDVQGAPFNP

SEQ ID NO: 18861 - protein, 770 aa, Thalassiosira pseudonana CCMP1335
MRFNLEGLDVFFPYDRIYLEQYQYMRALKQTLDAGGHCLLEMPTGTGKTVCLLSLITSYQLANPNCGKLVYCTRTVPEMNSVMEELGTVLAYRSEQLGAGSGVLALCLSSRRNMCIHERVLRESDREGIDAACRSMTAPWAIEKAQKARQQQSAQVVETCEYYDGFQSAGEATSMPSGVYDLEELRKWGKNKNWCPYYLTRQAINHASVLVFNYQYMLDPKVAKMVSKELESESIIVFDEAHNIDSVCIEALSVDIHERNLEQATRSLGRLSSEVSRIKASDGARLQAEYQNLVNGLVDQGLLDAPAAAVGLSSNVLSPDVINEAVPGNIRRAEHFIAFMKKIVEHLKTRLRAVSGPRGGVISETPLAFLHRMITTTSLEAKPLKFAYSRLSSLLRTLQVPNLDDFNALTDVADFASLVATYAEGLPRFAIIMEPNGSSIPGALDPVIQLACLDASLAIAPLFKRFGSVVITSGTLSPIDLYPKLLQFEPCVSESFNMSTFRPCIRPLVITRGSDQLPVSTKFDDRDDMGVVRNYGSMLVELCSSIPDGVVAFFTSYSYMESIISEWDGMGILRQLTKSKLVFIETKDVVETTLALDNYRRACDSGRGAVFLSVARGKVSEGINFDRHYGRAVIMFGVPFQYTLSHILRARLEYLQTHYQIREQDFLNFDALRQASQCVGRVIRSKIDYGLMIFADSRYNRHDKRSKLPKWILQFLGDGQLNLSTDTAIAQVKHFLRVMAQPVDQNALKEVLLTLDEVQAMSPPTLRLED

SEQ ID NO: 18862 - protein, 258 aa, Thalassiosira pseudonana CCMP1335
ILGDGHFATVRRCIERSTGKEFAIKSIKIANQNAADIKREVSLLRTLDHPSIMKLVDVFEDDEFVHIISEQYTGGELFDKIIENTTDDHCLPESEAARIIHSILSAVEYLHKCNIVHRDIKPENVLFATKQRDSQIKLIDFGLSQIHKVGDPLMTEAVGTPYYMCPEQLTRNYDRSCDLWAIGVVTFILLAGHPPFAGDDSEIFRAIRSGHYVYYPERWRGISDGAKHFVDSLLNRDPKERPTATEALEHLWFHQFQR

SEQ ID NO: 18863 - protein, 446 aa, Thalassiosira pseudonana CCMP1335
MKSHALLLALSAPTSLHAFAPPSLKASHHAFTSKLSMVDPSMLAHHDITPHVETINNFFSSLVLSDLNVDSVTSVAAPVQPLGASPSPEATKAAIEAVTASSADPNAQNGWFGFLTLPIEGLLKLIHGGLDSMGMSSNAWGISIIAMTVVIKALTFPLTKSQLESTNKMQALQPTIKSLQAKYQSNPEVMNQKIAEVYQTNEVNPLAGCIPSLVQIPVFIGLYRAVLNLAKENALDEPFLFLPNLEGPTYGADPAHGSDWLFKNWVDGVPGLGWEDTIAFLSIPVFLTISQVISMNMMQPKTDDPQQQQANVILKVLPFMIGWFALNVPAALGVYWVVNNIVTTATTLYVRNSMPKPDVSSVGGGAAGASVMEARTTDFNPTPMNERAVGFGGSSSDSGNSMKTITPIDAEIVGDDEGMEVLGDGPDIPGAPQSKGKRGKKKKRRN

SEQ ID NO: 18864 - protein, 656 aa, Thalassiosira pseudonana CCMP1335
MARVKRVDIAKTRAGLAYCLIVLIVELQASVVGAGFSLQCRSTRTHSKRPLAQKNTIYATRSSVVVKSSPTPSSEATPPQSNNSIQSTPIPELYSVDIRYNRRSPLTYDAESGRYLDVSMLEVPLNDNDTDALSTNSGDTLVQKWTQFLHSAFVPEGVTPSYYRFMRWRILQRFINANVHVIGTQSLLMGLRGMTRSGSVGEAASFAAKEGAALGAAAATNWVLKDTLGKIVRMVWASKMGRKFDPDAKRWRFRSALIYALGNGLEVSTYLHPQYFLLLAMLANSCKQMSMLTSSATRNALYNSFKRVGTTSSTVSTSNNASGSSAIVRRGGNGGIENIGDITAKGEAQIAVVDLLGIASGICLSRAVGVSVQNVFAVWVVLQIGEIFCMYHEMRSIVYRTFNFERMYMVLGKLMLDDAADNKGGDSSSTKNLIPSPEQIAANEKVFLPPDHLARRAIAFGSPGRSTLDPAELDVLVNDIFRGEKYFLVVGQDVKNDRGLSARVRQWRRRQSGHATGIDPQENCHIVLHADANNSDILKSALALVILRTKLVKLDAEMREPKDSGEHVHSSQPLRCRDCVDILLESRTEADQIFPELLRELTKQGWQPPLRSMLGRVSARAEWPIQKMSVGTPSVSTTTIEDVTLVRVGNGDNNTQ

SEQ ID NO: 18865 - protein, 462 aa, Thalassiosira pseudonana CCMP1335
GPVLGSGISGLVRLATHKATGLKYAVKCLDLGLVDTEEGLQQLREEIYIMCQLDHPNIVRLEEVYESHSEIYLVQELCLGGELFDRLDEQPDYHYTEAQCARLVKQMLCSVRYIHSKGIIHRDLKLENFLFTDTGADSELKMIDFGLSKVCSLHFKFGEVQHEAVGTPYTVAPEVIKGSYDERCDVWAIGVITYLLLSGESPFGGCGGPEPLMQVRDNILRGSFVFEPEDIWENVSSKAKDFIRHLLVTDPNHRPTAREVQKDPWLVEMADRSRKHDDRQLNPSVVKALVNFKEYSDMRKLLCEVLSFTLIPDQIQGLRSEFEKFDTDGSGEISLSALKSVLIGNAAQGSLGALTEEEVEDIFNAMRVSKTETTIHWHEFIAAGLSHCKVDERNLKLAFDRLDADHTGYITFENFMDLIGNGAVHSEEALREMWGEASMHSDEAFITYEDFLLLMKGQSTPG

SEQ ID NO: 18866 - protein, 408 aa, Thalassiosira pseudonana CCMP1335
MSKNAVIVSYARTAIGKFNGSLSHLSAPQLGSAAIRGAVARLGSDGDENSSIRIVEAYLGNVLSTGIGQAPCRQAVLGAGLRDDTICTTVNKVCASGMKSIMLAAQTIENNTHGNIHAPIAILAGGMESMSNVPHYLPSSRSGTSLGHAKLIDGIIHDGLWDPYDNVHMGTCAEKCAVEYGISREDQDNYAVESYRRAREAMELGIFDDEIVPVEGPKKRGREDPPDLMATDEEPNSVNLEKLTTLRAAFEKDGTVTAGNASSINDGASAFLLMNESQALAMGLTPLARIRGYADAEGPPVQFTTAPSKAVLIAVQQAGMELQDVEYHEINEAFSVVSIANSMILNLDMTKVNVFGGAVSMGHPIGMSGARIVGSLYQVLKKSGAGVGCASICNGGGGASAIVLERLN

SEQ ID NO: 18867 - protein, 538 aa, Thalassiosira pseudonana CCMP1335
IRTRFPPEPNGYLHIGHAKSMNMNFNLAFEKLGVPMENRRTIFRYDDTNPDAESPEYIDSLRRDLEWLGWQPERTTYSSDNFQTLYELAVKLIENGLAYVCDMTKAEMEAQQAPIPSEDVLPGRNRNTSVERNLKLFEEMKLGLHDEGAMTLRLKMDFESANPNMYDLVAYRIRYTPHPHAGKGWCIYPNYDFTHGICDSLERIDYSICTLEFETRREPYYWILWALDMYRPKVYEMSRLNLEYTVLSKRRLLKLVNANWVRGWDDPLMPTISGLRRRGYTKEIINSFCNDVGATRAMNVVEMVKLFQVARLKLAESTRRAMAVLEPIKIVITNFGEESAKAGEGGLTYEVQNSPTDPSYGSHSVTLTETIYIDSEDFRLEDDPSYFRLSPNQPVGLKYHGGNLVCDDIVRDGGNVKVLKCHLDTTEGRPKPKSHISWVPCDGIPCEVRVYNHLFTVAEPSDRWEEELNSEREIVYANAIIDPSVLELVDKKDVDKWKSNQALQFERLGYFVVDTDTTFDSSTKSGKLVFNRTVSLKE

SEQ ID NO: 18868 - protein, 615 aa, Thalassiosira pseudonana CCMP1335
MTVRRIASLAIGISLSTLTCAFVTISSSRTTIKPLNVVGEQASSIGPATLLRNLKQNLPQIDWLAEGKGSPSNKIDIPDHVATVLAQPNAPKREAESEERTHKIRSRAKQASEDAMALRGMLIGDDDANAWWREQRSIPEGGRVVTTDDPLTVLVAGGGLAGLVVAAACHSKGMKVALFEQASSYAPYGGPIQIQSNALRALQQINPEIFQELVTAGTCTADRVSGLKIGYKKGNKLAGLYDAGDWLVRFDTIGPALEAGLPATVVVDRPVIQQILVKYGFPEGTVRIKSRIQSYEDLGKGRGVSVTLEDGTKAYADVLVGADGIWSQVRKNLHGLDDGAGGFAASGAAGGALDDAEARKLARDTVAIAAKADRRFSGFTCYAALAPHRASNIENVSYQILLGEKKYFVSTDGGGDRQQWFALIREPAGGVDPEPTPEDPHPKLTRLRKEFACNGSGDADGNVWDPFALELINAASEEDIKRRDLYDGAPLLTTLDPQRLLSPWAKGPVALCGDAAHPMMPNLGQGGCQATEDGYRLVEELAKVQHSRDVPGALGRYSRVRVIRTAIIQGFAQLGSDLLVDFDLMMTIPLLGPFFLTMTQLSMPFILRYLYTPSF

SEQ ID NO: 18869 - protein, 396 aa, Thalassiosira pseudonana CCMP1335
MSSIFIVAAKRTPFGAFGGSLKALSATELGAISTKAALSSANIDPSLVDAVYFGNVIQSSPDAAYLARHVGLKCGVPIPTPALTINRLCGSGFETVIQGAKSIKLNEASIVVCGGSENMSMAPLQVDGNDARWGVALGKGLTMRDSLWDGLTDKYVGTPMGITAENLAEQYGITRQDCDEFAIRSQQTWVKAHKNGVFDLEMANVEIETKKGPKIIGTDEHPRPDTSLEQIASLRPVFKKDGVVTAANASGICDGAGTIILASEEAVREHGLQPLARLASYHVSGCDPSIMGIGPVSAIKGALESAGMTLADVDRMEINEAFAAQFLACAKALELDMDKTNLHGGAISFGHPLGASGSRITAHLANEFLRTDAGKVHVGSACIGGGQGIAVVLERV

SEQ ID NO: 18870 - protein, 294 aa, Thalassiosira pseudonana CCMP1335
PLNFAKPQAPATATVLGRTKLIADDAPGDIEHVIMKLPEGFHYVEGQSLSVIPPGTDAKSGRNHKPRLYSIASTRYGDTLDGTTISLCVRRAEFIDPVTGEKDPEKQGVCSNFLCNVNPGDTVSVAGPVGKTMLLPEDPTKDVIMVATGTGIAPFRGFMHRLFMENTLARHMFGGSAWLVLGVPVSGGLLYKEEFDCMLRNASPNQLRIDYAISREMTNTIDGGKLYVQHVIAQNGKELFNRLDNGAHIYFCGLKGMLPGILESLEGVAKEQGVDWTAKLSELKKNNQWHVEVY

SEQ ID NO: 18871 - protein, 576 aa, Thalassiosira pseudonana CCMP1335
MTTVMAPTSTNVHSNQAVNPPINNPIDKVTLSLILLVLTLVSCSPCLLQQLLQDIQQSAIYVYVVNLVPLDVPIHLIKHALFAIAIVIVLITLAAVPEKRSNISSTALFSSVDSDASFTQTNNNTPLNPAVTPSSANTNNEYSFFDEATIYIRAGSGGQGSSTYKKGVNSQNGPPDGGNGGKGGNVVLKLDDSLNTLAGLARYAWKPNSFGGGGGAKRRGGGGSGGNASGGDASTTTRVLSFRAENGADGARQCKQGRNGKDIVVRVPPGTVVQQEIMDPNANSEDGTPTYIDQGTITHANPTLVIATGGQGGEGSALHSTLQRGVRRPRTPPQGGERKRLKLTLKVVADVALVAVPNAGKSTLLSKVTRAKPKIADYPFTTVVPNLGVWVPSNALDAFDDEEEYYEYDVDGNPIASSKSKSLILCDVPGLIAGASEGVGLGHAFLRHVERCHVILHLLDATSNKVLEEYAMINRELLNYGTGKLARMPQVVVVNKLDVAFEEGNVQAGMFKSKEELEAKLQAVMPHSRLMWISAKEGEGVDDLMERVAMFVKKVKEASATEEKKQTALAAETGED

SEQ ID NO: 18872 - protein, 267 aa, Thalassiosira pseudonana CCMP1335
LGVGHHGSVRQCVDRSTGQQFAIKSLRKSEHSSKLKDLDREVMLLDEMNHERIIRLVDLYEDEEYLHLVTNLCHGGELFDRIRKKSAENRVGGCFSEQQAAKILHQLLSSVSYMHKNNVVHRDLKPENILFETTDEDSSIKIIDFGLARKHYAKHGEPPMKSLVGTPYYLAPEVLRKCYGKECDLWSVGVIAYILLSGYPPFNAPSSKGVYQKVMRGKYWFPSAEWKHVSIGAKYFIHRLLQMDPKKRMTADQALIHPWILSQLNRK

SEQ ID NO: 18873 - protein, 327 aa, Thalassiosira pseudonana CCMP1335
MDFCDNSSSNNDIHPIKCALNDDATLSTQQSSSSNWSLPSIDIAHAFDDSLVTGVHTDIFSDYEVLPIIIGTGNYGTVRECRSKSTGKVYAVKTIDKSKIGRFDHLQREIELLQMVNHDGIMQLVDCFEDSDYVHLVTEKYSGGELFDKIIDNTTSSGCLPEKEASRIIKSLLESVSYLHKNGIVHRDIKPENILFESNEEGASVKLIDFGLSKMHLRGEAPMSSTVGTAYYMPPEVIKGCYDKACDIWSIGVVTYIILSGYPPFNGANDNDIYNSIVQGNLHFPTEVWDNLSNDAREFVCKLICRDTSIRATPEEALQHPWIVRNQ

SEQ ID NO: 18874 - protein, 485 aa, Thalassiosira pseudonana CCMP1335
KRLSIDTISDNLKAMEYAVRGKIAIEADRITEELKSSTDNKYPFDHIIMTNIGNPHAVQQKALTWPRQVMALLQLPDPLGIDHPSANALFPEDAIARAKEMKAALGGHGIGAYTHSKGVKEFREDVARFIEKRDGAEEGSVDVENIFLTAGASEAITMVMTALVKDSSCGIMLPIPQYPLYSATLDLLGGHKVGYYLDEQSIWGMKIEELERSLAEAKSQGINVVAFVLINPGNPSGAVLSRQEVKDIVMFCARHNLVLLSDEVYQENVYRKEDEFFSSRRAADELGLIKNDAIQLCSFHSVSKGVFGECGQRGGYVEMVGIEQDVNDCFYKLAASKLCSNAPGQAMVSLMCKGPNRGDSSYESHEKEKQAVFEGLRDRAQLVSEGLDSIPGFSCQPATGAMYCFPSVHMPPGAIKAAQDAGLPPDTLYSLDLLQTKGICVVPASGFGQKEGRYGFRTTFLSPEMKTVVESIRDHYEQFCSKYAE

SEQ ID NO: 18875 - protein, 108 aa, Streptococcus thermophilus
DQITDHPERFLVSEMIREKVLQLTREEIPHSVAVVIDSMKRDEETDTVHIRATIMVERDSQKGIVIGKKGAMLKKIGTLARKDIELMLGDKVFLETWVKVKKIGGIKT

SEQ ID NO: 18876 - protein, 936 aa, Thalassiosira pseudonana CCMP1335
MRLDVSFLLIATGLSSVTSFAPSRSSSSSSSSSTITTSSSWLPKSPAFTATTRDHPSTTTTLLHYTATATTNIDICPQSITRPNSNPNPWEVHKFGGASLADAELYRTVGDLLLRESSGRVLQAISARAGMTDQLVAVVSSALQDITQAETELSKALEGQLSILKELAPPSITTEIEERMKKDAQDILSVVQSLRMIRSVPPSVMEVVTGFGEIWSAQTLYAYLKNKGVKCAWLDARDVLIVKSENANAGLGEKGSSSIGTLDEAPIVIATGFVATSSEGVPTTLKRSGSDYSATIFAKLCSAARVTMWKNTDGVYTADPRRVPEAFSIASLKYDEAMELAYFGAQVLHPSAMVPCIDGNIPVYVRNIFNPSFAGTVIQGRCASLSEVNKDGKVVNWRSKKGEIPIKGITSVDRVSLLTLEGASVIGGAEVAERFMGSMADAGIDVLMVTQASSESSITVVVPENQGKKALGALQSTFELELSRSNVNSISLTDVPMAIVAIVGEGMAMNSGVSASFMSALAKANVNIRVIAQGSSERQVAVVVEGKDVSRALRSAHMAFTLSQTMLSVVILGGTGKLGSALIRQLNAQRDSLAKNLNFGVCVNAIASSSKMILGKNGACLATSRAGDMLEADDAQDLDMEALTAALEADVNPHRVIIDCTNSESVADHYEEWMSKGVNVISPGRKAGAGSLERYNAIREAQRANAVEWQYESSVGSALPILTTLRDLMQTGDEVQMLRGCLSGTMAYIFHTMDEKTSFSEAVRQAVEQDFTENDIKEDLAGYDAALKIVILARELGLNISVEDVEVESLLPEELRNKEYTGTKEEVNAAILEDLKSLDEPMMERWKEAKSDDRLLRYKFVIDVPNGKCKCSLEAVDNSDTLYRLRNNENLVAFETSRYTTSPLIVKGAAAGPELSAAGMFADLLRLGRAFSTFQT

SEQ ID NO: 18877 - protein, 173 aa, Thalassiosira pseudonana CCMP1335
MRPIFFGNLSHNCVASDVENIFRNPRRPLPIDRVDMKRGYCFVFLKDAVDEVEKRRIQNYVVDISLRAEFARGDGRIKRKEDERRKKITPSETLFVVNFHEQTTKREDLEQLFQQYGELVRVDMKRNYAFVQFKTVDEAQAAKDGTNGGKLDQSEITVEFVARRMNDGDRGGR

SEQ ID NO: 18878 - protein, 262 aa, Thalassiosira pseudonana CCMP1335
RYKVSPKIIGSGSFGTVRPCMHRKTKERLAVKTISKKATFAKNKTLLKNEITLLQQIDHKNIVRVADVIQDEERIHIVMEECKGGDLFDRVIEDGVTFGERRAAEIIGSLLDAVAYLHDMNIVHRDLKAEHLMFSKDDINSTIKVIDFGLATTHKPGDEPLTAFAGSAFTVAPEVIQRKYGRECDNWSVGVITYFLLTHLMPFNANSDDEMFKQILSGSFAYPKWARTGMTEEAKDFIERLLVVNPKHRMTAKQALSHAWIR

SEQ ID NO: 18879 - protein, 619 aa, Thalassiosira pseudonana CCMP1335
MTNEKLTSTAAVLLLALSASLTTIGAFSPTPLNRLTNQRSLIVKYDVPSSSSSVVSPLGLQRRIVYEKESNQTGLFMSEDDDDGEANEIDNDGEETASTEQSSSDVEADAAAQISSYKSSLNPRRSFSSSSSSRPGSSAITPLDVTMKFGGSSLANSERVDRVAHLIQDRIRPPPNEDGTPSDEIPVRPRAVICSAMGKTTNSLLSAGEMALEGRVDVEALRTLHLGTCRDFDLPERTREDVEKLLDECEDMLNGVRLIQELSPKSLDQLVSYGERCSVRIMAARLNQIGVPAQAFDAWDVGVVTDDNYGDAKLLPSCIESIRGRFSSRIDPNVVAVVTGFIGHNTKGRITTLGRGGSDLTATAIGAALKVDEVQVWKDVDGILTADPRLVKNAVPVSKVSYDEASELAYFGAQVLHPIAMQPALKANIPVRVKNSYNPSAPGSVIDKIGNPERMVTAITCKRNVKLLDIHSLNMLGAYGFLGAVFADFEKHKCSVDVLASSEVSVSVTLDKKQHEEDITELCNDLSKFAEVELHRDRAILTLIADVKRSSDVLATVFRSFSAHGVQVEMMSQGASKVNISFIVREDQIDDAILNLHSCFFEGSCDVGMIEGGELLADK

SEQ ID NO: 18880 - protein, 188 aa, Thalassiosira pseudonana CCMP1335
MLHRLITTSTVRASRSYTARSCASSASPTAASVHQFQHLLARRSWPSSASQLTPTQQRPFSSSHDDFSPQKKHNLDGEGSDNESKILDLIDGHVKGNKVMLYMKGSPAQPMCGFSATVVQILKSQGVDFASVNVLDYPEVREGVKKYAQWPTIPQLYVEGEFVGGCDIIKDLHESGELGELLGVEKKE

SEQ ID NO: 18881 - protein, 423 aa, Thalassiosira pseudonana CCMP1335
IDAFFLIYASSLVFFMQAGFAMLCAGCVQHKNVQNSMLKNLLDACGAALGFYSVGYAFAYGGMDYSDPNKTFIGTENFFLMGVDDFMFWLFQFAFAASAATIVAGTLAERCQMTAYLCYSVAVTGFVYPVVVHSVWSPQGFLCGQAVSPLFGVGVVDFAGSSVVHLTGGCIALIATYILGPRRGRFYDHRGEPLETPVEFPGHSAALQMLGAFILWFGWYGFNTGSTLSITGPGQHQVVSLVAVNTTLAAASACVASLLASYYVIERKTGEGTFSLSSAMNGCLGGLVSITGGCAVVEPWAAVVIGFIAGLLYLFTSKLLIRLRIDDAVDAIPVHLSNGIWGTVAVGLFASSNRLQLAFGKVADTGVFMGGTGKLLGCQIIGVFFVLGWISFIMIPFFCFLHYMGWLRSESIDEVEGLDSKYH

SEQ ID NO: 18882 - protein, 289 aa, Thalassiosira pseudonana CCMP1335
MLPTHRDYGYCDIQGRRRTIEDFHTVHLYHDHQFYGVFDGHAGNLASKYAASSFYRLVEEQLSNLDQNIRLETEWKKMVASDLTRSFKDLHQGVVNVVTSSPGEVMSESGTTATVIYMTELAVVVANVGDSRAVMSHWDRDYKGRIIIKAMQLTVDHVASSKEEQKLVHARGGFLSKSGGIERVNDSLAVTRSLGDVRLAPYLSRTPYVYAMTKEEVREKCGDGRCFIVLASDGLWDVMSNQEAVDMVMEVLKTNESGAAFQEAAEMLTQEAFVRGSTDNIGVCVIAMA

SEQ ID NO: 18883 - protein, 435 aa, Thalassiosira pseudonana CCMP1335
MIQCVGDSNSQSIDTFFLIFASSLVFFMQAGFAMLCAGCVQHKNVQNSMLKNLLDACGAALGFYSVGYAFAYGGMDYSDPNKTFIGTENFFLMGVDDFMFWLFQFAFAASAATIVAGTLAERCQMTAYLCYSVAVTGFVYPVVVHSVWSPQGFLCGQAVSPLFGVGVVDFAGSSVVHLTGGCIALIATYILGPRRGRFYDHRGEPLETPVEFPGHSAALQMLGAFILWFGWYGFNTGSALTITGPGQDNVVSLVAVNTTLAAASACVSSLAANYYVEERKTGEGTFSLSSAMNGCLGGLVSITGGCAVVEPWAAVVIGFIAGLLYLFTSKLLIRLRIDDAVDAIPVHLSNGIWGTVAVGLFASSNRLQLAFGKVADTGVFMGGNGTLLGCQTIGVLFVLGWVTVLMFPFFMVLNYLGLLRASSADEVEGLDSKYH

SEQ ID NO: 18884 - protein, 344 aa, Thalassiosira pseudonana CCMP1335
MGCSGSKPQTAGATPQAPKAAAKSATKKATFDGSYKRGKTLGEGAFSVVIEATKKDTDESYAVKVVTKSKLTKEDEVALKDEIAVLNELKHQHIIRLYEVFEEPSYYYLVTEQMRGGELFDRIVSKSYYNEKEARDVCKILFESIGFCHSKSVAHRDLKPENLLLRAEDNDSDIKIADFGFAKKVLTPNSLTTQCGTPGYVAPEILEGVPYDTKSDMWSLGVIIYILLGGYPPFIEQNQRELFRKIRKGQYEFHEEYWGSVSDDAKNLISSLLTVDPAKRLSASEALNHKWMVADGDKLAAQDLGTNLAELKKYNAKRKFKAAVNAVILANKLTSLGANFKDNL

SEQ ID NO: 18885 - protein, 1071 aa, Thalassiosira pseudonana CCMP1335
MIRLASLNTASTVTKSGLRTSLLCLSRSRLTSTSSSLATRSFSSKKEEDVKPKGIPYNKLTVGVPKERFPLEKRVAATPESVSKLVKPGFNVLIEKGAGSSSYFSDADYESAGAKIVEADQVWKESDIVMKLRPPTKEELTQLDNRTIISFLYPAQNPELLQQLQDQKSTAFSMDCIPRTLSRGQTYDALSSQANITGYRAVVEASNEFGRFFAGQMTAAGKVPPAKVLVVGTGVAGLAAIQTAKNMGAIVRAFDVRPVTKEQVEAMGGQFLEVDYQEDGSGAGGYAKEMSKEWHAAAAKMLGKQCEEVDIVITTAAIPGRKAPLMITKAMVDKMKSGSVTVDLAAESGGNIETTVKDEKFITDNGVTCLGYTDLASRLPTTSSSLYSNNISKFLLSMGPQTTKVKDYFYIDHEDDAVRGMLTVENGKLMWPAPMPPPPVAAKKDDKPVEPEVIDYRAPYVQGAKQASYLAGSVLTVGCISPDPAFSAMFTTFALSNIIGVQVVLGVTHALHSPLMAVTNAISGTTALGGIHLLAHSNSAGVTALAAAATTLSTVNIVGGFIVTKKMLDMFKRPTDPPEYYHLYGIPAAGTMAFYTAGTMSGHVPEIDSAAATLSGLLCIGGIAGLSSQSTARLGAASGQAGVALGVASTLGHLHPDLGTTAKIATLMGIGGLAGKYIGDRVEPTSLPQTVAAFHSLVGVAASAAAIGDFANAPSPADLDKVHLASVYLATVIGSVTCTGSLVAFGKLDGRMGSAPMQHPARDQINMGLGAATLGAGAVVMGGPEVGTGIAALGGALTTSGALGWHMTASIGGADMPVVITVLNSYSGWALCAEGFMLDMPILTTVGALIGCSGAALTKIMCDAMNRDILSVILGGYGTKSSGKGEAMTFEGEVTQTSIDETCSLLMESESVIIVPGYGLAVAKGQYPLKEMVDVLRSAGKKVRFGIHPVAGRMPGQLNVLLAEAGVPYDIVEELEEINDDFDETDVALVIGANDTINSAAEDDPNSEISGMPVLRVWRAKQVIVMKRSLAAGYAGVENPVFLKDNTDMLLGDAKDTCEKLAAGVKALSGK

SEQ ID NO: 18886 - protein, 262 aa, Thalassiosira pseudonana CCMP1335
MRSFLMRPCPKGVGMVHCYVQRNKGIKNKLFPEYRVYLKGNNAFLMTSKKRAGNKTSNYLISMGRNDHDNRLSPNILGKLRSNFLGTEYMIYDGGKNPSYEESYYEDEDNGDVRCELGAIFYGSTTTLGAKGPRNMKTCISKVDADGKPVRVWQPMNKNDDRMADCYKNQEPSQIGKLMSLVNNPPSWNEEVRAFVLNFNGRVTMASIKNFQMVEESNPDEILLQFGRTGKDTFSLDVQWPLSPFQAFSLALSSFDSKLGCD

SEQ ID NO: 18887 - protein, 263 aa, Thalassiosira pseudonana CCMP1335
EDYHIMPRVLGSGHYGSVRECVHRNSRKWFAVKSIDKSKIGRLDHLQREVYLLSKMDHNGIMKMVDCYEDESCVHIVTEKYTGGELFDKIIEKTTKDGCFSEVKAAKIIKSLLESVAYLHENEIVHRDIKPENILFESKDENSDVKLIDFGLSRRHRKGEALMSNPVGTAYYMSPELLKGRYDKSCDIWSIGVVSYIIICGYPPFNGGEDPEIFKNILEGSFTFPKQGWEGVSDEAKDLIKCLLHTDIRKRFTAQEALMHPWI

SEQ ID NO: 18888 - protein, 271 aa, Thalassiosira pseudonana CCMP1335
ILGTGQYGSVRTCIHNSTGNHYAVKSIEKSKIGRLDHLRREVMMLIRMNHDNIMKMVDCFECEEYLYIVTEQYSGGELFDAIRNNTDKDGCFSEAKAARIIKSLLEAVAYLHENGVVHRDIKPENILFESKDEDSDVKLIDFGLSRRHRKGVDPLMCNPVGTSYYMSPELLKGRYDNGCDTWSVGVVTYILLCGYPPLNGSSDQDIQRAVLNSNHHFKGRGWHNKSPQAKDFINRLLHRDVTKRFSAKEALMHPWIVEHWMDKMNVVEGCW

SEQ ID NO: 18889 - protein, 229 aa, Thalassiosira pseudonana CCMP1335
MKMVDCYEDCDFVHIVTEQYTGGELFDKIIDNTTKDGCLSEAKAAKIIKSLLESVAYLHEHDIVHRDIKPENILFDSKGEDSDIRLIDFGLSRRHENGEAPMSNPVGTSYYMSPELLKGRYDRATDLWSVGVIAYIVLCGYPPMNGNDDREIFEAIRKGHYSFPSEGWSNKSDEAMDFIKCLLRRDPRKRFTAQEALMHPWLKQSINVVASSGSRRRLSLLRRNRVGMA

SEQ ID NO: 18890 - protein, 423 aa, Thalassiosira pseudonana CCMP1335
MQNNFIPDAIQIVSQAITADNSGDYPQALSLYRDALSRFTLGLKYEKNESRKKLILERVEGYMKRAEELRDYLNKQAEIERNGGGGGSAGGAGTKAKGSGEEDADAEKTKLRGALSGAVVTEKPNVKWDDVAGLTQAKESLKETVILPTRFPQLFTGKRRPFKGILLYGPPGTGKSYLAKAVATEADSTFFSVSSADLVSKWQGESERLVRNLFEMARESPGSRAIIFIDEVDSLCGSRSEGESDSARRIKTEFLVQMDGVGKKEGDVLVLGATNVPWELDAAIRRRFEKRVYIPLPEQEARTTMVKIHLGDTPNNLTEHDYETLGRLTEGASGSDIAVLVKEALMEPLRRCQQAQQFLPVGEFLMPCEERMQLWDVPSEKLKAPDVGVKDFERVLRHSHSTVSDEELLEYTKWTKQFGQEGA

SEQ ID NO: 18891 - protein, 556 aa, Thalassiosira pseudonana CCMP1335
MTSDSSGSKHTCALQADNYGNRRHHINQTSKPNIASSNNVAQQLHQIIHTVVILPLRRTNVADALLELLGGGAVVVVVSFFREPPLKKRTFLIGGIFLTLSQPRKFRHPASIPAHIDNHTMRRICSSSYRCVVRPRAAASTVRQDGTELLTTLSTLCGMSTPFRTQYSCNTQYSLASSTPSITVASRVYHSSSRTTFSSASDTLVQPPLPQLQNDKRGQRVWKAKHQQPDSIITTSDEEYWDKSVDDVHDRRIVDDSLARICEQQEREGGRMQQSQLGVLREDPHEDMRLLLENYTVAALASALRDREDTLQLCANLLSSNRIEEVSKILRPYEPKYIHQRRHSKGKMLDFRRGGFDNQSIELIRKGLNRMHRRVSTAHSKRAGVVLPLCNVDGVPCILFEKRSRDLRAHPDEVCLPGGMVSEGGDKSIVQTCLREMEEEIGIEHNAASVLGVLRCNWGEVHHLVGVAVTPVVCYIGQVGMSQLNPNSDEVAEVFTVPLELFLDRDRWVHKKHYAPFFTGSPHIIWGLTGYIIHRFVMDIIERYTVVFEDRDELNR

SEQ ID NO: 18892 - protein, 326 aa, Thalassiosira pseudonana CCMP1335
LFALPSSEHLGKEMAFLLGSNLNAIEVGSYSDGETNVKIEDAVRGKNVFVVCTTVTTDAIMELLLTVSALRRGSAKRICIVIPYYGYCRQDRRTGMKREPIAAADMAKLLEEMGVDSVICMDLHNPLLKGFFSPTIPVDHLVPGPVAAAYFYEELFGVTVVAAHENQVFRANVFRNALQKLSGNDDIRVALVSNSRALNAHTMSNSATVVGDVEGRQCIIVDDIINTGGTMMKAINILNEAGADSVYAWATHGVLHLPENNAPEMFQSMEGLKFLLVSNSVAVDKELPPKIRKLSVAPLLAEAIARALRHDSIKEIMNMKLPDSEK

SEQ ID NO: 18893 - protein, 968 aa, Thalassiosira pseudonana CCMP1335
MFVGLCILVAITFVLSRGQAGAVGGVGSGGVDGTTANANTVPEGTAQAQPVNAAPEGTGWAQTSHASPVIASSPAYSQAIDSADAAAGPLACNCDGKVDPSQVDIGTLRAAALASSPPHIIECSAAAAGQSQSACHLPSSTRYAALNQKGATLWMTGCSGAGKTTIATALEDRLIKAYGKHVYRLDGDNLRTGINRDLTFTEADRAESVRRTGEIATLFADSGVITLVGLISPYRADRDAVRKRHEDQNIPFYEIFLDVPVEELKKRDPKGQYARVESGQLKHFTCIDDPYEPPLNPEITLKTHELEIELPNPDGDEEIDLHLPSHLREERMLEAETLPKVLITDLDLNWLQVIGEGWASPLRGFMREGTLLEVLHFNSILYRPPNRVSMSVPITLACTSYTKTAIESSPHNAVALTTQMGNVVAILRNPEIYPNRKEEIVTRMFGVIDPGHPYIQQIYKGGDYLIGGEVELLDRIRYNDGLDQWRKTTTELMEEFKQKGADTVYAFQTRNPTHAGHAYLMRSAGENLKKEGYKNPVLWLSPLGGWTKEDDVPLDVRVKQHEEVLNSGLEHPGGLDPSKTVMAIWPAPMVYAGPTEVQFHAKSRRSAGASYFVVGRDPAGMKGSHLAVEHQDDDLYDGDHGRYVLQNSPGIGSMKMLSFVKVMYDITDNVMKIPDETRMDDFISISGSKMRLLARNGAVPCSATDIPTDLVEANCVPSGFMVPKGWDIVVDYYRNIDSGRWIPWSRPFWHDIPLRPSGQADEVVNFVTEIPLHMTAKMEVQKALPGNPIAQDSNSDGSPRYYTYGTPFFNYGFIPQTWEDPDLKDSLGNGGDNDPLDVMEIGSTRLEMGSVTPCRVLGHLELIDEGEMDNKIVCISLSDKDANSIHTMEDLERVKPGTVDKLKDWLTRYKTSDGKPENALASENPTRTSEALELINETHMRWKNLCGKGTSYVSGDHGFWLHAAGCKG

SEQ ID NO: 18894 - protein, 298 aa, Thalassiosira pseudonana CCMP1335
MSLVAMSRTQHANSGKLSGDITTCTFANKHHTSSPLHSQPRRHFSKYVVVNHSLAYQNSMASNHGLQLQLALEEGRGKDDAPFDPFSQFLDQMGSTKESEEELDGEIVDEGMNGIDEAEFKEMDQYDDDDEEEEDEEAYFASSPLYTTSGAVHRPLSERLALRAGYPAGGKFAVIHLAGFQHKVTTDDLLIVNKLKPVSEWSVGSTHTLSGDDVLLMADTNQTLVGLPGVKGGEVNVMVEEITRDKTVVVFKKRRRKHSRRKNGFRRQVTFLRVLDVKMPGEVKGESMDHGEELQVAA

SEQ ID NO: 18895 - protein, 356 aa, Thalassiosira pseudonana CCMP1335
MAKDGYTPVFTDKLQLEEALGVCKKTLEDNLKNNINLVRVSAPLFVTKASGFNDNLNGTERPATFEPRDFPGIHLEVPFSLAKWKRWALHYYGVEAGKGIVTDFRGLRCDDDVDFTHSLYVDQFDWEKHIEAENRNVEYLKETVKAIYKAFYDTEQALSKQFGIEPILPEEITFATSDDMIKEHPHATPKERENILCEKHKAVFFIGIGGLKEDGQLRHDGRAPDYDDWITQRPDGGHGLNGDLLVWNPILKQSFELSSMGIRVNPEVLLKQLDLCNVPERTEFVWHKMLLDGTLPQTIGGGIGQSRSCQFFLRCAHIGEVQHGWYNPKEVEKLKEANIFLLGLGEFESDPHAKST

SEQ ID NO: 18896 - protein, 231 aa, Thalassiosira pseudonana CCMP1335
MLRNDPKYIAKLQEEVNVLRELRGHDNVIRLYDVFCVDNELFIITELGRGGDLFHLLTTHPKHGVTEGYAAKTVSEMLSAVSFLHSRHICHRDLKLENWVLESGKDVWSPLKLIDFGLSTHFTPGHRLSRVVGSSYYVAPEVLKKSYTEACDLWSLGVIVYMLLSGAPPFYGKNDEAIKASIVHGEYQFPEELFKDVSDDAMAFVSCLLSYSIEYRYTAEQALTHPWLRAN

SEQ ID NO: 18897 - protein, 354 aa, Thalassiosira pseudonana CCMP1335
MALRKRNFVGQLENIYLLYPHTVAPGYLEYQFYDSLQGLSSYLRGVVSTTAVLSAAGVGDAAATAMSAAMTWAIRDGLGMVGGLLFSYVASSHFDAHVKEFRLVADVLNDVGLTLDMALPVVLSWTRATKGNITDHFSISGNRADVSAKESTQETLVSLIGMALGVWLSNLDSHSRVGELRRSATIASTNIEPSTCTNSIAVVHRDFPSEVSEPLWKSIISMFNNGNVHLGMRSDDVYVMMRMGASESDELRAFLTAHVLQWCIERDDFPSDTMERQKHRRENLVARSNTIVQHLVTTKKNNIKTDIDLHRTLYEHGWDMARLYLGFSPWRLPQLLSNTGSAKLLMKQKQSITT

SEQ ID NO: 18898 - protein, 420 aa, Thalassiosira pseudonana CCMP1335
MKLLKKQISSKDGSGFISLLPSTPEDLWHTYNLLQNGDLVRCTTLRKVSKESSTGSVTSNKVRMNLTIEVTKVEFDRDTLQVRISGPNRAESEHVRMGAFHTLTLELDRQFSIEKLCWDQIYLDRIEEACNPEKGAEVACVVMSGGLAHVCLVTGSVTVTKARIEVTIPKKRTGSSGHAKALTKFYDAIYRAVLMHVPFDKIKCVLLGSPGFQKDDFFKYLLAESVRREDRPLIENKGKFVLCHSSSGHKHAIEEMFSDPNIMSRVTETKLSREIEVLNKFMRLLDTNPDKAYYGYFHVQKANDELAIDSLLISDELFRSSDVVTRKKYVSLVESVRDRGGTVYVFSTMHVSGQQLQQVSGVAAILRYPLPDLEELEDIAAAHEAGLIDEDDDDEEELTDEMRKEREDARVREDMADMGL

SEQ ID NO: 18899 - protein, 460 aa, Thalassiosira pseudonana CCMP1335
MITDTLSDVRVKYHINPKEIGHGHYGVVRKCMDRDTKTWYAIKSIRKSKVGKVDVLKREIALLKEVNHPNIIKLVEVHEDQKYLHLVTELCTGGELFDRIIAKTQSDEGHFSEADAAAIVRCILDAIAYCHDVKGIVHRDLKPENFLFSTPAEDAVIKIIDFGLSRHDDMQAGIMNTKVGTPYYVAPEVLNREYTKSCDIWSIGVITYILLCGYPPFYGDTDNQIFDSVRTGRFDFPSPDWDGISDNAKDFICSLLRRDPSKRASAAEALKHPWIRENTMSSSMKNSSRSSIVFSANSITFKKYMGMQKLKKAALTYIATHVTNDDVAALRDVFTKIDVNHDGTITLEELDECLKDATFSLPSLTSDLRNLRQDLSLSGEDSLNWRDFIASMLDKSLVMKEDNIRMVFEHFKKSDRDYLLISDIAELVGGEKQAMEIMKSVDVNSDGRVDFNEFRKMMEG

SEQ ID NO: 18900 - protein, 1647 aa, Thalassiosira pseudonana CCMP1335
MRLSSAAIAAFLTASSYYTSTAFQTHQPRSLHLRRTTNTNGVNHVDSNDDSSNKKFVAALQAFKLEEGQQSNMFDGPRPLVKERDACGVGFIANTNSGDEFGTHKVLQEGLTALDCMEHRGACGGDGISGDGAGIMTQIPWKLFSEYRSDNCPQPGVGMVFLPRDETRRDQVKQVIESVCKANELDFMGWREVPVDPSTLGPNARAVVPSMWQMFVKAPQRLEDDEETRDGFERTLYLVRRRIAVELKNNGLTWDDDDGEVYFASFSSQTIVYKGMVQGCVLPQFYKDLQNEDYTTKFVIYHRRFSTNTNPRWPLAQPMRVVGHNGEINTLLGNVNWVKAREKSKVLDDVPSVLEPLVDLNRSDSANLDAVFELMTKSRHRAPCALMSLVPTAYENEPALRDNPEIVDFYKFHGGLLEAWDGPALLVFSDGKSIGASLDRNGLRPARYSITKDGTVYMMSETGVIPDLDEADIVQKGRLGPGQMINVDLATGEFKDNIKIKSEIASRHPYGEWLKKGRKDVTKMGFSEERIYDDATTTFAQGTFGWGLEDIGMQIQDMAGSAKETTYSMGDDAPIAVLSERPHTPYNYFKQRFAQVTNPPIDPLREGVVMSVAMTLGKKESIYKVSEKGARLIHLESPVLNTNEMDRIASYAEPENGGFKQATLSTRYSLEDGPEGIKAAIDAICNKAAEDVRNGVEVLILSDKASGQSELDDTTYIPPLIAVGAVHHRLIKEGLRMDTGIVVETGSAWSTHHFACLVGYGANAVHPYLALETVKQWHGLPRTQSMMESGKLSKSTVDEAQQNYRVAVENGLLKILSKMGISLLTSYHGAQIFEAMGLGEEVIDTSFKGTTSRIGGVNLSDIASETVSMRPESASEKAKLVNYGYYKPVPKMGEYHANSSDLAKLLHDAIGLDKTNDGVKPSNAANYEIFKKSLAEAPLANIRDLLDFESDRKSVSIDEVEPAAEIMKRFCTGAMSLGALSREAHETLAIAVNRVGGKSNSGEGGEDVVRGYNLEDVDDKGRSPTFPHLAGLKNGDSANSYIHQVASGRFGVTPEFLVTAKQLEIKMAQGAKPGEGGQLPGPKVSDYIATLRASKPGVTLISPPPHHDIYSIEDLAQLIHDLHAVNEKAGVSVKLVSSIGIGTVACGVAKAQADVIQISGGDGGTGASPLSSIKHAGMPWELGLSEAHSALMNNGLRERVTLRVDGGIRTGRDIAIAAMMGAEEFGFGTIAMIAEGCVMARVCHLNTCPVGVTSQKEELRKKFPGTPEHVVNFFMFVAEEIRELMAHLGYTKFEDLIGRADLLTTDSAQIDRVAKTKGVSLDGFFSGIPDSKDNREFLRASPEDGGVAKDDVICNNADVKNAIEQNSGETAVSFNIKNTDRSTCAMLAGDIARKYGNQGLEGNLNINFFGSAGQSFGAFVLPGLKVRLTGEANDYVGKGMHGGEIVVLPEADAGFVAADSSIVGNACLYGATGGDFHANGRAGERFCVRNSGAYAVCEGTGDHCCEYMTGGVVVALGTVGRNVGAGMTGGIGYFYDEDGRFDERVNGEIVKTQRIVTSVGELQLKNIIERHFEKTGSEKAEAILDNWKEEVGKFWQVYPPSEAQSAVVADTIVGETVKVSARAPSQDLCYLPVGASLNADQTTRCAD

SEQ ID NO: 18901 - protein, 157 aa, Thalassiosira pseudonana CCMP1335
MYHSLFIATLLSSCSAFAPSSTSIQRHATPSNVVVIGAPSHVRHSTQLSMSATNDKIQSLVDENPVLLFMKGSKLFPQCGFSNTACQILQSYNIDFHTVDVLADDEVRQGVKVFSDWPTIPQLYVCGEFIGGSDIMIEMYQSGELGEMIEKAKADMM

SEQ ID NO: 18902 - protein, 502 aa, Thalassiosira pseudonana CCMP1335
MLNIAGNRIVSRIRRQLFASIISQESAYFDEAKSGDLISRLSNDSWFIKSAMTTEAVSLLRGVVMSVGSTSLLFYTSPKLAVVSLLSLPPVFLAARSVGRTLKKKQKEVQDLHGGATNIAEEVFGGIKTVQLFGAEELEYDRYATAINTAHEMEIQVGKTKAAFDGVVHVAANGTLVLANQMTAGDLTGFLMYSLLMAGNVSSLSGTYAEMMKSIAAGGRVFDVIDRVPGIPSSFRATRDQADERPIHNPFKHGGHKPLSISFQDIEFSYPARPDVTVLGPRMSLVINAGENIALVGGSGSGKSTVALLLSRLYNLNGGKILVSGHDIEDIDPAILRAQIGVVSQEPLLFAGSLADNIRYGRADASDEDVVEAARAAHVTHFSDSLPNGLDTQVGHRGAQLSGGQRQRVAIARVFLKDPPIVVLDEATSALDARSEYHINQALKTMTKGRTVISIAHRLSTIKEADRIAVLKGGEVVETGTFEELVRSKGAFHKLVAQQLHL

SEQ ID NO: 18903 - protein, 597 aa, Thalassiosira pseudonana CCMP1335
KVLSILLPETKSLLIALGALTISTAATMQFPNAIGQMIDILSGIPAMPQIQHEQQLEQMNRIALQMISFFTIGAVGTFIHSALFDSIGQRIGASLRKQLFTTIIHQDQTFFDQNRAGELANRLSTDVHEVAEHLVQNIAVFLSNVVRSLTAILSMIALSPVLTMYLSPVVPLLGVCAMGFGGAIKRFSKQHLDVLAHSTHVATERFAGIATVMSFGQKGKEVDRYSEVIQAAYEYARRVAVFQGAFLGTSYMVGNAALLGVLWIGGGYVLDGEMTAGQLAGFCMYAGHLADGVFEISESVGGFLKAQGSGARLFALLDKDSITEKGTNATPFGNGESSLILPPNYNPTIRFEDVQFSYPSHPNVDILHRISFSVRQYEMIALTGSSGCGKSSVVSLLLRLYDPTHGSITLDGVDVRRLNVDWLRSQIGTVRQEPILFHASVRENISYGKPDATHEEIVEACVAANAHNFILELPNGYDTIVGERGASVSGGEKQRLSIARALLTKPRILALDEASSALDATAEQDFLRQLRHLLESKDNNLSLVLFVTHKKSVLQACDRVLVLSDGRVTETGSYDVLDSKKGDQLRKLMMGESSILK

SEQ ID NO: 18904 - protein, 418 aa, Thalassiosira pseudonana CCMP1335
MSTPTKPKVVLAYSGGLDTSVILKWLCEKGFDVIAFCADVGQHHEDFEAVKAKAVSCGALKCIVTDLRKDFVSNYIFEALKCNAIYEGRYLLGTSVARPCIAKEMVRIAAEEGASYVAHGATGKGNDQVRFEMCAQALDAKIKTIAPWRDAEFIESFKGRSDLLAYCTKHGIPVDAKPKSNYSIDENLFHTSYESGVLEDAAATYEEDMFKMTVSPKAAPEESTLVDVEFVKGIPVKLTNKTDGTTDPLELFMYANEIAGANAIGRIDIVENRFVGIKSRGVYETPGGTLLRDAHMDLEGICMDREVKRITENLGSEFARLCYNGFWFAPEMDLIRHSVTYSQKDVTGVVSLELYKGNIICRGRTSPFALYNPDLASMDIEGGGDDFDYNPSDAAGFIRINAVRLKTYAALRAKAGDN

SEQ ID NO: 18905 - protein, 277 aa, Thalassiosira pseudonana CCMP1335
VFSWGRGEDGQLGIGDTSDQDEPTYVDALRGVGIITHVTCGSYHTAAVASNGDLYTWGGGMYGKLGHGNESGHSTPRRVEALVGLSIVDIACGSRHTAVVTSKGCLYTWGDKENGVAGHGDTEGHQYTPKLLERLNGKKVVQLSACGFHTACLTDDHETFAWGEGKFGRLGNGTERNCHSPRLIESLIGKYPCQVACGGFHSAVITRDGKMYTFGGGEHGQLGHADKVNKLKPTLVEALDGVVVKQITCGWSHSVALTSEGEYHLVIQLSTLLSLCL

SEQ ID NO: 18906 - protein, 376 aa, Thalassiosira pseudonana CCMP1335
MNASPIEMTKVASRLVSAPYDELTTADCSSVPIATPVSPCASQDACSVAAEVSVTGVYGNIEDKYHVDPHVLGVGHHGSVRQCVDRSTGQRLAVKSVRKSEPSVNPKGLAREIALLDEMKHDSIIQLVDVYEDAEYVHLVTKLCEGGELFDRIVEKSSDAKHGCFSEHEAAKILHQLLNALSYMHKHNVVHRDIKPENILFETKDEDSPIKIIDFGLARKHHADRGESPMKTIVGTPYYIAPDVLRKSYGKACDLWSVGVIAYILLAGYPPFNSAGGGNKEVYAAVQRGMYYFPSADWKHVSLEAKDFIRRLLQKDPSKRMTVEQALRHPWLMNQLSGMDVEEGREDSSVEVVLSKSLRKESILCDGVVNRQIAFV

SEQ ID NO: 18907 - protein, 258 aa, Thalassiosira pseudonana CCMP1335
VLGVGHHGSVRHCINRYTGEHFAVKSICKADPSVHSKGLAREVALLVEMKHDSIIQLVDVYEDAEYVHLVTKLCEGGELFDRIVEKSSDAKHGCFSEHQAAKILHQLLNALSYMHKHNVVHRDIKPENILFETEDEDSPIKIIDFGLARKHYANKSPMKTIVGTPYYIAPDVLRKSYGKACDLWSVGVITYTLLAGYPPFNATDIKGVYAAVQSGKYCFPSADWKHISLEAKDFIRKLLQTDPSKRMTTEESLMHPWL

SEQ ID NO: 18908 - protein, 363 aa, Thalassiosira pseudonana CCMP1335
MTDLDDEGGAEMATVPEEGGDGSNNNNHADTTIVPSLQWGASDKPGWRIEMEDAICVHYPIMVPPPPSTPLDTTNDANAARTPTMGLFGVFDGHGDGGFASEFISTHLLPKLQGHSNWSVAYHSCNSSFNSTTEGDGAMMTVLTDSFHSLDEDLKTAPMKIRDGGTTAIVAVVSDGKMFVANVGDSRCILVKKRSVTEVPMSEDHKPDLSGERSRIESAGLTVQTDHKSDKELLGVARAFGDFDYKCNESLSASRQAVVCTPEIVVRERDDSSDMFLVLACDGIWDVMTNDEVGLFVAKRVSECVGKKDVVEGEALASVGDDLLEECLEKGSRDNMSVLIVGLPASGLSSVVSSDRAARALAF

SEQ ID NO: 18909 - protein, 415 aa, Thalassiosira pseudonana CCMP1335
GPVLGSGISGIVRLVKHRTTQVSYAVKCLDLALIDSEEGLKQLKEEIYIMCQLDHPNIVRLEEVYESHSEIYLVQEVCKGGELFDRLDEQPDYHYTEAQCARLVKQMLSSVRYIHNKGIIHRDLKLENFLFSELDANSELKMIDFGLSKHFTFGEVHHEAVGTPYTVAPEVIRGSYDERCDVWAIGVITYLLLSGEPPFGGCGGPETLMQVRDNILKGAFRFEPEDIWHSVSKEAKDFILSLLVLDPMHRPTAQEAKESKWLKMWSDKENGYEEAVINPNVVKALVGFKEYSDMRKLLCEVLSFTLLPEQIQDLRMEFEKYDKEGTGEITLDTLKKVLIGNASTGSLGGLSEGEVEDIFNAIRVRKGETSIHWHDFIAAGLSQCQVDDRNLRLAFERLDSEHKGYITFENMTDLL

SEQ ID NO: 18910 - protein, 102 aa, Thalassiosira pseudonana CCMP1335
MAERVLGNVKWFSNKKGYGFITPAEGATVAEDIFVHQSSIHCDGYRTLDEGWEVEFEIGHDDDGKVKAVSVTAPGGGPCTGVRKSRRPRERREGGGNNNGGG

SEQ ID NO: 18911 - protein, 416 aa, Thalassiosira pseudonana CCMP1335
MKLSIALLSMAATATAFAPSLTTPSRTTSLSMVNPLEIRTGKAQLDHSVIDRFNALPYPADKVLAEYVWVDAKGECRSKTRTLPVARTTAVDNLPRWNFDGSSTGQAPGDDSEVILRPCRIFKDPFRPRNDGVDNILVMCDTYTPAGEALPTNTRAIAAKAFEGKEDEEIWFGLEQEFTLFNLDQRTPLGWPKGGVPARAQGPYYCSVGPENSFGRAITDTMYRACLYAGIEISGTNGEVMPGQQEYQVGPCVGIDAGDQLQMSRYILQRVCEEFQVYCTLHPKPIVEGDWNGAGMHTNVSTKSMREEGGLEVIKKAIYKLGAKHQEHIAVYGEGNELRLTGKHETASIDQFSFGVANRGASVRIGRDTEAEGKGYFEDRRPSSNADPYLVTGKIMATIMEDVDVPEISALDRAEA

SEQ ID NO: 18912 - protein, 412 aa, Thalassiosira pseudonana CCMP1335
MLLPITFNGFVLIGCAVLRSTHLASSTNTVAFVPSASSIRSTSSTHHQHTVLFAESGNKYAKEDKQTQQELLQTLESKFDYEGRIASKVGDGDNSSTDTSTTNPSHRCALVTILGKPNMGKSTLLNSLLSDNLAIATSRPQTTRHAILGVMTSDHNQLCLTDTPGIIDKTAYKLQDGMMDVVKGAVKSADLFLVVTDEEDPYLGIGEDTVKMIKQMEKPVIVCVNKVDLASVDKSSVYVNTPPLAVQTIGKWRALLPNAFAIIPTCAANVDLLPIGPPLYHPDFFTDRTDRFCASELIRETLFETLGKELPYCCEVRVETFDESKRYLDEDSVGSGKNKSMIRIGATILVERDSQKGIVVGKGGQQIKDLGMNARKKLQVFFDTKIFLDLRVKVDKNWRNNAEKLKKYGYMQ

SEQ ID NO: 18913 - protein, 444 aa, Thalassiosira pseudonana CCMP1335
MLSSSLATILLISCSRSCSAFTGALTTASSQISRPFSFQLRDTPPDAPIEPPLNPLLSQIKPSKTVEVFSLVKQMEAEGETVTSLCVGEPDFAPPQCVLDAATKAMTNGQTRYTAVTGTLELRQAIADDLKSRKGIQYNPMTEIVVGNGAKQCVYQGLLASCGAGDEVIIPAPYWPSYPEMALLVGATPVILETSVNDGYLLNPTELEKCLKEHPKAKALMLCNPSNPTGGVHSTELLLRIAKVLEKYPNVVILSDEIYERLVYTEDGKCTAFASLPNMFHRTITLNGFSKSHAMTGFRLGYLAAPARFAKATSVLQGQITSCASSVSQAAGVAALREVDESWLENNAEIMKEKRDYVLRELSKMEGVSVAVPPNGAFYVLPDVSSYYGGDDTQLCLDLLKEKKLALVPGESFGAPGTVRISYATSMEELEVAMTKLREFLETR

SEQ ID NO: 18914 - protein, 502 aa, Thalassiosira pseudonana CCMP1335
MSLFDLTAFGVGCTIGSGVFVLAGVAAHSYAGPAASISYLVAGAVAALSGLPYAELSAAFPMDGSTYAYSYITLGEVFALMSSLCQTLEYGGSSAAVARSWGNKFVDWLRERHSDSDGNALPQWVDSFLDPGFGINPMAAIIAFLCTLLLLWGVQESKMATNVVSSAKLSLITFMILSATFSNWDPFVPPEFGPSGIIQGSSILFFAFLGYDQICNLSGEAKNPVKDVPRAVVYTLMIDGGIYMMAALALTAMLPYTEISTVSGFPRAFGANGWIWAEKLTAIGEIVTLPLVVLTGVQSQTRLLFAMSKDKLVPELFGRLTFAKKSASPCGCINACSNAKKEDKIAAFVPFQYMDDLISAGALFLFSLTDCCLLILRYKCPSESFLGTVEYDDTVSIFSIATVRKDYAFIPIAALQIALTVVFALLTLGITIYMALYCPEQSTTRFSLEGDGYGIGRRRFRTPLVPYLPALGIFANWFMIANVGWVGIVMLVCYLLFGILVY

SEQ ID NO: 18915 - protein, 339 aa, Thalassiosira pseudonana CCMP1335
MKVALLAATLASASAFVPSTAPKFGTSLNLKQDFLEAEPYYSQDTVKTNTYKNKAPFTGKVVSTKRIVGPKATGETCHIIIDHNGDFPYWEGQSWGVIPPGTREKDGKPHSVRLYSIASSRYGDDMTGKTGSLCVRRATYWCPELKADDPAKKGICSNFLCDTEPGAEVMMTGPAGKVMLMPEEDPKTDYIMVATGTGIAPFRSFVRRLFFEDTPAAAAYKGEAWLFLGVANSDALLYDDEFQDAKARYPENFRLDYALSREQENKNGGKMYIQDKVEEYADEVFNKLDNGAHIYFCGLKGMMPGIQDMLAEVCKSKGLDYEEWIKELKGKKQWHVEVY

SEQ ID NO: 18916 - protein, 719 aa, Thalassiosira pseudonana CCMP1335
MSVLSCFLLTVTSILPPLLVLPPTMCAPRIKFTRRAVVCITRSPQFQEKHTRTHLLGMNHRLIVTPTFATLSSSTPPCDVSDVSPQCRVNAVHLSSFLESSSTFLLPSCIASSRPMVVMQTGPSSRRCISTGKQADTSLLKESSRSNQKSVYVWEQTISSSIASSSRSKSSEGNENDMFNGVLYRPVATTSCKKEGTPIGWEVVPSKSSGGTQSPLSTIRSFISSCRTKDMINIQNLPLIHHFLPANYPQSVCPSYATYASYCFLGSIAGSSAMVLSTQALLVAVGVGTQSAAPMAAALNWVMKDGVGQLGGVVFASQLGKGGVDVDYWKVKLNKLMGSSSSKSTETSARGNFQRGTADSNPKRWRMVAALALDLSTLLEICTPWMGPQWFLPCASIANIGKNVGFLAASASRAAVHQSLCTGGSFLPPVPDNTTEKDESYDNPKKGKNVTSSSNNLGDVTAKSGSQAIVASLLGTALGIWLSRTFCSDYGTAGILAGFVILSAVHQVCTYRALKAVPLRSVDRHRLHIILNAYITADGRSVQSMVLTPSQVAEEESFLPMMAPDNSVHWLSVGDSLIDICPSGLDELEALLIRRDDISQYEKYIMKVHLADTNATTAAVDGIVQLTFLDGATDNDLLQGMFHAYIARALMISHQCHDDSNDNHNHGKRGNQIIEDSHTITNHRMPEFLEHLQQGGWQMGSGYVNVECGSSHRFRIQSV

SEQ ID NO: 18917 - protein, 379 aa, Thalassiosira pseudonana CCMP1335
MAIIDIATDASASALLSPPSGNVGGAAATTKAVVFFWAEWHAPSSPKGVFDTVFCTLASQQQSDGSDEVKFYRVLAEECPEVSSKYNVNAVPTFLFLQPDGSILDRIDGGEDVARVTQSFAKLASASSAVVTTESSPSAATTSEQQSPLNNNATDNATNTALTTRLQSLITSSPIMLFLKGTPTSPKCGFSRQAVELLTSCNLSFGYFNILEDEDVRQGLKKYSDWPTYPQLYVRGELAGGLDIMKEMAEDEGGLVSGLGLENYQSSNGATLATDASETALNNKLSALVNRHKVMLFMKGIPSSPRCGFSRQIVEILDSYNVSYDAFNILEDEEVRQGLKVYSDWPTYPQLYCGGELVGGLDIVQEMQESGDLKILLEG

SEQ ID NO: 18918 - protein, 409 aa, Thalassiosira pseudonana CCMP1335
MARSTQHPRDAVIVQAIRTPLCRARKGGLTDLPPSTLLASVLRGVLMKDPSSTATADAADYLLSPDSIQDICVGNVLSPPTAAVSFRMAALAANIPHTASISTTNRQCSSGLQAIANIAHAIQCGSIDIGIGAGVESMSTNPMHELYTKFPPEVDWDSMQSCDNSKEVMDCVIPMGVTSENVSKKNNLDRRTLDEFAALSHQKAARAQSMGKFQSEIVPVGNINKDDGIRPTTTADKLAKLKPVFDKKNGSTTAGNSSQLTDGAAAVLLMSREEAMKRRLPIIGVWKSFAVEGVPPKIMGVGPVYAIPSALQKASLRKEDVDVYEINEAFASQCYYSIQSLKLDEAKVNPNGGAIALGHPLGCTGARMVVSILNEMKRENKRFGVVSMCVGTGMGAAAVLEMEDMRSAL

SEQ ID NO: 18919 - protein, 256 aa, Thalassiosira pseudonana CCMP1335
LKSGTFSTVCRGVHRATGRQVAVKCILRKKIEPSVDAAVFEEVLIMSGLHHPYICPMIDYFEEDRCHFVVMELEKGGDLCERLNEKTTYSEADARVVCKNICEAMDFVHSKGYAHCDIKPRNYLLRSKRDDLDVRLADFGFAQHVHAPNSLTSQCGTPFFVAPEVINRKPYDQKVDMWSIGVTAYLLLCGETPFNGKNRQQLFRRISCDDPTFPDDKWGHISDEAVDFVRKLLTKDPAKRLSAVEALKHRWLVDNH

SEQ ID NO: 18920 - protein, 423 aa, Thalassiosira pseudonana CCMP1335
MQNNFIPDAIQIVSQAITADNSGDYPQALSLYRDALSRFTLGLKYEKNESRKKLILERVEGYMKRAEELRDYLNKQAEIERNGGGGGSAGGAGTKAKGSGEDDADAEKTKLRGALSGAVVTEKPNVKWDDVAGLTQAKESLKETVILPTRFPQLFTGKRRPFKGILLYGPPGTGKSYLAKAVATEADSTFFSVSSADLVSKWQGESERLVRNLFEMARESPGSRAIIFIDEVDSLCGSRSEGESDSARRIKTEFLVQMDGVGKKEGDVLVLGATNVPWELDAAIRRRFEKRVYIPLPEQEARTTMVKIHLGDTPNNLTEHDYETLGRLTEGASGSDIAVLVKEALMEPLRRCQQAQQFLPLGEFLMPCEERMQLWDVPSEKLKAPDVGVKDFERVLRHSHSTVSDEELLEYTKWTKQFGQEGA

SEQ ID NO: 18921 - protein, 282 aa, Thalassiosira pseudonana CCMP1335
MEAEFLSKTKDDEAAKAGTRWTLQDFEIGKPLGRGKFGKVYLARERRTKYIVALKVLSKAQLLKSGVEHQLRREIEIQAHLRHRHILRMYGYFYDNKNIYLILEYSPGGELYKKLTAKGRFSERTAARFISDLSLAMKYCHSKHVIHRDIKPENLLLGAKNDVKIADFGWSVHAPTSRRNTLCGTLDYLPPEMVEGREHDEQVDTWALGVLLYEFLVGVPPFETESHGATYRRIQRVDIRWPSGMPEDAKDLISKLLKKDPRARLPLECVPKHPFVLRNLRV

SEQ ID NO: 18922 - protein, 82 aa, Gratiola officinalis
RALAVFDKDTPDRWDNVARAVGGRTPEEVKRHYEILVEDIKFIESGRVPFPNYRTTGGGGSMRAEEQRMKKSEAPLNEVAMK

SEQ ID NO: 18923 - protein, 300 aa, Zea mays
MPVILREMEDHSVHPMSKSNHGSLSGNGYEMKHSGHKVCDRDSSSESDRSHQEASAASESSPNEHTSTQSDNDEDHGKDNQDTMKPVLSLGKEGSAFLAPKLHYSPSFACIPYTSDAYYSAVGVLTGYPPHAIVHPQQNDTTNTPGMLPVEPAEEPIYVNAKQYHAILRRRQTRAKLEAQNKMVKNRKPYLHESRHRHAMERARGSGGRFLNTKQLQEQNQQYQASSGSLCSKIIANSIISQSGPTCTPSSGTAGASTAGQDRSCLPSVGFRPTTNFSDQGRGGLKLAVIGMQQRVSTIR

SEQ ID NO: 18924 - protein, 995 aa, Zea mays
MKSLFKSKIRWQHRSNDPASPAAPPPQTSGPPPASSPSGTAPAPALSVSTPVSPSPSSAAATPTGAAAAAAAAGAGGEDYISSEEEFQMQLAMALSASSNSDCAGGLDGEQIRKAKLMSLDRFAAHRDETHTAEFLSRRYWDYNFLDYHEKVIDGFYDIFGSSIESSRQGKMPSLADLQTGIGDLGFEVIVVNRAIDSTLQEMEQVAQCILLDFPVANIALLVQRIAELVTDNMGGPVKDANDMLTRWLEKSTELRTSLQTSLLPIGCIKIGLSRHRALLFKILADSVGIPCKLVKGSNYTGGDDDDAINIIKMDNEREFLVDLMAAPGALIPADILSWKGNSLNSNRKLGLNRTAGSSSTVDANVDPTVLPLEPKGGQLPLFSSGDWMSDIDSGYEAAEIAASTQTSSGVTPSVSAGSVFGSSWMLVNHDQSDGPSTSAGTSSQQKVVPQSEHQRNLNRLPDLQEIPESKYLFADLVPSGDNKSKKTSVPFKGPDHRNNELQKRRENIVPNAGRPQQRLVMKNWSPYNDVSNNKQYNYVEDSFARRNVGNNAASSSSQMPRPAVRSNLNSGLHNDASYHNYDSIMAGTSAMKITSTAETGKVPERVLRGDLDKGQTNYRLEDQHVIVQPPQGRLPWGNPAEGRVPMNRVQSQAKQHLENMDAKQDHKKLLPDPKKSPLDRFMDTSLPSRNMDMRSQRLDFDDVSECEIPWEDLVIGERIGLGSYGEVYRADWNGTEVAVKKFLDQDFYGDALDEFRSEVRIMRRLRHPNIVLFMGAVTRPPNLSIVSEYLPRGSLYKILHRPNCLIDEKRRIKMALDVAKGMNCLHTSMPTIVHRDLKSPNLLVDNNWNVKVCDFGLSRLKHSTFLSSKSTAGTPEWMAPEVLRNEQSNEKCDVYSFGVILWELATLRMPWSGMNPMQVVGAVGFQDRRLDIPKEVDPLVARIIFECWQKDPNLRPSFAQLTSALKTVQRLVTLCHQENQSPHVQQEISVHLTP

SEQ ID NO: 18925 - protein, 550 aa, Zea mays
MAADDAARSSRRMDLNLYLGLPRAPRARRPDLGFDLALGTPMLSSSSPSSSAASADAPPLETDPLHPPYSPSRADLMRPPTPAHEPYNPFAPEAHPPYVPPPPLPVAGALPVLADELEFGFSDAHLGLVERLDRPSSSTASSSFRPDLAERYRHLMSLGGSRFFRPRRFRSDLPPLSSELPSLENDAAVQPPEPEEPVHDTVEENKVVAHGAVVGVSEDDGTEHGKSAPMFECNICFEMADEPVVTSCGHLFCWPCLYQWLHVHSSHKECPVCKGEVTEGNITPIYGRGNSGSEMEKKVAEDGKASGPKIPPGPHGNRLESFRQQFHHLRPISRRLGEAHGFLSTWRRILDRHLANSMSRFEGPPEPSVSETAQHASSLGRMTTRLRARRWQREAENPTSIDSSAPDSGQPVNNTFDLPRRSSNPFPSEGMDLLRHIAFTGLEDSERFATAVSELRRIARASPYGASTSSNPPNPEPFGETQIATALAADQASNSSTMAVIQEDAAFTGSAGEPSNAGSSRPLRRRGSDALGSLDVDGGDLHQNKRRRLN

SEQ ID NO: 18926 - protein, 320 aa, Zea mays
MASTRAAATLLLLLALAGTSSAQLSTGFYSYSCPGVYGAVKSVMQSAIAREKRMGASILRLFFHDCFVQGCDASLLLDDTPSFQGEKMANPNNGSVRGFEVIDAVKSAVEKLCPGVVSCADILAIAARDSVVILGGPTWDVKVGRRDSTTASFSGANNNIPPPTSGLANLTSLFAAQGLSQKDMVALSGAHTIGQARCTNFRAHIYNDTDIDAAFARTRQSGCPSTSGAGGDSNLAPLDLQTPTVFENNYYRNLLAKKGLLHSDQELFNGGATDALVQSYVGSQSAFFADFVAGMIKMGDITPLTGSNNGQIRKNCRRVN

SEQ ID NO: 18927 - protein, 320 aa, Zea mays
MASSSVSSCLLLLLCLAAVASAQLSPTFYDSSCPNALSTIKIAVNAAVQKENRMGASLLRLHFHDCFVQGCDASVLLADNAATGFTGEQGAAPNAGSLRGFDVIANIKAQVEAVCKQTVSCADILAVAARDSVVALGGPSWTVPLGRRDSTTASLSLANSDLPPPFFNLGQLITAFGNKGFTATEMATLSGAHTIGQAQCKNFRDHIYNDTNINQGFASSLKANCPRPTGSGDGNLAPLDTTTPYSFDNAYYSNLLSQKGLLHSDQELFNGGSTDNTVRNFASNSAAFSSAFAAAMVKMGNLSPLTGSQGQIRLTCSTVN

SEQ ID NO: 18928 - protein, 290 aa, Zea mays
MAQEDVHLDDAGLALGLSLGSGSGGASGAARHGGISRRLSREVRLPSPHPLEPSLTLSLPDEATATGSGGGGAAHSVSSLSVAGVKRERVDDAEGERASSTAALPRACAGAEDDDDDGSTRKKLRLTKEQSALLEDRFKEHSTLNPKVALAKQLKLRPRQVEVWFQNRRARTKLKQTEVDCELLKRCCESLTEENRRLQRELQELRALKFAPHPQAPPSSATQAGAAAGVVPAPPPPLYMQMQMPAAATLSLCPSCDRLAGPGAAAKAEPRPKAAATHHFFNPFTHSAAC

SEQ ID NO: 18929 - protein, 339 aa, Zea mays
MESGRLIFNAPGSGAGQMLFLDCGAGGGPGGGLLHRGGRPMLGLEEGRGVKRPFYTSPDELLEEEYYDEQLPEKKRRLTPEQVHLLERSFEEENKLEPERKTELARKLGLQPRQVAVWFQNRRARWKTKQLERDFDRLKASFDALRADHDALLQDNHRLRSQVVSLTEKLREKEATEGDANGAAAALPAVGVVRASVADDVGEPEPEPEPEAEAAAFEERQVKSEDRLSTGSGGSAVVDAADALLYNGRIGGAAVDSSVESYFPGAEVQDQYHGCGTMGPVTHGAGGIQSDDDDGAGSDEGCSYYADEEAAAAFLSEHTHHADGDDEDAGQVSWWWMWN

SEQ ID NO: 18930 - protein, 350 aa, Zea mays
MGDSGGSVVSVDVERISFGGKEHHIQTNHGPVSVAVYGDHDKPALVTYPDIALNYMSCFQGLLFCPEAASLLLHNFCIYHISPPGHELGAAPISPNAPIPSVDDLADQVADVLDFFGLGSVMCFGVTAGAYILTLFAAKYRERVLGLILVSPLCKGPTWTEWLYSKVTSNLLYYYGMCGLVKECLLQRYFSKEVRGFSELPESDIVQACKSLLEQRQSMNVWRFVQTMNERYDLSEHIKRLQCRTLIFVGDNSQFHTEAVHLTSKLDRRYCALVEVQACGSLVTEEQPHAMLIPMEYFLMGYGLYRPPSQVVECSPRSPLSPFCISPDLLSPESMGVKLKPIRTRVRLEV

SEQ ID NO: 18931 - protein, 263 aa, Zea mays
MSAAAAAEVGKEKGAATPGPGPGPGGACELCGAAARVYCGADEATLCWGCDAQVHGANFLVARHARSLLCRGCARPTPWRAAGPRLGPTVSLCVRCVRRGPAGAVGVGGDEEMGGAGDGDAEDDDDEDDDSEEEEEEEEEEGEGENQVVPWTEDAEATPPPVGSSTSSSSREAPANGAERAAKENAPCSTSQPGLCHHASSARHGGRSDEATSSRSGGRVLASRHRKRSPSDFFSSDGSPQPGNGTPAARNCSDAGIARNDFT

SEQ ID NO: 18932 - protein, 332 aa, Zea mays
MAASAAAATRLSGGGVALLLLALLAAGTSTSSAQLSTGFYSHSCPGVHDAVRSVLQAAIAREQRMGASILRLFFHDCFVQGCDASLLLDDTPSFQGEKMAKPNNGSVRGFEVIDAIKSAVDKACPGVVSCADILAIAARDSVVTLGGPNWDVKLGRRDSRTASFSGANNNIPPPTSGLANLTSLFAAQGLSQKDMVALSGAHTIGQARCTNFRAHVYNDTNIDGAFARARRSVCPAAASSGSGGDNNLAPLDLQTPTVFENDYYRNLVCRKGLLHSDQELFNGAATDAQVQAYVSSQSAFFADFVAGMVKMGDISPLTGSSGEIRKNCRRIN

SEQ ID NO: 18933 - protein, 787 aa, Zea mays
MGAAGGGRCVRLGAAPVLVLLLIAAATLPRLARAVTDAGDVSAINGLYVALGSPKLPGWSASAGDPCGESWQGVTCTGSSITSIVFNAANLGGQLGSLGNFTSITEINLSNNNIGGTIPEDLPVTLQNLFLSDNQLTGSIPMSLSELHSLTAMSLNDNHLDGKLPDAFDSLTGLVNLDISSNNFSGPLPPSLGSLTSLTTLHMQDNQLSGTLNVLQDLPLKDLNVENNMFSGPVPPKLLNIPNFKNDGNPFNTSIAPSTSPSSTPTGSRPTQTPSSSSSPSGSPPPSSAASNSSSGSTARNSNSPSSKKNKSSPLRTVGYVLLAIVLFIVLVLLVIFCLSKYQERQSRRDYSTSQLGRVHQRVEEPKSKQASVQSKHEAKKGSSEVPERKKPREINLAVPVAIEKPPEKRKERVINLERTESEIFAAAPPPPPPPPPPPPPPTPPPPPPPPRLPSPPPVEKVTVNPIVLPEKRVSTPPRTGPSTSATSFSVASLQQYTNSFQEQNLIRESRLGKVYLAELPEGKLLEVMKIDNANGRIPVDDFLELVARISDIRHPNILELVGYCAEYEQRLLVYNYFSRKTLHDVLHEGEDLDEPLSWNARLHIVLHAAKALEYLHDTCEPPVVHQNFEPANVLLDNRCSVRVAECGLAQLMASGSVTQLSGRMRALLNYEAPEIHESEPFTRQSDVYSLGVVMLELLTGRKPYDSSRPRDEQHLVRWANSQLHDMESLSKMVDPSIRGECSVILLSRFADIISQCIQPGPEFRPAMSQIVQDLARIVGASGAVSE

SEQ ID NO: 18934 - protein, 753 aa, Zea mays
MPAMGRSSRACSLLGSTHLLLLLLLSVGSAVAQNGSTWKTLSGKAPAVVAKGGFSGLFPDSSDYAYQFVGISSSPDTTVWCDVRLTKDGAGICLPSINMDNCTIIASVFPQGKKTYKVNGVSTAGWFSVDYTSTVLLQNVSLKQSVLSRTPAYDGLFQINPVENIFTLYKAPAVWLNVQHDSFYSQFKLSMRSYILSLSKQFIVDYISSPEVNFLTSISGRVSKKTKLVFRFLDERSIEPSTNQTYGSMLKNLTFVKTFASGILVPKSYIWPVTPDNYLLPYTSVVDDAHKAGLEIYAADFANDLTISYNYSFDPLAEYLFFIDNGAFSVDGVLTDFPITPSEAVGCFSNLNTSKIDHAKPLVISHNGASGDYPDCTDQAYEKAVADGADVIDCPVQVTKDGILICMSSVDLMDVTTVAKSQFASQVTTINSLKAGSGVFTFNLTWDDISKNLKPMISNPMSTYNLYRNPRNKNAGNFMRLSDFLTFANGKDLSGIMITVEHAAFMAEELGFGVVDAVIKALDDSGYSKQTAQNVMIQSTNSSVLVKFKQETKYNLVYMIEESVRDAAPSSLADIKKFADAVSVGTTSVFPETHYYLTNQTNKLVPTLKSAGLQVYVYVLMNEFASQPNDFFADATSQINAYVQSAKVDGVITDFPGTAHRYKLNSCTSMGKNMPLFMQPPQPGGLLSTILPDAQPPAAAPMPLLTDADVAEPALPPVSNTTTAASPSHAALRMRTHVLSIATLLMLCASLLI

SEQ ID NO: 18935 - protein, 458 aa, Zea mays
MPCNACVSLVNYYVRIGVACMQMTASHLPYTRNGLKFFTKRGGLTSGDVENICDRAAHKYVARKTGVGGGGRGTPPVVMRVDLMSAYAQHLRDIIKQRVAHPTHYDTPLRGFKVVVNAGNGCGGFFTWDVLEKLGADTTGSLHLEPDGRFPNHIPNPEDATAMSLTRGAVLAQGADLGVVFDTDVDRSGVVDAGGAAINGDRLIALMSAIVLGEHPGTMVVTDARASDGLTRFVESRGGRHCLYRVGYRNVIDKGVQLNADGVETHLMMETTGHGALKENYFLDDGAYMVVKIIIEMVRMKLAGVEGGVGSLIRDLQEPAESVLLRMDVMGEPKDAKERATHAVEAFKNYIQEDKLFGWVLDDCGDCSVAEGCLMDTNNDPIDVDAHMYRAKLYDENQRAVGMVHIRQSVHNPNIALNMQSYAPGGCKSMAKDLLERFLLASGLNGFLDISQVEKFVQ

SEQ ID NO: 18936 - protein, 225 aa, Zea mays
MANRAGEPVARTNSDGGGGGSKDSGSFECNICLDLAQDPVVTLCGHLFCWPCLYEWLHVHAHSQECPVCKAVVEEGKLVPLYGRGGSSAVPRARSVAGVEIPSRPTGQRPSTAPQPDHNNHYPHQNPWFNGAGAPPVANGRWGSYTFSAAIGGLFPLLSFQVHGFPQATAYGPAAGFPYGYGHSFHGWHGHGFPRQAPQGQQVDAYLKVLLLAVGVLVIASLIAF

SEQ ID NO: 18937 - protein, 517 aa, Zea mays
MVDTVAGATDYRGQPASRAATGGWKPSVFVMAMEIAERFAYKGVAANLITYLTGPLGQPMARAAASIDAWKGVSQMLPLPLACVADAWLGRYRAIVLASLIFAVSMGALSLSSALPALRGGHVAIFYVALYLVALGEGAHKPCAQAFAADQFDEKDPRESVARSSFFNWWYFGMCAGTAVTTMVSSYVQDNVGWGLGFGIPCIVIVASLALFLLGTRSYRFYTTAAASPFSRVGKALLALVQSWAPKHRTRKLGDSDGDAVAVEEVKSVLRLLPIWASCIIYAIIFSQTSTFFTKQAATLDRRIGARFKVPAAALQTFISVSIVVFIPVYDRLFVPLARRYTGRPTGITMLQRVGAGLALALVAVALSALVEMKRLRVAAEAGLVNTPKAQLPMALWWMVPQYVLIGVADVFAMIGLQEFFYDQVPNAVRSLGLALFLSIFGIGHLLSSFLISVIDKTTAKSGTSWFSNNLNRAHLDYFYWLLTGLCAVELVAFVIFSRVYVYKRKVGNDGGNGDFV

SEQ ID NO: 18938 - protein, 170 aa, Zea mays
MAPQGRRATRRYGGVPEMGGASASASSGAGADERPKGEDGKQGQVAAGAQPPAGGKKRGRTAGDKEQNRLKRLLRNHVSAQQARERKKAYLTELEAKAKGLELRNAELEQRVSTLQNENNTLRQVIDVSGKEFKFTWASGRGELCDIYEERQSGEDGNGLLLECGSTWRK

SEQ ID NO: 18939 - protein, 425 aa, Zea mays
MEEEPPHLFLCPISMELMDDPVTVSTGVTYDRRSIERWIFGCGRTTCPATMQSLANLDLTPNHTLKRVIGSWLDRGSPSTSASASPSASSLSSPAHELATPLSRILEAERLRSALAGLDETPFKVTALKNMRACMAGDVAMQCEFVSSGGIQAAGRVMAQALAESGAGGDFSAFTACEEAAAVLALLPLADAASVGLLLAPEHMRPLMALLQRGSAEARLHAMDIVTKISNAGAGDWTARVEVDDVLKSLLELLADEVSARLSSRALDVLLDVVELSRVGPTKAVEVGAVHVLVELLANADDRHDAERILLLLKRLCKCPEGRTAFAEHDLSVAAVAKTMLRVSELATQLAVKVLWLVSVVAPSEKVLEDMVLTGAVAKLLGLLHVESPPATKQKTVRMVRINGVFWRQYPCFPTDLRDYLRLLD

SEQ ID NO: 18940 - protein, 438 aa, Zea mays
MWTASAHIITAVIGAGVLSLAWAMAQLGWAAGTAMMLLFAGISYYTSTLLAECYRCGEPGTGKRNYTYTEAVRAILGGAKFKLCGVIQYANLVGIAVGYTIAASISMLAIKRADCFHDRGHRNPCRSSSNPYMILFGAVEIVFSQIPDFDQIWWLSIVAAAMSFTYATIGLALGIAQTVANGGFKGSLTGVNVGDGITPMQKVWRSLQAFGNISFAYSYAYILIEIQDTIKAPPPSEVTVMKKATMVSVATTTVFYMLCGCMGYAAFGDDAPDNLLTGFGFYEPFWLLDVANAAIVVHLVGAYQVFCQPLFAFVEKRAAARWPDSRFMTRELRLGPFVLGVFRLTWRTAFVCLTTVVAMMLPFFGDVVGLLGAVSFWPLSVYFPVEMYKAQRRVRRWSTRWLCLQTLSAVCLLVSIAGAVGSTAGVINAVNLHRPFSG

SEQ ID NO: 18941 - protein, 368 aa, Zea mays
MCGVAQYVNLWGTMVGYTITATISMAAIRQADCLRRDGAGAGARCDAPGTVLMLAFSVVQVVLSQFPGLEHITWLSVVAAAMSFAYSFAGLGLSVGHWVSRGGGGLGGRVAGAAAASSTRKLWNVLLALGNIAFAYTFAEVLIEIQDTLKSPPPENRTMKKAAMYGIGATTIFYISVGCAGYAAFGSNAPGNILAAGGLGPLWLVDIANMCLILHLIGAYQQVYAQPVFASVERWAASRWPEAKFMSSAYTVSVSIPLLQRGSVTVAPHKLVLRTAIVGATTAVALAIPFFNAVLGLLGAFSFWPLTVYFPISMHIAQGKIARGTKWWCLLQALSMVCLVISVAVGVGSVTDIVDSLKASSSPFKIVG

SEQ ID NO: 18942 - protein, 110 aa, Zea mays
MAAAARQRGTVKWFNDTKGFGFISPEDGSEDLFVHQSSIKSEGFRSLAEGEEVEFSVSEGGSAAAAGVAATAPATTAARPATSPATAPREVCPRPSVQPDQIGSLHHLLV

SEQ ID NO: 18943 - protein, 249 aa, Zea mays
MAAAARQRGTVKWFNDTKGFGFISPEDGSEDLFVHQSSIKSEGFRSLAEGEEVEFSVSEGDDGRTKAVDVTGPDGSFVRGGGGGGGGGGGYGSRGGGGSGGGGRSYGGSWGGGRRSGGGGGPGACYKCGEPGHMARDCPSADGGGGYGGGGYGGGGYGGGGGGGGGCFKCGEPGHMARDCSSGGGGYGGGGGGGGGGCYNCGQAGHMARDCPSGGGGGGGRFGGGGGGGGDRSCYNCGEAGHIARDCPT

SEQ ID NO: 18944 - protein, 612 aa, Zea mays
MAAPPATTATTHHRALLPPTRTHAAATHSALRLPLRAHPHAHAQRARLTAAAAPAPAASTASLESSAAGKPTVLVAEKLGAAGLALLREFANVDCSYGLSPEDLRAKISLCDALIVRSGTKVGRDVFEASGGRLRVVGRAGVGIDNVDLAAATEHGCLVVNAPTANTVAAAEHGIALLTAMARNIAQADASLKAGKWQRNKYVGVSLVGKTLAILGFGKVGSEVARRAKGLGMHVIAHDPYASADRARAIGVELVSMEEAMTTADFISLHMPLTPATNKMLNDEAFAKMKYGVRIINVARGGVIDEDALVRALDSGIVAQAALDVFTKEPPAPDNKLVLHENVTVTPHLGASTVEAQEGVAIEIAEAVIGALKGELAASAVNAPMVPAEVLSELAPFVVLAEKLGHLAVQLVAGGGGIKSVKVTYASARAPDDLDTRLLRAMITKGLIEPISSVFVNLVNADFTAKQRGVRITEERIILDGSPETPIDYIQVQIANVKSKFPSAISETGEITVEGRVKDGVPHLTKVGAFQVDVSLEGSLILCRQVDQPGMIGSVGSVLGEENINVSFMSVGRIAPRKHAVMAIGVDEEPSKVTLRKIGEIPAIEEFVFLKL

SEQ ID NO: 18945 - protein, 362 aa, Zea mays
MCGGAILSDIIPPPPPRRVTAHLWPESKKPRRAASGRRGAPVEQHEQEEDFEADFEEFEVESGESELESEDEPKPFAAPRSALARGGLNTGAAGVDGPAANSVKRKRKNQFRGIRRRPWGKWAAEIRDPRKGVRVWLGTFNSPEEAARAYDAEARRIRGKKAKVNFPDEVPTAVSQKRRAAGPASLKAPKMDVEEEKPIIKLAVNNMTNSNAYHYPAVVGHNIIPEPFMQTQNMPFAPLVNYAALVNLSSDQGSNSFGCSDFSLENDSRTPDITSVPAPVATLAAVGESVFVQNTAGHAVASPATGNTGVDLAELEPYMNFLMDGGSDDSISTLLSCDGSQDVVSNMDLWSFEDMPMSAGFY

SEQ ID NO: 18946 - protein, 443 aa, Zea mays
MPSLAAFLVLLLPPLLLSAAGAAEAEELIGFKATLRHVDADAGYTEEQLLSRALRRSSARVATLQSLAALAPGDAITAARILVLASDGEYLMEMGIGTPTRYYSAILDTGSDLIWTQCAPCLLCVDQPTPYFDPARSATYRSLGCASPACNALYYPLCYQKVCVYQYFYGDSASTAGVLANETFTFGTNETRVSLPGISFGCGNLNAGLLANGSGMVGFGRGSLSLVSQLGSPRFSYCLTSFLSPVPSRLYFGVYATLNSTNASSEPVQSTPFVVNPALPTMYFLNMTGISVGGYLLPIDPAVFAINDTDGTGGTIIDSGTTITYLAEPAYDAVRAAFASQITLPLLNVTDASVLDTCFQWPPPPRQSVTLPQLVLHFDGADWELPLQNYMLVDPSTGGGLCLAMASSSDGSIIGSYQHQNFNVLYDLENSLMSFVPAPCHLM

SEQ ID NO: 18947 - protein, 194 aa, Zea mays
MVRGKTQMKRIENPASRQVTFSKRRNGLLKKAFELSVLCDAEVALVVFSPRGKLYEFASGSAQKTIERYRTYTKDNVSNKTAHQDIEQVKADAEGLAKKLEALEAYKRKLLDERLEECSFEELHSLEVKLEKSLHCIRGRKTQLLEEQLHKLKEKEMNLRKSNEDLREKVMGAKTFCRRCTAASGMPTTQENRL

SEQ ID NO: 18948 - protein, 466 aa, Zea mays
MGDPSASADPAAARHHLSPQLAGQPPVPRSPAPLDLTSAAAASGHRRLSPSLRPPAHPQARLPSPYGQISSPGAAAHHALSLSQPLFFSLDSLPPPPPPYADLGAAPAVPAPSPPPSTSDPPPPLGLPPRRSGHRRSQSDIPFGLAQLSPPLPPPAPVKREVATAAEGGDGDDAAFFDLVNAYMDLDGLDPLNSSEDRHDDRDSRASGTTRAGSAAESSENEAESQSTSADRKDGGKSRHCRSLSMDSFMGKLNFAAGDESPKLPLPSPRASGSLTRSGSGSLEGGAVALFDMEFSNGEFTESEKKKIMANERLAEIALTDPKRVKRILANRQSAARSKERKMRYIQELEHKVQVLQTEATTLSAQLTMLQRDSAGLATQNNELKIRLQAMEQQAQLRDALNEALTGEVQRLKLATGEMTDGPMPKGLQQQMNSQMLQLQQLQIQQQAPPQQTQQQGQRQQPQKSA

SEQ ID NO: 18949 - protein, 351 aa, Zea mays
MATTQSCQSRSSACSKAAACFPAAVAVDEEHGHHSHQLKGGAQEEAENDNNKPELRRGPWTVDEDLTLVNYIADNGEGRWNNLARAAGLKRTGKSCRLRWLNYLRPDVKRGNFSADEQLLILDLHTRWGNRWSKIAQHLPGRTDNEIKNYWRTRVQKHAKQLNCDANSKRFKDAMRYLWMPHLADDVDTIAAANDDDEDHHHHLRLLVLHHHQAQHLQQAAAAAGGAANDLAAGAYDVRQLHALPSSGMAATSSSDSLASESYDDGGLLFANLRAGEMLMDGGDWAAQQEADQGLWPPPPPPPSDLDQSVVQAAGAGAGQFQDMELSGWVQGFSESITDNFWALEEIWKMQ

SEQ ID NO: 18950 - protein, 217 aa, Zea mays
MASLTDLVNLDLSDCTDRIIAEYIWIGGTGIDLRSKARTVKGPITDPSQLPKWNYDGSSTGQAPGEDSEVILYPQAIFKDPFRKGNHILVMCDCYTPQGEPIPTNKRYSAAKVFSHPDVAAEVPWYGIEQEYTLLQKDVSWPLGWPVGGYPGPQGPYYCAAGADKAFGRDVVDAHYKACLYAGINISGINGEVMPGQVGSTLYSPAVLQVARMQPSL

SEQ ID NO: 18951 - protein, 266 aa, Zea mays
MPPCCSPTTSAVTAAAASPGASRSGGLLRRSRPAPAAVEIASYLGLELGKITIKRFADGEIYVQLQESVRGCDVFLVQPSCPPANENLMELLIMIDACRRASAKNITAVIPYFGYARADRKSQGRESIAAKLVANMITEAGANRVLVCDLHSSQAMGYFDIPVDHVYGQPVILDYLASKTICSDDLVVVSPDVGGVARARAFAKKLSDAPLAIVDKRRQGHNVAEVMNLIGDVRGKVAVMMDDMIDTAGTISKGAELLHQEGAREV

SEQ ID NO: 18952 - protein, 285 aa, Zea mays
MVSSTSHSQNSNSSPSPLHLSTGIVGFLARRAAMTRQPSSFQFHQPRVAVPPLDSPGSSVDSSAPTWVQQQQRAPPAPVLAFDGNDTDEMALLDMITRQVQGQGQEGATSKQEEAERSLGAGGGRPYRGVRKRPWGKFAAEIRDSTRNGVRVWLGTFDSAEAAALAYDQAAFAMRGEAAVLNFPVERVRQSLEGMGMGMGMPIPGSGSASASPVVALKRRHSMRMRRPASRNRKAKTATRSEVMELEDLGADYLEELLGATATEAEEQTMSHSSSSSWHRSHHSI

SEQ ID NO: 18953 - protein, 283 aa, Zea mays
MDPASSLISSSAVPFPAAGDGGGQRQVFLFGGGFVGGAPPLVGGAADGRRKRPFQLTAHDELQLQLQLQLDDELCGLDYELHGPQQERTTKRRLTAEQVRELELSFEEEKRKLEPKRKLEPERKSELARRLGIAPRQVAVWFQNRRARWRSKQLEQDFDRLRAAHDDLIAGRDALLADNDRLRSQVITLTEKLQTKESAAAAAEPGEQTVAAQATAYAVLEGDKLCSGSAAAPAAAGTNDSPESYFAGARSPPSSPEDDDRAFFFPPDALLNNWAWVWNDRQY

SEQ ID NO: 18954 - protein, 154 aa, Zea mays
MDARMFGLETPRVAALHHLLDVPDGDKAGGGATRTYVRDARAMAATPADVKELAGAYAFVVDMPGLSTGDIRVQVEDERVLVISGERRREEREDAKYLRMERRMGKFMRKFVLPDNADVDKVAAVCRDGVLTVTVEKLPPPEPKKPKTIEINVA

SEQ ID NO: 18955 - protein, 566 aa, Corynebacterium glutamicum
  misc_feature (115)..(116): Xaa can be any naturally occurring amino acid
  misc_feature (121)..(121): Xaa can be any naturally occurring amino acid
  misc_feature (126)..(126): Xaa can be any naturally occurring amino acid
  misc_feature (153)..(153): Xaa can be any naturally occurring amino acid
  misc_feature (157)..(157): Xaa can be any naturally occurring amino acid
  misc_feature (281)..(281): Xaa can be any naturally occurring amino acid
  misc_feature (318)..(318): Xaa can be any naturally occurring amino acid
  misc_feature (324)..(324): Xaa can be any naturally occurring amino acid
  misc_feature (354)..(354): Xaa can be any naturally occurring amino acid
  misc_feature (424)..(424): Xaa can be any naturally occurring amino acid
  misc_feature (429)..(429): Xaa can be any naturally occurring amino acid
  misc_feature (447)..(447): Xaa can be any naturally occurring amino acid
  misc_feature (450)..(450): Xaa can be any naturally occurring amino acid
  misc_feature (508)..(508): Xaa can be any naturally occurring amino acid
  unsure (1)..(566): unsure at all Xaa locations
LENPTNLEGKLADAAAAIILEGEDTQASLNWSVIVPALVIVLATVVWGIGFKDSFTNFASSALSAVVDNLGWAFILFGTVFVFFIVVIAASKFGTIRLGRIDEAPEFRTVSWISXXFAAGXGIGLXFYGTTEPLTFYRNGVPGHDEHNVGVAXSTTXFHWTLHPWAIYAIVGLAIAYSTFRVGRKQLLSSAFVPLIGEKGAEGWLGKLIDILAIIATVFGTACSLGLGALQIGAGLSAANIIEDPSDWTIVGIVSVLTLAFIFSAISGVGKGIQYLSNANXVLAALLAIFVFVVGPTVSILNLLPGSIGNYLSNFFQXAGRTAXSADGTAGEWLGSWTIFYWAWWISWSPFVGXFLARISRGRSIREFILGVLLVPAGVSTVWFSIFGGTAIVFEQNGESIWGDGAAEEQLFGLLHALPGGQIXGIIAXILLGTFFITSADSASTVXGTXSQHGQLEANKWVTAAWGVATAAIGLTLLLSGGDNALSNLQNVTIVAATPFLFVVIGLXFALVKDLSNDVIYLEYREQQRFNARLARERRVHNEHRKRELAAKRRRERKASGAGKRR

SEQ ID NO: 18956 - protein, 112 aa, Populus tremula x Populus tremuloides
ASFGSRLEDAVKKTVAENPVVVYSKTWCSYSSEVKSLFKRLNVDPLVVELDELGAQGPQIQKVLERLTGQHTVPNVFIGGKHIGGCTDTVKLYRKGELEPLLSEANAKKSQG

SEQ ID NO: 18957 - protein, 343 aa, Populus trichocarpa
MLSVELAVKEALCARGEAHFTDQEFPPNDQSLYMDPRNPPSKLQVVSEWMRPVEIVKESHLDSHPCLFSGAANPSDVCQGHLGDCWFLSAVAVLTEVSRISEVIITPEYNEEGIYTVRFCIQGDWVPVVVDDWIPCESPGKPAFATSQKGNELWVSILEKAYASKDGIFWMSWQDFQIHFRSIYICRVYPTEMRYSVHGQWRGYSAGGCQDYASWNQNPQFRLRATGPDASLPIHVFITLTQGVSFSRTAAGFRNYQSSHDSMMFYIGMRILKTRGRRASYNIYLHESVGGTDYVNSREISCEMVLDPDPKGYTIVPTTIHPGEEAPFVLSVFTKASVTLEAL

SEQ ID NO: 18958 - protein, 570 aa, Populus trichocarpa
MTQNGRAETKVVSTTRKPSKGGWNAAIFIIFVEVALRFAYYGLAGNLITYLTNDLHQSTSTAIKNINTWVGVSAIFPIFGAIVADSLLGRFKTILLSSTIYFIGMVLLTLSVSVIPTHYREAVFFIALYILAVGEGGHKPSVQTFAADQFDEEEPEEKAAKSSFFNWWYLGIVVGASSAILVVIYIQDNLGWTAGIGILTGALGVALFIFLIGIKRYRKQAPVGSPFTMVAQVFVAATRKRRVVQTRQGWGICYEAGGTDIEGQTRKRTLAATNQFRFLDKAMIIDDLDASSKNRNPWRLCSLNQVEEVKLVLRLLPIWLSCLMFTVVIVQTHTLFIKQGSTMTRSIGPNFQVPPASFQSLVGLTILFTIPLYERVFIPAARKITGHSSGITMLQRIGIGLFLSIVEMVVAALVEAKRVSIAREHGLMDIPKATIPMSVWWILPQYMISGISDVFTVVGLQELFYDQMPESMRSMGAAAYISVTGLGSFFNTAIITVVQAITARSSGILLGNNLNRAHVDYFYWILAVLSALNFCVYLWVAHGFVYKKVEGEKPQEGRELAFAENLDAKT

SEQ ID NO: 18959 - protein, 262 aa, Populus trichocarpa
MNEISSLCEFSALSHHHQHRSTSFNSLISCLNETWGDLPLRVDDSEDMVIYNFLRDAVCCGWSPLDLSTSTTTTSSTTTTTTTTTTTITTNVVKAEPKDELDLEAEPIKLVQESSLNMEAVVTKKVVTKGRHYRGVRQRPWGKFAAETRDPAKNGARVWLGTYETAKEAALAYDRAAYRMRGSKALLNFPHKIGSNEPDPVRITAKRRQPDTGLTAVDTGSAKMRKMLVDEGAELERGVGYSVFQVGHHKGLMPVGEQLLAS

SEQ ID NO: 18960 - protein, 240 aa, Populus trichocarpa
MESIKLFRGYGKVNPHLEDQSPHQQHSASKRRILIFSVSSILLLTLIIGIALATLIHESNSEPDESPYLSSSNPAESIKTVCDVTLYPSSCFTSISSLNISTKPDPEVIFKLSLQVSIAELKNLSSLLSSFNDVNSQAALKDCVSQFDDSLSKLNDSLSAMEVGPGEKMLNLEKVNDIRTWISAAMTDQDTCIDGLEEMGSKFLDEIKAKIERSKEFLSISLAIIAKMQALLEKFDLKMH

SEQ ID NO: 18961 - protein, 170 aa, Populus trichocarpa
MVRGKTQMKRIENATSRQVTFSKRRNGLLKKAFELSVLCDAEVALIVFSTRGKLYEFSSSSMNRTIESYQKRAKDVGTSSKMVKDNMQPVKEDAFTLAKKIELLEVSKRKLLGDGLEPCSIDDLQQLENQLERSLTRIRARKNQLFREQIEKLKGEEKILMEENTELREK

SEQ ID NO: 18962 - protein, 415 aa, Populus trichocarpa
MDQIDVPYHFLCPISLQLMRDPVTVSTGITYDRENIEKWLFSCKNKTCPVTKQELFTKDLTPNHTLRRLIQAWCTLNASFGIERIPTPKPLADRAQISKLLNDAKKFPHLLLKSLRRLRSITLESERNRSCLEEAGVVDFLASILKTDNSTSVQIDSDDNESEFTRASDEALNILYHLKISQRQLKNLIINDSDRFLESLLQILKHSSYQSRAYATMLLKSVFEVADPTHLISIRPEMFVEIVRVLDDQISQQASKAALKLLVEICPWGRNRIKAVEGGAVSVLIELLLDTSDKRACELILAVLELLCGCADGRAELLKHGAGLAVVSKKILRVSHVASDKAVRILCSICRFSATSRVLQEMLQVGAVAKLCLILQVDSSLKSKERAREILKVHSKVWRSSACIPAYLMSSYPSS

SEQ ID NO: 18963 - protein, 570 aa, Populus trichocarpa
MAEEDVYTKDGTVDYRGNPANKKETGTWRACPYIIGNEFCERLAYYGMSSNLILYFKHRLNQQSATATRNNLNWGGTCYLTPLIGAFFADAYLGRYWTIACFSIIYVMGMTLLTISATVPGLRPKCYAEDDCNPTDAQSALAFVSLYLIALGTGGIKPCVSSYGADQFDDADEVEKKHKSSFFNWFYLSINVGALIAGSVLVWVQDNVSWGWGFGIPAIAMAIAVASFFSGTRLFRYQKPGGSPLTRICQVLLASFRKKKVEVPADKALLYETADAESNIKGSRKLDHTEEFSFLDKAAVETEKDDIKGPVDPWRLCTVTQVEELKSIIRLLPIWATGIIFTAVYSQMGNLFVLQGEQMDKYVGNSNFQIPSASLSIFDTLSVIFWVPVYDRIIVPVARKYTGHKNGLTQLQRMGIGLFISIFSMVSAAILELKRLEMVRRHNSYELKTVPLSIFWQAPQYFLIGCAEVFTFIGQLEFFYEQAPDAMRSMCSALSLTTVALGSYLSSLLVTIVTSISTKNGKPGWIPENLNYGHIDYFFWLLGVLSVLNLCVFLLISNWYTYKKPVGTLR

SEQ ID NO: 18964 - protein, 451 aa, Populus trichocarpa
MARTLLSSPPFIGTPLPSLSRHALTTNRRFISTRIKLSLHDNIPPIHHHLHSSVDFNTIISRAEGFLYTLADAAVAVDSAASTTSSDTADAAQKNGGWFGFISDGMEFVLKVLKDGLSSVHVPYAYGFAIILLTIAVKVATLPLTKKQVESTLAMQNLQPKIKAIQQRYAGNQERIQLETSRLYRQAGVNPLAGCFPTLATIPVWIGLYQALSNVANEGVLTEGFFWIPSLGGPTTIAARQSGSGISWLFPFVDGHPPLGWHDTAAYLVLPVLLIASQYVSMEIMKPPQTDDPTQKNTLLVFKFLPIMIGYFSLSVPSGLSIYWFTNNVLSTAQQVWLRKLGGAKPVVNENASGIITAGRAKRSASQPGQPGDRFKQLKEQDKSKTLRKALPTEGVQALDSASGSDEDSDEETNDKGEEVLEETYASSASKRVPDISRPKRSKRSKRKRTV

SEQ ID NO: 18965 - protein, 241 aa, Populus trichocarpa
MMQDEIRKGPWTEKEDILLINFVHLFGDRRWDSIAKVSGLNRTGKSCRLRWVNYLHPGLKRGKMTPQEERLVLELHAKWGNRWSRIARKLPGRTDNEIKNYWRTHMRKKAQERKGAMSPSLSSSNCSSSSNTTTVNSSPLPRTGETSFYDTGGLEQVALAGKNSEAVQGGEKGYSMDDIWKDIENTIEPVCDGFSEKGCNFSCPSLASPSWDYFPDTLWGFGEEEGKIFLPYDDGTTILTG

SEQ ID NO: 18966 - protein, 318 aa, Populus trichocarpa
MPLPSPPSASLISPAVLFVIVILAVLFFISGLLHLLIRFLIKHPTSSAASQSNRYPEISGSDALQRQLQQLFHLHDSGLDQAFIDALPVFQYKEIVGPKEPFDCPVCLCEFSEKDKLRLLPMCSHAFHINCIDTWLLSNSTCPLCRGTLFNTAGFSMENPMFDFDDLREDDECPGDGDIVFIPSQKTGEIEGTVVEKGVLPVRLGKFRKLNGGVGEAGGETSSSNLDARRCFSMGSYQYVLGDTDLRVGLSNERQSRDIKPARGTEQKVNLSVDGDLEENKISSLSQGESFSVSKIWLWRNKKGKFSSSSDAPMGMPS

SEQ ID NO: 18967 - protein, 104 aa, Populus trichocarpa
MAMNKAKELVSTNPVVVFSKTSCPFCVKVKQLLNQLGAKYTTVELDTEKDGGEIQSALHEWTGQRTVPNVFIGGNHIGGCDKTTGMHQEGKLVPLLADAGAVAS

SEQ ID NO: 18968 - protein, 190 aa, Populus trichocarpa
MDKSPCNSQDVEVRKGPWTLEEDLILTNYIANHGEGVWNSLAKAAGLKRTGKSCRLRWLNYLRPDLRRGNITPEEQLLIMELHAKLGNRWSKIAKHLPGRTDNEIKNYWRTRIKKHTKQTEPFAAGSSETNEHGSSTCQVSSATDQMETYCPPFYQGDVGAFSGGNIPQELNENYWSMEDLWSMQLLNGD

SEQ ID NO: 18969 - protein, 196 aa, Populus trichocarpa
MAAFAGTQQKCMACDKTVYLVDKLTADNRIYHKACFRCHHCRGTLKLSNYSSFEGVLYCRPHYDQLFKRTGSLDKSFEGTPKIVKPEKPVDNENASKVSNLFAGTREKCVGCNKTVYPIEKVTVNGTPYHRSCFKCTHGGCTISPSNYIAHEGKLYCKHHHIQLFKEKGNYSQLENEREKNPVTVSITAVEIAAES

SEQ ID NO: 18970 - protein, 219 aa, Populus trichocarpa
MGRTRTTTKQAVDPNGSATQNMLVIAKEPRYRGVRKRPWGRFAAEIRDPWKKTRVWLGTFDSAEDAARAYDAAARTLRGAKAKTNFPISTTNQLFNHQNQNQSPTDPFLDHHSINPQRPTSSSLSSTVESFSGPRPPQPTTTTKSGNGPRRSHPRIPPVVPEDCHSDCDSSSSVVDDRDVASAASSLCRKPLPFDLNFPPLDQVDLGSGDDLHCTALCL

SEQ ID NO: 18971 - protein, 330 aa, Populus trichocarpa
MTDSSAYRVETTSRLAQWKIDNLASCTYRKSDPFKIGKWNWHLSVEKNRVLFVKLYPEISNLTRENPPIASFIIRVVSSAGDRKALTHPEVTDKQLKNNEDFVWAIDVPLTTGKFIIDVEFLDLKAASPGGGEPCSIWDEETTEKRANATALVSLGRMLTESIHTDIKIIVSDGSIGAHRAVLAARSPVFHSMFAHDLKEKELSTINISDMSIEACQAFLNYIYGNIQSEEFLVHRLALLSAADKYDIADLKEACHDSLLEDIDTKNVLERLQSASLYQLPKLKTSCLRYLVKFGKIFDIRDDFNSFLQCADRDLIAEVFHEVLNSWKGF

SEQ ID NO: 18972 - protein, 297 aa, Populus trichocarpa
MTIRNKPEVIDPPQNKDMTDIVECVNSPAKTALKPNVTVSSSVHELLECPVCLNAMYPPIHQCSNGHTLCSSCKPRVHGRCPICRHELGNIRCLALEKVAASLELPCIYRSFGCIGIYPYHSKSKHESQCVFRPYSCPYSGSECTAIGDIPYLVAHLKDDHKVDMHNGSTFNHRYVKSNPHEVENATWMLTVFSCFGQYFCLHFEAFHLGMSPVYIAFLRFMGDDNEAKNHSYSLQVCGSGRKMTWQGVPRSIRDSHRKVRDSFDGLVIQRNMALLFSGGDRKELKLRVTGRIWKEQ

SEQ ID NO: 18973 - protein, 263 aa, Populus trichocarpa
MEGHYMNPSYPYNSAGSFIEYFEGLTYDHVNFIFNGGSHAQMMEQLVGCGFVLVQMTFLHLQDIVYPSTNANFYKFGISPPGSTSYYDPTHIYEVHDNGLRNEEYGRPLENSSTTTNEQTSRVNTEWEVNENRTSHDDPVECLRRHHNVQDYQAIWQDNVDPDSMTYEELLELGETVGTQNRGLTQELISLLPISKYNRSFFSRRNSRSERCVICQMEYKRGDRRITLPCKHIYHAGCGTRWLCINKACPICYTEVFGDASRH

SEQ ID NO: 18974 - protein, 385 aa, Populus trichocarpa
MTDSRQQPSVMQKMASQAHHSSSFSQGFQRPALHQRQFAYGNYSNAGFQYAMTRACQSTPDMSLIASSTSPVFVQAPSEKGLAGFAIDFLMGGVSAAVSKTAAAPIERVKLLIQNQDEMIKTGRLSEPYKGIGDCFSRTMKDEGMVSLWRGNTVNVIRYFPTQALNFAFKDYFKRLFNFKKDRDGYWKWFAGNLASGGAAGASSLLFVYSLDYARTRLTNDSKAAKKGGERQFNGLVDVYKKTMQSDGIAGLYRGFNISCVGIIVYRGLYFGMYDSLKPVVLTGKMQDSFFASFALGWVITNGAGLGSYPIDTVRRRMMMTSGEAVKYKSSFDAFSQILKNEGAKSLFKGAGANILRAVAGAGVLAGYDKLQMIVFGKKFGSGGA

SEQ ID NO: 18975 - protein, 79 aa, Populus trichocarpa
CLVDGCTSDLSKCRDYHRRHKVCEFHSKSSQVFIKGQEQRFCQQCSRFHSLGEFDEGKRSCRKRLDGHNRRRRKPQPDS

SEQ ID NO: 18976 - protein, 666 aa, Populus trichocarpa
MAGTWTARGVVVSAIILFGCLFAISIAKEEATKLGTVIGIDLGTTYSCVGVYKNGHVEIIANDQGNRITPSWVAFTDSERLIGEAAKNQAAVNAERTIFDVKRLIGRKFEDKEVQKDMKLFPYKIVNKDGKPYIQVKIKDGETKVFSPEEISAMILTKMKETAEAFLGKKIKDAVVTVPAYFNDAQRQATKDAGIIAGLNVARIINEPTAAAIAYGLDKKGGEKNILVFDLGGGTFDVSVLTIDNGVFEVLSTNGDTHLGGEDFDQRIMEYFIKLIKKKHGKDISKDNRALGKLRRECERAKRALSSQHQVRVEIESLYDGMDFSEPLTRARFEELNNDLFRKTMGPVKKAMEDAGLEKNQIDEIVLVGGSTRIPKVQQLLKDYFDGKEPNKGVNPDEAVAFGAAVQGGILSGEGGDETKDILLLDVAPLTLGIETVGGVMTKLIPRNTVIPTKKSQVFTTYQDQQTTVSIQVFEGERSLTKDCRLLGKFDLTGVPPAPRGTPQIEVTFEVDANGILNVKAEDKGTGKSEKITITNDKGRLSQEEIERMVREAEEFAEEDKMVKERIDARNSLETYVYNMKNQINDKDKLADKLESDEKEKIETATKETLEWLDDNQNAEKEDYEEKLKEVEAVCNPIITAVYQRSGGAPGGGSAEDPEDDSHDEL

SEQ ID NO: 18977 - protein, 344 aa, Populus trichocarpa
MERKNANPQDLPMAVEANQEGLQSNEDLHLVLVLRLPSFNLPVNDILRPHFHLLDPADSPEPASSFLSNHAQSVRALICVGYAPVTAETLNLLPSLELIVASSAGVDHIDIQECRRRGIIMTNASTAFAEDAADYAVALLIDVWRRISAADRFLHAGLWPVKGDYPLASKLRGKRVGIVGLGSIGFEVSKRLEAFGCSIAYNSRMEKPSVPFPYYANVLDLAAHSDALVLCCSLTEQTRHIINKDVMTALGKKGVIINVGRGGLIDEKELVQFLLRGDIGGAGLDVFENEPDVPRELFELDNVVLSPHRAVATPESFEAVFQLIFTNLKAFFSNKPLQSVYQIE

SEQ ID NO: 18978 - protein, 315 aa, Populus trichocarpa
MKSIGVLMTCPMHKYLEQQLETHFNLFKLWHCNSSITEFLKTHQGNTIRAVVGNTEIGADAELIASLPSLEIVASYSVGLDKIDLRKCEEKGIRVANTPDVLTDDVADLAIGLILGVLRGICASDAYVRIGKWKDADFGLATKFSGKSVGIVGLGRIGTAIAKRAEAFGCSISYFSRSQKPFANYKFYSNIIDLATSCQILIVACALTEETRHIINREVIDALGPKGILINIGRGAHVDETELVSALLEGRLGGAGLDVYENEPDVPEELLGLGNVVLQPHVGSDTVETSDAMADLVISNLKAHFSKKSLLTPVI

SEQ ID NO: 18979 - protein, 215 aa, Populus trichocarpa
MSCLSWRLAVETNNVIGWSTVPEECEDYVGHYMLGSQYREDSAVITDEAFAHAKTFKLAGDGKDIWVFDVDETTLSNLPYYAKHGFGAEPYNSTAFNQWVFTGKALALPESLKLYRNLLSIGIKVVFLTGRTEDQRAVTSNNLKNAGYHIWEKLILKSSSYSGKTAVFYKSSERAKLEKKGYRIIGNIGDQWSDLLGTSVGNRTFKLPDPMYYIS

SEQ ID NO: 18980 - protein, 408 aa, Populus trichocarpa
MADIEIPEYFLCPISLQILKDPVTTITGITYERESIEHWLKTAQGNPTCPVTKQPLPGDSELIPNHTLRRLIQSWCTLNAIDGIDRIPTPKSPIKKSQVLRLIKDLDVPDHSCTKALMKLEALAAENERNRTCMVEAGVAKAMVLFIIKCFKEGKTTGLEEGLRILYLIWNQSQEIKLLVRENQEFIDSLTWTLRCKIDNHVDVKTHAMLVLHKTICVVCQELLERLKVDFFKEIVTRVLRKRISKLAIKSALLVLTEVCFGGRNRMKIVEANAVFELIELELEKPERNITELIFNLLAQLCSCAAGREQFLKHAGSIALLSKRVLRVSPATDDRAVHILDSISKFSAGDEAVLEMLRVGAVSKLLCMLIQADCAPYLKKKARGILRLHSNTWNNSPCIAVDLLTRYP

SEQ ID NO: 18981 - protein, 261 aa, Populus trichocarpa
MEAVTAILGGGLRVGVLLQGKKVRDDNKTLLQTGISHNNQLDSLGFCLEPNPSQTPPSLCPEDSPFLLQCDTPDPISRCPPTAGVVCQGICTGSPEPHANNLGNCIESDHDSASSPTDTSMDKSTNSKALVAVPAMKVEALAVVPAHQKSKQSEIVQRRIRRPFSVAEVEALVQAVEKLGTGRWRDVKLRAFDNAKHRTYVDLKDKWKTLVHTARISPQQRRGEPVPQELLDRVLTAHAYWSQQQADQQFKHQHAETCLLL

SEQ ID NO: 18982 - protein, 214 aa, Populus trichocarpa
MSDTATSAQVPGMNPPGPKADDPLLQNGSSIDPNKHSTADETLNRTNDKGNQQPVTPVREKRRLSETAVDTSWLPPGWVVEDRVRTSGATAGTRDKYYIEPVSGRRFRSKKDVQYYLETGTLKKRGKVAENVDADTNSAENSKSSKNKSGANTNFAWNFDSFNVPDRTEWFLTEANEDTWTPFIDGKKVPLYDKEQWDFTFASLTTSSHGYRMH

SEQ ID NO: 18983 - protein, 158 aa, Populus trichocarpa
MTHARMPLPLEMEEEPVYVNAKQFNGIMRRRQARAKAELEKKAVKVRKPYLHESRHQHAMRRARGCGGRFLNTKKLDHNAANPTSDKGTGDLDSSGDLQEGKESMVQDMQTHASSNCHGNGNGLSSRYHSLSDDGSFLGQQKETTHGNGVSNGNVSIY

SEQ ID NO: 18984 - protein, 203 aa, Populus trichocarpa
MEVHYMNTDFPYTTTESFMDFFEGLTHAPVNYAHNGPMHDQDNAYWSMNMNAYKFGFSGLGSTSYYSPYEVNDNLPRMDVSRMAWEYPSVVIKALWQDDVDPDTMTYEELVDLGETVGTQSKGLSPELISLLPTSKCKFGSFFSRKRSGERCVICQMKYKRGDKQIKLLCKHAYHSECITKWLGINKVCPVCNDEVFGEESRN

SEQ ID NO: 18985 - protein, 389 aa, Populus trichocarpa
MADQIQHPSVMKKVAGQFLLSSVSQDFGCDGAFQRPALYQRRAYGNYSNPAFQYPMGRTCAVATDLSIVPSTASSVLVQAPAEKGLASFAIDFLMGGVSAAVSKTAAAPIERVKLLIQNQDEMIKSGRLSEPYKGIGDCFKRTIQDEGFGSLWRGNTANVIRYFPTQALNFAFKDYFKRLFNFKKDRDGYWKWFAGNLASGGAAGASSLLFVYSLDYARTRLANDAKAAKKGGGRQFNGLIDVYRKTMASDGLAGLYRGFNISCVGIIVYRGLYFGMYDSLKPVLLTGSMQDSFFASFALGWLITNGAGLASYPIDTVRRRMMMTSGEAVKYKSSLDAFSQILKNEGAKSLFKGAGANILRAVAGAGVLAGYDKLQLIVFGKKYGSGGA

SEQ ID NO: 18986 - protein, 587 aa, Populus trichocarpa
MCGILAVLGCSDDSQAKRFRVLELSRRLKHRGPDWSGLFQHGDFYLAHQRLAIIDPASGDQPLFNEDQAIVVTVNGEIYNHEELRKRLPNHKFRTGSDCDVISHLYEEYGENFVDMLDGMFSFVLLDTRDNSFIVARDAIGITSLYIGWGLDGSVWISSELKGLNDDCEHFKCFPPGHIYSSKSGGLRRWYNPLWFSEAIPSTPYDPLALRRAFEKAVIKRLMTDVPFGVLLSGGLDSSLVAAVTARHLAGTQAARQWGAHLHSFCVGLENSPDLKAAREVADYLGTIHHEFHFTVQDGIDAIEDVIYHVETYDVTTIRASTPMFLLARKIKALGVKMVISGEGSDEIFGGYLYFHKAPNKEELHGETCRKIKALHQYDCLRANKATSAWGLEARVPFLDKDFINVAMAIDPEWKMIKPGRIEKWVLRKAFDDEEHPYLPKHILYRQKEQFSDGVGYSWIDGLKAHAELHVHDKMMQNAEHIFPHNTPTTKEAYYYRMIFERFFPQNSARLTVPGGASVACSTAKAVEWDASWSNNLDPSGRAALGVHLSAYEQQAALASAGVVPPEIIDNLPRMMKVGAPGVAIQS

SEQ ID NO: 18987 - protein, 458 aa, Populus trichocarpa
AYQGGSASVPDWLNKGDNSWQMISATLVGLQSMPGLVILYGSIVKKKWAVNSAFMALYAFAAVVLCWVVWAYKMSFGDKLLPFWGKAGPALGQKFLIRQAELPATTHFYDNGEVETAMIQPFYPMASMVWFQCVFAAITLILLAGSVLGRMSFKAWMAFVPLWLTFSYTVGAFSLWGGGFLFHWGVMDYSGGYVIHLSSGIAGLTTAFWVGPRSTKDRERFPPNNVLLMLAGAGLLWMGWAGFNGGDPYTANIDSSMAVLNTNICAATSLLVWTWLDVIFFKKPSVIGAVQGMITGLVCITPGAGLVQGWAAIIMGILSGSVPWFTMMIVHKRWTLIQKIDDTLGVFHTHAVAGLLGGVLTGLFAEPQLCALFLPVTNSRGGVYGGSGGIQVLKQLVGAAFIIGWNVVVTSIICVVINLVIPLRMSDEELLIGDDAVHGEEAYALWGDGEKYDSTKHG

SEQ ID NO: 18988 - protein, 597 aa, Populus trichocarpa
MAATTSTAASSLLATKKNLSSLSLTSANKLPAFSPLLTSSRRQRFIVLSASLNSKPTVLVAEKLGEAGINLLKDFANVDCSYNLSPDELCTKISLCDAIIVRSGTKVSREVFESSGGRLKVVGRAGVGIDNVDLAAATEHGCLVVNAPTANTVAAAEHGIALMAAMARNVAQADASVKAGKWERNKYVGVSLVGKTLAVMGFGKVGSEVARRAKGLGMHVIAHDPYAPADRARAIGVELVSFDEAIATADFISLHMPLTPATAKILNDETFAKMKKGVRIVNVARGGVIDEDALVRALDAGIVAQAALDVFTVEPPPQDSKLVQHERVTVTPHLGASTKEAQEGVAIEIAEAVVGALKGELASTSVNAPMVPAEVLTELKPYVELAEKLGRLAVQLVSGGSGVKDVKVTYASARAPDDLDTRVLRAMITKGLIEPISSVFVNLVNADFSAKQRGLRISEERILGDGSPESPLHFIQVQIANVESKFASAISENGEIKVEGRVKDGIPHLTKVGSFEVDVSLEGSIILCRQVDQPGMIGKVGSVLGVENVNVSFMSVGRIAPRKQAVMAIGVDEQPSKETLKKIGDIPAVEEFVFLKL

SEQ ID NO: 18989 - protein, 596 aa, Populus trichocarpa
MAVDNALSSPLGPPACEKDAKALQFIEEMTRKTDSVQEDVLAKILIQNAEVEYLKRFNLDGATDRETFKSKLPTIRYEDLQPEIQRIANGDRSSILSTHPISEFLTSSGTSAGERKLMPTIKQELDRRQLLYSLLMPVMNLYVPGLDKGKGLYFLFVKSETRTPGGLLARPVLTSYYKSDHFKTRPYDPYNVYTSPNEAILCADSFQSMYTQMLCGLLEREQVLRVGAVFASGLLRAIRFLQLHWRELADDIESGMLNKEITDPSVKDCMVKILKPNPKLAEFVRMECSKENWEGIITRIWPNTKYLDVIVTGAMAQYIPTLDYYSGGLPLACTMYASSECYFGLNLNPMCKPSEVCYTIMPNMAYFEFLPHDPNGFTHDSTPKLVDLADVELGKEYELVITTYAGLYRYQVGDILRVTGFHNSAPQFHFVRRKNVLLSIDSDKTDEAELQKAVENASQLLREFNTSVVEYTSYADTKTIPGHYVIYWELLVKDLANSPSDEVLNQCCLAMEECLNSVYRQGRVADYSIGPLEIRVVKNGTFEELMDYAISRGASINQYKVPRCVNFTPIMELLDSRVVSKHFSPALPYWTPERRR

SEQ ID NO: 18990 - protein, 678 aa, Populus trichocarpa
AGNPPLVIARGGFSGLFPDSSSDAFQFATLTSLPGVVLWCDVQLTKDSVGICAPDLRLDNSTSIAQVMQNKDKLYLVNGIPTRGWFTVDFTLNELSLVSLTQGIYSRSERFDYIYPIQTVEDVANLKPPGLWLNIQYDAFFKQHNLSMRSYVLSLSRRVVINHLSSPEVGFLRGIVKRFNLNITKLVFRFLESNVIEPSTNETYGSLSKNFTFIKTFASGILIPKSYIWPLDASNYLQPHTSIVSDAHKAGLEVFVSEFYNDVPLSYNYSYDPVTEYLRFVDNGEFSVDGVLSDFPVTPSATIDCFSGLGKNATPQVNLSVISKNGASGDYPGCTDLAYQKAILDGADVIDCPVQISKDGIPFCLGSINLYDSTTVAQSIYSNREQNIPQIKAGSGIFTFSLTWSEIQNLTPVISNPYSKYELLRNPKFKNSGKFLTLSDFLALAKNTSSLSGVLISIENAAYLIEKEGLPITDKVLEVLSLAGYDDPTSKKVMIESTNSSVLMKFRDESNYELVYRIEEDIQDAQDAALKDIKDFANSVVISKASVFPESSSFLSGVTNVVPKLQSHGLSVYVETFSNEFVSQAWDFFSDSTVEINSYVMGVNISGVITEFPLTSARYKRNRCLGKELPSYMSPAQPGGLMQLISPFALPPAEPPNPVLTAPDVVEGPLPSHTASPP

SEQ ID NO: 18991 - protein, 724 aa, Populus trichocarpa
MATHKILGNRPLVIARGGFSGLFPDSSSVAFQFATLTSLPDVVLWCDVQLTKDGVGICAPDLRLDNSTSIAQVMKNKDKLYLVNGIPTQGWFTVDFTLNELSLVSLAQGIYSRSERFDNTYPIQTVEDVANLKPPGLWLNIQHDAFFTQHNLSMRIYVLSLSRRVVINHLSSPEAGFLRSIVKRFNLNITKLVFRFLEPNVIEPSTNETYGSLSKNFTFIKTFASGILIPKSYIWPLDASNYLQPQTSIVSDAHKAGLEVFVSDFYNDAQLSYNYSYDPVTEYLSFVDNGDFSVDGVLSDFPVTPSATIDCFSGLGKNATPQVNLSVISKNGASGDYPGCTDLAYQKAILDGADVIDCPVQISKDGIPFCLGSINLYDSTTVAQSIYSNREQNIPQIKAGSGIFTFSLTWSEIQNLIPVISNPYSKYELLRNPKFKNSGKFLTLSDFLALAKNTSSLSGVLISIENAAYLIEKEGLPITDKVLEVLSLAGYDDPTSKKVMIESTNSSVLMKFRDESNYELVYRIEEDIQDAEDAALKDIKDFASSVVISKASVFPESSSFLSGVTNVVPKLQSHGLSVYVETFSNEFVSQAWDFFSDSTVEINSYVMGVNISGVITEFPLTSARYKRNRCLGKELPSYMSPAQPGGLMQLISPFALPPAEPPNPVLTAPDVVEGPLPSHTASPPPVPGGGATAVPPGAPNGLPKIGACIFLPNLAMLITILLLL

SEQ ID NO: 18992 - protein, 226 aa, Populus trichocarpa
MLKLSFLLTLLSSASFGPWHDEAKRSGVAIYPPACTSIECPVFDVLQLGNGYEIRRYNSSVWMSTSSIQDISLVDATRTGFLRLFDYIQGKNSYEEKIEMTAPVITEVSPSDGPFCESSFTVSFYVPKENQANPPPAKGLHVQRWQPTYVAVRQFNGFVTDSNVGEEAAALQASLADTIWAAAIEKSRPDSTTVYTVAQYNSPFEFDNRVNEIWMQFYVEDELLVM

SEQ ID NO: 18993 - protein, 159 aa, Populus trichocarpa
PLHSRAPSCDPQVHSCKWWPYSNSNDFGANTAMILIILLCALICALVLNTAIRWFLRSNNNNSSDRLGELEEQRKPKDEADMATLVLATTQVYSAGMKLGGVEADCAICLSEFVEGEGIRVLGRCDHGFHVLCIEKWLSSHSSCPTCRRSCLASSPSSP

SEQ ID NO: 18994 - protein, 426 aa, Populus trichocarpa
MIQASVSGTVIKSSLIEPDGGVLVDVIVPESERGSKTLEAESLPKARLAKIDVEWVHVISEGWASPLKGFMRENEYLQSLHFNSLRMENRTVVNMSLPIVLAIDDETKESIGSSKDVGLVGPEGDLLAILRSIEIYKHNKEERIARTWGTTAPGLPYVEEFIAPAGNWLLGGDLEVLKPIKYNDGLDHYRLSPKQLRKEFDRRQADAVFAFQLRNPVHNGHALLMNDTRRRLLEMGYKNPILLLHPLGGFTKADDVPLDVRMEQHSKVLEDGVLDPETTIVAVFPSPMHYAGPTEVQWHAKARVNAGANFYIVGRDPAGMGHPTEKRDLYDPDHGKKVLSMAQGLEKLNILPFRVAAYDTVAKKMAFFDPSRSKEFLFISGTKMRAYARNGENPPDGFMCPGGWEVLVKYYEQLQAEEAMPVVASA

SEQ ID NO: 18995 - protein, 758 aa, Populus trichocarpa
MKFQIEDVTVYFPYDHIYPEQYSYMVELKRALDAKGHCLLEMPTGTGKTIALLSLITSYTISKPQGAIKLIYCTRTVHEMEKTLAELKLLHNYQVKHLGPAAKILAIGLSSRKNLCVNPNVLEANNRDSVDAACRKRTASWVRALAAENPNVETCEFFENYERAASGAVLPPGVYTLQDLRAYGKEKGWCPYFLARHMVQLANVVVYSYQYLLDPKVAGIISKEMQKESVVVFDEAHNIDNVCIEALSVSVRRQTLDGASRNISRIEQEINRFKATDANRLRDEYKRLVNGLALSGNLPGSDSWLSNPALPDDILREAVPGNIRRAEHFLHVLRRLLQYLTVRLDTENVEKESPISFVASINNQAGIDQKTLKFCYDRLHSLMLTLEITDTDEFLHVQTICDFATLVGTYSRGFSIIIEPFDERMPHIPDPVLQLSCHDASLAIKPVFDRFQSVVITSGTLSPIDLYPRLLNFHPVVSRSFKMSLTRDCICPMVLTRGSDQLPVSTKFDMRSDPGVVRNYGKLLVEMVSIVPDGIVCFFVSYSYMDGIINTWNESGLLKEIMQHKLVFIETQDVVETTLALDNYRRACDCGRGAVFFSVARGKVAEGIDFDRHYGRLVIMFGVPFQYTLSKILLARLEYLRDTFQIKEGDFLTFDALRQAAQCVGRVIRSKADYGMMIFADKRYSRHDKRSKLPGWILSHLRDAHLNLSTDMALHIAREFLRKMAQPYDKTGSSGKKTLLSQEDLEKMDDSGKQAMLY

SEQ ID NO: 18996 - protein, 184 aa, Populus trichocarpa
MAETKRSTGTVKWFSAQKGFGFIAPDDGGEDLFVHQTSIQSDGFRTLSDGQPVEFSVGSGEDGRAKAADVVGASRSRRPPRGGRGGGGGRGYYSGRGRGGGYERGGHSRGRGYGGGGSSGGACFNCGRYGHLARDCYEGGDDGGRYGGGGGRRYSGGGGGGGGGCYNCGEEGHFARDCPNAGNK

SEQ ID NO: 18997 - protein, 818 aa, Populus trichocarpa
MDREANLPLPSLPPPKNLVRPVTNAADTTSSSSSFSSSPPDFLRHVQAAFKRHRPLGIMQTNNSIKPRRTLIPQREASRTVASNVDPTTGTKKSQDVVPLSKDSILQTKNPVAVIRETHEDASPFPGTITKTFDESFNPFDGQREQPESVIATKEDNQVPLTCVESQLFEGKRKVQFLTVNKATSQEMEWDVSNQVEVSNVINDETKQQNFQNMESDVTSRSDGAVTSLAKRAMVVQDQLHQLRNFLNQPATQSSVVGPSCATTTSVHSTSAPMLNSTTYCSRLHTESGSQAAVEPLRDSNANSQHVTPRNLEQLSHPLLKDTSAMLIDLRATATQPSTSAIHSQFKELDLPKEQKGSMPEAHDIANNPSLVDKPAKERGPADEGTDVQSQRPMSRNPSSNVKLEPSKPENKEKVASSKGTSVPRKRSYDPDLFFKVNGKLYQRLGKIGSGGSSEVHKVISSDCTIYALKKIKLKGRDYGTAYGFCQEILYLNKLKGKNNIIQLIDYEVTDKALLHEVMSSSISNKDGRVKDDGCIYMVLEYGEIDLAHMLAQKWKEMDSSNQTIDENWLRFYWQQILQAVNTIHEERIVHSDLKPANFLLVKGSLKLIDFGIAKAIMSDTTNIQRDSQVGTLSYMSPEAFMCNESDANGNTIKCGRPSDIWSLGCILYQMVYGRTPFSEFKTFWAKFKVITDPNHEITYEPVSNPWLLDLMKKCLAWDRNERWRIPQLLQHPFLVPPVPTQPSVSQKQGCKLLQLVSETCSGDQEASVLCRELQQLLNPGTLTPESSTSRDQQCKLLSQMSKLCFQLRECLAKLERG

SEQ ID NO: 18998 - protein, 598 aa, Populus trichocarpa
MVTTSSLNLVFTPTKPTSLSWKHSFPSPFTTANCTRRQDRKAYRFVVFATVLADPKPTVLVAEKLGKAGLELLKTFANVDCSYNLSPEELCTKISLCDALIVRSGTKVTREVFERSGGRLKVVGRAGVGIDNVDLSAATEHGCLVVNAPTANTIAAAEHGIALLTAMARNIAQADASLKAGKWQRSKYVGVSLVGKTLAVIGFGKVGSEVARRAKGLGMHVIAHDPYAPADRARAIGVDLLTFEEAISIADFISLHMPLTPATSKIFNDQAFSRMKKGVRIVNVARGGVIDEEALVRALDSGIVAQAALDVFTEEPPPKDSRLVLHENVTVTPHLGASTTEAQEGVAIEVAEAVIGALKGELAATAVNAPMVTAEVLTELAPFVTLSEKLGRLAAQLVAGGSGVQSVKVTYASARGPDDLDTRLLRAMITKGLIEPIASVYINLVNADFTAKQRGLRIIEERFLLDGSPENPLEFIQVQIANVESKFATAISDSGEIKVEGRVKDGKPHLTKVGSFGVDVSMEGSLVLCRQVDQPGMIGSVGNILGEENVNVNFMSVGRIAPRKQAVMIIGVDEEPSKEALKRIGEIPAVEEFVFLKL

SEQ ID NO: 18999 - protein, 450 aa, Populus trichocarpa
MGWLSKIFKGAYLEQENEEDIDRAIALSLLEDNHIGKNVADVEIQLKEDEQLAKALQESLSVESPPRHGIPYQGNAYQPYPIHFPMGFRVCAGCNTEIGQGKFLNCLNAFWHPECFRCHACGLPISDYEFSMTGNYPYHKFCYKERYHPKCEVCKLFIPTNPAGLIEYRAHPFWIQKYCPSHEHDGTPRCCSCERMEPQDTGYVALNDGRKLCLECLDSAVMDTKHCQPLYLDIQEFYERLNMKVEQDVPLLLVERQALNEARDGEKNGHYHMPETRGLCLSEEQTISTVSKQPRFGAGNRAMGMMTEPYKLTRRCEVTAILILYGLPRLLTGSILAHEMMHAWMRLKGFQTLSQDVEEGICQVLAHMWLDSELTPTSGSNIASSSASRTTKNGTRSQFERKLGDFFKHQIESDTSPVYGDGFRAGQQAVQKYGLERTLDHIRMTGKFPY

SEQ ID NO: 19000 - protein, 295 aa, Populus trichocarpa
MGDKNDGLGLSLSLGYATQRNHHQQPSLKLNLMPLASQNKHKKTSWTDLFQSPDRTCDTRLFQRGIDMNRVPAAVADCDDETGVSSPNSTLSSLISGKRSEREQIGEETEAERASCSRGSDDEDGGDASRKKLRLSKEQSSVLEENFKEHNTLNPKEKLALAKQLNLRPRQVEVWFQNRRARTKLKQTEVDCEYLKTCCENLTEENRRLLKEVQELRALKLSPQLYMHMNPPTTLTMCPSCKRVVSSASSSSAAVVSSALAPIASTPQPQRPVPINPWAAMPIHHRTFDAPASSS

SEQ ID NO: 19001 - protein, 338 aa, Populus trichocarpa
MSIIGKRGIHYLQKLKTANISPELLEKGQNRVIDASLTLIRERAKLKGELLRALGGVKASTTLLGVPLGHNSSFLQGPAFAPPRIREAIWCGSTNSSTEEGKELNDPRVLTDVGDVPVQEIRDCGVDDDRLMNVISESVKLVMEEDPLRPLVLGGDHSISFPVVRAVSEKLGGPVDILHLDAHPDIYHCFEGNKYSHASSFARIMEGGYARRLLQVGIRSITKEGREQGKRFGVEQYEMRTFSRDRQQLENLKLGEGVKGVYISIDVDCLDPAFAPGVSHIEPGGLSFRNVLDILHNLQADVVAADVVEFNPQRDTVDGMTAMVAAKLVRELTAKISK

SEQ ID NO: 19002 - protein, 291 aa, Populus trichocarpa
NKFQFLKTYDSQLPLDQFLSTHSHSIKAILSSGGAPVNADILQLLPEVGVVVTTSAGLNQIDIPECRRRGIKIANAGYVYSADVADMAVGLLIDVLRKVSASDRYVRQGLWAAKGNYPLGSKLSGKRAGIVGLGNIGYEVAKRLEAFGCFVSYNSRKKKPNVSYPFYHDVCELAANCDALIICCGLSDETRHMINKQVLSALGKEGVIVNIGRGAIIDEKEMVRCLMQGEIAGAGLDVFETEPSVPKEFFAMDNVVLSPHRAVFTPESLKDLSQLVVGNLEAFLSNKPLLS

SEQ ID NO: 19003 - protein, 335 aa, Populus trichocarpa
MDCNGYHQENHDQNLFPKPKVLVLEPPPVFKYHEDKLSQKFHFLKAWDSPLPLDQFLTTHAHSVQAILSHGTCPVTTSTIRLLPSLGLIVTTSSGLNQIDLQECRRRGVSVAYAGSLFSADVADIAVGLLIDALRKISAGNRYVTQGLWANNGDFSLGSKLGGRKVGIVGLGSIGLEVGKRLEPFGCNILYSSRNKKSSVSYPYYSNVCELAANCEVLIICCELNDQTRHMINKEVLLALGKKGLIINVGRGAIIDEQEMVRCLMQGEIAGAGLDVFENEPHVPSELIALDNVVLSPHRAVHTEETLMALVELVIGNLEAFFSNKPLLSPVILDE

SEQ ID NO: 19004 - protein, 264 aa, Populus trichocarpa
MKAIFCGNLDYDARQSDVERLFRRYGRIDRVDMKSGFAFVYMEDERDAEDAIRRLDQTEFGRKGRRLRVEWTKQERDSKPAGSRRSSANMTPSKTLFVINFDPIHTRTRDLERHFDPYGKILSTRIRRNFAFVQYELQEDATKALEATNMSKLMDRVISVEYAARDDDERRNGYSPERRGRDRSPDRNYSRERSPSPYRRDRGSPDYGHGQNTNARPQRGNHAYEKAEGPENERYRRFILSSTSNSQLFLLCAHFIIFQCCTMM

SEQ ID NO: 19005 - protein, 415 aa, Populus trichocarpa
MDGFEHQAPSFFICPISLQVMKDPVTISTGMTFDRESIQKWLFSYKKIICPVTKQPLSDFRLTPNSNLLRLIQSWHLQHASSSTTKFVEPEPNNQDALMKVLLEEIKQPHLQVKSLRKIKSLIQENRGDSSRITCIRDDSLFSLVASLVVKTELVPGVPQITGNDTPEIINEAVSSLCLLRPSDETLKMVSQNENGLLIESLCLIITQYLSNLQIRIQAALLLKSIFEVVDGIYKEGLRVEFFESITEILKDQISKHGSLTVLATLMEVLSYGKNKEKAIEGGLIPILIELLAEDNERHVCELMLAVLEKLCQKAEGRAAFLAHPAGIAVVSSKILKVSHVGDDKSISLLSSVLRFCISRGEVAQEFMEVGGVTKICLVIESGCNLKTKEKAREILGFHLKTWNKTPCFPSLFKA

SEQ ID NO: 19006 - protein, 105 aa, Populus trichocarpa
MSEATGQPQEEDKKPNDQSAHINLKVKGQDGNEVFFRIKRSTQLKKLMNAYCDRQSVEINSIAFLFDGRRLRGEQTPDELDMEDGDEIDAMLHQTGGAVKASDYA

SEQ ID NO: 19007 - protein, 103 aa, Populus trichocarpa
MSGATGQPQEEDKKPNDQSAHINLKVKGQDGNEVFFRIKRSTQLKKLMNAYCDRQSVEFNSIAFLFDGRRLRGEQTPDELDMEDGDEIDAMLHQTGGAVKTSN

SEQ ID NO: 19008 - protein, 482 aa, Populus trichocarpa
MANSKYEYVKSFEVEDEIMFPNLIVVRIGDRHFQRFSEVHEFEKPNDEKALKLMSLCATLVLQEYPDIVFSFGFSDEYSFVFKQTTKFYQRRASKVVSIIVSFFTSVYVTKWKEFFPEKELKYPPSFYARPIVCASLEVLQEYLAWRQQHCHITNQYNTCLWELVKSGKTEKEALEILKGTQKQERNELLFQHFGINYRTLPQMFRQGSCVLRTEVEDIVKYSENGTPIKRMRRDKTTVHSKNIAGRSFWNEHQSLLKELGGFTKDVGKINSDYIRSFLFESKLMASTWIVIRIDGCHFHRFSEVHDFEKPNDEQALNLMNSCAVAVLQEFADVVFSYGVSDEYSFVLKKDSQFCQRKASNIVSIMVSFFTSMYVMNWKAFFPQKELKYCPAFDGRAVCYPSTEILRDYLAWRQVDCHINNQYNTCFWMLVKSGKSKSEAQRTLKGTQAQEKKEMLAWFGIDDYNALPVMFRQGSSVFRVHI

SEQ ID NO: 19009 - protein, 358 aa, Populus trichocarpa
MSLLSDLINLNLSDSTEKIIAEYIWVGGSGMDIRSKGRTLPGPVSDPSKLPKWNYDGSSTGQAPGEDSEVILYPQAIFKDPFRRGNNILVICDTYTPAGEPIPTNKRCKAAKIFSHPDVVAEVPWYGLEQEYTLLQKDVKWPLGWPIGGYPGPQGPYYCGAGVDKAFGRDIVDAHYKACLYAGINISGINGEVMPGQWEFQVGPSVGISSGDELWAARYILERITEVAGVVLSFDPKPIQGDWNGAGAHTNYSTKSMRNEGGYEVIKKAIEKLGLRHKEHIAAYGEGNERRLTGRHETADINTFKWGVANRGASIRVGRDTEKEGKGYFEDRRPASNMDPYVVTSMIAETTILWKPCQ

SEQ ID NO: 19010 - protein, 486 aa, Populus trichocarpa
KVSCEAASVDLLETNKIDNEAEKKITCVMKFGGSSVASAERMREVAELILSFPNESPVIVLSAMGKTTNKLLLAGEKAVSCGVTNVDSIEELSFIKELHNRTVKELEVDESVIAKHLEELEQLLKGIAMMKELTPRTRDYLVSFGECMSTRIFAAYMNKIGAKARQYDAFEIGFITTDDFTNADILEATYPAVAKSLHGDWISDPAIPIVTGFLGKGWRSCAITTLGRGGSDLTATTIGKALGLSEIQVWKDVDGVLTCDPNIYPHAEPVPYLTFDEAAELAYFGAQVLHPQSMRPAREADIPVRVKNSYNPNAPGTLITRARDMSKAVLTSIVLKRNVTMLDIASTRMLGQFGFLAKVFSTFEDLGISVDVVATSEVSISLTLDPSKLWSRELIQQASELDHVVEELEKIAVVNLLQRRSIISLIGNVQRSSLILEKAFHVLRTLGVNVQMISQGASKVNISLIVNDDEAEQCVKSLHKAFFETD

SEQ ID NO: 19011 - protein, 307 aa, Populus trichocarpa
MRNWNAARIFSYKEIKAATNNFKEVIGRGSFGSVYLGKLSDGKLVAVKVRFDKSQLGADSFINEVYLLSQVRHQNLVCLEGFCHESKQQILVYEYLPGGSLADQLYGPNSQKVSLSWVRRLKIAADAAKGLDYLHNASDPRIIHRDVKCSNILLDKEMNAKVCDFGLSKQVMQADATHVTTVVKGTAGYLDPEYYSTQQLTEKSDVYSFGVVLLELICGREPLRRSGTPDSFNLVLWAKPYLQAGALEIVDENLKGTFDVESMRKAAIVAVRSVERDASQRPTIAEVLAELKEAYSIQLSFLASFDM

SEQ ID NO: 19012 - protein, 421 aa, Populus trichocarpa
MNIVHHEYLEESEEEERLPILNMESMKVISPLGRGAKGVVFLVKEEPLGEFYALKVVSREFVKKKKRGSNDKDMEGEEYRRIYFEQQVVSRFNHPLLPKLRGVLATDKILAYAIDYCPGRDLHFLRKQQSEKMFAIDTIRFYAAELVLALEYLHRLGIAYRDLKPDNIMVQENGHIMLVDFDLSTKLPPKSASPVSVVADRRKRRSPLHRFFNRGVSPDDSGEELGHRLSEPDSTSKSNSFVGTEEYVAPEVIQGDGHDFGVDWWSLGVVLYEMLYGVTPFKGESRKESFYRILTKKPDLVGEATPLRDLIGKLLIKDPKERIRVEGIKGHDFFKGIDWDLLLQILRPPYIPFMDNWSEGEGKNGIKEIDVEIFVQEIFGAGDDDKKKNLDGNHHGNENKKVWVNGLNTNHPCEAENFLVF

SEQ ID NO: 19013 - protein, 901 aa, Populus trichocarpa
MDFDYMDELLLEGCWLETTDGSEFLNPSLSNSAAFFDSSFMWPTPEINHGDSASSPSQKGNQEDNQISMFPGNSTLSDIQARSPAGETAVSVAGWDDNATDGSELGKRWWIGPTPNPSVETSVKRRLIKALECIKDLTKNKDVLIQIWVPVNRGGRRVLTTHDQPFSLDPSSEKLASYRDISVKYQFSAEEDSKDSVGLPGRVFLGKVPEWTPDVRFFRSDEYPRVNHAQLYDVRGTLALPVFEQGSRTCLGVIEVVTTSQKIKYRPELESVCKALETVDLRSSEVPSIQNLQACNMSYQAALPEIQKLLRAACETHRLPLAQTWVPCTQQGKGGCRHSNENYYRCVSTVDDACCVADSAIQGFQEACSEHHLLKGQGVAGQAFMTNQPCFSGDVTSYGKTEYPLSHHARMFGLCAAVAIRLRSIYIGTTDFVLEFFLPVNCRDPQEQKKMLNSLSAIIQHVSQTLRVVTDKELVEETDLPFSEVLVPSDGRSSGEETSTVKQSCSERHSRDNSPWTACLSEVQPSGSNISLSQKDKQKVMLREKSSENRENQEDCSLRESIKCGRDSTSAEGSFSSAGTSKTGEKRRAKAEKTITLQVLRQYFAGSLKDAAKSIGVCPTTLKRICRQHGINRWPSRKIKKVGHSLKKLQRVIDSVEGASGTVQIDSFYKNFPELASPTLSRTSPLSTLKSSSHPKPSGMQPEGGTFSSQVTAPKSPSPSCSLGSSSSHSCSSGAIAASEDPVSGENSGNGVLKMVRSNVELHASSPGEQERMPRSQSHKTLAELGSIPPLSKDGSRLSQETDAHRLKVTYGNEIIRLRMSNKWGFKDLLQEIVRRFNIDDIHRFDLKYLDDDSEWVLLTCDDDLEECIAICGSSDNQTIKLLLEVSPRPLGRSSHSSGLS

SEQ ID NO: 19014 - protein, 341 aa, Populus trichocarpa
MGSLPPSLDLPSPNAKSQQIDQTTLLNLFKSQQNHLNYFFRNLDLSQTLTFTQTLLHCNGTIFFSGVGKSGFVANKISQTLISLGIRAGFLSPLDALHGDIGALSASDILVLFSKSGNTEELLRLVPCAKAKGAYLVSVTSVEGNALTAVCDLNVRLPLERELCPFDLAPVTSTAIQMVFGDTVAIALMGARNLSKEEYAANHPAGRIGKSLIFKVKDVMKKQNELPICKEGDLIMDQLVELTSKGCGCLLVIDEEHHLIGTFTDGDLRRTLKASGEAIFKLTVGEMCNRNPRTIGPDAMAVEAMKKMESPPSPVQFLPVIKDDNILIGIVTLHGLVSAGL

SEQ ID NO: 19015 - protein, 239 aa, Populus trichocarpa
MDHSFFNNPNQEFSTSPPFGLLDPSWDKLPFNLHGFSPFNSNDSEGSQETLPSDVPLTEAKASTHSIASDVPPNIAKNNLPQLSSSKEIEEQEATPKAKKNIPTRKKTYRGVRNRPWGTYAAEIRDSTRNGVRVWLGTFETGEAAALAYDQAALSLQGSKAVLNFPIEQVRKSLEELKCGFTDWCSPAEALKKTHSKRKPVSGKRKGKGLATKEVLVLEDLGADYLETLLSSCERGIPK

SEQ ID NO: 19016 - protein, 226 aa, Populus trichocarpa
MEPSLFYHNQYLNSDLSPESSFGSLDSFPWDDLFQSSSLPFNTSDSGEMVLFNDLGADGAKESSESNSSSGIKEEEVTSNAKEEEPKKEKSYRGVRRRPWGKYAAEIRDSTRNGVRVWLGTFDSAEAAALAYDQAAFSMRGSMAVLNFSVEMVRESLEDMKYRCEDGCSPVVALKRRHSVRRKSTSRKSKVNQVANTRQQNVVVLEDLGADYLEELLNSCESSSSW

SEQ ID NO: 19017 - protein, 233 aa, Populus trichocarpa
MDAEESECQSEDAELDSAVANKPAKRSGSTRRSRAAEVHNLSERRRRDRINEKMRALQELIPHCNKTDKASMLDEAIEYLKSLQLQLQVMWMGSGIVPVMFPGVQHFMSRMGMGMGMGPPPLPSMQNPMHLPRVPLVDQSISMTPTQNQAVICQTPVLNPVNYQNQMQNPTFSDQYARFMGFHMQAASQPMNMFRFGSQTVQQNQMMAPPNSGGGPLSAGTAASDAPPSGKTG

SEQ ID NO: 19018 - protein, 424 aa, Populus trichocarpa
MSFRSIVRDMRDGFGSLSRRSFEVRLPGHLRGKSHGSACELQDQPVVIQNSRWAGLPPELLQDVIKRLEASESTWPSRKHVVACASVCRAWREMCKEIVRSPEFSGKITFPVSLKQPGSRDGTIQCFIKRDKSNLTYHLFLCLSPALLVENGKFLLSAKRKRRTACTEYVISMDADNVSRSSSTYIGKLRSNFLGTKFIIYDTQPPYNNAQLAPPGRSRRFYSKKVSPKVPTGSYNIAQVTYELNVLGTRGPRRMHCTMHSIPALSLEPGGSVPGQPELLPRCLEDSFRSISFSKSIDNSTEFSSSRFSDIVGPREEDEEGKERPLVLRNKAPRWHEQLQCWCLNFRGRVTVASVKNFQLIAATQPAAGAPTPSQPAQSDHDKIILQFGKVGKDMFTMDYRYPLSAFQAFAICLSSFDTKLACE

SEQ ID NO: 19019 - protein, 409 aa, Populus trichocarpa
MASSPSLKDAVSTQNESTQKTQQPLQVAKRLEKFKTTIFTQMSSLAIKHGAINLGQGFPNFDGPEFVKEAAIQAIKDGKNQYARGYGVPDFSSAIAERFKKDTGLVVDPEKEITVTSGCTEAIAATMLGLINPGDEVILFAPFYDSYEATLSMAGAKIKCITLHPPDFAVPIDELKSAITQDTRAVLINTPHNPTGKMFSREELSTIASLCIENDVLVFTDEVYDKLAFELDHISMASLPGMYERTVTLNSLGKTFSLTGWKIGWAIAPPHLTWGVRQAHSFLTFATSTPMQWAAAVALRAPESYFVELKRDYMAKKEILVEGLKAVGFKVFPSSGTYFVVVDHTPFGLENDIAFCEYLIKEVGVVAIPTSVFYLNPEDGKNLVRFTFCKDEGTLRAAVDRMKEKLKRK

SEQ ID NO: 19020 - protein, 635 aa, Populus trichocarpa
MAQWVLNSPDPPGLLQELGSSVREIIFPHGKKHTSSTARRKQQSRAMEFLQGVFPILRWGRDYKASMFKNDLMAGLTLASLSIPQSIGYANLAKLDPQYGLYTSVIPPLIYAIMGSSREIAIGPVAVVSMLLSSMIGEIQDPLADPVAYRNFVFTVTLFAGTFQAIFGLFRLGFLVDFLSHASIVGFMGGAAIVIGLQQLKGLLGISHFTTKTDVVSVLHSAFTSIDHPWSPLNFVLGCSFLIFLLIARFIGRRNKKLFWFPAIAPLVSVILSTLIVFLTKADKHGVKIVRHIKGGLNRSSVHDLQLSGPQVGQAAKIGLISAIVALTEAIAVGRSFASIKGYHIDGNKEMLALGFMNIAGSLSSCYVATGSFSRTAVNFSAGCQTLVSNIVMSITVLVSLEVFTRLLYYTPTAILASIILSALPGLIDIRGAYYIWKVDKLDFIACIGAFFGVLFASVEIGLLAAVTISFARILLNAIRPGIEALGRLPRADVYCDMNQYPMAVKTPGILAVRINSALLCFANANFIRERILRWVTEEVNEIKESTEGGIQAVILDMSNVMNIDTAGILALEELHKELLIHEAQLAIANPKWQVIHKLRLAKFIDRIGRGWIFLTVSEAVDACVSSKLTALANC

SEQ ID NO: 19021 - protein, 337 aa, Populus trichocarpa
MERYEIIKDIGSGNFGVAKLVRDKWTKEFFAVKFIERGQKIDEHVQREIMNHRSLKHPNIVKFKEVLLTPTHLAIVMEYAAGGELFERICNAGRFSEDEARIFFQQLISGVSYCHSMQICHRDLKLENTLLDGSTAPRVKICDFGYSKSAVLHSQPKSTVGTPAYIAPEVLLKKEYDGKISDVWSCGVTLYVMLVGAYPFEDPDDPKNFRKTIGRILSVNYSIPDYIRVSVECNHLLSRIFVANPEKRITIPEIKNHPWFLKNLPIELMEGQSWQSIDVNNLSQSIEEVLSIIQEASKPVSLSKAVGHLLGGSMDLDDLDADADLEDIETSGDFVCP

SEQ ID NO: 19022 - protein, 265 aa, Populus trichocarpa
MKRFNSSDPLAAFISISSSKEERTQKTNQGYSRDFQSMLDSLEEEDYSEAASHVGEKKRRLNLHQVKALEKNFEVENKLEPERKLKLAGELGLQPRQVAIWFQNRRARWKTKQLERDYGTLKANYEALKLDYCNLEQKNEVLAQKVKELKAKLSEENVDSSHSVKEEHRVSESDNNASVHSKNRDFSEKNNSSAITKDHSNISSSHELMNLFQLSDSRVILGNIYQVYQPHLMKPEEQSLFSTEESCNFFSVDQAPTLHCYFPEH

SEQ ID NO: 19023 - protein, 269 aa, Populus trichocarpa
MMGFGTTDDLCNTGLGLGLGSFHAEQENCSQSDHLFQPIKKDKLTLKYDLLLPSLTLGPSEEVYRSITKKTDADLQPQASSLSAVSSFSNSSIKKEREFGIGEEVDVERISSRLSDEDEEGSPRKKLRLTKEQSVILEDNFKDHSTLNPKQKQVLAEQLNLRPRQVEVWFQNRRARSKLKQTEVDCELLKKCCETLTLENKRLQKELQELKSLKLASPVYMQLPAATLSMCPSCERICSGSDQGSSTSTFTVGPKPNFYNPDTHSSAAC

SEQ ID NO: 19024 - protein, 197 aa, Populus trichocarpa
MAFAGTTQKCMACDKTVYLVDRLAADNRVYHKACFRCHHCRGTLKLGNYNSFEGVLYCRPHFDQLFKRTGSLDKSFEGTPKILKPEKPVDGEKPISTKVSTMFAGTRDKCFGCKNTVYPTEKVSVNGTSYHKSCFKCIHGGCTISPSNYIAHEGRLYCKHHHNQLIKEKGNLSQLEGDVEKDSMNDKTNGREVSAES

SEQ ID NO: 19025 - protein, 227 aa, Populus trichocarpa
MASGFGESTSRAPHNSSFTSNNGNGDAGNFECNICFDLAQDPIVTLCGHLFCWPCLYKWLHFHSKSRECPVCKALVEEEKLVPLYGRGKTSTDPRSKSIPGVNIPNRPAGQRPETAPPPEPNHFGQHGFGFMGGLGGFAPMATARLGNFTFSAAFGGLIPSLFNLQVHGFPDAAMYGPAGYPYGFNSFHGGHPHGYRQHHGQGQQDYYLKRLLLFIGFCVFLALIWQ

SEQ ID NO: 19026 - protein, 204 aa, Populus trichocarpa
MNRLSLSIPLLLLSIFCFSGTVEPARFARHSRPRAYIETACTKTLYPSLCTQYLSVFANSTIQTPQQLAQAALSVSLYKALQTRTFMLKVVKELKAMKSKDYQAVKDCLDQIGDSVDQLSQSVRELHRLEHPGAAGGGDVFWHVSNFETWVSSAMTDASTCVDELPGKDMNKLKAVIKAKVLNVAQTASNALALFQRYAAKHKP

SEQ ID NO: 19027 - protein, 221 aa, Populus trichocarpa
MVRGKTQMRRIENATSRQVTFSKRRNGLLKKAFELSVLCDAEVAVIVFSPRGKLYEFGSSSVQETIERYQRHVKESNTNKQTSELNMEQLKGEAASMIKKIEILEVSKRKLLGECLGSCTVEELQQIEQQLERSVSTIRARKNQVFREQIEQLKQKEKQLTAENARLSNKSGVQPWRVLSREQRENLPCEEQRDSSSISDVETELFIGLPETRTRRLPLRN

SEQ ID NO: 19028 - protein, 604 aa, Populus trichocarpa
MGQCYGKTNSTNINDATTVTIVASSTDQNQQTPLPSSTPRNGVRSLKYSASSSSTHPSPWPSPYPQGVAASPLQGVSPSPARSSTPRRFFKRPFPPPSPARHIAASLVKRLGGRGKPKEGPIPEHGSVEAEQQQEQSLDKSFGYSKNFGAKYELGKEIGRGHFGHTCSARVKKGELKDEAVAVKIISKAKMTSTISIEDVRREVKILKALSGHRHLVKFYDAFEDANNVYIVMELCEGGELLDRILARGGRYTEEDAKAIIVQILCVVAFCHLQGVVHRDLKPENFLFTSGSEDADMKLIDFGLSDFFRPDERLNDIVGSAYYVAPEVLHRSYSLEADIWSIGIITYILLCGSRPFWARTESGIFRAVLRSDPNFEDLPWPSVTPEAKDFVKRLLNKDYRKRMTAVQALTHPWLRDDSRPIHVDILIYKLVKVYLHATPFKRAALKALSKALTEDELFYLRAQFNLLGPNGDGSVSLDNFRMALVHNATDAMRESRVPEILNAMESLSYRKMYFEEFCAAAISTYQLEALEGWEQIASTAFEHFEQEGNRVISVEELARELNVGPSAYTIIKDWIRSSDGKLSVLGYAKFLHGVTLRSTNTRHR

SEQ ID NO: 19029 - protein, 294 aa, Populus trichocarpa
MDAQARKHGYAGTLSEDQGMGIRKGPWTIEEDSLLAHYITIHGEGHWNSAARCAGLKRTGKSCRLRWLNYLRPNVRRGNITLQEQLLILQLHSRWGNRWSKIAQMLPGRTDNEIKNYWRTRVQKQAKQLKCDVNSKQFRDTMRYVWIPQLIQKIGAESESPMDQPTISPPTYYSSQIDIPAAASESGSDLIDPNFMPDISVSSTLSDSLDAQVSPWSDLTDYQNPPCGQYYSDCMQNGSGLCPENDSGSWGWCQDGVDMQGMEQERYGFIGGGDSLDQSLWNEENIWFLQQQLM

SEQ ID NO: 19030 - protein, 924 aa, Populus trichocarpa
MGSRLLLLFSLLLFVFVHASSAQPGFLSLDCGGPVNFTDDLGLSWTSDFNFSYGAAASISVANETRKQYTTVRHFPADSRKYCYRLDVTSRTRYLLRATFLYGNFDSNNVYPKFDISVGPTHWSTIVISDANTIESTELIFLASSSSMSVCLSNATTGQPFISTLELRQFNGSVYYTEFENQFYLSMSARINFGADNEAPIRYPDDPYDRIWESDSVKKANYLVDVAAGTKKVSTDMPIDVNIDERPPERVMQTAVVGTNGSLTYRLNLDGFPGFGWAVTYFAEIEDLDPEESRKFRLVLPGYPDMSKAIVNIEENAQGKYRLYEPGYTNLSLPFVLSFRFGKTSDSSRGPLVNAMEIHKYLEKNDGTLDGYVISRVILSHSTEDWAQEGGDPCLPVPWSWVQCNSDARPRIVKLSLSSKNLSGNVPSGLTMLTGLVELWLDGNSLTGPIPDFTGCTGLEIIHLENNQLTGELPSSLLNLPNLRELYVQNNLLSGTIPSGLSRKVALNYSGNINLREGARRGRHMDIIIGSSVGAAVLLIATIVSCLFMHKGKKRHPDQEQLRDSLPMQMVVSSLRNAPGEAAHCFTTFEIEDATKKFEKKIGSGGFGVVYYGKMKDGREIAVKVLTSNSYQGKREFTNEVTLLSRIHHRNLVQFLGYCQEDGKSMLVYEFMHNGTLKEHLYGPLKRGKSINWIKRLEIAEDAAKGIEYLHTGCVPAIIHRDLKSSNILVDKNMRAKVADFGLSKLAVDGASHVSSIVRGTVGYLDPEYYISQQLTDKSDVYSFGVILLELMSGQEAISNESFGVNCRNIVQWAKLHIESGDIQGIIDPSLCGEYDIQSMWKIAEKALMCVQPHGHMRPSISEVLKEIQDAILIEREVTAAREDISDEMSRNSVHSSLNLGSLDLGGAENYLALDESIAQPTAR

SEQ ID NO: 19031 - protein, 379 aa, Populus trichocarpa
MGYICDFCGEQRSMVYCRSDAACLCLSCDQIVHSANALSKRHSRTLLCERCNSQPALVRRVEERISLCQNCDWMGYGSSTSASTHKRQTINCYFGCPSVSELSSKWPFILDSPSGGGSTCEQELGLMSIAENSTKNTWGPTENTICHNASGIVGASSVPESSSVPKNLDQPTRSPNSSLPKVCDADLYEDFNMAEMDLNLENYEELFGVTLNNSEELFENGGIDSLFGTKDMPIVDSNFGLVNTIQPTCSNAPSTDSMISSKTEPILCFTAKQGHSSLSFSGLTGESNAGDYQDCGASSMLLMGEPSWCPPCLESPLPSANRSDAVKRYMEKKKTRKFEKKVRYASRKARADVRRRVKGRFVKAGDAYDYDPLGQTRSF

SEQ ID NO: 19032 - protein, 510 aa, Populus trichocarpa
MEAFSLVVLVLAWVFALLYLPKFFKSLRNPLKLPPGPKPWPIIGNFDLLGPLPHQSLHQLSLKYGKTMQLQFGSYPVFVTSSLDIAKQILKTYDHMFASRPQTAAGKYTTYEYSDLAWAPYGPYWRQGRKIYLTELFSAKRLESYEYMRIEEMREFTRRLYRNCGKTIELKDYLSHYTLSIISRIVLGKKYFSASESEKEIVTLEEFQEMLDELFLLNGVLNIGDWIPWLDFLDMQGYVKRMKELKVRFDRFHDHVIDEHNAKRKATKNWQPKDMVDLLLQLADDPELEVKLTRDNIKGLTQDLIAGGTDTAATMGDWSMSELLKKPQLFKRVTDELDRVVGRDRWVEEKDIPQLPYIEAIMKEAMRMHPSAVMLAPHLALQDSKVGGYDIPKGTRIFINTWSMGRDPDLWEDPEDFRPERFIGKGIDIKGHNFELLPFGSGRRMCPGYPLGTKMILVSLANMLHGFTWELPPGMKPQDVKRDEVFGLATQRKYPTVAVAKPRLPLHLYN

SEQ ID NO: 19033 - protein, 198 aa, Populus trichocarpa
MSPPFSLFNLLFIFISFSTSPYSAAAKSHNAPRDLVRSSCVHASYPNLCLRTLSSYAGPANTPRDLAQAAVKVSIARARKVSNYLSTLSGLKKKRERVALSDCIEQIYDSVDELSKTLGELKHLREETFGWQMSNAQTWVSAALTNEDTCLDGFHEVESKAKDDVKRKITNVARVTSNALYMINRLDESRGRPKLGRH

SEQ ID NO: 19034 - protein, 596 aa, Populus trichocarpa
MDPSHSFTSHSKVDEQAEQAFRRKARKRLIVIVVSAVVLVTIIICALVGTSVSADNKSNGKNPSSQTSEAQYIRAMCNATRYPDSCYSSMSSSLKASSNDTNPNPDPKTLFLLSLQVSLIELTKLSSLPQWIMSSNSFKNETSDSLVQSALHACEILFLDAIDQVNESMSSIQVGQGDKTVFLTSKINDIRTRLSTAITDQDTCIAGLQDTAKHLILTDGVRYAMTNSTEFTSNSLAIASNLVKILDDQLGIPIHRKLLTVDHDLDMGFPSWVNKSDRRLLQQENPEPNLTVAKDGSGAFKTIREAVDSIPKNSKSRFVIYVKEGIYVENVKIEKQQWNFMMYGDGMNKTIISGSLNNVDGVTTFLSGTLIAEGRGFIAKDMGFKNTAGPQKEQAVAVRSSSDQSIFHRCSFDAYQDTLYTHSNRQFYRECRIIGTIDFIFGNAAAIFQNCTIQPRQPMEKQNNTITAQSRTDPNQNTGISIQQCQMTPFDNLTVPTFLGRPWRDHATTVIMESYIGDFLDPLGWIPWEPETDPPNTTFYAEYQNFGPGSAIDKRAGWLGVLPNITSDEAAKFTVEPFIQGRQWLVQANVFFQDTL

SEQ ID NO: 19035 - protein, 597 aa, Populus trichocarpa
MVFQDFDQLSERRKLERQQKLRKKIIIGSVSSIAFFVIVGAGVFALVSNHNISSPGSNGGSPSTVSQPVESAKPTSHVARVIKTVCNATTYQDTCQNTLEKGMRKDPSSVQPKDLLKIAIKAADKEIEKVLKKASSFKFDKPREKAAFDDCLELIEDAKEELKHCIDRVGNDIGKLTKNAPDLNNWLSAVMSYQQTCIDGFPEGKLKSDMEKTFKAARELTSNSLAMVSSLASFLKNFSFSGTLNRRLLAEEYNSPSLDKDGLPGWTSHEDRRILKGANQDKPKPHVTVAKDGSGDFKTISEALAAMPAKYEGRYVIFVKQGIYDETVTVTVTKKMVNITMYGDGSQKTIVTGNKNFADGVQTFRTATFAVLGEGFLCKAMGFRNTAGPEKHQAVAIRVQADRAIFLNCRFEGYQDTLYAQTHRQFYRSCVITGTVDFIFGDAAAIFQNCLITVRKPLENQQNIVTAQGRIDGHETTGIVLQNCRIEPDKGLVPVKTKIRSYLGRPWKEFSRTVIMDSTIGDFIHPDGWLPWQGDFGLKTLYYAEYNNKGIGAQTNARIKWRGYHIIKKEEAMKFTVETFYQVDWISATGSPVRLGL

SEQ ID NO: 19036 - protein, 541 aa, Populus trichocarpa
MAFSILKLLLLLISSVFFTSTWALNTSSTTSLDAHLSTIRTFCNSRPYPDACFNSLKLSISINISPNIINLLLQTLQTAISEAGKLTNLFSIAGGSNIIERQRGTIQDCLELHQITVSSLQRSVSRVRAGDSRKLVDARAYLSAAVTNKNTCLEGLDSASGPLKPALLNSLTSTYQHVTNSLSMLPKSKHSKQGYKNRRLLGFPKWMSKKDRRILQSDEDEYDPSEELIVAADGTGNFSTITDAINFAPNNSYDRIIIRVREGVYAENVEIPIYKTNIVLLGDGTDVTFITGNRSVVDGWTTFRSATLAVSGDGFLALDITIDNTAGPEKHQAVALRVSADLVALYRCSINGYQDTLYVHSFRQFYRECDISGTIDYLFGNAAVVFQACNIISRKPLPNQFTVITAQSKETPDEYTGISIQNCSILATEDLYSNSNTVKSYLGRPWKVYSTTVVLESYIDDFINPEGWSKWSNDDDQGLDTLYYGEYENYGPGSGTENRVTWAGYHVMDDIDAYNFTVSYFITGDEWLDSTSIPYYDGIQS

SEQ ID NO: 19037 - protein, 142 aa, Populus trichocarpa
SSSGIRKGAWTREEDILLRDCVEKYGEGRWHQVSSKAGLNRCRKSCRLRWLNYLKPGIKRGQYSEDEEDLIIKLHRLLGNRQVKMWSLIAGRLPGRTANDLKNYWNTNLSKKVVSGTREAQTKPEPKAITKANIIKPRPHKF

SEQ ID NO: 19038 - protein, 281 aa, Populus trichocarpa
MVSSSGIRKGAWTREEDILLRDCVEKYGEGRWHQVSSKAGLNRCRKSCRLRWLSYLKPGLNRCRKSCRMRWLNYLKPNVKRGQFSVGEVDLIIRLHKLLGNRQVKMWSLIAGRLPGRTANDVKNYWNTNLRKKVVSSTREAQTEPEPKAITKANIIKPRPHKFKSLCWLGGKGIPFFNGGFQYGYDLCKPCSTSALSPSDIIEVESMWGESLLDDKEINISNNKRCLGSGSEADREPINSLFVEDNAPEGILIADVFCCEQGQHCWSDLSFDADLWNLVNT

SEQ ID NO: 19039 - protein, 146 aa, Populus trichocarpa
MVSSFGVRKGAWTEEEDILLRKCVEKYGEGRWCQIPLKAGLNRCRKSCRMRWLNYLKPNVKRGQFSVGEVDLIIRLHKLLGNRQVKMWSLIAGRLPGRTANDVKNYWNTNLRKKVVSSTREAQTEPEPKAITKANIIKPRPHKFKS

SEQ ID NO: 19040 - protein, 271 aa, Populus trichocarpa
MVSSLGVRKGAWTEEEDILLRKCVEKYGEGRWCQIPLQAGLNRCRKSCRMRWLNYLKPNVNRGQFSVGEVDLIIRLHKLLGNRQVKMWSLIAGRLPGRTANDVKNYWNTNLRKKVVSSTREAQTEPEPKAITKDNIIKPRPRNFKNLCWLRAGKGTPFINVGSQYGDDLCKPYSTIAFPPSDTDEVERMWWESLLDDKEINLTNRNSCQNSCLGSGSTANQEPINSLFVEANPPGGIMIGDVFSDQGQNRWGDISFDADLWSLIDTEIDQQ

SEQ ID NO: 19041 - protein, 272 aa, Populus trichocarpa
MVSLLGVRKGAWTEEEDILLRKCVEKYGEGRWHQVPSKTGLNRCRKSCRLRWLNYLKPNIKRGQFSVDEVDLIIRLHKLLGNRQVQMWSLIAGRLPGRTANDVKNYWNTNLRKKVVSSTEDAQTKPEAKSITKDNIIKPRPRNLKNLCWSRAGKGTPYINVASQYGDDLCQPYSTTALPPSETDEVERMWWESLLDDKEINLTNNSSCLGSGSAVNQDPIKSLFVEDNAAGGIMIGDVFCEQGQSSWAGISFDANLRNQIVTEIYRQGPEGL

SEQ ID NO: 19042 - protein, 116 aa, Populus trichocarpa
GVRKGAWTEEEDILLRKCVEKYGEGRWHEVPSRAGLNRCRKSCRMRWLNYLKPNVKRGQFSVDEVDLIIRLHKLLGNRQVKMWSLIAGRLSGRTANDVKNYWNSNQRKKVISSTDE

SEQ ID NO: 19043 - protein, 512 aa, Populus trichocarpa
METPTWMSYAFAWLATVSLILLASRLRRRKLNPPPGPKSWPIIGNLNLIGELPHRSLHALSQKYGPLMQVKFGSFPVVVGSSVEMAKTILKTHDVIFSGRPKTAAGKYTTYNYSDITWSPYGPYWRQARKMCLMELFSAKRLESYEYIRVEELRALLKTLNKSSGRPINLKDHLADVSLNVISRMVLGKKYTVKSSENEKEIVTPEEFKEMLDELFLLNGVLDIGDSIPWIAFLDLQGYIKRMKTLSKKFDKFMEHVLDEHEARRKEDKNWEPKDMVDVLLQLASDPNLEIKLERHGVKAFSQDLIAGGTESSAVTVEWGISEILRKPEVFEKATEELDRVIGRERWVEEKDMVNLPYIYAIAKEVMRLHPVAPMLVPRAAREDININGYDIKKGSRVLVNVWTIGRDPKVWDKPDEFFPERFIGNSIDVRGHDYELLPFGAGRRMCPGYPLGLKVIQATLSNLLHGFKWRLPDGQKKDDLNMDEIFGLSTPKKYPLVAVAEPRLPAHVYPK

SEQ ID NO: 19044 - protein, 172 aa, Populus trichocarpa
MARLLSNTILKGISRASQSPRIVPASFNHVKLRFSTTIPNDPDSHADFQPNNKAVNESGSCSGINIKELVDKDVKEHPIVIYMKGYPDLPQCGFSALAVRVLKQYNVPITARNILEYPDLRTGVKAYSNWPTFPQIFIKGEFIGGSDIIMNMHQTGELKEKLQDIAGKEESE

SEQ ID NO: 19045 - protein, 156 aa, Populus trichocarpa
MNRVVDSDVFDAVNHLFSFPENFEKLMFHPRSSDHTTNEIRSNSIPVDILDAPKDYVFYMDVPGLSKSDIQVTVEDENTLVIKSGGKRKREDGDEEGCKYIRLERKAPQKLIRKFRLPENANVSAITAKCENGVLTVVVGKHPPPPKPKTVEVTIS

SEQ ID NO: 19046 - protein, 221 aa, Populus trichocarpa
MSMGSELNETVEDVTENRCFPAGENKGKVPKRIHKSEREKLKREQLNELFLELASALELSQPNNGKASMLCETTRLLKDLHTQIESLKKENVALLSESHYVTVEKNELREESSALEHQIGKLHSELEMRAASQSKPDLNVPPPEFLQPPHFPVDSFRLPAVDAVALQQTSTVFVVPISPDHVQGFPMATSNVSKPHPRYPTAADSWPSQLLREQQIGRKEV

SEQ ID NO: 19047 - protein, 303 aa, Populus trichocarpa
MAEKEDLGLSLSLSVPQNQHSLQFNLMPSLVPSTAASSLSGFNPQKPSWNATFPPSDQNSDPYRAETRSFLRGIDVNRLPSTADCEEEAGVSSPNSTISSISGKRSEREGINGEEHEMERDYSRGISDEEDGDTSRKKLRLSKDQAAILEESFKEHNTLNPKQKMALAKQLGLRPRQVEVWFQNRRARTKLKQTEVDCEFLKRCCENLTAENRRLQKEVQELRALKLSPQFYMQMTPPTTLTMCPSCERVAVPPSASSTVDARSHPHMGPTPPHHRPIPINPWAPAAPITRGPTPFDVLRPRS

SEQ ID NO: 19048 - protein, 750 aa, Populus trichocarpa
MTGTEEITTPLIHQHSKQTSSSVANSSSTSADSKENSPIEQVALTVPTTDDPTLPAVTFRTWTLGSLACILLSFLNQFFWYRREPLSITSICAQIAVVPLGHLMASTITNKTFFIGKKWEFTLNPGPFNVKEHVLITIFANSGAGNVYAIHIVSAVKLFYKKELTFFVALLVVLTTQMLGFGWAGLFRRYLVEPASMWWPQNLVQVSLFRALHEKEERHKDGLTRNQFFIIAFICSFAYYAFPGYLFPKLTSISWLCWIFPSSILAHQLGSGLHGLGIGAFGFDWATISSYLGSPLASPWFATANIAAGFVLLMYVIAPIAYWLNIYEAKNFPIFSDGLFTSTGQSYNISAIIDPKFHIDLDAYDRQGPLYLSTIFAMIYGLNFACLTATVVHVFLFHGRDIWQLSKSAFRYKKMDVHTKLMRKYNQVPEWWFLCILFLNIAATIFTCEYYNEQLQLPWWGVLLACGIAVFFTLPVGVITATTNKTPGLNVITEYVIGYLYPGFPVANICFKVYGYISMKQGITFLEDFKLGHYMKIPPRAMFMAQVVGTIISALVHLGTAWWLMETIPNICDRELLSPGSPWTCPSDHLFYDASVIWGLIGPRRVFGDLGHYSATNWFFLGGAIAPILVWLAHKAFPNKDWIGLISIPVLLSATLNMLPATAVNYTTWVVVGFASGFIAYRYYRDWWSRHNYVLSGALDAGLAFMAVFLYLCLGMWHVSLEWWGSESEGCPLASCPTAPGVFGKGCPIL

SEQ ID NO: 19049 - protein, 332 aa, Populus trichocarpa
MASYANQECFQSNDDLPIVLLHRLPSFNSPLKDILQPHFHLLDPADSPEPASSFLSCHAKSVRALICIYNTPLSAETLNLLPSLELIVAASAGVDHIDLEECRCRGIIMTNASTAFAEDAADHAVALLIDVCRRISTADRFVRAGLWPVKRDCSLGFKMGRKRVGIVGLGRIGFEVGKRLEAFGCSIAYNSRKKKPSVPFSYHANVLDLAEDSDALILCCSLTEQTHHIINKDVLEALGKEGVIINVGRGALIDEKVLVQFLLRGDIGGAGLDVFENEPDVPRELFELDNVVLSPHRAIFTSESLEALHELVFTNLKAFFSNKPLQSVFQIE

SEQ ID NO: 19050 - protein, 666 aa, Populus trichocarpa
MAGTWRARGAVVSAILLFGCLFAISIAKEEATKLGTVIGIDLGTTYSCVGVYKNGHVEIIANDQGNRITPSWVAFTDSERLIGEAAKNLAAVNPERTIFDVKRLIGRKFEDKEVQKDMKLVPYKIVNKDGKPYIQVKIKDGETKVFSPEEISAMILTKMKETAEAFLGKKIKDAVVTVPAYFNDAQRQATKDAGVIAGLNVARIINEPTAAAIAYGLDKKGGEKNILVFDLGGGTFDVSVLTIDNGVFEVLSTNGDTHLGGEDFDQRIMEYFIKLIKKKHGKDISKDNRALGKLRRECERAKRALSSQHQVRVEIESLHDGMDFSEPLTRARFEELNNDLFRKTMGPVKKAMDDAGLEKNQIDEIVLVGGSTRIPKVQQLLKDYFDGKEPNKGVNPDEAVAFGAAVQGGILSGEGGDETKDILLLDVAPLTLGIETVGGVMTKLIPRNTVIPTKKSQVFTTYQDQQTTVSIQVFEGERSLTKDCRLLGKFDLTSIPPAPRGTPQIEVTFEVDANGILNVKAEDKGTGKSEKITITNDRGRLSQEEIERMVREAEEFAEEDKKVKERIDARNSLETYVYNMKNQINDKDKLADKLESDEKEKIETATKDALEWLDDNQNAEKEDYEEKLKEVEAVCNPIITAVYQRSAGAPGGGSAEDSEDDSQDEL

SEQ ID NO: 19051 - protein, 760 aa, Populus trichocarpa
MEETTHHGIRTPLMSRDEKDEDNTDNNLPSSSKSQTSEINQAHDEENSPVKQVALTVPTTDDPSLPVLTFRMWVLGTLSCVLLSFLNQFFWYRTEPLSITAISAQIAVVPLGQLMAAKITDRVFFKGTRCEFTLNPGPFNVKEHVLITIFANSGAGSVYAIHIVTVVKAFYKKNITFFVSFIVIITTQVLGFGWAGIFRRYLVEPAAMWWPANLVQVSLFRALHEKEERSKGGVTRTQFFLIAFTCSFAYYVFPGYLFEMLTSLSWICWIFPKSILAQQLGSGLYGLGIGAFGLDWSTISSYLGSPLASPWFATANVAAGFVFVMYVLTPLCYWFNVYKAKTFPIFSDDLFTATGQEYNISAIIDSNFHLDLAAYDREGPLYLSTFFAVTYGVGFAALTATIVHVALFHGREIWEQSMASFQEKTMDIHTRHMRKYNQVPEWWFVCILLVNIALTIFACEYYKDQLQLPWWGVLLACGIAITFTLPIGIITAITNQSPGLNIITEYIIGYIYPGYPVANMCFKVYGYISMTQAITFLQDFKLGHYMKIPPRTMFMAQVVGTIIACITYLGTAWWLLETITDICDSTASDSVWTCPSDHVFYDASVIWGLIGPRRIFGNLGTYEAVNWFFLVGAIAPILVWLAAKAFPQQEWIRLINMPVLIGATGMMPPATAVNYTTWVLVGFLSGFVVYRYKPDLWQRYNYVLSGSLDAGLAFMGVLLYFCLGLENISINWWGNDLDGCPLASCPTAKGVSVEGCPVFT

SEQ ID NO: 19052 - protein, 530 aa, Populus trichocarpa
MDTPFYRIHRNYPSSSPQIPVHHRTTTVLPKKVVSIPVRYVGSERSRSESAIKIQKVFRGFLVRKSMKKILATKRQVDEIEKRILMKETVELMRRDQKEKLKINEMLMSLLLKLDSVRGVDSGVRDCRKAVIKKAIALQETVDSIAAAANGDDSVVSAGEKGVDETGEGEEENGSVANAADELQNGAAESEAVVSMLADSRETREEFNGALENVDMASEGERNVECDGDVPTSMSDYCDSVRGVDSGVGDCREAVIKKAIALQETVDSIAAAANGDDSVVSAGEKGVDETGEGEEEDGSVANAADELQNGAAESEAVVSVLADSREAREEFNGTLENVDMASEGERKVECDGDVPTLMSDYCEPERVLEVVNETVELKEAENDETACQGEDRDLEKQVDKDGDCMGTSQTESQSDSSASLMEGDDEEEEEHSGGVEIEKKGDEGEVKSNDESTRRGKELLERMMEDNERMMGLMAELFERNEMQTRLLSSLSQRVEQLERAYICDQLRRRKKKRNAAGLLDCLESTPKKL

SEQ ID NO: 19053 - protein, 77 aa, Populus trichocarpa
PSCLVDGCTSDLTKCRDYHRRHKVCELHSKSRQVFIKGQEQRFCQQCSRFHSLGEFDEGKRSCRKRLDGHNRRRRKS

SEQ ID NO: 19054 - protein, 385 aa, Populus trichocarpa
MADRRQQPSVMQKMASQVHLSSSFPQGFQRPALHRRQFAYGNYSNAGFQYAMTRPCQSSPDMSLVASSTAPVFVQAPSEKGLAGFAVDFLMGGVSAAVSKTAAAPIERVKLLIQNQDEMIKAGRLSEPYKGIGECFSRTIKDEGTMSLWRGNTANVIRYFPTQALNFAFKDYFKRLFNFKKDRDGYWKWFAGNLASGGAAGGSSLLFVYSLDYARTRLANDAKAGKKGGERQFNGLVDVYRKTLKSDGIAGIYRGFNISCVGIIVYRGLYFGLYDSLKPVVLTGKLQDSFFASFALGWVITNGASLASYPIDTVRRRMMMTSGEAVKYKSSLDAFSQILKNEGAKSLFKGAGANILRAVAGAGVLAGYDKLQVIVLGKKYGSGGA

SEQ ID NO: 19055 - protein, 228 aa, Populus trichocarpa
DGHSMNASYPYNSAGSFIEYFEGLTYDHVNFIFNGASHVQDSVYPSMNANFYKFGLSPPGSASYYDPAYVYEVYNHGLRNEEYRRPPSENSSTATNERTSRVNTEWEVNENRSSHDDPAIWQDHVDPDNMTYEELLELGETVGTQNRGLSQEQISLLPTSKYKRSFFSRRKSRSERCVICQMEYKRGDRQITLPCKHIYHAGCGTRWLSINKACPICYSEVFGDASKH

SEQ ID NO: 19056 - protein, 305 aa, Populus trichocarpa
MASSNLFFDDIRNKPEVIDPPQNEDLTDIGESVNDPAQTALKPNVTVSSSVRELLECPVCLNAMYPPIHQCSNGHTLCSGCKPRVQNRCPTCRHELGNIRCLALEKVAASLELPCKYQSFGCIGIYPYYSKLKHESQCVFRPYNCPYAGSECTVIGDIPYLVAHLKDDHKVDMHNGSTFNHRYVKSNPHEVENATWMLTVFSCFGQYFCLHFEAFQLGMAPVYIAFLRFMGDDNEAKNYSYSLEVGGGGRKMIWQGVPRSIRDSHRKVRDSFDGLIIQRNMALFFSGGDRKELKLRVTGRIWKEQ

SEQ ID NO: 19057 - protein, 484 aa, Populus trichocarpa
MPEDRRQFEIIQDSYLREKEMEEEILMQRREEEGSVCVLDDEPTTSGRHCGEIDPSVCQSRKVSFSIAVMIQPESGPVCLLGTEFQKKECWEILVAGAEQGIEAGQMTIDADLGEATCYMDGGFDGYQTGLPLSVGSSIWEQGTEVWVGVRPPIDMDAFGRSDSEGAESKMYIMDVFLWGRCLTEDEIASLHTAIGSTEFGMIDYHEDNWQWADSPPRVVSEWMRPVEIVKESHLDSHPCLFSGAANPSDVCQGRLGDCWFLSAVAVLTEVSRISEVIITPEYNEEGIYTVRFCIQGDWVPVVVDDWIPCESPGKPAFATSQKGNELWVSILEKAYAKLHGSYEALEGGLVQDALVDLTGGAGEEIDMRSAQAQIDLASGRLWSQLLRFKQEGFLLGAGSPSGSKDGIFWMSWQDFQIHFRSIYVCRVYPPEMRYSVHGQWRGYSAGGCQDYASWNQNPQFRLRATGPDASLPIHLFITLTQVV

SEQ ID NO: 19058 - protein, 314 aa, Populus trichocarpa
MESIGVLMTCPPFDPYLVEQLEKRFTLFKFHSIPDKAHFLNSNKASIRAVVGNASAGADAQLIHQLPNLEIVSSFSVGLDKIDLAKCRERGIRVTNTPDVLTDDVADLAIGLMLAVLRRLCPSDRYVRSGQWKRGDYKLTTKFTGKSVGIIGLGRIGLAIAKRAEAFSCPISYHTRAEKSDVKYKYYPSVVELAANCQILVVACALTEETRHIINREVINALGPKGVLINIGRGPHVDEPELVSALVEGRLGGAGLDVFQDEPNVPEELFGLENVVLLPHVGSGTMETRKEMADLVVGNLEAHFLNKPLLTPVL

SEQ ID NO: 19059 - protein, 380 aa, Populus trichocarpa
MCGGAIISDFIAPTTTARSSRRLTSGFEWLEVKKPFNNKHLKPVVADPEDDFEADFQEFKDESDVDEDYDVFADAKPFAFSASVSEPAQKRGLPRGSTAVKSAGFSGPAEKSAKRKRKNQFRGIRQRPWGKWAAEIRDPRKGVRVWLGTFNTAEEAARAYDSEARRIRGKKAKVNFPDEAPCASARHPIKENSQKRLTKANLSQDFSYLSNPETDYNNMGFVEEKPQVSQFGLMNSFPAIGDSGVTPLTPSDNASMYFNSDKGSNSFDCDFGWGEQGPEILSVLAATPEVDESVFVDANPKKLKSYSENEVPVEEKNGKSLSEELLAFDNQLMNLQMPDLVGNWEASLDSFLNGDTTQDGTNAVDLWSFEDFPSMVGGVY

SEQ ID NO: 19060 - protein, 481 aa, Populus trichocarpa
MPPVSLDNINPKVLKCEYAVRGEIVTLAQALQEELKSKPGSHPFDEILYCNIGNPQSLGQQPITFFREVLALCDHPSILDRSETQGLFSADAIERAWQILDQIPGRATGAYSHSQGIKGLRDTIAAGIEARDGFPADPNDIFLTDGASPAVHMMMQLLIRSEKDGILCPIPQYPLYSASIALHGGALVPYYLDEATGWGLEVSELKKQLADAKSKGITPRALVVINPGNPTGQVLAEDNQRGIVEFCKQEGLVLLADEVYQENVYVPEKKFDSFKKVARSMGYGEKDISLVSFQSVSKGYYGECGKRGGYMEVTGFGPEIREQIYKVASVNLCSNISGQILASLVMSPPKVGDESYESYSAEKDGILSSLARRAKTLEDAFNNLEAVTCNKAEGAMYLFPCICLPEKAIKAAEAAKTAPDNFYCRRLLNATGIVFVPGSGFGQLPGTWHFRCTILPQEDKIPAVVSRLTEFHKSFMDEFRD

SEQ ID NO: 19061 - protein, 588 aa, Populus trichocarpa
MDSINSFKGYGKVDEAEQQAFRKKSRKRLIIIVVSSIVLLAVIIGAVIGAVVHKRNNKSSSNPVPPPELTPATSLKAVCSVTQYPASCFSSISALETGNTTDPEVLFKLSLRVAMNELSKLKDYPDKLIQSIKDTTLQGALKVCATVFDDAVDRLNDSISSMAIGEGEQILSPAKMNDLKTWLSATITDQETCLDALQELSTTKHFNQTLVDQVKTAMENSTEFVSNSLAIVAKILGLLSDFKIPIHRRLLGFERSHISEFPQWVSFGDRRLLQESKPTPNVTVAKDGSGDCETLREAVGKIPKKSESKFIIHVKEGVYVENVILDKSKWNVMIYGEGKDKTIVSGSLNFVDGTPTFSTPTFAVAGKGFFARDMKFINTAGAEKHQAVAFRSGSDMSVFYRCAFDAFQDTLYAHSNRQFYRDCDITGTIDFIFGNAAVVFQNCNIQPRQPLANQFNTITAQGKKDPNQNTGISIQKCKFSAFDNVTAPTYLGRPWKDYSTTVIMQSDIGSFLRPLGWISWVSGVDPPATIFYAEYQNTGSGANVDGRVKWTGYKPALTVDEAGKFAVDSFIQGSEWLPKTSVTFQSML

SEQ ID NO: 19062 - protein, 579 aa, Populus trichocarpa
MTQDKQSLTGISDSGKHISIFKKNKKLFLVILASLLLVTAIIAIVAGVNSHKSSKNEGTHAILKSSCSSTLYPELCYSAVATVPGATSNLASQKDVIELSINLTTKAVQHNFFTVEKLIATKKLTKREKTALHDCLEIIDETLDELHEALVDLNDYPNNKSLKKHADDLKTLLSSAITNQETCLDGFSHDEADKKVRKALLKGQIHVEKMCSNVLAMIKNMTDTDVANELKTTNRKLMQEKEGNESEWPEWMSVADRRLLQSSSVTPDVVVAADGSGNYKTVSAAVAAAPKKSSKRYIIRIKAGVYRENVDVPKDKTNIMFMGDGRKTTIITASRNVVDGSTTFNSATVAAVGQGFLARGITFQNTAGPSKHQAVALRVGSDLSAFYDCDMLAYQDTLYVHSNRQFFINCLVAGTVDFIFGNAAVVLQDCDIHARRPNSGQKNMVTAQGRTDPNQNTGIVIQKSRIGATSDLQPVKSSFPTYLGRPWKEYSRTVIMQSSITDVIQPAGWFEWSGSFALNTLYYAEYQNSGAGAGTSRRVTWKGYRVITSATEAQRFTPGNFIAGSSWLRSTTFPFSLGL

SEQ ID NO: 19063 - protein, 280 aa, Populus trichocarpa
MYGQSLLDQPDYAFLDPVRLHLQGETVSTAPTTTCSYTPAITTTTAAPAANYTPPLVYCRSTSFSSLYPCLTENWGDLPLKVDDSEDMFLYAVLRDAVTVGWVPSLKTDQLVQPNFPLVKLEPTENLAVSPPSTAVPVAEPAVLPSKGKHYRGVRQRPWGKFAAEIRDPAKNGARVWLGTFETAEDAALAYDRAAYRMRGSRALLNFPLRVNSGEPDPVRVTSKRSSPEPSSSVDSGSPKRRKKVGGTAGAATVVAKAGLEIGNGVGCQVGTHGEQMLVI

SEQ ID NO: 19064 - protein, 363 aa, Populus trichocarpa
MAAAVTAAVSFPSSTKSTSLPSRTILIAPERITLRKVPVHFRDVSASGRVISIRAQVTTEAPAKVEKVSKKNEEGVVVNKFKPKNPYTGRCLLNTKITGDDAPGETWHMVFSTEGEVPYREGQSIGVIPDGIDKNGKPHKLRLYSIASSAIGDFGDSKTVSLCVKRLVYTNDQGEIVKGVCSNFLCDLKPGAEVSITGPVGKEMLMPKDPNATVIMLGTGTGIAPFRSFLWKMFFEKHDDYKFNGLAWLFLGVPTSSSLLYKEEFEKMKEKAPDNFRLDFAVSREQTNAKGEKMYIQTRMAEYAEELWELLKKDNTYVYMCGLKGMEKGIDDIMVSLAAKEEIDWLEYKRSLKKAGQWNVEVY

SEQ ID NO: 19065 - protein, 172 aa, Populus trichocarpa
HQRNIRYIKTSCYDTTLYPKLCYHTLAIYASTIKTNPKLLANTALHVSLKSTNSTSRLMKRASKTPGLDPRVLAAMLDCVEEVGDAVYELQRSIEEMDHAGGSNFSMVMNDVVTWVSASLTDDDTCMDGFAEGAVNKKVKTTVKRHLGRIARLTSNALALVNRYASSKANLP

SEQ ID NO: 19066 - protein, 198 aa, Populus trichocarpa
MAKLVSFLTLLSFALYMVGTAGSASSPTDFIKSSCKATRYPELCVGCLSGYASVIQRNERRLVLTALSVSLARARSAAAFVTKMTKVRGIKPREYQAAKDCIENMGDSVDRLSQSVRELRHTGRAVGRDFLWHMSNVQTWVSAALTDENTCLDGFAGHLMDGNVKVAIKRRINNFSQVTSNALALVDRFTSRHRARNP

SEQ ID NO: 19067 - protein, 212 aa, Populus trichocarpa
MVRGKTQMKRIENATSRQVTFSKRRNGLLKKAFELSVLCDAEVALIVFSSRGKLYEFSSSSINRTIERYQKRAKDVGISSKMVQDNIQPVKEDTFTLAKKIELLEVSKRKLLGEGLETCSTDDLQQLENQLGRSLTRIRARKNQLFRERIEKLKGEEKILLEENTRLREKCGMQQPDLSSTRKQQLLEDRQITEVETELFIGPPETRLAPKP

SEQ ID NO: 19068 - protein, 240 aa, Populus trichocarpa
MESLNFFKGYGKVNPLEDQSPHQQESTASKRRILIISVSSILFFTLILGLALAALIHESNTEPDEFPYLSSSNSAESIKTVCDMTLYPSSCFTSISSLNISTKPDPEVIFKLSLKVSITELKFLSSLFTSSHDVNSQAAMRDCVSLFDDSLGKLNDSLLAMEVGPGEKMLTLEKVNDIHTWISAAMTDQDTCIDGLEEMESVLPDEIKAKVERTKDFLSISLAIIAKMEALLKKFDLEMH

SEQ ID NO: 19069 - protein, 267 aa, Populus trichocarpa
MNEVTSLCEFSTLSHHRQHRSPSFSSLISCLTETWGDLPLRVDDSEDMVIYNSLRDAVRFGWSPLDLTSPTATTATATITRTTSVVKAEPGYEPEPEAEPMKLVQEAGLNEAAVSKKVVAKGRHYRGVRQRPWGKFAAEIRDPAKNGARVWLGTYETAEEAGLAYDRAAYRMRGSKALLNFPHKIGSNEPDPVRVTTKRREPETGLPAVDSGSAKTRRILVANGDELERERGSKVFQVAHHIMPLGEQLLVNGLRCWWRSVVTLCCE

SEQ ID NO: 19070 - protein, 121 aa, Populus trichocarpa
LSQVVEVSTSKTGKHGHAKCHFVAIDIFNGKKLEDIVPSSHNCDVPHVTRTDYQLIDISEDGFVSLLTENGNTKDDLRLPTDESLLSQIKDGFGDGKDLVVTVMSSMGEEQICALKDVGPK

SEQ ID NO: 19071 - protein, 210 aa, Populus trichocarpa
MGRGIAEQGWRKGPWTPEEDKLLSEYVSSNGEGRWSSVSRCSGLNRSGKSCRLRWVNYLRPGLKRGQITPQEEGIIIELHALWGNKWSTIARYLPGRTDNEIKNYWRTHFKKKDKSSQKQEKRKALILEQEVQHHHQQQQQLEAGEMKMVNTIDHVKMHEAQEMYFMYHNLEDQCSPVMTQDVASWADFVVEDYYGLWGGLWNLDDHPQG

SEQ ID NO: 19072 - protein, 212 aa, Populus trichocarpa
MVAMMGRGIAEQGWRKGPWTPEEDKLLSEYVSLNGEGRWSSVSRCSGLNRSGKSCRLRWVNYLRPGLKRGQITPQEEGIIIELHALWGNKWSTIARYLPGRTDNEIKNYWRTHFKKKDKSSQKQEKRNALILKQEVQQQQQQQLEAGEMKMVNTIDHVKMHEAQEMYFMYHNLEDQCSPVMTQDAASWADFVVEDYYGLWGGLWNLDDHPQD

SEQ ID NO: 19073 - protein, 254 aa, Populus trichocarpa
MDFKDEVQRVKFGINQIGNFGLRLVWHSVHLLVRFWYLGVGVANVIESYLISSGLLKRYRSIDVGKLRYLAIVIESDDACRISKVIQLLQWLQAIGVKHLCLYDTEGVLKKSKESILAKLKNATLFEEADERDSLLDQKHMTLEFASISDGKEAVAKGGNVLFMKYSKVANSGAEQKEQIFTEANMTEALRAVGCGGPEPDLLLVYGPARCHLGFPAWRIRYTEIVHMGPLKSVRYGSLVKAIYKFTIVRQKYG

SEQ ID NO: 19074 - protein, 507 aa, Populus trichocarpa
MGPQSFSLGPTHSRSLSQPSSFFSLDSLPPLSPAPFRDSSSPSVSDPISTDVFMEEKDGGSHSLLPPSPFNRGNAPRVVESLPPRKAHRRSNSDIPFGLANVLQCSPPLIPSRGSSGLERSMSGRENLGMAKPAQSVKKEWERGGDSNAEGMGERKSEGEVVDDLFSAYMNLDNIDVLNSSGTDDKNGNENREDLDSRASGTKTNGGDSSDNEAESSVNESGGNLPRAGLSSSTEKREGIKRSAGGDIAPTTRHYRSVSMDSFMGKLNFGNESPKLPPSPGTRPGQLSPTDSIDGNAFSLDFGNGEFSGAELKKIMANEKLAEIALADPKRAKRILANRQSAARSKERKMRYISELEHKVQTLQTEATTLSAQLTLLQRDSVGLTNQNNELKFRIQAMEQQAQLRDALNEALTAEVRRLKIATAEQGGDSDPSKSMVQQQLSINPQMYLQQPRPSQLGMHQLQQQSSASQFNMHQRQRQQQQQQQQQSSQPQPQQNGNTTPKPDSNQ

SEQ ID NO: 19075 - protein, 207 aa, Populus trichocarpa
MGERQTGKVKWFSDQKGFGFISPDDGSDDLFVHQSSIKSEGYRSLGDGEEVEFVIENSDDGRTKAVDVTAPGGNPVQGIRSGGGFGGGSGGRGGGRGGGGYGGGGGYGGGGGGYGGGGYGGGRRGGGGGGYGGGGGYGGGGGGGGGCYSCGESGHMARDCPQGGSGGGGGGGRYGGGNGGGGGGGGGGCYNCGGSGHFARDCPNSGR

SEQ ID NO: 19076 - protein, 386 aa, Populus trichocarpa
MAKPISIEVYNPNGKYRVVSTKSMPGTRWINLLIEQDCRVEICTQQKTILSVEDIIALIGDKCDGVIGQLTEDWGETLFAALSRAGGKAFSNMAVGYNNVDVNAANKHGVAVGNTPGVLTETTAELAASLSLAAARRIVEADQFMRAGLYDGWLPHLFVGNLLKGQTVGVIGAGRIGSAYARMMVEGFKMNLIYYDLYQSTRLEKFVTAYGEFLKANGEQPVTWKRAASMDEVLREADVISLHPILDKTTYHLINKESLATMKKEAILVNCSRGPVVDEVALVEHLKQNPMFRVGLDVFEDEPYMKPGLADMKNAVVVPHIASASKWTREGMATLAALNVLGKIKGYPVWGDPNRVAPFLNENAPPPAASPSIVNAKALGLPVSKL

SEQ ID NO: 19077 - protein, 431 aa, Populus trichocarpa
MYSNFKEQAIEYVKQAVQEDNAGNYSKAFPLYTNALEYFRTHLKYEKNPKIREAITQKFNEYLRRAEEIKTVLDEGGPGPNSNGDAAVATRPKTKPKDGEDGDDPEKDKLRAGLNSAIVREKPNVKWNDVAGLESAKQALQEAVILPVKFPQFFTGKRRPWRAFLLYGPPGTGKSYLAKAVATEADSTFFSISSSDLVSKWMGESEKLVSNLFQMARESAPSIIFVDEIDSLCGQRGEGNESEASRRIKTELLVQMQGVGNNDQKVLVLAATNTPYALDQAIRRRFDKRIYIPLPDMKARQHMFKVHLGDTPHNLNESDFESLGRRTEGFSGSDISVCVKDVLFEPVRKTQDAMFFINNPDDMWVPCGPKQPGAVQISMQELAAKGLAKKLLPPPIMKTDFDKVLARQRPTVSKADLGVHERFTKEFGEEG

SEQ ID NO: 19078 - protein, 376 aa, Populus trichocarpa
MGRAPCCDKNGLKKGPWTPEEDQKLVDYIQKHGYGNWRTLPKNAGLQRCGKSCRLRWTNYLRPDIKRGRFSFEEEETIIQLHSILGNKWSAIAARLPGRTDNEIKNYWNTHIRKRLLRMGIDPVTHSPRLDLLDLSSILSSSLYNSSDQMNMSRMLGVPPLVNPGLLRLATSLLSSQRDQTQNFVIQNGQEENHLPNPQVQQSQYESMIHQANIQFQTPGQEMPTCTTLTTSPCVTFSNEARIMDPNVDQYQSSTITNFSSPNSQFSTHDQWQNNGMGSNLAEDYYVPAVSSYNSNGYYGSDLMDPSSETSTFISNSSNQNFGFASVLSTPSSSPTPLNSNSTYINSSSAEDERESYCSNILKFEIPDILDAINFM

SEQ ID NO: 19079 - protein, 582 aa, Populus trichocarpa
MAHPSSAPAPAPVPGHTFNGTLGHHLARRLVEIGVSDVFSVPGDFNLTLLDHLIDEPELNLIGCCNELNAGYAADGYARAKGVGACVVTFTVGGLSVLNAIAGAYSENLPIICIVGGPNSNDYGTNRILHHTTGLPDFTQELRCFQTVTCVQAVVTNLDDAHEQIDTAISTALKESKPAYISISCNLSGIPHPTFSREPVPFFLAPKVSNYLGLEAAVEATAEFLNKAVKPVIIGGPKLRVAKAQKAFIELADASGYPIAVMPSGKGLVPEHHPHFIGTYWGAVSTSFCAEIVESADAYVFVGPIFNDYSSVGYSLLIKKEKSIIVQPNRVTIGNGLSLGWVFMADFLSALAKKLKKNSTALENYRRIFVPPGMPLMREKDEPLRVNVLFKHIQNMLGGDSAVIAETGDSWFNCQKLCLPENCGYEFQMQYGSIGWSVGATLGYAQAARDKRVIACIGDGSFQVTAQDISTMIRCGQRTIIFLINNGGYTIEVEIHDGPYNVIKNWDYTGLVNAIHNGEGKCWTAKVRTEDELTAAIATATGEQKDSLCFIEIFVHKDDTSKELLEWGSRVSAANSRPPNPQ

SEQ ID NO: 19080 - protein, 306 aa, Populus trichocarpa
MPGARIRIPFNQRNLMSNINQFEFLDEPAASLSDMVFGFLEDGDWSSGSSGSEGCHENEMLELEDEGEENNGNVEEDKSFWENQHQLLHATLFRTSSLESRIRSISKEALKEIQMAGTICGCGRPMAASCRSCLMAEVSSRLRNAGYNSAICKTKWRSSPGIPSGEHTFMDVIDNSSSKRGEVRVIIELNFRAEFEMAKASEEYNQLVHRLPEVFVGKVERLNSVVKILCLAAKKCMKEKKMHLGPWRKQRYMQAKWLRTTCERSTSMPPFSMGSSGRLPRPKASMLTVDLKEMLPDVHCTAVAVV

SEQ ID NO: 19081 - protein, 492 aa, Populus trichocarpa
MGGSVKDVKSKAELDNITKSGEAVIIHFWATWCDASKQMDQVFSHLSTDFPKTHFLRVEAEEQPEISEAFSVSSVPYFVFLKDGKTVDTLEGADPSSLANKVAKVAGSANPGEPAAPASLGMAAGPTVLETVKEFTKENGSSQQANQVQPGLSDALKNQLQQLIGSHPVMLFMKGNAEAPKCGFSRKVVDILKGENVKFGTFDILSDIEVREGLKLFSNWPTFPQLYCKGELLGGCDIVIALHESGELKEVFRDHGIDTIGSNEAKVSGSENGKGGIAQSTGLSMTLTSRLESLVNSSPVMLFMKGKPTEPKCGFSGKVVEILREEKVKFETFDILTDEEVRQGLKVYSNWSSYPQLYIKGELIGGSDIVLEMQKSGELKKVLIEKGIVQKETLEDHLKSLITSSPVMLFMKGTPDAPRCGFSSKVVNALKEKGVSFGSFDILSDEEVRQGLKVFSNWPTFPQLYYKGELIGGCDIIMELRDNGELKSTLSE

SEQ ID NO: 19082 - protein, 356 aa, Populus trichocarpa
MSLLSDLINLNLSDSTEKIIAEYLWIGGSGLDIRSKARTLSGPVSDPAKLPKWNYDGSSTGQAPGQDSEVILYPQAIFRDPFRRGNNILVICDAYTPAGEPIPTNKRCDAAKIFSHPDVVAEKPWYGLEQEYTLLQKDVKWPLGWPIGGYPGPQGPYYCGIGVDKAFGRDIVDAHYKACLYAGINISGINGEVMPGQWEFQVGPSVGISAGDELWAARYILERITEVAGVVLSFDPKPIQGDWNGAGAHTNYSTESMRNEGGYEIIKKAIEKLGLRHKEHIAAYGEGNERRLTGRHETADINTFKWGVADRGASIRVGRDTEKEGKGYFEDRRPASNMDPYVVTSMIAETTILWKP

SEQ ID NO: 19083 - protein, 231 aa, Populus trichocarpa
MGRGRVELKRIENKINRQVTFAKRRNGLLKKAYELSVLCDAEVALIIFSNRGKLYEFCSTSNMLKTLERYQKCSYGAEEVNKPAKELESSYREYLKVKARFEALQRTQRNLLGEDLGPLNTKELEQLERQLESSLNQVRSTKTQYMLDQLADLQNKEHLLLEANRGLTIKLDEISARNSLRPSWEGDDQQNMSYGHQHAQSQGLFQALECNPTLQIGYNPVGSDKKKKNFE

SEQ ID NO: 19084 - protein, 326 aa, Populus trichocarpa
MGSIESALRGWRGLAEDLGEWAFYAVAVLLVLALVKRFPYRLFAKTHHWMAAIYLVLAFHTLVLVQFSYWAQPVGWALAMLLASGTVSAVWVLLGRVGAQRTTHGVIESLQTYSALNVLETTLRMDPAWPGHRPGQFAFAMSNPKEGPHPYTLASAWVPEDRRITFITKALGDHTRRLPERLQVGDRVTVEGPYGCFTFDDGRARQIWIGAGIGITPFIARMKYLAQHKGRDARPVDLFHPTSDADPQAIEKLRADSQAAGVALHLFIDKKDGRLTGERLRAMVPGWKDASVWFCGPTAFGRALRADLLAQGLEPEAFHQELFEMR

SEQ ID NO: 19085 - protein, 135 aa, Populus trichocarpa
MPQSQLKFVILDRDGVINRDSDQFIKTPDEWIPIEGSLEAIAMLNQAGYRVVVASNQSGIGRGLFEMSALNAMHEKMYKALANLGGRVEAIFFCPHTAADNCDCRKPKSGLYEQIGERRAWRLAASRIWFVLARA

SEQ ID NO: 19086 - protein, 109 aa, Populus trichocarpa
MLNGLDEEGCVEESGGHVTEKKRRLSGDQVKALEKNFEVENKLEPERKVKLAQELGLQPRQVAVWFQNRRARWKTKQLERDYGVLKANYDSLKHNFDAIQQDNEALLKE

SEQ ID NO: 19087 - protein, 566 aa, Populus trichocarpa
MCGILAVLGCADNSQAKRSRVIELSRRLKHRGPDWSGLHCHGDCYLAHQRLAIVDPASGDQPLYNQDKTVVVTVNGEIYNHKELRAQLKSHTFRTGSDCEVIAHLYEEHGENFVDMLDGMFSFVLLDTRDKSFIAARDAIGITPLYIGWGLDGSVWFASEMKALSDDCERFMSFLPGHIYSSKQGALRRWYNPPWFSEQIPSSPYDPLALRKAFEKAVVKRLMTDVPFGVLLSGGLDSSLVAAVASRHLADSEAAQQWGSQLHTFCIGLKGSPDLKAAREVADYLRTRHHEFYFTVQEGIDALEEVIYHIETYDVTTVRASTPMFLMSRKIKSLGVKMVISGEGSDEIFGGYLYFHKAPNKEEFHQETCRKIKALHLYDCLRANKSTSAWGVEARVPFLDKEFINIAMSIDPEWKMIRPDLGRIEKWVLRNAFDDEKNPYLPKHILYRQKEQFSDGVGYSWIDGLKDHANKQVTDAMLMNASFIYPENTPTTKEAYYYRTIFEKFFPKNSARSTVPGGPSVACSTAKAVEWDAAWSKNLDPSGRAALGVHEAAYEETVDTKAASQN

SEQ ID NO: 19088 - protein, 625 aa, Populus trichocarpa
MSQWVLNAPEPPSLWRELMDSARETVLPRGKRFPYLKDKDGLSKTVISVLQAMFPIFSWCRHYNATKLRNDLLAGLTLASLCIPQSIGYATLAKLDPQYGLYTSVIPPLIYAVMGTSRDIAIGPVAVVSLLMSSMVPKLEDPEANPIAYRNLVLTTTFFAGIFQAAFGLFRWLGFLVDFLSHAAIVGFVSGAAIVIGLQQMKGLLGIAHFTNKTDVISVMQAIWRSVHQYWNPHNFILGCSFLSFIKLTRFVGKRNRKLFWLPATAPLISVVLSTLLVYLTRADKHGVMIIKHIKKGLNPGSIHELQFNSRCHCDHCGYQIVQEATAVGRSFASIKGYHINGNQEMVAFGFMNILGSFTSCYVATGSFSRSAVNFSAGCETAMSNIVMAITVIISLELFTRLLYFTPIAVLSAIILSALPGLVDPHEAYYIWKVDKLDFLVCIGAFFGVLFASVEIGLLAAVIISFVKIIIFSIRPGTEELGRLPGTDIFCDVNQYPMAVKNSKALIIRLKSGLLCFANANFVKEKIMKWATEEEENDSQGKRTVQVVILDMSNLMNIDMSGIASLLELQNNLASGGMELAITNPKWQVIHKLRLANFVTKMGGRVFLTVGEAVDACLGAKMAAV

SEQ ID NO: 19089 - protein, 356 aa, Populus trichocarpa
MSLLNDLININLSDTTEKIIAEYLWIGGSGMDLRSKARTLPGPVTDPAELPKWNFDGSSTGQAPGDDSEVILYPQSIFKDPFRKGNNILVMCDAYTPAGEPIPTNKRFNAAQIFSDPVVAAEEPWYGIEQEYTLLQKDINWPLGWPVGGFPGPQGPYYCSVGADKSFGRDIVDAHYKACLYAGINISGINGEVMPGQWEFQVGPSVGISAGDEVWVARYILERIAEIAGVVVSFDPKPIPGDWNGAGAHTNYSTKSMRNEGGIAVIKKAIEKLGLRHKEHIAAYGEGNERRLTGRHETADINTFSWGVANRGASIRVGRDTEKEGKGYFEDRRPASNMDPYVVTSMIAETTIIWRP

SEQ ID NO: 19090 - protein, 517 aa, Populus trichocarpa
MTSITSVELNYLVFRYLQESGFTHSAFALGYEGGINKCTIDGNMIPPGALITFVQKGLQYLEMEANLSNSDADVDEDFSFLQPLDLITKDVNELQQIIKEKKKNLHKDREKEKEKEKDKDRDKDKDKDKEFEREHERELGPEPMDISITSTSQTCEIPSSDVMILEGHTSEVCACAWSPIGQLLASGSGDSTARIWTITEGTSRSGVQNDPLNVLVLKHVKGRTNEKSKDVTTLDWNGEGTLLATGSYDGQARIWSTDGELKTTLSKHKGPIFTLKWNKKGDYLLTGSCDKTAIVWDVRAEEWKQQFEFHSGPTLDVDWRNNVSFATSSTDNMIYVCKVGETRPIKSFAGHQGEVNCVKWDPTGSLLASCSDDISAKIWSMKQDKYVHDLREHSKEIYTIRWSPTGPGTNNPNQQLVLASASFDSTVKLWDVEFGKLLSSLNGHREPVYSVAFSPNGEYLASGSLDRCINIWSLKEGKIVKTYTGNGGIFEVCWNKEGDKIAACFANNTVCVLDFRM

SEQ ID NO: 19091 - protein, 250 aa, Populus trichocarpa
MKRFNSSDSLAAFISITSSKEDRTQNTNQGYSRDFQAMLDSLEEEDYIEEANLGSEKKRRLTLHQVKALEKNFEVDNKLVPERKLKLAEELCLQPRQVAIWFQNRRARWKTKQLERDYGTLKANYEALNLDYSNLEQKNEALAQKVKELKAKLREEISDNNASVHSQNHDFSEHKNSSAVTKDHSNVSSSNELMNCFNLTDSRAILGNRYQVYQPHLMKLEEQSLFSAEESCNFFSVDQAPTLHCYFPEQ

SEQ ID NO: 19092 - protein, 343 aa, Populus trichocarpa
MDRYEIMKNIGSGNFGVTKLVRDRCTKEFFAVKFFERGEKIDEHVQREIMNHRSLKHPNIVRFKEVLLTPTHLAIVMEYAAGGELFERICSAGKFSEDEARFFFQQLISGVSYCHSMIFMLQQICHRDLKLENTLLDGNTVPRVKICDFGYSKSAVLHSQPKSAVGTPAYIAPEVLSKKEYDGKIADVWSCGVTLYVMLVGAYPFEDPDGPKNFRKTIGRILSVHYSIPDYVRVSIECKHLLTRIFVADPEKRITIPEIKNHPWFLKNLPIELMEGGSWQSNDVNNPSQSVEEVLSIIQEASKPVFLSKGEEHLLGSSMDLDDLDADADLEDIETSGDFVCPL

SEQ ID NO: 19093 - protein, 413 aa, Populus trichocarpa
MASSPSVSTTQKDAFSTQNDSTRKTQQPLQVAKRLEKFKTTIFTQMSSLAIKYGAINLGQGFPNFDGPEFVKEAAIQAIKDGKNQYARGYGVPDLNSAIAERFKKDTGLVVDPDKEITVTSGCTEAIAATILGLINPGDEVIVFAPFYDSYEATLSMAGAKIKGITLCPPAFSVPIDELKSAITKNTRAILINTPHNPTGKMFTREELSTIASLCIENDVLVFTDEVYDKLAFETDHISMASLPGMYERTVTLNSLGKTFSLTGWKIGWAIAPPHLTWGVRQAHSFLTFATSTPMQWAAAVALRAPESYYVELKRDYMAKKEILVEGLKAVGFKVFPSSGTYFVVVDHTPFGLENDIAFCEYLIKEVGVVAIPTSVFYLNPEDGKNLVRFTFCKDEETLKAAVERMKEKLKRK

SEQ ID NO: 19094 - protein, 423 aa, Populus trichocarpa
MSFRSIVRDMRDGFGSLSRRSFEVRLPGHHRGKSHSSACELHDQPVVIQNSRWAGLPPELLRDVIKRLEASESTWPARKHVVACAAVCSAWREMCKEIVRNPEFSGKITFPVSLKQPGPRDGTIQCFIKRDKSKLTYHLFLCLSPALLVENGKFLLSAKRTRRTTCTEYVISMDADNISRSSSTYIGKLRSNFLGTKFIIYDTQPPYNNAQLSPPGRSRRFYSKKVSPKVPTGSYNIAQVTYELNVLGTRGPRRMHCTMHSIPASSLEPGGSVPGQAELLPRSLEDSFRSISFSKSIDNSTEFSSSRFSDIVGPREDEEGKERPLVLRNKAPRWHEQLQCWCLNFRGRVTVASVKNFQLIAATQPAAGAPTPSQPVQSDHDKIILQFGKVGKDMFTMDYRYPLSAFQAFAICLSSFDTKLACE

SEQ ID NO: 19095 - protein, 424 aa, Populus trichocarpa
MSFRSIVRDMRDGFGSLSRRSFEVRLPGHFRGKSHGSACELLDQPVVIQDSPWAGLPPELLRDVIKRLEASESTWPARKHVVACASVCRAWREMCKEIVRSPEFSGKITFPVSLKQPGPRDGTVQCFIKRDKSNLTYHLFLCLSPALLVENGKFLLSAKRSRRTTCTEYVISMDADNISKSSSTYIGKLRSNFLGTKFIIYDTQPPYNNAQLAPPGRSRRFYSKKVSPKVPTGSYNIAHVTYELNVLGTRGPRRMHCTMHSIPVSSLEPGGSVPGQPELLPCSLEDSFRSISFSKSIDNSTEFSSSRFSNIVGPREEDEEGKERPLVLRNKSPRWHEQLQCWCLNFRGRVSVASVKNFQLVAATQPAAGAPTPSQPAQSDHDKVILQFGKVGKDMFTMDYRYPLSAFQAFAICLSSFDTKLACE

SEQ ID NO: 19096 - protein, 377 aa, Populus trichocarpa
MKINRRDLVPDGPGSVKMTPVDADDLWFVYNLIAHGDSVMAVTVRKVLRETSTGRDAERVKLKLEIKVEAIEYDKVGSVLRIRGKNVLENEYVKIGAFHTLEIELHRPFVLRKELWDSMALHVLNQASDPAASADLAVVLMQEGLAHILLVGRSLTITRAKIETSIPRKHGPAIAGYQTALNKFFEHLLQAFLKHVDFNVVRCAVIASPGFTKDQFHRHLLLEAERRQLRPIIENKSRIVLVHTSSGYKHSLKEVLDAPNVMNMIKDTKAAQEVRVLKDFFDMLSNDPDRACYGPKHVEVAHERMAVQTLLITDELFRNADIPMRKKYVNLVNSVKGSGGTVHIFSSMHASGEQLAQLTGVAAILRFPLPELEDIEM

SEQ ID NO: 19097 - protein, 380 aa, Populus trichocarpa
MPPPRIQVPEKNHAGVGGFGEAVNANFSQFSAPFKGGDFRTSSGQFGGQGSGNSPQGEVRECSVVTVGSSNQIPHDRDMSRASSNAMGTSTAFSTGPSMDDPRKIVSQSERGKTETLEATLTTSSGGSGSSFGRTCKQSAGPSSSQKRKTIDTEDSEYQSEAAELDLDSMAGNNPTKRSGSTRRSRAAEVHNLSERRRRDRINEKMRALQELIPHCYKTDKASMLDEAIEYLKSLQLQLQVMWMGGGMAPMLFPGVQHFMSRMGMGPPLPSMQNPMHLPRVQLIDQSISMAPTQNSGVMCQAPVLNPVNFHNQMQNPAFADQYARFMGFHMQAASQPMNMFRFGSQTVQQNQMMAPTSSVGGPLSAGTAVSDAPPSDKVG

SEQ ID NO: 19098 - protein, 157 aa, Populus trichocarpa
MAFTSFLGRVLFASVFILSAYQEFNEFGVDGGPAAKALKPKFGVFTSHVQSHAGIQVPEIEIKHLVSAAIFLKGIGGILFIIGSSLGAYLLIIHQLIAIPILYDFYNYDSEEKEFNQLFIKFTQNMALYGALLFFIGMKNSFPRRQHKKKVPKTKTG

SEQ ID NO: 19099 - protein, 228 aa, Populus trichocarpa
MESSLFYHDQYLNSDFSPECSFGSLDSFSWDELLFQSNSLPFNTNDSEEMVLFNALANGPPKESSESNSSSGIKEEEVTSNAKEEEEAKREKSYRGVRRRPWGKYAAEIRDSTRNGIRVWLGTFDSAEAAALAYDQAAFSMRGSMAVLNFPVEMVRESLQDMNYRCEDGCSPVVALKRKHSMRRKSKSWKTKVNQVPHSRPQNVVVLEDLGADYLEELLNSCDTSNSW

SEQ ID NO: 19100 - protein, 241 aa, Populus trichocarpa
MDHSFFNHPNLEFSPSSPSSSLDLLQDDLLFNPHDNFYLFNSNDSEETLPSDVPFTEAKESATSVTSDVPPNNKAKDLSELISSNEIKEKEAAPNATEENPGREKTYRGVRKRPWGKYAAEIRDSTRNGVRVWLGTFDTGETAALAYDQAALSLHGSKAVLNFPIEKVRKSLREMKSGLEDQYWCSPAEALKKTHSKRRAVSREGKGKGNGLATKEVVVFEDLGAEYLEELLSSCERGTPQ

SEQ ID NO: 19101 - protein, 341 aa, Populus trichocarpa
MGSLPPFLDLPSPDAKFQQIDQTTLLNLFKSQQNHLNYFFQNLNLSQALTFTQTLLNCNGTIFFSGVGKSGFVANKISQTLISLGIRAGFLSPVDALHGDIGALSSSDILVLFSKSGNTEELLRLVPCAKAKGAYLVSVTSVEGNALTAVCDMNVHLPLERELCPFDLAPVTSTAIQMVFGDTVAIALMGARNLSKEEYAANHPAGRIGKSLIFKVKDVMKKQNELPICKEGDLIMDQLVELTSKGCGCLLVIDEDSHLIGTFTDGDLRRTLKASGEGIFKLTVGEMCNRNPRTIGPDAMAVEAMKKMESPPSPVQFLPVIKDDNILIGIVTLHGLVSAGL

SEQ ID NO: 19102 - protein, 864 aa, Populus trichocarpa
DGVLSPGMMLGAAVDSAMDFDYMDELLLEGCWVETTDGSEFLNPTSSLSQKGSQEVSHIPLLPGNSPSDIQSRSPVGEIAVSAAGWEYNATEGSELGKRWWIGPAPNPSPGTTVKRRLIKAVECIKDLTKNKDVLIQIWVPVNRGGRRVLTTHDQPFALDPSSERLASYRDISVKYQFSAEKDSKDSVGMPGRVFLGKVPEWTPDVRFFRNDEYPRVNHAQQCDVRGTLALPVFEQGSRTCLGVIEVVTTSQKIKYLPELESVCKALEACDMSYQAALPEIQKVLRAACETHRLPLAQTWVPCIQQGKGGCRHSNENYYHCVSTVDDACCVGDPAFQGFLEACSEHHLLKGQGVVGEAFMTNQPCFSGDVTLYGKTEYPLSHHARIFGLCAAVAIRLRSMYTGTTDFVLEFFLPVDCRDPQEQKTMLTSLSIIIQRVCQTLRVVTVKELEEETDLPVSEVLVPSDGRSSGEETSTVKESYSERNARDNSPWTACLLKVQQSESNASLSEKDKEKVMCEKSFESRHNQEDYSLRGSTKYGGDSTSAEGSFSSVCKTKPGEKRRAKTEKTITLQVLRQYFAGSLKDAAKSIGVCPTTLKRICRQHGINRWPSRKIKKVSHSLQKLQCVIDSVEGAPGSVQIGSFYENFPELASPNSSRNSSLSTLNPSSHPKPSGIQLEGGTFSSHVAEPKSPSPSCSLSSSSSHSYSSTTQQYPSAITVSASEDPKLGENLGSGVLKKIRSNAELHASILEERKLMLRSQSHTTLTELGNRPPLPKDSSRLSQEMDGHRVKVSFRNDKIRLRMPNNWVFKDLLQEIIRRFNLDDMHRYDLKYLDDDSEWVLLACDDDLEECIDVCGSGDNQTIKL

SEQ ID NO: 19103 - protein, 297 aa, Populus trichocarpa
MDFADAVRIDDNVIARLDALVPLAPLHQPHNLTAIRAVRAAAPDLLQVACFDTAFHAGHDPMAQLMALPYEYYEQGIRRFGFHGLSYAYIARRLKQVAPDLAEGRVIVAHFGNGASLCAMRGGKSVESTMGLTALDGMPMGTRCGTIDPGAVLWLAAQGMTPDAIQAMLYGQSGLKGISGVSSDMRALLASDTPRAKLAVDFYAYRAAQEIGKLAVTLGGLDGLVFTAGIGANSPDVRARVCAHLTDLFGISLDAAANGDNCQRISSDTSRVPVLALQTDEEGMIALSTAKILLNGG

SEQ ID NO: 19104 - protein, 364 aa, Populus trichocarpa
SIIDAVHWLGFSWDSAQAGSTPHLYFASDYFDQLYKFAETLIERGVAYVDSQSAEQIAAMRGNFSEPGKPSPFRDRSVEENLKLFREMRDGKYADGEHVLRAKIDMTAPNIVMRDPVLYRIRHAHHHRTGDKWCIYPMYDFTHCISDAIENITHSLCTLEFENNRPLYDWVLEHLRDAGVFANPLPHQYEFARLNLTYAITSKRRLKQLVDEQRVTGWDDPRMPTIVGIRRRGYTPESIQLFCDRVGVSKADSWIDMSTLEGAVRDDLDARAPRSVAVLDPLKLILDNYPEGQSEECSAPVHPKQPEMGRRVFPLSRELWIEREDFNENPPKGYFRLFPGNKVRLRYGYVIECTGVDKDADGNV

SEQ ID NO: 19105 - protein, 410 aa, Populus trichocarpa
MQVDISLSPRVTAVKPSKTVAITDQATALAQAGVPVIRLAAGEPDFDTPAVIAEAGINAIREGHTRYTPNAGTQELRVAICQKLKEENGISYKPDQILVSNGAKQSIYQAILAVCSPGDEVIIPAPFWVSYPEMARLADATPVILPTSISENFLLDPKQLESKLNEKSRLLILCSPSNPTGSVYPKKLLEEIAKIVAKHPRLLVLSDEIYEHIIYAPATHTSFASLPGMWERTLTVNGFSKAFAMTGWRLGYLAGPKHFVAACNKIQSQFTSGASSISQKAGVAALGLGYAGGEAVSTMVTAFRERRDFLIKSFGEMEGVGLSEPLGAFYLFIDFSSYYGAEVEGFGKIDDSDALCRYLLDQAQVALVPGVAFGDDSCIRISYAASLTTLQAAVERIKKALLPLKSAVPV

SEQ ID NO: 19106 - protein, 401 aa, Populus trichocarpa
REDTPLLSKRPPVSSQGKTFANVFIAIVGAGVLGLPYTFKKTGWVMGSIMVFSVAFLTYYCMMLLVHTRRKLESLEGFSKIASFGDLGFTVCGPIGRFAVDIMIVLAQAGFCVSYLIFIANTLAYVVNHQSGDRILGFLSPKALYIWGCFPFQLGLNSIPTLTHLAPLSIFADVVDLGAMGVVMVEDVMVFLKNRPALEAFGGFSVFFYGLGVAVYAFEGIGMVLPLETEAKHKDNFGRVLGLCMAFISLLYGGFGVLGYFAFGEDTKDIITTNLGPGLLSNLVQIGLCVNLFFTFPLMMNPVYEVVERRFCDSRYSIWLRWVVVLGVSLVALLVPNFADFLSLVGSSVCCILGFVLPALFHLLVFKEELGWNGLLLDGAFVVFGVIIAVTGTWSSLMEIF

SEQ ID NO: 19107 - protein, 692 aa, Populus trichocarpa
MASSTLFCNTPTAVFSRTQFPVPIFSNSSVEFSSSTHYNYNFKTKTGSAKKLKHVNAVVTEAPAVSESRGKQSEQRKLKVLVAGGGIGGLVFALAAKRKGFEVMVFEKDLSAVRGEGQYRGPIQIQSNALAALEAIDLEVAEEVMRAGCITGDRINGLVDGVSGTWYVKFDTFTPAAERGLPVTRVISRMTLQQILARAVGDDVILNDSNVVSFQDEGNKITVVLENGQQFEGDLLVGADGIWSKVRKNLFGPKEAVYSGYTCYTGIADFVPVDIETVGYRVFLGHKQYFVSSDVGAGKMQWYAFHKEQPGGMDGPRGKKDRLLKIFEGWCDNVIDLILATDEDAILRRDIYDREPILTWGRGRVTLLGDSVHAMQPNMGQGGCMAIEDSYQLALELDKAWKQSVESGTSVDVISSLRSYENARRLRVAIIHGMARMAAIMASTYKAYLGVGLGPLSFLTKFRIPHPGRVGGRFFVDIAMPVMLNWVLGGNSSKLEGRSLSCRLSDKASDQLRRWFEDDDALERALDGEWFLLPCGNEAVASQPIGLSRDENKPCVVGSVSHDDFPGMSIVIPAPEVSEMHARISCKNGAFYLIDLRSEHGTFITDNEGRRYRATPNFPARFHPSDMIEFGSDKKVTNNPCPVHSFSSEIRLNPYSKCNLGIRTNATFRVKVMRSPPKISEKKEESQVLRSV

SEQ ID NO: 19108 - protein, 266 aa, Populus trichocarpa
MGCLDDGCSTGLVLGLGLIPLTDLESTSKPDDYSNRLIRPQIKPSLKFDHKPLTSTSFEPSLSLSIVAHDLLYRQASPDQSAVSSFSSGRVKRERDLGCEDIEVERISSRVSDEDEDGTNARKKLRLTKEQSALLEESFKQHSNLNPKQKEALARQLNLRPRQVEVWFQNRRARTKLKQTEVDCEFLKKCCEALTDEKRRLQKELQELKALKLAQPFYMHMPAATLTMCPSCERIGGGGDGASKSSFSMVPKPHFYNTFTNPSAAC

SEQ ID NO: 19109 - protein, 740 aa, Populus trichocarpa
MDREANLLVPSAPPQRNLVRPVTNAADTTSSSSSSSSPPDFLRHVQAAFKRHRPLGIMQTSNSTKPRRTLIPKREASRTVASNAGPTTGTKNSQDVVPLSKDSTLPKKNTVTVIRESHEDASITPPSFPGTITKTFDESFNPFEAQREQPKSAIDTKENNPMPLTCIESQLVEEMEWDVSNQVEVSNVINDETKQQNMESDLTLRSDGAVPSLAKRTMVIQNQLHQLRNFLSQPATQSSVVGPSCATTTSVHSTSAPMLNSMTYCSRESGSQAAVEPLRDANANSQSFTPGNLEQLSTEDIEPADDGAAVQSQPPMSKNPSSDVKLEPPKHEKQEKVSSSKGASVPRKRNLDPDLFFKVNGKLYQRLGKIGSGGSSEVHKVISSDCTIYALKKIKLKGRDYGTAYGFCQEILYLNKLKGKNNIIQLIDYEVTDKTLLHEVMSGSVNNKDGRVKDDGCIYMVLEYGEIDLAHMLSQKWKEMDSSNQTIDENWLRFYWQQILQAVNTIHEERIVHSDLKPANFLLVKGSLKLIDFGIAKAIMSDTTNIQRDSQVGTLSYMSPEAFMCNESDANGNTIKCGRPSDIWSLGCILYQMVYGRTPFSAYKTFWAKFKVITDPNHEITYEPVSNPWLLDLMKRCLAWERNERWRIPQFLQHPFLVPPVPTQQSESQNQGCELLQLVAETCGSDQEASMLCHELQQLLNPGTLISESLTSRDQQYKLLSQMSKLCFQLRECLAKSEGF

SEQ ID NO: 19110 - protein, 64 aa, Populus trichocarpa
GTVKWFSAQKGFGFIAPDDGGEDLFVHQTSIQSDGFRTLSDGQPVEFSVDSGEDGRTKAVDVVG

SEQ ID NO: 19111 - protein, 426 aa, Populus trichocarpa
MSQASVSGSVIKSSLIEPDGGVVVDVIVPECERGSKTLEAESLPKVRLARIDVEWVHVISEGWASPLKGFMRENEYLQSLHFNSLRMGNGTVVNMSLPIVLAIDDETKENIGSAKDVGLVGPDGDLLAILRSTEIYKHNKEERIARTWGTTAPGLPYVEEFITPAGNWLIGGDLEVLKPIKYNDGLDHYRLSPQQLRKEFDRRQADAVFAFQLRNPVHNGHALLMNDTRRRLLEMGYKNPILLLHPLGGFTKADDVPLAVRMEQHSKVLEDGVLDPETTIVAIFPSPMHYAGPTEVQWHAKARINAGANFYIVGRDPAGMGHPTEKRDLYDPDHGKKVLSMAPGLEKLNILPFRVAAYDTVAKKMAFFDPSRSKDFLFISGTKMRTYARTGENPPDGFMCPGGWEVLVKYYERLQAEEATPAAVSA

SEQ ID NO: 19112 - protein, 180 aa, Populus trichocarpa
MNQKPSPPLPPPVTGYPVGHFINQHHNEIHSHPIQHQQPQPGRWSSGLCDCFSDIPNCCITCWCPCITFGRIAEIVDKGTTPCAVSGAIYGVLLWFTGCPCIYSCIYRTKMRKQLMLEDRPCNDCLVHFCCDACALCQEYRELKHRGFDMTMGWQENVERQNGRVTIIASAPPVEQGMKR

SEQ ID NO: 19113 - protein, 431 aa, Populus trichocarpa
MMKKVTRMVGKYEVGRTIGEGNFAKVKFAQNRETGESVAMKILAKSTILKHKMVDQIKREISIMKIVRHPNIVRLHEVLSSRTKIYIILEFVTGGELFDKIVHQGRLSENESRRYFQQLIDAVAHCHRKGVYHRDLKPENLLLDAFGNLKVSDFGLSALRQKGVGLLHTTCGTPNYVAPEVLGHQGYDGAAADVWSCGVILFVLMAGYLPFEEIDLPTLCRKYSCPFWFSPVAKALIDKILDPNPKTRIGIEGIKKHPWFRKSYEPVGHSEEEEVNLDDVHAVFDDIEDHYVAEQLENSEGGPLVMNAFEMIALSQGLNLSALFDRRQDYVKKQTRFVSHKPAKVIISAFEAVAESMNLKFHTHNYKTRLEGISENKAGQFAVVLEVYEVGPSLFMVDARKASGETLEYHEFYKNFCAQLENIIWKPPEGC

SEQ ID NO: 19114 - protein, 373 aa, Populus trichocarpa
MVVTESELNSQGEVESPLQPDQQQTKNHAFSSLGRQSSIYSLTLDEFQHTLCESGRNFGSMNMDEFLASIWTAEENQATATSANMSGNNQIIIDNNASQVLNDPYGHRGASQQPSLPRQESLSLPAPLCRKTVEEVWSEIHKEQISGAENRGGNVQNPKTAPRQPTFGEMTLEDFLIKAGIVRERCTAPFQQQQRGLYESNNNNRAAATGFVARPILGMAAGGGGGGGGNGGGYGQGHGVGMVAPLSPASSDGMVTNFDNSGNQFGMDIGGMGRKRIIDGPVERVVERRQRRMIKNRESAARSRARKQAYTVELEAELNQLKEENKQLKHDLAELERKRKQQYFEESRMKARTKAHKTKEKLRLTRRSSSCPL

SEQ ID NO: 19115 - protein, 681 aa, Populus trichocarpa
MVFQRRLDYGFDGYQVPVVPRASRSARGRGPIRKKSENNQKHAFEILASVAGEILQEEETSAPTNTACGKDLCNVKNTIQQEQVDRGKFLIIEPLLGEPCNEKAFACIPELQGHWHGNALNKFLHNQESFNSQGSFASERFDYPETIYVAEKLVVVNSKNAGGSSSCEMNGESSHARKIFKGKVEGLTERKPEAELVKSSSIESGTLLVKDGSEDAMDLDAGSIGHASVESNVKASLFKDCIGLCPFSRPCADVEVVSRDDDGKSSGCSQYGAMPKTSRPLSYTETRRMSNLTASRHWRAAPISKSGGYFRTDWKTKPPFRNGRTSYSCQRSQKIFPFKKRKFFDQSTLPTSDGAFHCEDIFNSSNKRTNGNDMVSGAKLSATEASSSVKGQHASLDSRDLKLSIKSFKVPELFIEIPATATVGSLKRTVMEAITSILGDGLHVGILLQGKKVRDDNKTLLQTGISEDDKHSNLGFMLESRHAKMMSPPHTKNPSNLPFSAPGGITRHTTSLMLQEGTSHASSVPAETNFSSSVGSDLGAVCSLAKASTADKMSDSRALVPVPAIGRGALSVVPFNCKSMHPEFGQRRIRRPFTVSEVEALVQAVERLGTGRWRDVKLHAFDKANHRTYVDLKDKWKTLVHTARISPQQRRGEPVPQEVLDRVLAAHAYWSYRRQLVKAEV

SEQ ID NO: 19116 - protein, 103 aa, Populus trichocarpa
MSDVQQKIDQIVKGSPVVLFMKGTAQFPMCGFSGRAIQILKACGVDAPTTVNVLEDEGIRQGIKEYANWPTIPQLYVNGEFIGGSDIMMEMYQNGELQSLLKA

SEQ ID NO: 19117 - protein, 605 aa, Populus trichocarpa
MDTKIGSPDTCKPTSNDMINPTNATVSTVQNSVSSTIINPSQSTLGRHLARRLVQIGVTDVFSVAGDFNLILLDHLIAEPGLNLIGCCNELNAGYAADGYARSRGVGACVVTFTVGGLSVLNAIAGANSENLPVICIVGGPNSNDYGTNRILHHTIGLPDFSQELRCFQTVTCYQAVVNNLEDAHEQIDTAISTALKENKPVYINVSCNLSAIPHPAFCREPVPFSLSPKISNELGLEAAVEAAAEFLNKAVKPVLVGGPKLRPAHASEAFVELADACGYALAVMPSAKGLVPEHHPHFVGTYWGAVSSAFCAEIVESADAYLFAGPIFNDYSSVGYSLLLKKEKAIIVQPDRVMIANGPAFGCVLMKDFFVALAKKIKPNTTAYDNYQRIFVPEGEPLRNAPEEPLRVNVLFQHVQKMLSSETAVIAETGDSWFNCQKLKLPRGCGYEFQMQYGSIGWSVGATLGYAQAVPEKRVIACIGDGSFQVTAQDVSTMLRCRQNTIIFLINNGGYTIEVEIHDGPYNVIKNWNYTSLVDAIHNGEGKCWTAKVFCEDELVEAIETATGPEKDSLCFIEVIVHKDDTSKELLEWGSRVSAANSRQPNPQ

SEQ ID NO: 19118 - protein, 321 aa, Populus trichocarpa
MASLGIFSLISTLFLVLALATTASSSKGLSPNYYDYVCPKALPTIKRVVEAAVYNERRMGASLLRLHFHDCFVNGCDASILLDSTSAFDSEKNANPNINSIRGFEVIDRIKLEVDKACGRPVVSCADILAVAARDSVVALGGPTWAVQLGRRDSTTASKTTANNDIPAPFMDLPDLIINFKKHGLNKKDLVVLSGAHTTGFAQCFTFKDRIYNETNIDPKFARERKLTCPRTGGDSNLAPLNPTPSYFDARYYNDLLKKRGLFHSDQALFNGGSTDSLVKAYSSNAKAFWTDFANSMVKMGNINPLTGKQGQTRLNCRKVN

SEQ ID NO: 19119 - protein, 293 aa, Populus trichocarpa
LDAELAQAYEVTLLSEQPDRERFLAEHGAQFEYLVTSAAMGVPASVVQALPRLRCVSSFGVGFDALDRESLLRQGARVGYTPGVLDDCVADMAFALLLDAARGLSESDRFVRRGDWSRGRFGIRTRASGKRLGIFGMGRIGSTVARRAAGFDMEVAYHNRRPVEGSPHLYQPSLLELARWSDFLVITAAGGDGTQHLVNAEVLDALGPQGFLINVARGSVVDEAALVQALQQGRIAGAGLDVFEDEPRPHAELLSQDNVVLAPHIASGTHETRRAMADLVLRNLAQFIATGRP

SEQ ID NO: 19120 - protein, 341 aa, Populus trichocarpa
MALRIQNLLKKNFDEPHFTVSCPSWWNSNEQHFSPSLSKNINFKVDSSPQPYHEAKQLGLNLPDQESSSTLSIGQSHNEMSAMGGTNSQGQCISSESDESCGKGVEGKMRPVLLLSTPDGVSNHSQADCSYSMVRTPYPCADPYFGGLFNPYGPHAFIQPQMGSHMVGMTAGRVPLPLDLADDGPIYVNAKQYHGILRRRQSRAKLEAQNKLVKNRKPYLHESRHIHALNRVRGSGGRFLSTKKLQRSDPTSSHGQCNVLDTIHLHPKNNASELESFQSRTGQSSASNTTRSDTTSVSNSDVNFRQPDRGFSGIAAHLVGGRQINGGLMSSGNQHHASVVR

SEQ ID NO: 19121 - protein, 409 aa, Populus trichocarpa
MDDIEVPKFFVCPISLQIMKDPVTTITGITYDRESIEHWLFTSQNTACPVTKQPLQKDLDLTPNHTLRRLIQAWCTENASHGVDRIPTPKPCLDKAHVLKLIKNLSHHELQIKTLTRLELLAAENERNRKCMVDAGLPKAMLLFIAACFKKGQVSGIQEALSILCFIRIPRSESRAFYSENDDKIIESLTWVLGCKMENYATVKSHAASVLKMLLEEASSSVLERLKPEFFERIVGVLRERITHQGINAALQVLLNACPWGRNRKMMVESGAVFELIELELGSPERRTTELNLGVLFHLCCCAEGRAQFLSHGGSIAVVAKRILRVSPAVDDRAILILSQICKFSGTSMVIQEMADVKAVTKLCMLLQADCATYLKDKAREILRSHSDKWKNSPCIFSSLSSLEFQVSS

SEQ ID NO: 19122 - protein, 413 aa, Populus trichocarpa
MEDIEVPSFFLCPISLQIMKDPVIVPTGITYDRESIEKWLFSGKNDTCPITKLVISGCEVTPNHTLRRLIQSWCTLNASYGIERIPTPKPPINKTQVAKLLNDAKSPQQQVKCLRKLRSIANENETNKRCMEAAGAVEFLVSVVNNFNSLSFEETSDDGFEIARPGDEALSILYGLEISESGLKNLIMGINGELIIETLTKVMQGGNYESRAYAVLLLKSMLEVADPLKLISLKHELFSEIVQVLRDQISHKASNASLQLLINLCPWGRNRIKAIEAKAVSVLIDLLLDSSERRTCEMVLMVLDLLCQCAEGRAELLGHGAGLAVVSKKILRVSQVASERAVRIILSISKYSTTTSVLQEMLQIGIVAKLCLVLQVDCGSKTKDKAREVLKIHARVWKSSRCIPANLLSSYPA

SEQ ID NO: 19123 - protein, 275 aa, Populus trichocarpa
MNSILLPSSPVLQLPFPQFSLCRQLQPLYISKSRGNRCASQNSSLPHSFQPNSKFSFHSHQPLIATAVPSDEGPVSVINFEDFIEKDWSFLDSEESNSKEHDQNIGRIISAGRIEETSRVLVSLGSEGFVDRLVDTSPCSLLLIVHDSLFLLACVKEKYDKVKCWQGELIHVSEKWAPLDVVFLYFLPALPFKLDEVLGSLAKRCSPGARLVISHPQGREVLEQQKKQYQDVVTSDLPDKMTLQKAAANHSFEMVEYVDEPGFYLTVLRLSDARN

SEQ ID NO: 19124 - protein, 160 aa, Populus trichocarpa
MSDEEHHFESKADAGASKTYPQQAGTIRKNGYIVIKNRPCKVVEVSTSKTGKHGHAKCHFVGIDIFNGKKLEDIVPSSHNCDVPHVNRVDYQLIDISEDGFVSLLTENGNTKDDLRLPTDDSLLTQIKDGFGEGKDLVVSVMSAMGEEQICALKDIGPKN

SEQ ID NO: 19125 - protein, 157 aa, Populus trichocarpa
MDFRIMGLDAPLFNTLQHMMDASDHEADKSFNAPTRTYVRDAKAMASTPADVKEYPSSYAFVIDMPGLKSGDIKVQVEDDNVLVISGERKRGEEKEGAKYVRMERRVGKFMRKFVLPENANTDAISAVCQDGVLTVTVEKLPPPEPKKPKTIEVKIA

SEQ ID NO: 19126 - protein, 234 aa, Populus trichocarpa
MYNISHGGSSSSFQPEVNDHNYNSNFHNLSSSKMEDGAEESGESSVKWMPSKMRLMQKMTNSNCSETDHMPMKFMLKFHNQQYQNNEINSSSNSNSNIRVCSDCNTTSTPLWRSGPRGPKSLCNACGIRQRKARRAMAAAAAAANGTVIAIEASSSTRSTKVNNKVKKSRTNHVSQNKKLSKPPESSLQSQKKLCFKNLALSLSKNPALQQVLPHDVEEAAILLMELSCGFIHS

SEQ ID NO: 19127 - protein, 209 aa, Populus trichocarpa
MLSMGSDESPGVNGRFEVQMDPALQKRALEAKRTQLLTLLQVVDERYSQCLDEIHTVISAFHAATELDPQIHTRFALQTISFLCKRLRDRISNQILAMGAQLDSGDTIEIEGSFESSYLQKQWTLQQLKKKDHPLWRPQRGLPERSVSVLRAWMFQNFLHPYPKDAEKHLLAVKSGLTRSQVSNWFINARVRLWKPLIEEMYAEMNRRK

SEQ ID NO: 19128 - protein, 169 aa, Populus trichocarpa
MQEQAASSIPAYSFPSSSERSSSSAPQLEVKEGMESDEEIRRVPEMSGEPAGTSASGRETGSIAGPGRVQPAGEGQSQRKRGRSPADKENKRLKRLLRNRVSAQQARERKKAYLTELETRVKDLEKKNSELEEKLSTLQNENQMLRHILKNTTASRRGGSNSANADGSS

SEQ ID NO: 19129 - protein, 412 aa, Populus trichocarpa
MASSDSIKPRDVCIVGVARTPMGGFLGSLSSFSATKLGSIAIQCALQRANIDPSLVQEVFFGNVLSANLGQAPARQAALGAGIPNSVICTTINKVCASGMKATMLAAQTIQLGINDVVVAGGMESMSNAPKYLADARKGSRLGHDTIVDGMMKDGLWDIYNDFGMGVCAEICADQHSITRDDQDSYAIQSFERGIAAQNSGHLSWEVVPVEVSGGRGKPFTIVDKDDGLGKFDAAKLRKLRPSFKENGGSVTAGNASSISDGAAALVLMSGEKALKLGLQVIAKIRGYADAAQAPELFTTAPALAIPKAISNAGLEASQIDFYEINEAFSVVALANQKLLGLNPQKVNAHGGAVSLGHPLGCSGARILVTLLGVLKHKNGKYGVGGICNGGGGASALVLELMQVARVGPSSL

SEQ ID NO: 19130 - protein, 556 aa, Populus trichocarpa
MLSTILRRSSSSYAPFSSFLTSPTISRDFHVKSGPLDFKASSVTQAGIAVADYGSDEEKGKGSEEGLEISNLGISKEIVNSLAKKGITKLFPIQKAVLEPAMQGKDMFGRARTGTGKTLAFGIPILDKIIEFNKQHGKGRNPLAMVMAPTRELARQVQKEFHDSAPSLDTICLYGGVPISSQMRELEYGVDVVVGTPGRIIDLMKRGSLNLSEIKYVVLDEADQMLGVGFVDDIETILSRLPKKRHSMCFSATMPSWIKQLVRKYLKDPLTIDLVGDSDRKLADGITLYSIASDMYAKASILGPLITEHAKGGKCIVFTETKRDADRLAYAMAKNHKCEALHGDISQNVRERTLSGFREGHFNILVATDVAARGLDVPNVDLIIHYALPRCSETFVHRSGRTGRAGKKGTAILIYTQDDARQVKLIERDTGCRFSELPKIAVDGASLDMHNDLGRGRSNSSGGFGNRGYGSGQGSRNSGFGRSNGQFSGSSQGGYNRNKTGNFGRSGSFGESGRSDRSSTFGDFGSGRSSTFGDFGSGRSSGKQKVPAFDPFGDSD

SEQ ID NO: 19131 - protein, 1628 aa, Populus trichocarpa
MASLQSPLISPVPQLVNATTPNSVNKNLLFVDFVGLYCKSKRTRRKIGVSSSFSSSFSRFANKKKSSCPVNATLSVDRRNISPPSSPPHPPPDLKPQVANLEDILSERGACGVGFIANLENKPSHAIVKDALTALGCMEHRGGCGADNDSGDGSGLMTSIPWELFDKWAESEGIGSFDKLHTGVGMIFFPKDDNLMKEAKEVIVNIFKQEGLEVLGWRPVPVNTSVVGFYAKETMPNIEQVFVRVINEEDVDDIERELYICRKLIERAANSESWGNELYFCSLSNRTIVYKGMLRSEVLRLFYSDLQNDIYKSPFAIYHRRYSTNTSPRWPLAQPMRFLGHNGEINTIQGNLNWMQSRETSLKSSVWHGRENEIRPYGNPKASDSANLDSAAELLIRSGRTPEHALMVLVPEAYKNHPTLTIKYPEVVDFYDYYKGQMEAWDGPALLLFSDGKTVGACLDRNGLRPARYWRTVDNFVYVASEVGVVPMDESKVTMKGRLGPGMMITVDLPGGQVYENTEVKKRVALSNPYGKWVHENLRSLKSTNFLSATVMDNESILRCQQAFGYSSEDVQMVIENMASQGKEPTFCMGDDIPLAILSQKPHMLYDYFKQRFAQVTNPAIDPLREGLVMSLEINIGKRGNILEDGPENASQVILSSPVLNEGELELLLKDPYLKPQVLPTFFDIRKGVEGSLEKTLIKLCAAADEAVRNGSQLLVLSDRSDDLEPTRPAIPILLAVGAVHQHLIQNGLRMSTSIVADTAQCFSTHHFACLIGYGASAICPYLALETCRQWRLSKRTVNLMMNGKMPTVTIEQAQKNFCKAVKSGLLKILSKMGISLLSSYCGAQIFEIYGLGKEVVDLAFCGSVSNIGGVTFDELARETLSFWVKAFSEATAKRLENYGFIQFRPGGEYHGNNPEMSKLLHKAVRQKSENAFSIYQQHLANRPVNVLRDLLEFKSDRAPIPVGKVEPAISIVQRFCTGGMSLGAISRETHEAIAIAMNRLGGKSNSGEGGEDPIRWTPLSDVVDGYSPTLPHLKGLQNGDTATSAIKQVASGRFGVTPTFLVNAVQLEIKIAQGAKPGEGGQLPGKKVSAYIARLRNSKPGVPLISPPPHHDIYSIEDLAQLIYDLHQVNPKAKVSVKLVAEAGIGTVASGVAKGNADVIQISGHDGGTGASPISSIKHAGGPWELGLTETHQTLVANGLRERVILRVDGGFKSGVDVLMAAAMGADEYGFGSVAMIATGCVMARICHTNNCPVGVASQREELRARFPGVPGDLVNFFLYVAEEVRGMLAQLGYQKLDDIIGHTDLLRQRDISLVKTQHLDLSYIMSSVGLPKLSSTDIRNQDVHSNGPVLDDVVLADPEILDAIENEKVINKTIKIYNVDRAVCGRIAGVVAKKYGDTGFAGQLNITFTGSAGQSFACFLTPGMNIRLIGEANDYVGKGMAGGELVVTPVENTGFVPEDATIVGNTCLYGATGGQVFVRGKAGERFAVRNSLAEAVVEGTGDHCCEYMTGGCVVVLGKVGRNVAAGMTGGLAYMLDEDDTLMPKVNKEIVKVQRVTAPVGQMQLKSLIEAHVEKTGSGKGAAILKEWDTYLPLFWQLVPPSEEDTPEACASFEATSAGQVTSFQSA

SEQ ID NO: 19132 - protein, 324 aa, Populus trichocarpa
MSSGPVRRVSPKDIQVVQNLIERCLQLYMNQNEVVETLLAQAKIEPGFTELVWQKLEEENREFFRAYYLRLKVKQQIEEFNKLLVQQAHLMRDLNSTGVVSMPTSNGSHIPSMHQNTACYGPDHTGPALKPESMHHPIGSSLTNAYTNGGSSLHSSMHAAVEIAARSSRIDAPPNMLSMQSSNIGLLQGMNGGMIKSEAGYSGTSPYMFGADGNVLEARPSIADASVASFSSVESSSQALNESILDADTSSFGFLSQIPRNFSLSDLTADFTQSSEILENYPRSPYLAADNDNFPDSQEREHPGDNRRLDTISEGMSYDDFGSE

SEQ ID NO: 19133 - protein, 67 aa, Populus trichocarpa
VQFVPKKSGTPKKGEIVFSAPTGEEITSKRQLEQYLKAHPGGPAVSEFDWGSGETPRRSARISEKAK

SEQ ID NO: 19134 - protein, 214 aa, Populus trichocarpa
MEEEGYCNTRLGLGLGGENYAPWPQKQKEKPVVRLDLSFTLCPDQDDSMNIDHHGKAEGTCFKSEEDEDYGNKRSDHSIDNSCMYGTGRKKLRLTKDQSSYLEESFRRHPTLNPAKKHALAEQLNLKPRQVEVWFQNRRARTKLKQTEADCELLKKCCESLSNENRRLKRELQELRSQKTGRSSSSHSQLAKDLGTITKCPSCEESTTTDQNKM

SEQ ID NO: 19135 - protein, 283 aa, Populus trichocarpa
MAEDNKKSEPRRRGWSIADFEIGKPLGRGKFGRVYVAREVKSKYIVALKVIFKEQIDKYNIHHQLKREMDIQTSLSHPNILRLYGWFHDDQRVFMILEYAHGGELFKELRKCGYLSEQKAATYVASLANALAYCHEKDVIHRDIKPENLLLDHEGRLKIADFGWSVQSRSKRHTMCGTLDYLAPEMVENKAHDYAVDNWTLGILCYEFLYGAPPFEAESQRDTFRRIVKVDLTFPSTPPVSAEAKNLITRLLVKDSSKRLSLQKILEHPWIIKNANPMGTCDN

SEQ ID NO: 19136 - protein, 567 aa, Populus trichocarpa
MAQDDYSNDGTVDIKGNPANKKKTGNWKAGRFILGNECCERLAYYGMSTNLVNYLEDRLNQGNVAASNNVTNWSGTCYITPLIGAFLADSYLGRYWTIASFVVIYIIGMTLLTLSASVPGLESSCDKDSCHPTTGQTTAFFVALYFIALGTGGIKPCVSSFGADQFDETDETERKKKSSFFNWFYLSINIGALIASSVLVWIQMNVGWGWGFGIPAVAMAVAVVFFFLGSKLYRIQKPGGSPITRIVQVIVASFRKYHVQVPADKSLLYETAEEESQIQGSRKLEHTDKFKFFDKAAVETQTDNIKDLTNPWRLCTVTQVEELKSIVRLLPVWASGIVFATVYSQMSIMFVLQGNTMDQHMGPHFKIPSASLSLFGYLSVIFWAPVYDRIIVPYARKFTGHERGFTQLQRMGIGLVISIVSMIVAGVLEVVRLNFVRENNYYDLEYIPMTIFWQVPQYFLIGCAEVFTFIGQLEFFYDQAPDAMRSLCSALSLTTVALGNYLSTLLVTIVTKVTTRGGKLGWIPDNLNRGHLDYFYWLLAILSFLNFTAYLWISKWYAYKKATERPH

SEQ ID NO: 19137 - protein, 485 aa, Populus trichocarpa
MNASTAYEQVSPAVPSWLNKGDNAWQMTASTLVALQSMPGLVILYASIVKKKWAVNSAFMALYAFAAVLICWVLLGYRMAFGDELLPFWGKGAPALGQKYLLTRARVPESTHTLEDGTRETVEPWYPMASLVYFQFTFAAITLILLAGSVLGRMNIKAWMAFVPLWLIFSYTVGAFSLWGGGFLYHWGVIDYSGGYVIHLSSGIAGLTAAYWVGPRLKSDRERFPPNNVLLMLAGAGLLWMGWSGFNGGAPYAANIDASIAVLNTNVCAATSLLVWTSLDVVYFGKPSVIGAVQGMMTGLVCITPGAGLVQSWAAIVMGILSGSIPWVSMMILHKKSALLQKVDDTLGVFHTHAVAGLLGGLLTGLLAEPELCDLILPVNTRGAFYGGSGGVQFLKQVVAALFVIGWNVVSTTIILLFIRLFIPLRMPEEQLAIGDDAVHGEEAYALWGDGEKYDPTRHGRNTLYGEETAQSPYVNGARGVTINL

SEQ ID NO: 19138 - protein, 470 aa, Populus trichocarpa
MTFSSPSFTDLVSGNNKYMDNLSWGLYEHGTNDRNGIEIPNFKSFQPPSLPLSPPPVSPSSYWAIPPRLSPTELLDSPVLFPTSYALASPTSGFFAGQTFNWRSNSNDNQRGVSGEEKDCSDFSFQTQTRPPTISSSSSSFELVPLQANMQNSTAPQPSYNQYNQAGHYMRENGRSEDRYKWRKYGQKQVKGSENPRSYYKCTYPNCTTKKKVERSLDGQITEIVYKGSHNHSKPQSTRRSSSQSVYPSGGANSEISYQSGAPMESGMMQEDSSISLGEDDIDHSSPISNSGGEDNENEPDAKRWLGQNENESILGAGSKTVRESRIVVQTTSDIDILDDGYRWRKYGQKVVRGNPNPRSYYKCTSAGCPVRKHVERASHDLRSVITTYEGKHNHDVPAARGRGNVNKAPSNANSTANAPIPIRPSVMASHSNQTRYHPNSLHSTRLLPTSGSQAPFTLQMLQSQGSFEY

SEQ ID NO: 19139 - protein, 156 aa, Populus trichocarpa
MDFGIRSGRGNKRDLEAIEASRASDDEENGLTRKKLRLSKDQSAFLEESFKEHSTLNPKQKLALAKQLNLRPRQVEVWFQNRRARTKLKQTEVDCEYLKRCCETLTKENRRLQKELQELRALKTSQPFYMQLPATTLTMCPSCERASNSTRRSITF

SEQ ID NO: 19140 - protein, 168 aa, Populus trichocarpa
MGFFVEESGLIVTHLLYKAALVLAVLRWALAWALRFKNRTHLASPSNDSLRRSHPVPSSQQIRDGLILTTFGDVTERMPGVCDTCAVCLSQLRDQDEVRELRNCCHVFHRDCIDRWVDHDHEHDENHNTCPLCRAPLLTTSQSLARTRAEPSWAVERILYLFGDDLVM

SEQ ID NO: 19141 - protein, 347 aa, Populus trichocarpa
MGDSSDSVSIDMETPSLSGKEYVVETCCGYVSVSVYGDQDKPALVTYPDLALNHISCFQGLFFCPEACSLLLHNFCIYHISPPGHELGAATISPDDPLLSVDDLADQIADVLNYFGLDAVMCMGVTAGAYILTLFAMKYRQRVLGLILISPLCNAPSWTEWLYNKVLSNLLYYYGMCGVVKELLLKRYFSKEARGSAQVPESDVVQACRRLLDERQGLNVWRFLEAMNGRQDISDGLRKLRCRSLIYVGESSPFHFEALDMNSKLDRRCSALVEVQACGSMVTEEQPHAMLIPLEYFLMGYGMYRPPKLSVSPRSPLSPICISPELLSPESMGLKLKPIKTRISLEV

SEQ ID NO: 19142 - protein, 390 aa, Populus trichocarpa
MMMIGELSHHRSNPTVQIPQWDPYEEQTTTSPSLSPIPTSPFTNFNALDSLTSLHRYLPSNEPDPTFEDELDLPVDAFSCDHFRMYEFKVKRCARGRSHDWTECPYAHPGEKARRRDPRRYHYSGTACPEFRKGGCKKGDACEFAHGVFECWLHPARYRTQPCKDGPACRRRVCFFAHTPEQLRLLPQQSPKGNGSGSGLGSGEYDFGSPVIHPFDSYMTKAGIFVSSPTSILTSPPVSPPSDSPPMSPGSPQVIGGSGPGSLNSMSALLASMRGLQVGKAKMGSPVGSWGVQSGFRFGSPRGSSLRPGFCSLPSTPTRTMASRSGLSQLDIWGDGVTCEEEPAMERVESGRDLRAKIYAKLSKENSVDRDRGDSGVSGPDVGWVSELVK

SEQ ID NO: 19143 - protein, 172 aa, Populus trichocarpa
MDPSNPGASALEIDTNPQPAYPPPETGIPRQHGQQARWSSGLCDCCSDVPGCCLTYWCPCITFGRIAEITDRGTTPCAVSGAIYGLLLYFTYCSCLYSCLYRSKLRTQYMLEESRCNDFLVHCCCEPCALCQEYRELKHRGFDMASGWQESLQGPSGTVAPSAPVVGQGMTR

SEQ ID NO: 19144 - protein, 476 aa, Populus trichocarpa
MQNHEGETPLYAAAENGHAEVVAEMLESMDLETASIAARNGYDPFHVAAKQGHLDVLRKLLGVFPNLAMTTDSSCTTALHTAATQGHIDVVNLLLETDANLVKIARNNGKTVLHSAARMGHLEVVRSLLIKDSSTGFRTDKKGQTALHMAVKGQNEEIVLELLKPDPSVMHVEDNKGNTALHVAIKKGRAQNVRCLLSVEGVNINAINKAGETPLDIAEKLGVQDLVYILKEAGANNSKDCGKPPSSAKQLKQTVSAIKHDVQSQLQQTRQTGFKVQKIAKKLKKLHISGLNNAINNATIVAVLIATVAFAAIFTVPGQYVEEKTDGAAIGQAHVARNPAFLVFIIFDSLALFISLAVVVVQTSVVVIEQKGKKQLVFIINKLMWLACLFISAAFISLTYVVVGKKFRWLAIYATVLGGIIMLATIGSMCYFVILHRMEESTLRNIRRESRSRSYSMSAASDQEILNSECKRMYAL

SEQ ID NO: 19145 - protein, 332 aa, Populus trichocarpa
MESVCDFCGVEKAVVYCKPDSAKLCVHCDGCVHSANFLSRRHRRSLLCDKCSSLPAVARCFDEKLSICQGCDCSANGCSSLGHQLRALNCYTGCYSLAEFSKIWSSVLEGSSSGGFDSGWDSLNSAPINENCISSCLEQRDNEGDQVSMFPEVTNLPKDIGLPDGEDLCEGLNLDDIPLDFENSDEIFSCSETQSKYQFGDVGKDCMLMEKNLSVTGSNGFPAVSGQVHSSMSLPLSNIIGESSAADYQDCGLSPLFLTGESPWESHLDASSPQARDKAKMRYNEKKKTRTFSKQIRYASRKARADTRKRVKGRFVKAGEAYDYDPLLSSNF

SEQ ID NO: 19146 - protein, 340 aa, Populus trichocarpa
MERYEILKDIGSGNFGVAKLVREITTGELFAVKYIERGQKIDEHVQREIMNHRSLKHPNIIRFKEVLLTPTHLAIVMEYAAGGELFERICTAGRFSEDEARYFFQQLISGVSYCHSMQICHRDLKLENTLLDGTTAPRLKICDFGYSKSSVLHSQPKSTVGTPAYIAPEVLSRKEYDGKIADVWSCGVTLYVMLVGAYPFEDPEDSRNFRKTIQRILSVHYSIPDYVRVSKECKHLLSRIFVADPEKRITIPEIRTHSWFLRSFPVELKEEEDGSLQIDDRNEESQSIEEILAIIQEARKPAEGHKIGGHFFGGSMDLDDIDSDADIDDVETSGDFVCAL

SEQ ID NO: 19147 - protein, 652 aa, Populus trichocarpa
MASLAIETGHQEIHDLERNGHAEKAQWVLNAPEPPSLWQELTGSIRETVLPHARRFPTVKDKGSLSKTVISFLHAIFPIFCWCRNYKATNFKNDLLAGLTLASLCIPQSIGYATLAKLDPQYGLYTSVIPPLIYAVMGTSRDIAIGPVAVVSLLLSSMIPKLEDPEANPILYRNLVLTTTFFAGIFQAAFGLFRLGFLVDFLSHAAIVGFVAGAAIVIGLQQMKGLLGITHFTNKTDVISVMEAIWRAVHHSWNPHNFILGCSFLTFILITRFVGRRNRKLFWLPAIAPLISVVLSTLLVYLTRADKHGVMIIKHIKRGLNPSSVHQLQFNNPHIGEVAKIGLIVAVVALTEAIAVGRSFASIKGYHINGNQEMVAMGFMNILGSFTSCYVATGSFSRSAVNFSAGCETAMSNIVMAITVIISLELFTRLLYYTPIAILAAIILSALPGLVDLHEAYNIWKIDKLDFLACAGAFIGVLFASVEIGLLAAVTISFVKIIIISIRPGAEVLGRLPETDIFCDVDQYPMAAKNPQVLIIRVKSGLLCFANANFVKEKIMKLATEEEEGSKGKRTIQVVILDMSNLMNIDVSGITSLVELHKNLASSGMELAITNPKWQVIHKLRVANVVTKIGGRVFLTIGEAVDACLGAKMAAV

SEQ ID NO: 19148 - protein, 643 aa, Populus trichocarpa
MASSTLFGNTLTAVSSRTHFPTPIFNNNSLELLSSAHSNYNFKTKTSTSAKKLKVKAVVTETPAGSKSEGKQSEQRKLKVLVAGGGIGGLVFALAAKKKGFDVMVFEKDLSAVRGEGQYRGPIQVQSNALAALEAIDLDVAEEVMRAGCITGDRINGLVDGVSGTWYVKFDTFTPAAERGLPVTRVISRMTLQQILARSVGDDMILNDSNVVSFQDDGDKVTVVLENGQQYEGDLLVGADGIWSKVRKNLFGPKEPVYSGYTCYTGIADFVPVDIETVGYRVFLGHKQYFVSSDVGAGKMQWYAFHKEPPGGMDAPHGKKDRLLKIFEGWCDNVIDLLLTTDEDSILRRDIYDREPIITWGKGRVTLLGDSVHAMQPNMGQGGCMAIEDSYQLASELERAWKQSIESGTPVDVLSSLRSYENSRRLRVAIIHGMARMAAIMASTYKAYLGVGLGPLSFLTNFRIPHPGRVGGSSKLEGRSLSCRLSDKANDQLRRWFVDDDALERSLNGEWFLLPCGNDAVASQPIGLSRDENKPCVVGSVSQEDFPGMSIVIPAPQVSKTHARITCKDGAFYLIDLRSEHGSFITDIEGRRYRAPPNFPTRFHPSDMIEFGSDKKVIFRVKVMRSPPKISEKKDEGQVLQSV

SEQ ID NO: 19149 - protein, 349 aa, Populus trichocarpa
VWHPDCFRCDACNLPISDYEFSMSGNRHYHKSCYRNQHHPKCDVCNNFIPTNSSGLIEYKVHPFWKQKYCPSHERDGTPRCCCCERMEPRDTRYLSLDDGRKLCLECLDSAVVDTLECQPLYFEIREFYEGLNMKVEQEIPLLLVERTALNEAMEGEKNGHHHLPETRGLCLSEEQTVTTVSRRPRIGAEQRSIDIITESYRLSRRCEVTAILILYGLPRLLTGSILAHEMMHAWLRLKGYPNLRPEVEEGICQVLAHMWLDSEIYSSSGGEGASSSSSSSSPSSSSSTSSKKGPRSDFEKKLGEFFKHQIESDTSPAYGEGFRVGNQAVLKYGLRTTLDHIRMTGNFP

SEQ ID NO: 19150 - protein, 851 aa, Populus trichocarpa
MMGRMHVWMLTASVGSFIVSLIHVIHLTCAEKGFVSIACCAESSTFTDNTTISWISDEGWFPIENTGCENITRQAENDANYDRVRIFYIEPGRRICYNFSTTKNQNYLIRATFLFDDSLGASFDVSIGFTPTSNVKLSKDLEVERVFTATHHDVDFCLMNHYGYPYISKLELRPLGDLKYLQGKASGVLKLVSRVDAGNTGNSIRYPDDSFDRIWRRPDPKTVSLSEPTNSTTYIHDVKKTVPAKVLQTALTHTDRLEFLHNELDTQDSNYTVFLYFFELNQSIKTGQRVFDIYINNEIKLGKFDIWAYGSAYREAALSVTASRSLNLTLVKVENASDLGPILNAYEILQWIQGTNQQDVEVIMKVRNELMLNNKENELLQSWSGDPCFPPWKGLKCQNISGSLPVITGLNISSSQFQGPIPASITELSYLKELNLSYNGFTGKIPEFPKSSVLTSVDLSFNDLSGSVPDSLASLTNLKTFCFCRNKSRTRRNFDRKSNPMTKNAVFSVASTVSKSINIQSFPLDYLENVTHKYKTLIGEGGFGSVYRGTLPDGQEVAVKVRSSTSTQGTREFDNELTLLSALRHENLVPLLGYCCENDQQILVYPFMSNGSLQDRLYGLTYLHTFSGRCIIHRDVKSSNILLDHSMNAKVTDFGFSKYAPQEGDSGASLEVRGTAGYLDPEYYSTQHLSAKSDVFSFGVVLLEIVSGREPLNIHRPRNEWSLVEWAKPYIRESRIDEIVDPGIKGGYHAEAMWRVVEVALVCIEPFSAYRPCMTDIVRELEDALIIENNASEYMKSIDSLGGYSLGGSNRFGSNRFSISTDKKIALSPPVPTPPDPSPINTQALAPLEPR

SEQ ID NO: 19151 - protein, 452 aa, Populus trichocarpa
MATSKLLASTLRRTLTTSSSFRRFSTAAAEAVALASEPEDSMTIKGVKISSRPLYLDMQATSPVDPRVLDAMLPYYLARYGNPHSRTHLYGWESDQAVETARSQIADLIGASPKEIVFTSGATESNNISVKGVIKFYKEKKRHVVTTQTEHKCVLDSCRHLQQEGFEVTYLPVGNDGIVDLEKLKGSIRPDTGLVSVMAVNNEIGVIQPMEEIGEICKELNVPFHTDAAQALGKIPIDVDKWNVSLMSLSGHKIYGPKGVGALYMRRRPRIRVEPQMNGGGQERGIRSGTVPTPLVVGMGAACELAKKEMEYDDKRIRALHERMLNGVRAKLDGVVVNGSVERRYAGNLNLSFAYVEGESLLMGLKDVAVSSGSACTSASLEPSYVLRALGVDEDMAHTSIRFGIGRFTTEEEIDRAIELTVQQVEKLREMSPLYEMVKEGIDIKQIQWAQH

SEQ ID NO: 19152 - protein, 98 aa, Populus trichocarpa
MKINRRDLVPDGPGSVKMTPIDADDLWFVYNLIAHGDSVMAVTVRKVLRETSTGRDAERVKLKLEIKVEAIEYDKVGSVLRIRGKNVLENEYVKVCEA

SEQ ID NO: 19153 - protein, 410 aa, Populus trichocarpa
MQLDISLSPRVNAVKPSKTVAITDQATALVQAGVPVIRLAAGEPDFDTPVVIAEAGINAIREGFTRYTPNAGTQELRVAICHKLKEENGISYTPDQILVSNGAKQSIYQAMLAVCSPGDEVIIPAPFWVSYPEMARLADATPVILPTSISENFLLDPKLLESKLSAKSRLLILCSPSNPTGSVYSKKLLEEIARIVAKHPRLLVLSDEIYEHIIYAPATHISFASLPGMWERTLTVNGFSKAFAMTGWRLGYIAGPKHFVAACNKIQSQFTSGASSISQKAGVAALGLGYAGGEAVSTMVKAFMERRDFLIRSFGEMEGVRMSEPQGAFYLFIDTSSYYGTEAEGFGKIEDSDSLCRYLLDQAQVALVPGVAFGDDSCIRISYAASLTTLQEAVGRIKKALLPLKSAVPV

SEQ ID NO: 19154 - protein, 356 aa, Populus trichocarpa
MSLLNDLININLSDTTEKIIAEYIWIGGSGMDLRSKARTLPGPVTDPAKLPKWNYDGSSTGQAPGEDSEVILYPQAIFKDPFRKGNNILVMCDAYTPAGEPIPTNKRFNAAKIFSNPAIAAEEPWFGIEQEYTLLQKDINWPLGWPVGGFPGPQGPYYCGVGADKSFGRDIVDSHYKACLYAGINISGINGEVMPGQWEFQVGPAIGISAGDEVWVARYILERIAEIAGVVVSFDPKPIPGDWNGAGAHTNYSTKSMRNDGGFAVIKKAIEKLGLRHKEHIAAYGEGNERRLTGRHETADINTFSWGVANRGASVRVGRDTEKDGKGYFEDRRPASNMDPYVVTSMVAETTIIWKP

SEQ ID NO: 19155 - protein, 512 aa, Populus trichocarpa
MEITSTWVSYAAPLLATITLILLGRLIRRRKLHLPPGPKPWPIIGNLNLMGELPHRSLEALSKKYGSLMQVKFGSHPVVVGSSVEMARAILKTHDLSLAGRPKTASGKYTTYNYQNITWAPYGPYWRQARKLCLIELFSPKRLDQFEYIRVEENLKFLNTLFQKRGKPITVRDHFSDLSFSVISRLVLGRKYMAESEDEKDMLSLKELKEVLDEMFLLNGVLVIGDFIPWLAFLDLQGYIKRMKAVAKKMDMFMEHALEEHHARRKGVKDYEPRDMLDILLQVADDPNLEVKLDRIGVKAFTQDLINGGTESSAVTTEWALAEIMKKPEIFDKATEELDRVIGRERWVQENDIDNLPFINAIVKETMRLHPVAPLLVPRLAREDIQIAGYDIPKGTRVLVNASAIGRDPSLWDKPKEFCPERFIGKSVDVKGHDFELLPFGAGRRICPGYPLGLKVIQTSVANLLHEFKWKLPNNMTAKDLNMEEILGLSIPRKVPLVAVLEPRLPSELYSL

SEQ ID NO: 19156 - protein, 230 aa, Populus trichocarpa
MESGFAESTSVPPERSSYSSNNGNDAGDFECNICFELARDPIVTLCGHLYCWPCLYQWLHLHSHSHECPVCKAIIQEEKLVPLYGRGNSQSDPRSKSYPGIDIPSRPSGQRPETAPPPDANNSPNFGFGMAGGYMPTAAARSGNFTFSTAFGGLSHFPSFFNVQFQGFPDATVYGTTSGFPYGFHGFHGFHGHHAHRFPPATIRGQRADNVLKNLFFLIGFLVVIALLWW

SEQ ID NO: 19157 - protein, 414 aa, Populus trichocarpa
MELVALNLSTKIPRQKPTFLSTTTKTLLFRNYHYQLRRRASNHFRFQARNKQQQQLLISQIDSESELEFDSDEDEDEMSSGLLSLSVKPDRNTALLDDYEIEELAFHDSSNSNHRSGYVAVVGKPNVGKSTLSNQMIGQKLSIVTDKPQTTRHRILGICSAPDYQMILYDTPGVIEKKMHKLDSMMMKNVRSAAINADCVLVIVDACRAPEKIDEMLEEGVGNLKDNVPTLLVLNKKDLIKPGEIAKKLEWYEKFTGVDEVIPVSAKFGQGVEDIKEWILSKLPMGPAYYPKDIVSEHPERFFVAEIVREKIFMQFRNEVPYACQVNVVGYKARPTAKDFIQVEIVVEKNTQKIIIIGKEGKALKLLATAARLDIEDFLQKKVYLEIEVKVKENWRQDEGLLKYYGYGGQISAL

SEQ ID NO: 19158 - protein, 134 aa, Populus trichocarpa
MKRIQCSIALNRTTIGLLLLLVALANELKVTEASNSASAFVQNVIYSNKIVIFSKSYCPYCLRAKRVFSELYEKPFAVELDLRDDGGEIQDYLLDLVGKRTVPQIFVNGKHIGGSDDLRAAVESGELQKLLGTE

SEQ ID NO: 19159 - protein, 229 aa, Populus trichocarpa
MTGFEPSLSLGLSAETYSLVDGKKGCEESIGAHDQLYRQASPHSAVSSFSSGRVKRERDLSSEDIEVERVSSRVSDEDEDGSNARKKLRLTKEQSALLEESFKQHSTLNPKQKQALARQLNLRPRQVEVWFQNRRARTKLKQTEMDCEFLKKCCETLTDENRRLQKELQDLKSLKMAQPFYMHMPAATLTMCPSCERIGGVGEGASKSPFSMATKPHFYNSFTNPSAAC

SEQ ID NO: 19160 - protein, 327 aa, Populus trichocarpa
MALRFTLSSPSPSLQPPLIHSPPPLKLSTLPLNSNLFTYSATRSLRLRSTRRLPAVTASVPAVETTGTTGTDSGKKRPLLEVKDLTAVIAESKQEILKGVNVVLYEGEVHAIMGKNGSGKSTFSKVLAGHPDYEVTGGSVVFKGENLLDMEPEERSLAGLFMSFQSPVEIPGVNNIDFLNMAYNARRRKLGLPELGPIEFYAYLFPKLELVNMKSDFLNRNVNEGFSGGERKRNEILQLAVLGAELAILDEIDSGLDIDALQDVAKAVNGMLTPNNAVLMITHYLRLLEFIKPTCIHIMENGRIVKTGDISIAKTLEKEGYKAISAS

SEQ ID NO: 19161 - protein, 470 aa, Populus trichocarpa
MLCNDNVSFSKKSALFQELGARNSELQGDAVVSNKGNGLRVHCNKGIQAVLSHDKATEVFEATKTKGLRGKLNKVVLAYSGGLDTSVIVPWLRENYGCEVVCFTADVGQGVGELEGLEQKAKASGACQLVVKDLQEEFVRDFIFPCLRAGAIYERKYLLGTSMARPVIAKAMVDVAKEVGADAVAHGCTGKGNDQVRFELTFFALNPELNVVAPWREWDITGREDAIEYAKKHNVPVPVTKKSIYSRDRNLWHLSHEGDILEDPANEPKEDMYMMSTSPEAAPDKPEYVEIGIVSGLPVSVNGVKLSPASLLSKLNEIGGKHGIGRIDMVENRLVGMKSRGVYETPGGTILFTAVRELESLTLDRETMQVKDSLALKYAELVYAGRWFDPLRESMDAFMEKITEKTNGSVRLKLYKGSVSVASRTSPNSLYREDISSFESGQIYDQADAAGFIRLYGLPMRVRAMLEKGI

SEQ ID NO: 19162 - protein, 319 aa, Populus trichocarpa
MTAKAGAAASFMFMLFLLNTACQAQLSPAFYDSSCPNAISAIRTAIRSAIASDRRMAASLIRLHFHDCFVQGCDASILLDETLSIQSEKTALGNLNSARGYNVIDKAKTEVEKICPGVVSCADIIAVAARDASAYVGGPSYAVKLGRRDSTTASRTLANAELPAFFESLESLISRFQKKGLTARDMVALSGSHTLGQAQCFTFRERIYNHSNIDAGFASTRRRRCPRVGSNSTLAPLDLVTPNSFDNNYFKNLMQNKGLLQSDQVLFNGGSTDSIVSEYSRNPARFKSDFGSAMIKMGDIGLLTGSAGQIRRICSAVNN

SEQ ID NO: 19163 - protein, 255 aa, Populus trichocarpa
MKVRDDNRTLLQTGMTSKENLDTLGFSLEPIPVQAPPPLCTEDPALLPCDTSQLISSSPTTPIIDSGISDALPDPPPSTNLDTNTESNHESVSSHSDMVTDDTLSDSRALVAVPPINAEALAMVPLNPKSKRSELVQRRTRRPFSVSEVEALVHAVEEVGTGRWRDVKLRSFEDADHRTYVDLKDKWKTLVHTARIAPQQRRGEPVPQELLDRVLAAHAYWSQHQAKQHSKNQAAILKITVAHAVRNGVEDNHSI

SEQ ID NO: 19164 - protein, 174 aa, Populus trichocarpa
MSRDRDPLSVGRVIGDVLDPFTKSISLRVTYSSREVNNGCELKPSQVANQPRVDIGGEDLRTFYTLVMVDPDAPSPSDPSLREYLHWLVTDIPATTGASFGHETVCYESPRPTMGIHRFVFVLFRQLGRQTVYAPGWRQNFNTRDFAEVYNLGSPVAAVYFNCQRESGSGGRRR

SEQ ID NO: 19165 - protein, 321 aa, Populus trichocarpa
MLMMDVKGNSNSSSSTTQSDEEMMGDLRRGPWTVEEDFKLINYIATHGEGRWNSLARCAGLKRTGKSCRLRWLNYLRPDVRRGNITLEEQLMILELHSRWGNRWSKIAQHLPGRTDNEIKNYWRTRVQKHAKQLKCDVNSKQFKDTMRYLWMPRLVERIQAAAATATNTSSTSTATVSAPATNQHSISNRDVGTGNLVMAPHGINGNDFGVSHVTQSYTPENSSTAASSDSFATQVSPVSDLTTDYYNIPVNRNTNPDYFQAGQVGYSESMISPPGFFNHGLDFQAMEHSSNQWPMDSGDTSDNMWNLEDIWFLQQQLNNL

SEQ ID NO: 19166 - protein, 174 aa, Populus trichocarpa
MPRDREPLSVGRVIGDVLDPFTRSISLRVNYNSREVNNGCELKPSHVVNQPRVDIGGEDLRTFYTLVMVDPDAPSPSNPNLREYLHWLVTDIPATTGANFGQEVVCYESPRPTAGIHRFVFVLFRQLGRQTVYPPGWRQNFNTRDFAELYNLGSPVAAVYFNCQRESGSGGRRP

SEQ ID NO: 19167 - protein, 314 aa, Populus trichocarpa
MLGVRKRICNPREEESELRRGPWTLEEDTLLTHYITRHGEGRWNMLARGAGLKRTGKSCRLRWLNYLKPDIKRGNLTPQEQLLILELHSKWGNRWSKIAQHLPGRTDNEIKNYWRTKVQKEARQLNIEANSKRFLDAVRSYWMPRLIQKIEQASYSSSLTTLDSPADREVRSTSSNPPVHNSSPTLLCPPESRFTHCSNPGSENSFSFTSPYLLSTNSNTISQQPDEILENPSCSPLLGDTVCNNLILSDTYNKEGSSYDMDVFNVASAGMGTHDNSPLECQVAEGNWVFDSVEDTLWNMDDMWVFRDLRETGI

SEQ ID NO: 19168 - protein, 181 aa, Populus trichocarpa
MNQKPSPPLPPVPVTGHPVGHFTNQHHNEIHSHPIQHQQQQPGRWSSGLCDCFSDIPNCCITCWCPCITFGRIAEIVDKGTTSCAVSGAIYGVLLWFTGCPCIYSCVYRNKMRKQLMFEDRPCNDCLVHFCCDACALCQEYRELKHRGFDMTMGWQENVERQNGGVTMIASAPPVEQGMKR

SEQ ID NO: 19169 - protein, 192 aa, Populus trichocarpa
MYSQNPSYEKFSTSQPPAFSQDTTTTGIPVTSTSQFYSTDDSRSSIELRSKNKGPWSTGLCDCHDDWRNCCITFWCPCVTFGQIAEIVDKGSSSCGVNGALYALISCVTCFPCCYSCFYRAKMRQQYLLRETPCGDCLVHCFCECCSLCQEYRELKSRGYDLAMGWHGNVEKKNRSSEMASVPPVVEGGMSR

SEQ ID NO: 19170 - protein, 264 aa, Populus trichocarpa
MSWGVMAGQLAWGGLIEEGWRKGPWTAEEDRLLIEYVRLHGDGRWSSVARLAGLKRNGKSCRLRWVNYLRPDLKRGQITPHEESIIVELHARWGNRWSTIARSLPGRTDNEIKNYWRTHFKKKAKLSPDNSDKARTRHLKRQQFQQQQQQLQRQQQQTQHQQPLQINQLDMRKIVSLLDENEDKAPCTPQMRQEMAPHAIYPNTIEEHVLLYNMFNVNNASVPEASNEDILWDGLWNLDDLHGNLGVACATSKASMQNLVAPFC

SEQ ID NO: 19171 - protein, 506 aa, Populus trichocarpa
MASMNCSAGDLAQLLGPNVTNSTGAAAFICSQFQIAAGNFNATQFAVDNTYLLFSAYLVFSMQLGFAMLCAGSVRAKNTMNIMLTNVLDAAAGGLFYYLFGFAFAFGTPSNGFIGKHNFGLKAFPSSSFDYSYFLYQWAFAIAAAGITSGSIAERTQFVAYMIYSSFLTGFVYPVVSHWFWSVDGWASATREHGDLLFGSGVIDFAGSGVVHMVGGIAGLWGALIEGPRIGRYHHSGRSIALRGHSASLVVLGTFLLWFGWYGFNPGSFNKILSAYTDAPVYYGQWSAIGRTAVTTTLAGCTAALTTLFCKRILSGHWNVTDVCNGLLGGFAAITAGCSVVEPWAAIVCGFVASLVLIGCNKLAEIFKFDDPLEAAQLHGGCGTWGVIFTALFATEKYVGEVYPKKPGRPYGLFMGGGGNLLAAHLIQVLVIIGWVSATMGPLFFVLHKLKLLRISAEDEMAGMDLTRHGGFAYIYHDDDDESQRPGTFRLGQIEPTNSTTPSANA

SEQ ID NO: 19172 - protein, 932 aa, Populus trichocarpa
MALYSHFLVLYLFFVSSVICQVTEFISIDCGGTSNYTDPRTGLAWVSDNGTIMKYGKSSEAQVSNGNTQYQRRRDFPIDSNKYCYTLGTKERRRYLVRATFQYGSSENEDAYPKFDLYLDTTKWSTMVVLDASRVYVKEMIIRAPSSSIDVCICCATTGSPFISTLELRPLNLSMYATDFEDNFFLEVAARVNFGALSKDAIRYPDDPYDRIWGSDLEKRQNYLVGVAPGTVRINTSKYVDTRTREYPPVKVMQTAVVGTEGILSYRLNLEDFPANARAYAYFAEIEDLGANETRKFKLQQPFLSDYSNAVVNIAENANGSYTLYEPSYMNVSLDFVLSFSFAKTRDSTLGPLLNAIEISKYLKIEPKTDSKDVTVLNALRFLSAESAWANEQGDPCVPAHWEWVNCSSTTPPRITKIALSGKNLKGEIPPEINNMEQLTELWLDGNFLTGPIPGISNLVNLKIVHLENNKLNGPLPKYLGSLPKLQALYIQNNSFSGEIPSEFLTGKVIFNYEHNPGLHKEARKKMHLKLIVGISIGILAGLLVVVIGSLLFLRNLQRKTSHKKSEVQGNSLRASTKPSTAYSVARGWHMMDEGVSYYIPLPELEEATKNFSKKIGRGSFGTVYYGQMKDGKEVAVKIMADSSTHLTLQFVTEVALLSRIHHRNLVPLLGYCEEEHQRILVYEYMHNGTLRDHIHGPVNQKRLDWLARLQIAEDAAKGLEYLHTGCNPSIIHRDVKTSNILLDINMRAKVSDFGLSRQAEEDLTHVSSVARGTVGYLDPEYYANQQLTEKSDVYSFGVVLLELVSGKKPVSTEDFGSELNIVHWARSLIRKGDVMSIVDPVLIGNAKIESIWRIAEVAIQCVEQRAFSRPRMHEIILAIQEANKIEKGTDGSQKQQSASSKAQSSRKTLLTSFLEIESPDLSNGCLVPAAR

SEQ ID NO: 19173 - protein, 250 aa, Populus trichocarpa
MAVKVCELCQREAGLYCDSDAAFLCFECDSNVHNANFVVSRHLRRVICSACNSLTGGSFSGTAPSLRRVTCLSCSPENKELDSISCSSSCSSTLSSACISTTETTRFENTRKGVETSCVTNIPARFSGGRLKRSRNLRSECVFVNWCERLGLNGNLVVQRATRAIALCFGRLVLPFRVSLAASFWFGVRSCGDKSVTTWQDLRRLEEVSGVPRKMISAVEMKIEHALRSRRLELHKNMEEGWADSTDCSA

SEQ ID NO: 19174 - protein, 637 aa, Populus trichocarpa
MASSSTKPISTPPFTTTISSSSQPSTRSSLLSFLRNTTPTPISLKLSHSRNSFLNSHSSSSRSLSIKNATKTIESAETSRVSKVGGQDADSQETKPTILVSEKLGEAGLELLRSFGDVDCSYDLSQEDLCKKIASCDALIVRSGTKVTRQVFEAAKGKLKVVGRAGVGIDNVDLQAATEFGCLVVNAPTANTVAAAEHGIALLAAMARNVAQADASMKAGQWQRNKYVGVSLVGKTLAVMGFGKVGSEVARRAKGLGMQVIAHDPYAPADRARAIGVELVSFDQAISTADFISLHMPLTPSTEKVFNDDTFAKVKTGVRIINVARGGVIDEDALVRALDSGKVAQAALDVFTEEPPPKDSKLVQHERVTVTPHLGASTKEAQEGVAIEIAEAVVGALQGELAATAVNAPMVPAEVLSELAPYVVLAEKLGRLAVQLVAGGSGIKSAKVVYRSSRDPDDLDTRLLRAMITKGIIEPISDSFINLVNADFTAKQKGLRISEERVVVDTSPEFPIHSIQVQLSNVDSKFGSGVSEGGDISIEGRVKYGKPHLTRVGSFSVDVSLEGNLILCRQVDQPGMIGQVGNILGEQNVNVSFMSVGRTVQRRKAIMAIGVDEEPNQETLKKIGEVPAIEEFVFLKL

SEQ ID NO: 19175 - protein, 104 aa, Populus trichocarpa
MPGHTSREVLIIFSSLTTCDPSNIYDLIKTLKAAKIRVSVIGLSAEVRVCTVLARETGGTYHVILDESHYKELLTHHLSPPPASSSSECSLIRMALWEAEVGGS

SEQ ID NO: 19176 - protein, 203 aa, Populus trichocarpa
MTPLENKRTTKSYEDRKNTLKKKTRELAILCDVPVCLICVDPDGTTETWPEEKERVVDVLKAYKANRTVHNVEGEEKVVDKAPRVFETWDPRFDYLPEESLMDVLKILERQSQVVDQVVGKEQTGKKRKIMCDKIKSKTGGDVNDERSQEAGLITRNFLDVVGLNHQTSSYTANYSDISSFLGKNSGSSSNDFLIPVDLELRL

SEQ ID NO: 19177 - protein, 434 aa, Populus trichocarpa
MYCNFMEHGIEYAKQAVKEDDAGNYRKAFQLYMNALEYFQAQLKYEKNPQIEKTIRQKCMGYLRRAEEIRSVLDNGRSMPASNGDASVAARPKTSPKPKDGGRKGKEDPELAKLKEGLDSVIIREKPNVKWSDVAGLENAKLALQEAVILPVKFPQFFTGKRKPWRAFLLYGPPGTGKSYLAKAVATEADSTFFSVSSSDLVSKWMGESEKLVSNLFQMARDNAPSIIFIDEIDSLCGQRGECNESEASRRIKTELLVQMQGIGNDDQKVLVLAATNTPYALDQAIRRRFDKRIYIPLPDLKARQHMFKVHLGDTPHDLTERDFEKLARKTEGFSGSDISVCVKDVLFEPVRKTRDAEYFIKSSDGMWVPCELQRVAVKTTLQELDAQGLASKVLPPHITRADFNKVLARQKPTVSKADLEVHERFTKEFGEEG

SEQ ID NO: 19178 - protein, 245 aa, Populus trichocarpa
MYCNFMEHGIEYAKQAVKEDDAGNYRKAFQLYMNALEYFQAQLKYEKNPQVEKTIRQKCMGYLRRAEEIRSVLDNGRSMPASNGDASVAARPKTSPKPKDGGRKGKEDPELAKLKGGLDSVIIREKPNVKWSDVAGLENAKLALQEAVILPVKFPQFFTGKRKPWRAFLLYGPPGTGKSYLAKAVATEADSTFFSVSSSDLVSKWMGESEKLVSNLFQMARDKAPSIIFIDEIDSLCGQRGECND

SEQ ID NO: 19179 - protein, 159 aa, Populus trichocarpa
MSDEEHHFESKADAGASKTYPQQAGTIRKNGYIVIKNRPCKVVEVSTSKTGKHGHAKCHFVAIDIFNGKKLEDIVPSSHNCDVPHVTRTDYQLIDISEDGFVSLLTENGNTKDDLKLPTDDSLLTQIKDGFGEGKDLVVTVMSSMGEEQICALKDIGPK

SEQ ID NO: 19180 - protein, 377 aa, Populus trichocarpa
MLQALMNLFSLCLKPFGHGRSSSNSDSKLESFVGVSKEGKDGLLWYRDVGRYWSGEFSMAVVQANQVIEDQSQIESGPFGTFVGVYDGHGGPEAARFVCDHLFRHFQAISAETHGVVTSETIQRAFCATEEGFTNLVSELWSSRPQMATVGSCCLVGVIYQQTLFVANLGDSRVVLGKKVGNTGGIAAIQLSTEHNANLEVIRHELKNLHPNDPQIVVLKHGVWRVKGIIQVSRSIGDVYMKHARFNREPINAKFRLPEPMDKSILSANPTIISHPLHPNDSFLVFASDGLWEHLSNEKVVDIVHSNPCAGSAKRLVKAALQEAARKREMRYSDLQKIDKKVRRHFHDDITVIVLFLNHDLISKSKSAVQTPPVSIR

SEQ ID NO: 19181 - protein, 1142 aa, Populus trichocarpa
MASQSQRQSNQRQHQNQAAQSSGTSNMRQHHHATESVSKAIAQYTVDAQLHAVFEQSGGSGKSFDYSQSVRTTSQSVPEEQITAYLSKIQRGGHIQPFGCMIAVDEGSFRVIAYSENAKEMLGLTPQSVPSLDKQEILSDGTDVRTLFRPSSSAMLEKAFGAREITLLNPIWIHSKNSGKPFYAILHRIDVGIVIDLEPARTEDPALSIAGAVQSQKLAVRSISQLQSLPGGDIKLLCDTVVESVRELTGYDRVMVYKFHEDEHGEVVAENKRADLEPYIGLHYPSTDIPQASRFLFKQNRVRMIVDCHATPVRVIQDEALMQPLCLVGSTLRAPHGCHAQYMANMGSIASLAMAVIINGNEEEAIGGRNSTRLWGLVVCHHTSARCIPFPLRYACEFLMQAFGLQLNMELQLASQLSEKHVLRTQTLLCDMLLRDSPTGIVTQSPSIMDLVKCDGAALYYQGQYYPLGVTPTEAQIKDIVEWLLALHGDSTGLSTDSLADAGYPGAASLGNAVCGMAVAYITKRDFLFWFRSHTAKEIKWGGAKHHPEDKDDGQRMHPRSSFKAFLEVVKSRSLLWENAEMDAIHSLQLILRDSFRDVEATNSKAVVHAQLEDTELQGMDELSSVAREMVRLIETATAPIFAVDVDGCINGWNAKVAELTGLSVDKAMGKSLVHDLVYKEYEETVDKLLHRALRGEEDKNVEIKLRTFGSEHQKKALFVVVNACSSKDYMNNIVGVCFVGQDVTGQKVVMDKYVHIQGDYKAIVHSPNPLIPPIFASDENTCCLEWNTAMEKFTGWSRGEVIGKMLVGEVFGSCCQLKGSDALTKFMIALHNAIGGQDTDKLPFSFFDRNGKYVQALLTANKRVNMEGEIVGAFCFLQIASNELQQALKVQRQQEKKCSARMKELAYICQEIRNPLSGLRFTNSLLENTDLTEDQKQFLETSAACEKQILKITRDVDLESIENGLLELEKAEFLFGSVINAVVSQAMLLLRERNLQLLRDIPEEIKTLVVYGDQARIQQVLADFLLNMVRYAPSSAGWVEIHVCPTLKQISDGHTLVHMEFKYALLNSFACLPPELVQDMFHSSRWVTQEGLGLSMCRKILKLMNGEVQYIRESERCYFLVILEVPMPNSVRGITVKSAAD

SEQ ID NO: 19182 - protein, 786 aa, Populus trichocarpa
MEVKEEESSGTPLELFLKIGLDERTARNTIANNKVTNNLTAVIHEAGVTEGCNRTIGNLLYMVATKHPANALIHRPTLLGYIVSAKIKTPAQLEAAFSFLSSTASESFELKEFEEACGVGVEVSEEDIEQTVNEVFKQNKGSILELRYRINVGDLFGHVRKRLPWADPKIVKKLIDAKLYELLGERTAADNEKPSKQKKEKPAKVEDKKVADENPVQPSEDLNPFLIFPNPEENFKVHTEVFFSDRPVLRCCNTKEVLDKHLKRTSGKVYTRFPPEPNGYLHIGHAKAMFVSFGLAKERGGCCYLRYDDTNPEAEKKEYIDHIEEIVEWMGWKPFKITYTSDYFQELYELAVELIRRGHAYVDHQTPEEIKDYREKKMDSPWRDRPIAESLKLFEEMRLGMIEEGKATLRMKQDMQSDNGNMYDLIAYRIKARDKWCIYPSYDYAHCIVDSLEDITHSLCTLEFETRRASYYWLLHVLDLYQPYVWEYSRLNVTNTVMSKRKLNFLVTNKHVDGWDDPRLMTLAGLKRRGVTSTAINAFVRGIGITRSDCSTIRLERLEYHIREELNRTAPRTLVVLQPLKVVVTNLESGLVMDLDAKKWPDASTEDSSAFYKVPFSRVVYIEQSDFRMKDSKDYYGLAPGKSVLLRYAFPIKCTEVVLADDNKSIVEIRAEYDPSKKTKPKGVIHWVAEPSREVDPLSIEVRLFDKLFNSENPAEHEDWLSDVNLQSKVVISGAYAVPSLRDAAMGDRFQFERLGYFVVDKDSTPERLVFNRTVTLRDSYGKSGK

SEQ ID NO: 19183 - protein, 317 aa, Populus trichocarpa
MAVKVAAAFIFMLFLLSTTACQAKLSSAFYDKSCPKAESAIRTAIRTAIARERRMAASLIRLHFHDCFVQGCDASILLDETSSIQSEKTAGGNNNSVRGYEVIDKAKSKVEKICPGVVSCADIIAVAARDASAYVGGPSWAVKLGRRDSTTASPTLAITELPAFSDDLGRLISRFQQKGLTARDMVALSGSHSLGQAQCFTFRDRIHSDNNIDAGFASTRKRRCPLVGSDSTLAPLDLVTPNSFDNNYFKNLMQKKGLLQSDQELFSGGSTDSIVSEYSRNPAKFSSDFASAMIKMGDISPLTGTAGQIRRICSAVN

SEQ ID NO: 19184 - protein, 177 aa, Populus trichocarpa
MEDEEESTNGGPPRKKLRLSKEQSRLLEESFRQHHTLNPRQKEALALQLKLRPRQVEVWFQNRRARSKLKQTEMECEYLKRWFGSLTEQNRRLQREVEELRALKVGPPTVMSPHSCEPLPASTLTMCPSCERVTTTGLDKGSTKTTTTAVATPTTAATLSSKVGTPALQSRQSSAAC

SEQ ID NO: 19185 - protein, 554 aa, Populus trichocarpa
MDKIRRLQNGSDVRGVALQGEKGRTVDLSPPAVEAIAESFGEWVINGLEKEKGRVVENVRVSLGRDPRLSGASLSVAVFSGLVRAGCLAFDMGLATTPACFMSTLLTPFAYDASIMMTASHLPYTRNGLKFFTRRGGLTSPEVEEICGKAARKYANRLAKVSTMLKTPPERVDFMSTYAKHLRNIIKERVNHPFHYDTPLKEFQIIVNAGNGSGGFFTWDVLDKLGAETFGSLHLNPDGMFPNHIPNPEDKIAMALTRAAVLENSADLGIVFDTDVDRSGVVDKEGNPINGDRLIALMSAIVLTEHPGTTIVTDARTSMALTRFIIDRGGQHCLYRVGYRNVIDKGVQLNKNGIETHLMMETSGHGALKENYFLDDGAYMVVKIIIEMVRMKLAGSDEGIGSLIKDLEEPLESVELRMNIISEPRHAKARGIDAIETFRSYVEEGRIEGWELDSCGDCWVADGCLVDSNDDPAAVDAHMYRAKVSDEKLGQHGWIHLRQSIHNPNIAVNMQSMAPGGCLSMTKTLRDKFLVASGMDKILDVTQIDKYARTGLVK

SEQ ID NO: 19186 - protein, 168 aa, Populus trichocarpa
SRSSGTDYIRSSCGVTLYPEICYTSLSRYASAVKQSPSRLARVAIGVSLSRARRLAAYVSNLTRHEDFGGDHRATAAIHDCLSNMGDAVDEMSGSLKQMRKVGAAGLSAESFQFQMSNVQTWMSAALTDEETCTDGFEDVADGAVKTEVCNRVADAKKFTSNALALVN

SEQ ID NO: 19187 - protein, 302 aa, Populus trichocarpa
MAGDKDCGSSKMTIFLRNGRLPPCESLCILTSFSTLHGAKSMVNFRNDGGDTVDMSFFQPHVKEESSDEDYDAHLKPSEKKRRLTAAQVQFLEKSFEAENKLEPERKMQLAKELGLQPRQVAIWFQNRRARFKNKQLERDYDSLRISFDKLKADYDKLLLEKQNLKNELLSLKEKLLSREESMESSEPFDVIHSPDAELEPIPDTVSENVSAIVPMVTPKQEESSAKNDVFNSDSPRSFLEPRDCYRVFESDQPDFSQVEEDNLTRSFLPPPYFPKLYREPPASSRNFEFSAEDQPFWSWIY

SEQ ID NO: 19188 - protein, 432 aa, Populus trichocarpa
MAQILAPSSQWQMRIAKNSAPASPMTAKMWSSLVLKQNKKGTAKSSAKFRVFAVKSENGTINRMEDLLNLDLTPYTNNFIAEYIWIGGSGIDLRSKSRTISKPIEHPSELPKWNYDGSSTGQAPGEDSEVILYPQAIFKDPFRGGNNILVMCDTYTPQGEPIPTNKRHRAAEIFSNKKVVDEVPWFGIEQEYTLLQTNVKWPLGWPVGGYPGPQGPYYCGAGADKSFGRDISDAHYKACLYAGINVSGTNGEVMPGQWEYQVGPSVGIDAGDHIWISRYILERITEQAGVVLSLDPKPIEGDWNGAGCHTNYSTKTMREEGGYEAIKKAILNLSLRHKEHISAYGEGNERRLTGKHETASIDTFSWGVANRGCSIRVGRETEKQGKGYLEDRRPASNMDPYVVTALLAETTILYEPTLEAEALAAQKLSMNV

SEQ ID NO: 19189 - protein, 428 aa, Populus trichocarpa
MGFGRKKASSSAKTFPPREDTPLIAKSTPLSSQSKTFANVFIAIVGAGVLGLPYAFKRTGWLMSLIMLFSVAGLTHYCMMLLVNTRGKLQSFSGGFSKITSFGDVGFTVCGSIGRFVVDVMIVLSQAGFCIGYLIFIANTLANLFNSPSPNGLASQILALSMSAKSWYMWGCFPFQLGLNSIATLTHLAPLSIFADVVDLAAMGVVIVKDVFIMMENRAEVRAFGGLSVFFYGMGVAVYAFEGIGMVLPIESEMREREKFGRILGLSMGLISVIYGAFGVLGYFAFGNDTQDIITANLGPGLISLLVQLGLCINLFFTFPLMMNPVYEILERRFWGGRYCLWLRWVSVLLVTLVALMVPNFADFMSLVGSSVCCGLGFVLPALFHLLVFKEEMSWKGWSIDVGIVALGLVLAVSGTWYALMEIFAVKV

SEQ ID NO: 19190 - protein, 350 aa, Populus trichocarpa
MVSENIAYGNAIQESPVLQPQDHQDQTLKDTPFSPLDGQSSLLSLTLNEIQLKRGKSFGSMNMDEFFVNLWNSDDNQVPSQPNQNVRPDNDHGGVTKQCPNLARQGSFSLPAPLCKKTVDEVLFEIQNEEPQQHNPNSIGADHEPPQRQQTLGEITLEDFLIKAGVVQEAPAGSSQHKKATPIQDRNNACLDMNFGMGHMMGLGYQNLSAGNGFAAYQMFPQGKLGYNVGEVVPNNAKNEKCQSIMELGAQSSKKRMNDGPPEVVVERRQRRMIKNRESAARSRARKQAYTVELELELNQLKEENAKLKQIVEEIEEKRKEEVMRRKSSKMTQEKDDKLRGIRRTVSLAW

SEQ ID NO: 19191 - protein, 160 aa, Populus trichocarpa
MSTSEFKGFTEEQEALVVKSWSAMKKNASELGLKFFLKIFEIAPSAQKLFPFLRDSSVPVEQNPKLKPHAMSVFIMTCESAVQLRKAGKVTVRESSLKKLGAVHFKNGVVDEHYEVTKFALLETIKEAVPEMWSPDMKKAWGEAYDQLVAAIKTEMKPSS

SEQ ID NO: 19192 - protein, 307 aa, Populus trichocarpa
MFMLFFLNTACQAQLSPAFYDSSCPNALSAIGTAIRSAIASDRRMAASLIRLHFHDCFVQGCDASILLDETTSIQSEKTALGNLNSARGYNVIDKAKTEVEKICPGVVSCADIIAVAARDASAYVGGPSYAVKLGRRDSTTASRTLANAELPAFFESLESLISRFQKKGLTARDMVALSGSHTLGQAQCFTFRERIYNHSNIDAGFASTRRRRCPRVGSNATLAPLDLVTPNSFDNNYFKNLMQNKGLLQSDQVLFNGGSTDSIVSEYSRNPARFRSDFGSAMIKMGDIGLLTGSAGQIRRICSAVN

SEQ ID NO: 19193 - protein, 675 aa, Populus trichocarpa
MRIPLGLSYGLRCGESMKRRDIAEEEKDDFSKILHGPKKPLNYFYRKSQIKYSYHGTFTEKPEVDSAARNLVRGQRETINIQYNDGCVDKARAQLVLGIVITRVDKTILVEAMVLRLDHIGFLDRSNNNYSWKSLLLFFIFTVPWLYKIQVLSKIGMDHGAIRTNSIFRTTSDTFMDLNFTDELLVQRYWWENAGGVNFLDPEPSISNDLCDPSQYVPFMGSGHLSINSHHRTCQEETDISLENPPVVYPETEEQVVETITSPVHSEGSQLESGEFVLEFCESWECPKQEPEEEETLQETTDSDNNDLDQYQEREFSDFGQLQQNPEHCTVESAGDSFVPWSHLLGSRKTGKKRQTKTEKTISLQVLRKYFAGSLKDAAKSIGVCPTTLKRMCRQYGISRWPSRKIKKVNHSLKKLQHVVDSVMGAQGLIEIDSFYTAFPELSSSGYFGHNPFSSFQITEYPKESNPKPINHLFSTKGPVSKSQSSSRSQNSGLFICHGKRQLTSTINGLSTGHALAVEDPVEVLKRTRSKSELPSLNKEELDRAKSNETSCQHQNLETQASLPINNGQCLRDGGAFRIKATFGDENIRFSLQPNWGFRDLQREIAKRFEIDDFSRIGLKYLDNDHESILLTCDADLEECKDLLGFSQSRTIKITLYLVSKPNLGSSFSSSRDLF

SEQ ID NO: 19194 - protein, 395 aa, Populus trichocarpa
MNTPVIVDAIRSPMARAKPDGALAQLHPVDLLSQVLEQLVQRNRIDPGAVDDVITGCVSQAGEQAGTPGRLAWLAAGLPAHVPSTTIDRKCGSSQQAVHFAVQAIMSGTQDMVIACGVESMSRVPMGSSRMGQNTTGARFDARFAPGLVGQGVSADLVAARWGLGREELDAYAARSHQRAHAAQSAGHFEREIVGITTPAGLVTADETIRPGTTVQKLGALKAVFQNDELSARFPQIRWHTTAGNASQMTDGASAMLLMSEKRAQQLGLRPRARFVALDVVGDDPLYMLTAPIPATRRVLAKAGMRLEQMDHCEINEAFASVPLAWLKELRELGADPERLNPRGGAIALGHPLGASGIRLMTTMLHALEDSGARYGLQSMCEAGGMANATIIERL

SEQ ID NO: 19195 - protein, 589 aa, Populus trichocarpa
MCGILAVLGCSDDSQAKRVRVLELSRRLKHRGPDWSGLYQCGDFYLAHQRLAIIDPASGDQPLFNEDQAIVVTVNGEIYNHEELRKRLPNHKFRTGSDCDVIAHLYEEYGENFVDMLDGMFSFVLLDTRDNSFIVARDAIGITPLYIGWGLDGSVWISSELKGLNDDCEHFECFPPGHLYSSKSGGLRRWYNPPWFCEAIPSTPYDPLVLRRAFEKAVIKRLMTDVPFGVLLSGGLDSSLVAAVTARHLAGTKAARQWGAQLHSFCVGLENSPDLKAAREVADYLGTVHHEFYFTVQDGIDAIEDVIYHIETYDVTTIRASTPMFLMARKIKALGVKMVISGEGSDEIFGGYLYFHKAPNKEELHRETCRKIKALHQYDCLRANKATSAWGLEARVPFLDKDFINVAMAIDPEWKMIKPGQGHIEKWVLRKAFDDEEHPYLPKHILYRQKEQFSDGVGYSWIDGLKAHAAQHVTDKMMQNAEHIFPHNTPTTKEAYYYRMIFERFFPQNSARLSVPGGASVACSTAKAVEWDAAWSNNLDPSGRAALGVHLSDYDQQAALANAGVVPPKIIDTLPRMLEVSASGVAIHS

SEQ ID NO: 19196 - protein, 99 aa, Populus trichocarpa
MTYEELLDLGDTVGTQSKGLSPELIRLLPTSKCKFGSFFSRKKSGERCVICQMKYKRGDKQTKLMCKHVYHSECIAKWLGINKVCPVCNNEVLGEHSRN

SEQ ID NO: 19197 - protein, 376 aa, Populus trichocarpa
MPAKSEKEDRRLDHSGPSPFQTNIYSQPWWRDVGNSSSLGDTASKLSSVEHLNGSLANAAIQSQVNTGLQKGAMVNKDMQTDVTSQSDESNEQEHHLKHIPSPTTVTMGGHLEPNSQMELVGHSIVLTSHPYTDPQYGGMFASYGAQAMVPQLYGMPHARMPLPLEMEEEPVYVNAKQFHGIMRRRQARAKAELEKKAVKVRKPYLHESRHQHALRRARGCGGRFLNTKKLDNSATNPTSEKGINSVANISKQSYSFSVSECFPTEGSGDLNSSGDLEEGKGSQASSNGHGNGHALSSRYHSSSHDGSFLGQQKETTHGNREKLEALAMFNLGGNLSCAVFLRQFILGFRSLVTWCIHGGESVVYVMDFTLSSDLN

SEQ ID NO: 19198 - protein, 570 aa, Populus trichocarpa
MAEEDVYTKDGTVDYLGNPANRKETGTWRACPFIIGNEFCERLAYYGMSSNLVLYFKHRLNQSSATATRNNLNWGGTCYLTPLIGAFVADAYLGRYWTIASFSTIYVAGMTLLTMSATVHGLRPECYSKDHCHPTGGQTAVTFVALYLIALGTGGIKPCVSSYGADQFDDADETEKKHKSSFFNWFYLSINVGALIAGSVLVWIQDNVSWGWGFGIPAIAMAIAVVSFFSGTKLFRYQKPGGSPLTRICQVLVASFRKQKVEVPADKSLLHETADAESNIKGSRKLDHTEEFSFLDKAAVETEKDDIKGTGDPWNLCTVTQVEELKAIIRLLPIWATGIIFSAVYSQMGNLFVLQGETMDKFVGNSTFEIPSASLSIFDTLSVIFWVPVYDRIIVPVARKFTGHKNGLTQLQRMGIGLFISIFAMVSAAILELKRLQMVRNNNYYELDSVPISIFWQVPQYFLIGCAEVFTFIGQLEFFYEQAPDAMRSMCSALSLTTVALGNYLSSLLVTIVTTISTKNGKAGWIPDNLNYGHIDYFFWLLGMLSVLNLGAFLLISNWYTYKKAIGTLR

SEQ ID NO: 19199 - protein, 210 aa, Populus trichocarpa
MGGDHCLAIGSVNAAARYCREQGKKLLVLWLDAHADANTGSTSPTGNTHGMPVACLCGDGPAPLVSLGGVTPATSPRNIRQIGIRSVDAEEKKRLRELGLTVYDMRYIDENGMRATMEQALAGIDGDTHLHVSFDVDFLDSQIAPGVGTAVRGGPTYREAHLALEMIEDTGALGSIDVVELNPARDVHNQTAELVVELLESLFGKSTLLR

SEQ ID NO: 19200 - protein, 673 aa, Populus trichocarpa
MVLQKRLDYGFNGYQVPPIPRATRSARRRGSFKKKHEENQMCAFDLLAIVAGKLLLDKESAPSSSDTSADEDQRAVINSAVKNEWQDEEKSLKVEACDQGSADKNIYVSDLSHVHRQGCSSKESLVTENGLNLGLASALAKPDCEERSNAEKFGNGQSKSEIGTFASKVEGGSSEYIEFGDCKLEAETKRAVKDEPHKSGMVQSSTVANICNLEDPVVLDAKPPALVSSDSSAKVPLCGNPNSSYPTNQDDVNVVSRDDDENSSGCTHPITTKKFFRPAPRIGDRRIRKILASKYWKVAPRLKDATVSNSDRDLKPVFRKRQNCYRHRRSERIYPFKKRKHFAYSSPSNSDGGMSCEFVSDSSQKGSNEDASVSCSRMRGEFFTRRCLFFSSVKLRIKSFSVPELLIEIPESSTVGSLKRTVMEAVTAILGSGLRVGVLLQGKKVREDNKTLQQTGISRNNQLDALGFCLEPNPSQIPPSLCPGDSPFFLQCDAPQPILRYPHTTGVVHQGICAVPEPHANNLGNYIESDHDSAPSPTDTSMDKSTNSKALVAVPAMNVEALAVVPALRKSKRSEIAQRRIRRPFSVTEVEALVHAVEKLGTGRWRDVKLRAFDNAKHRTYVDLKDKWKTLVHTARISPQQRRGEPVPQELLDRVLAAHAYWSQQQAKQQFKH

SEQ ID NO: 19201 - protein, 446 aa, Populus trichocarpa
MARTLLSSPPFIATSLPSLSRHTLTTNRRFISTRIKLSLHDNIPPIHHHLDSSIDFNSIISRAEGFLYTLADAAVAVDSAASTTSTDTAQKSGGWFGFISDGMEFVLKVLKDGLSAVHVPYAYGFAIILLTVFVKVATLPLTKKQVESTLAMQNLQPKIKAIQQRYAGNQERIQLETSRLYRQAGVNPLAGCFPTLATIPVWIGLYQALSNVANEGVLTEGFFWIPSLGGPTTIAARQSGSGISWLFPFVDGHPPLGWNDTAAYLVLPVLLVVSQYVSMEIMKPPQTDDPTQKNTLLVFKFLPLMIGYFSLSVPSGLSIYWFTNNVLSTAQQVWLRQLGGAKPVVNENASGIITAGRAKRSAAQPGQPGDRFRLKEEEKGKKLSKALQSEDVQALDSASDEDSDEETKDKGEEVLEEAYASSSASKKVSDISRPKRSKRSKRKRAV

SEQ ID NO: 19202 - protein, 236 aa, Populus trichocarpa
MMSIGWENLGTVSGTGVWRATLGISPNLVSNIIVQRTISTLLELPQFLMYHYEPGTGQRFCSLISIQKHLSGETSKSAKPGNKKKIQIDPYIFKSRSLFDLPNGWIVEKKPRKNMECAGIIDKHYFEPETGKRFRSLRSVEKYLTEGKEHIATLEALKAGDNFIPSKSSSSQKEHVSRKKVETSMLDPSSIPAKIKWVLSGPGGIVWNPFMDDSLVPEFIKQKWSETFVFSIIDRL

SEQ ID NO: 19203 - protein, 228 aa, Populus trichocarpa
MMQDETRKGPWTEQEDILLINFVNLFGDRRWDFIAKVSGLNRTGKSCRLRWVNYLHPGLKRGKMTPQEERLVLELHARWGNRWSRIARKLPGRTDNEIKNYWRTHTRKKAQERKSVVSPSLSSSNCSSSSNITTVNSSSPPGTGEASFYDTGGLEQVASAGKNGEAVQGGEKGYSMDDIWRDIENTIEPVCDGFSEEGCNFSYPSLASPSWEYRPDILWSISGEESKM

SEQ ID NO: 19204 - protein, 415 aa, Populus trichocarpa
MDQIDVPYHFLCPISLQLMRDPVTISTGITYDRENIERWLFSCKNNTCPVTKQELFGKDLTPNHTLRRLIQAWCTLNASFGIERIPTPKPPIERAQIAKLLNDAKKFPHLQLKSLRRLRSITLESERNRICLEEAGAVDFLATILKNGDSTSVDIASDDNESEFSRASDEALNILYHLKISQRKLKNLITNDGDQFLESLLQILKHSSYQSRAYATMLLKSVFEVADPMHLISIRPEMFVELVRVLNDQISQQSSKAALKLLVEVCPWGRNRIKAVEGSAVSVLIELLLDKSEKRACELVLAVLDLLCGCAEGRAELLKHGAGLAVVSKKILRVSHVASDKAVRILYSICRFSATSRVLQEMLQVGVVAKLCLVLQVDSSFKSKERAREILKLHSRVWRNSACVPAYLMSSYPSS

SEQ ID NO: 19205 - protein, 72 aa, Populus trichocarpa
MRHLYVVVDGSRTMEDQDLKPNRLTCTLKLLEYFVEEYFDQNPISQIGIIVTKSKRAEKLTELSGMHKITFT

SEQ ID NO: 19206 - protein, 903 aa, Populus trichocarpa
MDDGNGVFAPDSSFGNFSDAAMDLDFVDELLYDGCCFETVDEFGFLEAGTSASNDLNDPKQYLPFFESNSCNLNVNPCQENYQVATEKNFQSGGFLVEKNELGRRLWIAPTNNARSSTGVRERLMHAIGQLKQCTKDRDLLIQIWVPIKKEGKHVLTTFGQPYLLNPKSQSLASYRNVSKKFQFPAEEDSKELVGLPGRVFLRKLPEWTPDVSYFSWVEYPRKNHAKQFNIRGSFAVPVFEQGSRTCLGVIEVVTTTQDVSYRSELESVCKALEAVDLRSPKDFRPSSLKACKEFCQAAVPEISKILESVCKTHRLPLALTWAPCFRQGKGGCRHFDENYSNCICTVNSACFVAETDNFGFYVACSEQYLSFGQGIVGRAFTTRKQCFSTDVAAFSKTDYPLSHHAKMFELHAAIAIPVQSTYAGPVDFVLEFFFPKDCCNTEEQKRMWDILPITIKQACWSLHVVMDKELEETVNKKMKFASLFKESSEAESSWIARVAEAQQKGKGVCVSWDHRKEENKEEFKVTSHWGKTQDELYHKQAFPEFGKFQQNSVPKGSIESTTDAASAEHHSVGSRKSGDKRRTKTEKTISLQVLRQYFAGSLKDAAKSIGVCPTTLKRICRKHGITRWPSRKIKKVGHSLKKLQLVIDSVQGAEGAIQIGSFYTTFPELTSPNFSANGGFPSSKANDDSNKSNHRPENGIFSAAASASKSPSSSSSQSSGSSICFSGYPLLVEDPGGVLKRTHSDAALHALNRDKSEPLIRSQSFKTFGDLPNPETLPPLPKSSSQIIRDRSGFRVKATFGADKIRFTLQPNWGFRDLQQEIARRFNIDDICRIDLKYLDDDQEWVLLTCDADLEECKDVYKLSESRTIKMSLNQPSQPHLGSSLGSVGPNLVSLLGGGGPF

SEQ ID NO: 19207 - protein, 906 aa, Populus trichocarpa
MDDHRSSTPNSTFETFSGNVTNWDFMDEILYQGWFEKDGGFNFLQQGRLSTSNVLHDPSLYIPVTGTPNWNSVETSTPFAHPASCRVEAAGLGCEWQMVQRVNPGTSCSVKERVMQAVGYLKNCIQDRDILIQIWLPMEKEGKRVLATIDQPYFVDPSCKSLASYRKVSTAYHFQAEEDAKCSVGFPGRVFLEKLPEWTPDVRLFRSEEYPHRDHAVQHNIRGSLALPLFTQGSETCLGIVEIATTIQKISYRPELQDICKVLQAVDLRSSEDFCSPGVEITIVFLLSQTCNRLNRAAVPEISDIVKSVCKTYSLPLALTWALCSRQGKSGRQQFPERFSSCISTVDSACFLADRGFSGFHMASFEQYLFLGQGIVGRAFTTQKQCFTNDITSFSKKDYPLAHHAKIFGLHAAIAIPLRSISTGLVEFVLEFFLPKDCQDTEEQKEMWDLLPISIKQVCWSLQVVMDKELDQGENQSFVSSPSKEPPRDESSWIAWMVEAQKKGKSCCITWDYPKEPKEEFKMITPWDDSEEELDNKQVISELGQLQQNPRPNSCIEGDGVSSAFGGCRSLGSRKTGKKRRTKTAIQTISLEVLRRYFAGSLKDASQSLGVCSTTLKRICRQHGIKRWPSRKINKVGHSLRKLQQVIDTVQGAKGAVQIESFYSAFPELSSPKISSHAPYSSLRSDNSKHLDSPPDDSSPSGTASKSHSSPCSGKSCSSNCCSARAQQHDATTITVSSNGNGALLAETSNGILKRTCSSELAEFHSMNNHGDPDFLVRSQIHKTRTVSGHIHQSELGSPRFAQSLREGGVFGVKAIFGVEKVRLGLQPNWGLRDLQQEIGKRFEIDDFTDIGLNYMDDNGEWVRLTCDGDLEECKEIHIFSQRNTMKISCHDPNLVSMTSNTGATL

SEQ ID NO: 19208 - protein, 892 aa, Populus trichocarpa
HGSSTPNSTFDIFSGNVTNWDFMDEILYQGWFEKDGGFNFLQQGLSTSNVLHDPSLYFPVTGTTNWNSVETSTPFSHPASCRVEAAGLGFEWQMVQRVNPGTSCSVKERVMQAVGYLKNCIQDRDILIQIWLPMEKEGKRVLATIDQPYFVDPSCKSLASYRKVSTAYHFQAEEDAKCSVGFPGRVFLEKLPEWTPDVRLFRSEEYPHRDHAVQHNIRGSLALPLFKQGSETCLGIVEIATTIQKISYRSELQDICKVLQAVDLRSSEDFCSPGVEITIVFLLSQTCNRLNRAAVPEISDIVKSVCKTYSLPLALTWALCSRQGKIGRQQFPERFSSCISTVDSACFLADRGFSGFHMASFEQYLFLGQGIVGRAFTTQKQCFTNDITSFSKKDYPLAHHAKIFGLHAAIAIPLRSISTGLVEFVVELFLPKDCQETEEQKKMWDLLPIVLKQVCRSLQIVMDKELHIGENKSFESSPSKEAPPDESSWIASMLEAQKKGKSCIVTWDYPKEPEEEFKTIIHWDDSAVEIDQKQVISELGRLQQHSRPNINIEGDGVSFAFGGRRSLGSTKAGKKRRTKTEIQTISLGVLRQYFAGSLNDAAQSIGVCPTTLKRICRQHGIKRWPSRKIKKVDHSLRKLQQVIDTVQGAKGAVQIESFYPAFPELSSPKLSNHTSYSSFRRIDNSKHLDSPPDDSCPSGTASKSHSSPCSRSSCSSNCCSGRAQQHAATTITGSSNGNGSLLAETSNGIFKRTCSNELAELHSLNNQGGPDFLVRSQIHKTRTVSDHIHQNELESPPRFGPSLREGGVFGVKAIYGVEKVRLGLQPKWGLRDLQQEIGKRFEIDDFTCIGLKYMDDDGEWVLLTCDSDLEECKEIHRFSQTNTIKISLHKYS

SEQ ID NO: 19209 - protein, 491 aa, Populus trichocarpa
MAIKKAYKIDRVNWQGDPCLPLTTWSGLQCNNDNPPRIISLNLSSSQLSGNIDVSLLSLTAIQSLDLSNNELTGTVPEAFAQLPNLTSIYLSGNKLTGAVPHGLKEKSNNGQLQLSLEGNLDLCKMDTCEKKKFSVSVIASVISVSMLLLLSIITIFWRLKGVGLSRKELSLKSKNQPFTYTEIVSITNNFQTIIGEGGFGKVYLGNLKDGRQVAVKLLSQSSRQGYKEFLAEVQLLMIVHHRNLVSLIGYCNEHANMALVYEYMANGNLKEQLLENSTNMLKWRERLQIAVDTAQGLEYLHNGCRPPIVHRDLKSSNILLTKNLHAKIADFGLSKAFATEGDSHVITVPAGTPGYIDPEFRASGNLNKKSDVYSFGILLCELITGQPPLIRGHQGHTHILQWVSPLIEIGDIQSIIDPRLQGEFNTNCAWKALEIALSCVPPTSTQRPDMSDILGELKECLAMEMSSEMSMRGSVEMSLVLGTDMAPNLR

SEQ ID NO: 19210 - protein, 431 aa, Populus trichocarpa
MYSNFKEQAIEYVKQAVQEDNAGNYSKAFPLYMNALEYFKTHLKYEKNPKIREAITQKFTEYLRRAEEIRTVLDEGGPGPNSNGDAAVATRAKTKPKDGEDGDDPEKDKLRAGLNSAIVREKPNVKWNDVAGLESAKQALQEAVILPVKFPQFFTGKRRPWRAFLLYGPPGTGKSYLAKAVATEAESTFFSVSSSDLVSKWMGESEKLVSNLFQMARESAPSIIFVDEIDSLCGQRGEGNESEASRRIKTELLVQMQGVGTTDQKVLVLAATNTPYALDQAIRRRFDKRIYIPLPDLKARQHMFKVHLGDTPHNLTESDFESLARRTEGFSGSDISVCVKDVLFEPVRKTQDAMFFIHTSDDMWVPCGPKQPGAVQISMQDLAAQGLAEKILPPPIMKTDFDKVLARQKPTVSKADLDVHERFTKEFGEEG

SEQ ID NO: 19211 - protein, 66 aa, Populus trichocarpa
GKVKWFSDQKGFGFITPDDGGDDLFVHQSSIKSEGYRSLGDGEEVEFEIENSDDGRTKAANVTAPG

SEQ ID NO: 19212 - protein, 333 aa, Populus trichocarpa
MNLDNIDALNSSGTDEKNGNENREDLDSRASGTKTNGGDSSDNEAESSVNESGGSVPRGGFSSSTEKREGIKRSAGGDIAPTSRHYRSVSMDSFMGKLNFGDESPKLPPSPGTRPGQLSPTNSMDGNAFSLEFGNGEFSGAELKKIMANEKLAEIASTDPKRAKRILANRQSAARSKERKMRYISELEHKVQTLQTEATTLSAQLTLLQRDSVGLTSQNNELKFRLQAMEQQAQLRDVNEALNGEVRRLKIATAEQGGDSDPSKGLVQQQLSVNPQMFMQQPRPSQLNRQQLQQQQQPSASQINMHQLQQQQQSSQPQPQQNGSTTLKSDSNQ

SEQ ID NO: 19213 - protein, 543 aa, Populus trichocarpa
KPTVLVAEKLGEAGINLLKDFANVDCSYNLSPDELCTKISLCDALIVRSGTKVSREVFESSGGRLKVVGRAGVGIDNVDLAAATEHGCLVVNAPTANTIAAAEHGIALLAAMARNVAQADASVKAGKWQRNKYVGVSLVGKTLAVMGFGKVGSEVARRAKGLGMHVIAHDPYAPADRARAIGVELVSFDEALATADFISLHMPLTPATAKILNDETFVKMKKGVRIVNVARGGVIDEDALVRALDAGIVAQAALDVFTVEPPPQDSKLVQHERVTVTPHLGASTMEAQEGVAIEIAEAVVGALKGELASTAVNAPMVPAEVLTELKPFVELAEKLGRLAVQLVSGGSGVKDVKVTYASARAPDDLDTRVLRAMITKGLIEPISSVFVNLVNADFSAKQRGLRISEERILLDGSPESPLDFIQVQIANVESKFASAISETGEIKVEGRVKDGIPHLTRVGSFEVDVSLEGSIILCRQVDQPGMIGKVGSVLGGQNVNVSFMSVGRIAPRKQAVMAIGVDEQPSKETLKKIGDIPAVEEFVFLKL

SEQ ID NO: 19214 - protein, 596 aa, Populus trichocarpa
MAVDNALSSPLGPPACEKDAKALQFLEEMTRNADSVQEDVLAKILTQNSEVEYLKRFNLDGAIDRETFKSKIPMIRYEDLQPEIQRIANGDRSSILSAHPISEFLTSSGTSAGERKLMPTIKQELDRRQLLYSLLMPVMNLYVPGLDKGKGLYFLFVKSETRTPGGLLARPVLTSYYKSDHFKTRPYDPYNVYTSPNEAILCADSFQSMYTQMLCGLLEREQVLRVGAVFASGLLRAIRFLQLHWRELSDDIESGMLNKKITDPTVKDCMVNILKPNPKLAEFVRMECGKENWEGIITRIWPNTKYLDVIVTGAMAQYIPTLDYYSGGLPKACTMYASSECYFGLNLNPMCKPSEVCYTIMPNMAYFEFLPHEPAGISQDSTPKLVDLADVELGKEYELVITTYAGLYRYRVGDILRVTGFHNSAPQFHFVRRKNVLLSIDSDKTDEAELQTAVENASQLLREFNTSVVEYTSHADTKTIPGHYVIYWELLVKDSANSPGDEVLNQCCLAMEESLNSVYRQGRVADNSIGPLEIRVVKNGTFEELMDYAISRGASINQYKVPRCVNFTPIMELLDSRVVSKHFSPALPRWAPERRR

SEQ ID NO: 19215 - protein, 856 aa, Populus trichocarpa
QNSEGFISIDCGAEEDYLDRNTGISYKTDKDFISTGKNMIVAPEYSNRKLVDSLRTFPEGKRNCYTLKPREGKNQNYYVRAFIYYGNYDSKNQTQMFDLYVGVNYWATVDINVEDMFATYYGIIHYSVTDTINVCLVNTGSGVPFINGLDLRFMNDSPYRSMNGSLLPRVQADLGGLDPTKTSMRYKDDVYDRIWRLDVNLNDSVSISTETNIDIQGSDNPCRLPVEVLRTAVQPRNGLNSLSYNYTRYTENSEFHVFFHFAEIEQIAPGEIREFTITLNGLNYGLFTLEYLKPLTIGPYKLQDQVRFSIDATLRSDLPPILNAFEIFKLGPLPDSPTNQTDVDAIMAIKKAYKIDRVDWQGDPCLPLPTWSGLQCKNDNPPRIISLNLSSSQLSGNIAVSLLNLRAIQSLDLSNNELTGTVPEAFAQLPYLTILYLSGNKLTGAVPHSLKEKSSSGQLQLSLEGNPDLCKMATCEKKPRSFPVPVIASVIPFHTLVSLLKYWNIYRFIKKMKFSFAGRLNVSLSSSVGLSRKELSLKSKNQPFTYTEIVSITNNFQTIIGEGGFGRVYLGNLKDGHQVAVKLLSQSSRQGCKEFFGGGNKLVQLLMIVHHKNLVSLVGYCNEHENMALVYEYMANGNLKEQFTNMLNWRERLQIAVDTTQGLEYLHNGCRPPIVHRDLKSSNILLTENLQAKIADFGLSKAFATEGDSHVITEPAGTNGYIDPEFRASGNLNKKSDVYSFGILLCELITGQPPLIRGHQGHTHILQWVSPLVERGDIQSIIDPRLQGEFNTNCAWKALEIALSCVPPTSRQRPDMSDILGELKECLAMEMSSKMSMHDSVEMNLVLDTDMTPNLR

SEQ ID NO: 19216 - protein, 214 aa, Populus trichocarpa
MSDTATPAQFPGTDQPVPNQDDALRQNGSVIDPNTRTTAVETLTRPNNKGNQQPVTPVRAKRRSSETTIETSWLPPGWVVEDRIRTSGATAGTVDKYYIDPASGRKFRSKKDVQYYLETGTLKKKGKLTENSDADTNSAGNLKVDKNKSGANTSFALNFDSFNVPDRTEWVLANAKEDTWIPFIDGKKVPLYDKEQWDFAFASLTTSSHGKRKR

SEQ ID NO: 19217 - protein, 208 aa, Populus trichocarpa
MDFCIYSSKGGSGSNIEADQAERASSRASDEEENGSARKKLRLSKEQSSFLEESFKEHNTLTPKQKLALAKELNLRPRQVEVWFQNRRARTKLKQTEVDCEYLKRCCETLTEENRRLHKELQELRALKTSNPYYMQLPATTLTMCPSCERVAAAATSATATTATTTTTNTQNNTTDPTSNTTGLSLSSSRPRFYPFSHTQTHPHQPKA

SEQ ID NO: 19218 - protein, 410 aa, Populus trichocarpa
MDEIEVPEYFLCPISLQILKDPVTTITGITYERESIEQWLKAAKSNPTCPVTKQSLPRDSELTPNHTLRRLIQSWCTVNAIYGVDRIPTPKSPIKKSQIFRLIKDLDAPDDHLRTKALRRMEALAKENERNRTCMVEAGVTKAAVLFIIKCFKEGKTAGLEEVLRILYLIWNPSQEIKLLVRENQDFIDSLTWILRCDQINNHVDVKSHAMLLLHKTTEIVCQKLLESLKVDFFKEIITRVLRKRISKQAVKSSLLVLTEVCHWGRNRMKIVEANAVFELIELELEKPEKNITELIFNILAQLCSCADGREQFLKHAGSIAMISKRVLRVSPATDDRALHILDSISKFSASDEAALEMLRVGAVSKLCMVIQADCAPYLKKKARGILRLHSHMWNNSPCIAVYLLTRYPG

SEQ ID NO: 19219 - protein, 186 aa, Populus trichocarpa
MDPSKPGASALEIDTKPQPAYPPPETGIPVGHASQYINIPVGHATLYINENPQHPHHHQQRQHGQQARWSSGLCDCCSDVPSCCLTYWCPCITFGRIAEITDKGTTPCAVSGAIYGLLLCFTCCSCLYSCLYRSKLRTQYMLEESRCNDFLVHCCCESCALCQEYRELKHRGFDMASGIYFTLIFL

SEQ ID NO: 19220 - protein, 218 aa, Populus trichocarpa
MDIGESNNKYPHDHKKQLLDDDDDDDDDDDDHQVEGTSATATSSSSSSWRIRRSTGSTSDNLISHHKNKLVDHEDSDEDLFTVPDVEARPPAEAAAAAAGNNTTTYNNKNINSNNPEVQSAAAAPAATGSNKRHRGRNPVDKEYRRLKRLLRNRVSAQQARERKKVYVNDLESRAKELQEINTKLEEKISTLTNENTMLRKVLMNTRPKVDESMEQKQ

SEQ ID NO: 19221 - protein, 571 aa, Populus trichocarpa
MAISNDGSNAGKKKFAIIGVSSIILVAMVVAVAVGIGGSPGDSKQESSPKGQISTTSKSIKAICQPTDYRETCEESLSKAAGNTTDPSKLVQAGFKVTIEALQNAINRSTTLKELAKDPMASQALDNCRELMDDAIAELEHSFDLIESFQASQFDEYVNNLKVWLSATITYQRTCLDGFENTTGSAGEKMKELLMASSQLTSNGLAMVDGVTSILKDLNIPGLTSRRLLEADDEFPSWVNGGKRMLLLKETPATIKADAIVAQDGSGQYKTIAEAIEKIPKKKNETFVIYIKEGVYKEQVSLARSHTHVLMIGDGPTKTKITGNLNYANGVQTFKTATVSISGDHFMAKDIGFENSAGAIGHQAVALRVQADMSVFYNCQIDGYQDTLYAHTKRQFYRDCTITGTIDFIFGDAIAVFQNCKLVVRKPLDNQQCIVTAQGRNETREPTGFVIQNCTITADPQYFPVRLQNKAYLGRPWRELSRTIVMQSHIDDLIAPEGWLPWLGSFGLNTLFYSEYNNKGQGAVETNRVKWAGIKKLTPEAADGYTAAKFIQGDEWIPQTGVPYTAGMISA

SEQ ID NO: 19222 - protein, 432 aa, Populus trichocarpa
MAQILAPSSQWQMRIAKNSAPACPMTAKMWSSLVLKQNKKGIAKSSAKFRVFALKSENSTINRMEDLLNLDLTPYTDKFIAEYIWIGGSGIDLRSKSRTISKPIEHPSELPKWNYDGSSTGQAPGEDSEVILYPQAIFKDPFRGGNNILVMCDTYTPQGEPIPTNKRHRAAEIFSNKKVIDEVPWFGIEQEYTLLQTNVKWPLGWPVGGYPGPQGPYYCGAGADKSFGRDISDAHYKACMYAGINISGTNGEVMPGQWEYQVGPSVGIDAGDHIWISRYILERITEQAGVVLSLDPKPIEGDWNGAGCHTNYSTKTMREEGGFEAIKKAILNLSLRHKEHISAYGEGNERRLTGKHETASIDTFSWGVANRGCSIRVGRETEKQGKGYLEDRRPASNMDPYIVTSLLAETTILYEPTLEAEALAAQKLSMNV

SEQ ID NO: 19223 - protein, 114 aa, Populus trichocarpa
MQWEYQVGPSVGIDAGDHIWISRYILERITEQAGVVLSLDPKPIEGDWNGAGCHTNYSTKTMREEGGFEAIKKAILNLSLRHKEHISAYGEGNERRLTGKHETASIDTFSWVCS

SEQ ID NO: 19224 - protein, 216 aa, Populus trichocarpa
MAQILAPSSQWQMRIAKNSAPACPMTAKMWSSLVLKQNKKGIAKSSAKFRVFALKSENSTINRMEDLLNLDLTPYTDKFIAEYIWIGGSGIDLRSKSRTISKPIEHPSELPKWNYDGSSTGQAPGEDSEVILYPQAIFKDPFRGGNNILVMCDTYTPQGEPIPTNKRHRAAEIFSNKKVIDEVPWFGIEQEYTLLQTNVKWPLGWPVGGYPGPQVI

SEQ ID NO: 19225 - protein, 261 aa, Populus trichocarpa
MSLGVMAGQLRWGGLIEEGWRKGPWTAEEDRLLVEYVRLHGEGRWNSVARLAGLKRNGKSCRLRWVNYLRPDLKRGQITPHEERIIVELHARWGNRWSTIARSLPGRTDNEIKNYWRTHFKKKAKLSPDNSDKARTHLLKRQQFQQQQQQLQQQQQQIQHQQLLQLNQLDMKMIISLLDENENKAPHTPQMSQEMAPHAVYPNTTEEHGLLYNMFNASVPEASNEDILWDGLWNLDDVHGNFGVACATSRASMHNLVSPFC

SEQ ID NO: 19226 - protein, 498 aa, Populus trichocarpa
MTCSAGDLAQLLGSNVTNSTGAADFICSQFNTAADNFSATQYAVDNTYLLFSAYLVFSMQLGFAMLCAGSVRAKNTMNIMLTNVLDAAAGGLFYYLFGFAFAFGTPSNGFIGKHNFGLKNFPSSSFDYSYFLYQWAFAIAAAGITSGSIAERTQFVAYLIYSSFLTGFVYPVVSHWFWSGDGWASATRTDGDLLFGTGVIDFAGSGVVHMVGGIAGLWGALIEGPRIGRFDHSGKAIALRGHSASLVVLGTFLLWFGWYGFNPGSFTKILSAYPAGGYYGQWSAIGRTAVTTTLAGCTAALTTLFGKRILSGHWNVTDVCNGLLGGFAAITAGCSVVEPWAAIICGFVASLVLIGCNKLAEILKFDDPLEAAQLHGGCGTWGVIFTALFATEKYVREVYPNKPNRPYGLFMGGGGKLLGAHLIQILVIIGWVSATMGPLFFVLRKLKLLRISSEDEMAGMDMTRHGGFAYIYHDDESNKHGFQLKRVEPTSRTPNANV

SEQ ID NO: 19227 - protein, 934 aa, Populus trichocarpa
MASYSHFLLLYLFLMSSVICQVTEFISIDCGGTSNYTDPITGLAWVSDNGAIMNYGKSAEVEIPNGNMQYRRRRDFPIDSKKYCYTLGTKERRRYLVRATFQYGILGNGDAYPKFDLYLDATKWSTVVVLDASRVYVKEMIIRAPSSSIDVCICCASTGSPFISTLELRPLNLSMYATDFEDNFFLEVAARVNFGALSKDVIRYPDDPYDRIWDSDLEKRQNYLVGVAPGTVRINTSKYIDTRTREYPPVKVMQTAVVGTQGILSYRLNLDDFPANARAYAYFAEIEDLGANETRKFKLQQPYFPDYSNAVVNIAENANGSHTLYEPSYMNVTLDFVLSFSFVKTRDSTQGPLLNAIEISKYLKIEPRTDSQDVTVLNALRSLSAESAWTNEQGDPCVPAHWDWVNCTSTTPPRITKIALSGKNLKGEIPPEINNMETLTELWLDGNFLTGPIPSISNLVNLKIVHLENNKLSGQLPKYLGSLPDLQELYIQNNYFSGEIPSGLLTGKVIINYEHNPGLHKEAGKKKHSKLILGVSIGILAALLVVLIGSLLFLRNLQRKTSHQKTAVQGSSLRVSAKPSTAYSVSRGWHMMDEGVSYYIPLSEIEEATKNFSKKIGRGSFGTVYYGQMKEGKEVAVKIMGDSTTHMTQQFVTEVALLSRIHHRNLVPLIGYCEEENQRILVYEYMHNGTLRDHIHGSVNQKRLDWLARLQIAEDSAKGLEYLHTGCNPSIIHRDVKTSNILLDINMRAKVSDFGLSRQAEEDLTHVSSVARGTVGYLDPEYYANQQLTEKSDVYSFGVVLLELLSGKKPVSTEDFGAEMNIVHWARALIRKGDAMSIVDPVLIGNVKIESIWRIAEVAIQCVEQRAVSRPRMQEIILAIQEANKIEKGTYGSQKLPSGSSKAQSSRKTLLTSFLEIESQSPDLSNGCLVPAAR

SEQ ID NO: 19228 - protein, 175 aa, Populus trichocarpa
MNLNMKLFGKDTVFQTVSSSGKKKLKENQAMPLSNFVDSQISDGPKGIFDAVKMLRLSRAVILKLMDSHAAPSRLDGFFLRLRLGKWEQGLGGTGYYVACITGVESESSTQKSKNSIAVNVGGIKYLVESQCISNHDFTEDELMAWWRATLKGGGNIPSEEDLRMKAKEMKMLGV

SEQ ID NO: 19229 - protein, 212 aa, Populus trichocarpa
MPTQMQRPLLLLPFFLTSLLLYCQPISTVASPDPTFSPSNGTDYIRSGCGATLYPEICYASLSRYASAVQNSPGRLARVAIKVSLLRTSHMAAYVSNLSRQSDFGADNRAAAALHDCFSNLGDAVDEIRGSLKQMRQVGAAGPSTESFQFQMGNVQTWMSAALTDEDTCTDGFEDVGDGEVKTEVCNRAADVKKLTSNALALVNSYAATGTP

SEQ ID NO: 19230 - protein, 218 aa, Populus trichocarpa
MAVSRSSSSSLELTMSMPGVCAVKDFDINQVPSGAAEEEWISAGMEDEEESTDGAPPRKKLRLSKEQSRLLEESFRQHHSLNPRQKEALALQLKLRPRQVEVWFQNRRARSKLKQTEMECEYLKRWFGSLTEQNRRLQREVEELRALKVGPPTVISPHSREPLPASTLTMCPRCERVTTTGVDKGSTKTTRTAVANPTIAATLSSENGAPALQSRQSC

SEQ ID NO: 19231 - protein, 1146 aa, Populus trichocarpa
MASQSQRQSNQPVHNQAQSSGTSNMRQHHHATESVSKAIAQYTVDAQLHAVFEQSGGTGRSFDYSKSVRTTNQSVPEQQITAYLSKIQRGGHIQPFGCMIAADEQSFRVIAYSENAKDMLGLTPQSVPSLEKQEILFVGADVRILFRPSSAVLLEKAFGAREITLLNPIWIHSKNSGKPFYAILHRIDVGIVIDLEPARTEDPALSIAGAVQSQKLAVRAISQLQSLPGGDIKLLCDTVVDSVRELTGYDRVMVYKFHEDEHGEVVAENKRVDLEPYIGLHYPSTDIPQASRFLFKQNRVRMIVDCHAIPVRVIQDEALMQPLCLVGSTLRAPHGCHAQYMENMGSIASLAMAVIIYGNDEEAIGGRNSMRLWGLVVCHHTSARCIPFPLRYACEFLMQAFGLQLNMELQLASQLLEKHVLRTQTLLCDMLLRDSPTGIVTQSPSIMDLVKCDGAALYYQGQYYPLGVTPTETQIKDIVEWLLTLHGDPTGLSTDSLADAGYPGAAFLGDAVCGMAVAYIAERDFLFWFRSHTAKEVKWGGAKHHPEDKDDGQRMHPRSSFKAFLEVVKSRSLPWENAEMDAIHSLQLILRDSFRDAEATNSKAVVHTQLKDMELQGMDELSSVAREMVRLIETATAPIFAVDVDGRINGWNAKVAELTGLSVEEAMGKSLVHDLVYKEYEEIVDKLIHRAVKGEEDKNVEIKLRTFCSEHQKKAVFVVVNACSSKDYMDNIVGVCFVGQDITGQKVVMDKYVLIQGDYKAIVHSPNPSIPPIFASDENTCCLEWNTAMEKLTGWSRGEVVGKMLVGEVFGSCCRLKGPDALTKFMIALHNAIGGIDTDKLPFSFFDRNEKNVQTLLTANKRVNMEGDIIGAFCFLQIASPELQQTLKVQKQQEKKSFARMKELAYICQEIKNPLSGIHFTNSLLENTDLTEDQQQFLETSAACEKQILKIIRDIDLESIENGSLELEKAEFLLGSVINAVVSQAMLLLRERNLQLLRDIPEEIKTLAVYGDQARIQQVLADFLLNMVRYAPSSAGWVEIHVCPTLKQISDGHTLVHTEFKYLERVLQTRMLGLQHPLRSFLNFKLTLVMLHREGMVPKIQFQGLSVCQGRLIWLSYPENTTVTLYPLTIWFLLLYRRQSRSITHT

SEQ ID NO: 19232 - protein, 371 aa, Populus trichocarpa
MNLLSLCFRPFGQGSSSNSGTKFQSFVGISKEGKDGLLWYRDIGRYGSGEFSMAVVQANQVLEDQSQIESGPFGTFVGVYDGHGGPEAARFVCDHLFRHFQAETQGVVTSETIQRAFCLTEEGFTNFVSELWSTRPQMATVGSCCLVGVICQQTLFVANLGDSRVVLGKKVGNTGGIAAIQLSTEHNANLEAIRHELEDLHPNDSQIAVLKRGVWKVKGIIQVSRSIGDVYMKHARFNREPIDAKFRLPEPMDMPILSANPTILSHPLHPNDSFLVFASDGLWEQLSNEKVVDIVHSNPRAGSAKRLVKAALQEAARKRETRYSDLQKIDKKVRRHFHDDITVIVLFLNHDLISKGAVQTPPVSIRSALEH

SEQ ID NO: 19233 - protein, 159 aa, Populus trichocarpa
MSDEEQHFESKADAGASKTYPQQAGTIRKSGYIVIKNRPCKVVEVSTSKTGKHGHAKCHFVAIDIFNGKKLEDIVPSSHNCDVPHVTRTDYQLIDISEDGFVSLLTENGNTKDDLRLPTDESLLSQIKDGFGDGKDLVVTVMSSMGEEQICALKDVGPK

SEQ ID NO: 19234 - protein, 305 aa, Populus trichocarpa
AQLEEDEQLAKASQESLSLESPPRARYDGGNLVPPYPFSSGYRICAGCNTEIGHGQFLSCMGGVWHPDCFCCNACNLPITDYEFSMSGNRPYHKSCYRKQHHPRCDVCNKFIPTNSAGLIEYRAHPFWLQKYCPSHERDMTPRCCSCERMEPTDTRYISLDDGRKLCLECLDSAIMDTHECQPLYFEIREFYEGLNMKVEQEIPLLLVERPALNEAMEGEKNGHHHLPETRGLCLSEKQTVPTVLRWPRIGAGNRFIDIRIEPYRLSRRCEVTAILILYGLPRLLTGSILAHEMMHAWLRLKGLP

SEQ ID NO: 19235 - protein, 855 aa, Populus trichocarpa
QNSEGFISIDCGAEEDYLDGDTGITYKTDKDFISTGKNKVVAPEHNLTTLYYGNMANSLRTFPEGKRNCYTLKPRQGKNQNYYVRAFFYYGNYDSKNQTQIKFDLYIGVNHWTTVVDMQWTYYEIIHYSVTDTIYVCLVNTGFGVPFINGLDLRFMNDSPYRSMNGSLIPKVLADLGGLDPTLGAMRYKDDVYDRIWRLDVNLNDSVSNSTEANIDIQGSDDPCRLPVEVLRTAVQPRNGHNSLSYSYTLRHRENFTPEFLVFFHFAEIEQIAPGERREFTITLNGLNYGPFTLEYLKPLTIGPYKLQVPEDQVRFSIDATLRSDLPPILNAFEIFKLWPLPDSPTNQTDVDAIMAIKEAYKIDRVDWQGDPCLPLTTWTGLLCNDDNPPRIISLNLSSSQLSGNIAVSLLNLTAIKSLDLSNNELTGTVLEAFAQLPHLTILDLSGNKLTGAIPHSLKEKSNSRQLQLRFGYHLQRLQLICMLIKQPFNSFGSSLTSFLTYEVNTSILYVSTVVFPFIFNIYIIHIIKELSLKSKNQPFTYTELVSITNNFQTIIGEGGFGKVYLGNLKDGRQVAVKLLSQSSRQGYKEFLAEVQLLMIVHHKNLVPLIGYCNEHENMALVYEYMANGNLKEQLLVPELFFLHFCSANFGGLIGIIELAGLEYLHNGCRPPIVHRDLKSSNILLTENLQAKIADFGLSKAFATEGDSYVITVPAGTPGYIDPEFRASGNLNKKSDVYSFGILLCELITGQPPLIKGHQGHTHILQWVSPLVERGDIQSIIDPRLQGEFSTNCAWKALEIALSCVPLTSRQRPDMSDILGELKECLAMEMSSEMIMRGSVEMSLVLGTDMAPNLR

SEQ ID NO: 19236 - protein, 424 aa, Populus trichocarpa
TKTKGLRGKLNKVVLAYSGGLDTSVIVPWLRENYGCEVVCFTADVGQGVGELEGLEQKAKASGACQLVVKDLQEEFVRDFIFPCLRAGAIYERKYLLGTSMARPVIAKAMVDVAKEVGADAVAHGCTGKGNDQACLTNRSNLTNTRAFPSSVRFELTFFALNPELNVVAPWREWDITGREDAIEYAKKHNVPVPVTKKSIYSRDRNLWHLSHEGDILEDPANEPKEDMYMMSTSPEAAPEKPEYVEIGIVAGLPVSVNGEKLSPASLLSCLNEIGGKHGIGRIDMVENRLVGMKSRGVYETPGGTILFTAVRELESLTLDRETMQVKDSLALKYAELVYAGRWFDPLRESMDAFMEKITETTTGSVRLKLYKGSVSVVSRTSPKSLYREDISSFESGQIYDQADAAGFIRLYGLPMRVRAMLEK

SEQ ID NO: 19237 - protein, 248 aa, Populus trichocarpa
MCGGAIISDFVSVKRGRKPTTEDLWSELDSLSDFLGLDHRSMNNINNGSKKENLSNLKLAQKPRQPNQVITERVEKPSQATEQEAGKKKVQRTRKNVYRGIRQRPWGKWAAEIRDPHKGVRVWLGTYNTADEAAKAYDEAAKRIRGDKAKLNFPPQPPPTSEAAPPPPPKSEAAPPPAKKRCILGPETAAMASFEQILNLESFHGLETKQTAAQLSCDGGGSGDYNCDSVDPWMLDDLINISLIISKI

SEQ ID NO: 19238 - protein, 452 aa, Populus trichocarpa
MRCFDRAKIYVKAGDGGNGVVAFRREKFVPLGGPSGGDGGRGGNVYLEVDGSINSLLPFRNRVHYRAGRGSHGQGSCMGGAKGEEIVVKVPPGTVVREAGNEEVLLELLSPGQRALVLPGGRGGRGNAAFKCGSNKVPRIAENGEEGSEMWLELELKLVADVGIVGAPNAGKSTLLSVISAAQPAIANYPFTTLLPNLGVVSFDYDSTMVVADLPGLLEGAHRGFGLGHEFLRHTERCSALVHVVDGSSQQPEFEFDAVRLELEMFSPELAEKPYVVAYNKMDLPEAYENWQLFKEKLEARGIETFCMSAVKREGTHEVICAAHKLLQESKEANKGSEGWTHPINLNHVADMVQRQRRAPINDFEISYDNASKTWQVVGAGLQRFVQMTNWRYKDSDTRFQHVLEACGVNKSLLKMGVKEGDTVIVGEMEMVWHDYPQSSGLSKVTKWPEWK

SEQ ID NO: 19239 - protein, 221 aa, Populus trichocarpa
MDASIFHSANSDFSSESCFRSPDSFYSQSFNQSSLPFNENDSDEMLLFELISEATQETSRTTFCNGIVKEEEVSSVAKRTPDKEKSYRGVRRRPWGKFAAEIRDSTRNGIRVWLGTFDSAEAAALAYDQAAFSMRGPGTILNFPVERVRESLKDMKCSHHYEDGCSPVVALKRKYSMRRKLGSRGKKERNARIENVVVLEDLGADYLEQLLNSSGKATSPW

SEQ ID NO: 19240 - protein, 157 aa, Populus trichocarpa
MAFVSFVGRVLFASVFILSAWQEFNEFGTNGEPAAHLLEPKFHVFSKHVSSQTGFQVPHFEMKHAVAAAISVKAFGSLLFIFGSSVGAYLLLLHQIIITPILYDFYNYDADTKEFNLLFAKFAQNLALFGALLFFIGMKNSIPRRQLKKKSPKSKTT

SEQ ID NO: 19241 - protein, 193 aa, Populus trichocarpa
MYSSNSSSYDKFSNSQPPVFSQDTSTTGIPVSTTSQFYSTDDSRSSIELRSKSKGPWSTGLCDCFDDWRNCCVTFWCPCITFGQIAEIVDKGASSCGVNGALYALISCVTCCPCCYSCFYRAKMRQQYLLRETPCGDCLVHCCCEYCSLCQEYRELKSRGYDLAMGWHGNVEKKNRSVEMASVPPTVEEGMSR

SEQ ID NO: 19242 - protein, 154 aa, Populus trichocarpa
MDPSKPGASALRQHGQQARWSSGLCDCCSDVPGCCLTCWCPCITFGRIAEITDKGTTPCAVSGAIYGLLLYFTCCSCLYSCLYRSKLRTQYMLEESRCNDFLVHCCCEPCALCQEYRELKHRGFDMASGWQESLQGPSGTVAPSAPVVGQGMTR

SEQ ID NO: 19243 - protein, 319 aa, Populus trichocarpa
MRASMLGVTRRICNSREEEGELRRGPWTLEEDTLLTRYIARNREGRWNMLAKCAGLKRTGKSCRLRWLNYLKPDVKRGNLTPQEQLLILELHSKLGNRWSKIAQHLPGRTDNEIKNYWRTKVQKEARQLNIEASSTKFLDAVRSFWMPRLPQKMEQASYSSSSTTLDSQSQADHGVRSPSSNSTVPSSLSTLLCPPESKLAHYSNLGSENSSPVTSPHVLSANSDTISPQPEILENPTCSPLHGDTFYNNLILSDTCYEEGSCYDLDGFNQASAGMGTYDNSPLECQMAGGNWVFDSRVDTIWDMDDMWQFRDLRETGI

SEQ ID NO: 19244 - protein, 134 aa, Populus trichocarpa
WSTSLCGCFSDLNSCCLTCWCPCVAFGRIAEIVDRGSTSCGMSGTLYTLILCLTGCSCLYSCFYRSKLRGQFFLEESPCTDCCVHCFCEECALCQEYRELKNRGFDLSIGWHGNMERQKRLAATAPPTEERMMR

SEQ ID NO: 19245 - protein, 316 aa, Populus trichocarpa
MDVEGNSNSSSSTTQSDEEMMVDLRRGPWTVEEDFKLIDYIATHGEGRWNSLARCAGLKRTGKSCRLRWLNYLRPDVRRGNITLEEQLMILELHSRWGNRWSKIAQHLPGRTDNEIKNYWRTRVQKHAKQLKCDVNSKQFKDTMRYLWMPRLIERIQAAAAATSSSTATSASPAASTNHHLINNNDVGTGNLVMPHGVIGNDFGVSHVTPSYTPENSSTAASSDSFAAQVSPVSDLTTDYYYIPVNHNPNPDYFQADQGGYSESMISPAGYFNQGLDFQAMEHNSNQWLMESGDTSDNLWNPEDIWFLQQQMNYNM

SEQ ID NO: 19246 - protein, 278 aa, Populus trichocarpa
TVVEAVSAILGGGLRVGVLLHGKKVRDDNRTLLQTGITSNENLDTLGFSLEPTPVQVSPPLCTEDPAALLPCDTSQLILRSPTTPIVDSGVSDALPDPPPLTNLDTNIESNRESVSSHADIVTDNTLPDSRALVAVPPVNAEELAMVPLNQKSKRSELVQRRTRRPFSVSEVEALVHAVEELGTGRWRDVKLCSFEDADHRTYVDLKDKWKTLVHTAQIAPQQRRGEPVPQELLDRVLAAHAYWSQHQAKQHSKNQTAILKITDAHAVRNGVQDIQSI

SEQ ID NO: 19247 - protein, 249 aa, Populus trichocarpa
MAVKVCELCRREAGVYCDSDAAYLCFDCDSNVHNANFLVARHARRVICSGCGSITGNPFSGHTPSLSRVTCCSCSPGNKELDSISCSSSSTLSSACISSTETTRFENTRKGVKATSSSSSVKNIPGRSLRDRLKRSRNLRSEGVFVNWCKRLGLNGNLVVQRATRAMALCFGRLALPFRVSLAASFWFGLRLCGDKSVTTWENLRRLEEVSGVPNKLIVTVEMKIEQALRSKRLQLQKEMEEGWAECSV

SEQ ID NO: 19248 - protein, 633 aa, Populus trichocarpa
MASSTTKPIFTPPSTTLTSSSSSSSQPPTRSSLLSFLRNTASTPISLKLSHSHPSFRSLSIRNATKTIESAETSPVSKVGGKDTINSQETKPTILVSEKLGEAGLELLRNFGDVDCSYDLSQEDLCKKIASCDALIVRSGTKVTRQVFEAAKGKLKVVGRAGVGIDNVDLQAATEFGCLVVNAPTANTVAAAEHGIALLASMARNVAQADASMKAGQWQRNKYVGVSLVGKTLAVMGFGKVGSEVARRAKGLGMEVVTHDPYAPADRARAIGVEVVSFDQAISTADFISLHMPLTPATKKVFNDDSFAKVKKGVRIINVARGGVIDEEALVRALDSGKVAQAALDVFTEEPPPKDSKLVQHERVTVTPHLGASTKEAQEGVAIEIAEAVVGALKGELAATAVNAPMVPAEVLSELAPYVVLAERLGRLAVQLVAGGSGMKSAKVVYKSARDPDDLDTRLLRAMITKGIIEPISDSFINLVNADFTAKKKGLRISEERVVVDASPELPVFSIQVQLSNVDSKFGSAVSGGGDISIEGKVKNGIPHLTQVGSFSVDVSLEGNLILCRQVDQPGMIGQVGNILGEQNVNVSFMSVGRTARRRNAIMAIGVDEEPNLESLKKIGEVPAIEEFVFLKL

SEQ ID NO: 19249 - protein, 600 aa, Populus trichocarpa
MESSHGSSFSSLNSYIQALAQTPARFARRAGSVSTSYEEMSRVKARSGSDMQRTLRWYDLVGFGIGGMVGAGVFVTTGRASRVCTGPSVIISYAIAGLCALLSAFCYTEFAVDMPVAGGAFSYLRVTFGEFAAFLTGANLIMDYVMSNAAVARSFTAYLGSAIGISTSKWRVVVHVLPDGFNEIDIFAVLVVLAITLIICYSFRLLNMTSLFLVDSTRESSVVNMVLTALHILFIGFVILMGFWKGDWKNFTEPADPKNPSGFFPFGAPGVFNGAAMVYLSYIGYDAVSTLAEEVHNPVKDIPIGVSGSVIIVTVLYCLMSASMSMLLPYDMIDADAPFSAAFRGKSDGWKWVSNVIGIGASFGILTSLLVAMLGQARYMCVIGRSNVVPAWFARVHPKTSTPVNASAFLGIFTAAIALFTDLNVLLNLVSIGTLFVFYMVANAVVYRRYVAIGTTNPWPTLAFLCSFSLTSILFTLIWHFMPQGKGKAFMLGACAVIAIAIIQLFHCLVPQARKPEFWGVPLMPWIPCVSIFLNIFLLGSLGGPSYVRFVFFSALAVLVYVLYSVHASFDAEAEGSFGQKNGGILKESGESDQDPSFKV

SEQ ID NO: 19250 - protein, 169 aa, Populus trichocarpa
MAAPPAPSMVSRMTALFLRVLTFAFLMVSLVIMTTNTGTIEIGIDEFKVRSKDFYSYRYMLAAIAFGLTYTILQIALTLNHISKRNGAQTSGDGNLVFDFYGDKVVSYILATGAAAAFGATKELKTQLAGLGGDKFFNKGYASASLLLLGFVCTAILSVFSSYALPKKV

SEQ ID NO: 19251 - protein, 431 aa, Populus trichocarpa
MYSNFMEHGIEYAKQAVKEDDTGNYSKAFQLYMNALEYFQAQLKYEKNQQIEKTIRERCLGYLKRAEEIRAVLDNGGSVPASNGDASVAAQPKSSPKPKDGGGKDKEDPEKAKLKAGLDSVIIREKPNVKWSDVAGLENAKLALQEAVILPVKFPQFFTGKRKPWRAFLLYGPPGTGKSYLAKAVATEADSTFFSVSSSDLVSKWMGESEKLVSNLFQMARDSAPSIIFVDEIDSLCGQRGEGNESEASRRIKTELLVQMQGVGSDDHKVLVLAATNTPYALDQAIRRRFDKRIYIPLPDLKARQHMFKVHLGDTPHNLTESDFEKLAQKTEGFSGSDISVCVKDVLFEPVRKIQDAEYFMKSSDGMWVPCEPKQRGAVKTTLQELDAQDLASKVLLPPITRADFDKVLARQKPTVSKADLEVHERFTKEF

SEQ ID NO: 19252 - protein, 283 aa, Populus trichocarpa
MYGENFLDQSDYAFLESVRMHLLGEPTSPTTASSCFNPASTNSAMSAAAATTPATCTPVPVYCRSTSFSSLYPCLTENWGDLPLKVDDSEDMFLYGVLSDAVTVGWVPSLKTDQFIEPNLPAVKLEPSENLTISPPRTEAPIAEPAVVPSKGKHYRGVRQRPWGKFAAEIRDPAKNGARVWLGTFETAEDAALAYDRAAYRMRGSRALLNFPLRVNSGEPAPVRVTSKRSSPERSSSVESASLKRKKVGGTAGTATVVPQAGLEMRNGVGCQVGTHGEQLLVI

SEQ ID NO: 19253 - protein, 374 aa, Populus trichocarpa
MGRAPCCEKKGLKKGPWTPDEDQKLIDYIQKHGYGNWRTLPKNAGLQRCGKSCRLRWTNYLRPDIKRGRFSFEEEETIIQLHGILGNKWSAIAARLPGRTDNEIKNYWNTHIRKRLLRMGIDPVTHSPRLDLLDLSSILNSPLYDSRMNMSRVLGVQPLGDPELLRLATSLLSSQRDQTQDFAIQNGHQENHLSSPQVHQSQHQSIIHQANQFQTPGQEMPTCTTLTTTPCVTFSNEAQQMDPNVDQYQLSTITSFSSPNSQLSTHDQWQSNRMGSNLSQDYYLPAVSSYNSADNCHGTDLVDPSSEASTFISNNSNQTFGFASVLSTPSSSPAPLNSNSTYINCSSTEDERDSYCSNILKFEIPDILDVSNFM

SEQ ID NO: 19254 - protein, 226 aa, Populus trichocarpa
MAPRERSNNNNSPNSPRSEIRFRGVRKRPWGRYAAEIRDPGKKTRVWLGTFDTAEEAARAYDAAAREFRGAKAKTNFPTIGELNPNPTRSPSQSSTVESSSPPPPRAASPPPPLDLTLNISRHKPDRQPFPNGVSFPGGAWFPFPAVARPVFFFDAFAHAKNDIPNNNSIVNNINMCRFDRTVMVNGGGAQSDSDSSSVVDYDHRRDSKGLSLDLDLNLAPPPEVS

SEQ ID NO: 19255 - protein, 851 aa, Populus trichocarpa
MEGSSESAWQKSDSHREFNTSVVSNRNLRSTSHNSGFRKERTDRVVLARQNLKNQAGTLSGVCEDEAAVDRFMQTIEWNDVSLRHWLDKPQRSVNEFECSHIFRQVVEVVNVAHSQGIVVHNVRPSCFVMSSFNHVSFIESASCSDSGSDSLDDGLNSETMEVKNSSSSLPHDMCQQRNVPLVEETEEHKVHDMRNVEHEEERKQPFPMKQILLMESCWYTSPEEDAGSPSSCASDIYRLGVLLFELFCPFTSSEDKSRTMSSLRHRVLPPQLLLKWSKEASFCLWLLHPEPSSRPKIGELLQSDFLNEPINNLEELEAATQLRERIEEQELLLEFLLLIQQRKQDAADKLQDTISLLCSDIEEVTKHQVFLKKKGDTCKERGEGDHLTSNIPALNVVDIDDSSSLGSRKRFCPGLEIHNVEKCDDNLDESQNSDTFVESQESPLFRSSRLMKNFKKLESAYFLTRCRPVRPPGKPSFARNLPVISDGRISIVATERSSINSIAPKQQFTEGRRSGWISPFLEGLCKYLSFSKLKVKADLKQGDLLNSSNLVCSISFDRDGEFFATAGVNKKIKVFECDTIINEARDIHYPVVEMVCRSKLSSICWNSYIKSQLASSNFEGVVQVWDVTRSQVVTEMREHERRVWSVDFSSADPTMLASGSDDGSGVSIGSIKTKANICCVQFPLDSSCSIAFGSADHRIYYYDLRNSKVPLCTLIGHNKTVSYVKFVDMTNLVSASTDNTLKLWDLSMGTSRVIDSPVQSFTGHMNAKNFVGLSVADGYIATGSETNEVFVYHKAFPMPVLSFKFNNTDPLSGHEMDDTAQFISSVCWRGQSSTLVAANSTGNIKILEMV

SEQ ID NO: 19256 - protein, 532 aa, Populus trichocarpa
MTSITSVELNYLVFRYLQESGFTHSAFVLGYEAGINKCTIDGNMVPPGALISFVQKGLQYLEMEANLSNSDADVDEDFSFLQPLDLITKDVNELRQIIKEKKKNLRKDEKRRRRRKTKTKTKTKTKIWSSMLSQCRDGEATVKSHFVFLFPLEFGPEPMDISTASTSQTCEIPSSDVMILEGHTSEVCACAWSPTGSLLASGSGDSTARIWTIAEGTSRSVAQNGPLNVLVLKHVKGRTNEKSKDVTTLDWNGEGTLLATGSYDGQARIWSTDGELKTTLSKHKGPIFTLKWNKKGDYLLTGSCDKTAIVWDVRAEEWKQQFEFHSGPTLDVDWRNNVSFATSSTDNMIYVCKVGETRPIKTFAGHQGEVNCVKWDPTGSWLASCSDDISAKIWSMKQEKYVHDLREHSKEIYTIRWSPTGPGTNNPNQPLVLASASFDSTVKLWDVEFGKLLCSLNGHREPVYSVAFSPNGEYLASGSLDRCINIWSLREGKIVKTYAGNGGIFEVCWNKEGDKIAACFANNTVCVLDFRM

SEQ ID NO: 19257 - protein, 597 aa, Populus trichocarpa
MAIESVLSPLGPPACEKDAKALQFIEDMTANVDLVQERVLKEILTSNAETEYLQKYHLNGATDRDSFKSKIPMVTYEDLQPQIQRIANGDKSPILSSHPISEFLTSSGTSAGERKLMPTIEEEMDRRQLLYSLLMPVMNLYVPGLDKGKGLYFYFIKAEAKTPGGLVARPVLTSYYKSKQFKTRPYDPYNVITSPNETILCVDSFQSMYSQMLCGLIMREEVLRVGAVFASGLLRAIRFLQLNWKELANDISTGSLNPKVTNPSIRECMAKILKPNQELAEFITKECSDENWERIITRIWPNTKYLDVIVTGAMAQYIPTLDYYSGGLPKPCTMYASSECFFGLNLRPMSEPSEVSYTIMPNMGYFEFLPHDPSAPAFSRESPPRLLDLADLEVGKEYELVITTYSGLNRYRVGDILLVTGFYNKAPQFRFVRRKNVLLSIESDKTDEAELQKAIDNASLLLREFNTSVVEYTSYAETKIIPGHYVIYWELLVKDPANSPTEEVLNQCCLAMEESLNSVYRQSRVADNSIGPLEIRVVKNGTFEELMDYAISRGASINQYKVPRCVSFTPIMELLDSRVVSKHFSPSVPHWTPERRS

SEQ ID NO: 19258 - protein, 351 aa, Populus trichocarpa
MGKSPSCDKNGLKKGPWTAEEDQKLITYIQKHGHGRWRILPKNAGLKRCGKSCRLRWTNYLRPDIKRGKFSDEEEETIIQLHGILGNKWSTIATRLPGRTDNEIKNYWNTHIKKRLLMMGIDPATHKPRLDLLQHCSALSSCLHNSSQLSIPSLLGMGPILNPNLLNLATSFLSCQGNISQDVSPRHFHESQRRNNQVNDQFQCLQPNELQNQAQACTNTSGAQSLNETQISEANLEQLISSDPTNFSCQNSLQSSWHTIEETPNVSESLMSNYVYHDCNNKPIIINDNSFETLPSLSFGSLLSTPSYNTTPLHSSSTTYVNVSDEDEKNIYCSDMLSFDIPSCLDGNRLV

SEQ ID NO: 19259 - protein, 216 aa, Populus trichocarpa
MRPAPLETTAAADISHLSPPPPLPSRPPSCDPQVHSCKWWPYSNSNDAGANTATILMILLCALICALAFNTAIRWFLRSDNDSSSDHLRELEEQRKPNKESDMALLVLATTQVYYAGMKLAGAEADCAICLSEFVEGEGIRVLGRCNHGFHVHCVEKWLASHSSCPTCRCSCLASSLSSPEPANCCARNGLDNNSSQSAEPQRAPANLSANENIPV

SEQ ID NO: 19260 - protein, 628 aa, Populus trichocarpa
MIPSSSRYPHIQTLLVSCVLLFLVFKVQAKCRTGCDLALASYYVWQGSNLTYISTIFNQSITEILRYNPKVPNQDSIRSDTRLNVPFSCDCLNGDFLGHTFSYITQSGDTYHKIARNAFSNLTTEDWVHRVNIYDITEIPNYVPINVTVNCTCGDKQVSRDYGLFATYPLRPDENFSSLEAESGVPADLLEKYNLGTDFNAGGGIVYMPAKDPTGNYPPLKILCCYAWPFQAGISSRAIAGISVAGIAGAFFLASCFYFGFYRRREVEASLFPEAAESPYIHHRHGSGNILEQTSETAALVGSPGLTGFTVDKSVEFSYEELAKATNDFSMDNKIGQGGFGAVYYAELRGEKAAIKKMDMQASKEFLAELKVLTHVHHLNLVRLIGYCVEGSLFLVYEFIENGNLGQHLRGNSGKDPLPWSTRVQVALDSARGLEYIHEHTVPVYIHRDVKSANILIDKNFRGKVADFGLTRLTEVGSASLHTRLVGTFGYMPPEYAQYGDVSSKIDVYAFGVVLYELISAKEAVVKTNEFITESMGLVALFEEVLGQPDPRENLPKLVDARLGDDYPLDSVCKMAQLARACTQENPHVRPSMRSIVVALMTLSSSTEDWDVGSLYENQAIVDLMSGR

SEQ ID NO: 19261 - protein, 183 aa, Populus trichocarpa
MVLSSQIHELPFNENDSQDMVIYQMINEASAPNSSTYNILPRSQINTSGMLQPARTVIAKKHYRGVRRRPWGKYAAEIRDSKRHGARIWLGTFETAEAAALAYDRAAFNMRGSKALLNFPAEVVAAISTQNCQPIFSSTRTSSKKAMDSCGSSSTITIATSQSESESSTSGESRRQGSDILEN

SEQ ID NO: 19262 - protein, 548 aa, Populus trichocarpa
MAHPSSALAPAPVPGHTFSGTLGHHLARRLVEIGVNYVFSVPGDFNLTLLDHLIDEPELNLIGCCNELNAGYAADGYARAKGVGACVVTFTVGGLSVLNAIAGAYSENLPIICIVGGPNSNDYGTSRILHHTIGLPDFTQELRCFQTVTCVQAVVNNLDDAHEQIDTAISTALKESKPAYISISCNLSGIPHPTFSREPVPFFLAPKVSNYLGLEAAVEATAEFLNKAVKPVIIGGPKLRVAKGQKAFIELADASGYPLAVMPSGKGLVPEHHPHFIGTYWGAASTCFCAEIVESADAYVFVGPIFNDFSSVGYSLLIKKEKSIIVQPNRVTIGNGPSLGWVFMADFLGALAKKLKKNSTALENYRRIFFPPGMPLMREKDEPLRVNVLFKHIQNMLGGDSAVISETGDSWFNCQKLCLPENCGFLLTQVTAQDISTMIRCGQRTIIFLINNGGYTIEAQIHDGPYNVIKNWDYTGLVNAIHNGEGKCWTAKVRTEDELTAAIATATGEQKDSLCFIEIFVHKDDTSKELLEWAPRVSAATGRPPNPQ

SEQ ID NO: 19263 - protein, 593 aa, Populus trichocarpa
MDSAIQIGSTAHHNSASAPAPAPVPAHACSGTLGSHLARRLVEIGVRDVFSVPGDFNLTLLDHLIAEPELNLIGCCNELNAGYAADGYARAKGVGACVVTFTVGGLSVLNAIAGACSENLPVICIVGGPNSNDYGTNRILHHTIGLPDFSQELRCFQTVTCIQAVVNNLDDAHEQIDTAISTALKESKPAYISISCNLPGIPHPTFARDPVPFFLAPKVSNHLGLEAAVEATAEFLNKAVKPVIVGGPNLRVAKAQKAFLEFADASGYPIAVMPSGKGLVPEHHPHFIGTYWGAVSTGFCGEIVESADAYVFVGPIFNDYSSVGYSLLIKKEKAVIVQPNRVTIGNGPSLGWVFMTDFLSALAKKLKKNSTALENYRRIFVPPGIPLKREQDEPLRVNVLFKHIQDILGGDTAVISETGDSWFNCQKLRLPENCGYEFQMQYGSIGWSVGATLGYAQAARDKRVIACIGDGSFQVTAQDISTMIRCGQRTIIFLINNGGYTIEVEIHDGPYNVIKNWDYTGLVNAIHNGEGKCWTAKVRTEDELTAAIATATGEQKDSLCFIEVFVHKDDTSKELLEWGSRVSAANGRPPNPQ

SEQ ID NO: 19264 - protein, 711 aa, Populus trichocarpa
MEYGSAGGGSGGGGGGDHDSSDPQRRKKRYHRHTAHQIQKLESMFKEFPHPDEKQRLQLSRELGLAPRQIKFWFQNRRTQMKAQHERADNSSLRAENDKIRCENIAIREALKNVICPSCGAPPVTEDSYFDEQKLRIENAQLKEELDRVSSIAAKYIGRPISQLPPVQPVHISSLDLSMGNFGGQGLGGPALDLDLDLDLIPTNSNLAFQPPGISDMDKSLMTDVATNAMEELLRLLQANESLWMKSSTDGRDVLNLDSYQRIFPRAMSHLKNPNVRIESSRDSGVVIMNGVALVDMFMDSNKWVESFPTIVSVAKTIEVISSGMLGNHSGSLQLMYEELQVLSPLVPTREFCILRYCQQIEQGLWAIVSVSYDIPQFASQFQCHRLPSGCLIQDMPNGYSKVIWVEHVEIEDKAPTHQLYRDLIHSGLAFGAERWLATLQRMCERVACQMVSGSSTRDLGGVIPSPEGKRSMMKLGQRMVSSFCSSISTSNSHRWSTLSGLHDVGVRITLHKNTDPGQPNGVVLSAATTFSLPVSPQNVFNFFKDEKTRPQWDVLSSGNAVQEVAHIANGSHPGNCISVLRAYNTSQNNMLILQESCMDSSGSLVVYCPVDLPAINIAMSGEDPSYIPLLPSGFTISPDGYPDQGDGASTSSNTQGRMARSSGSLITVAFQILVSSLPSARLNLESVNTVNSLIGTTIQQIKAALSCPGS

SEQ ID NO: 19265 - protein, 550 aa, Populus trichocarpa
LIAASAASAAILLGVRDKASGQSDPNSLTHRKPTQAISKACSKTRFPALCVSSLLDFPGSMTASESDLVHISFNMTLLHLDKALYLSSGISYVNMETHERSAFDDCLELLEDSIDALTRSLSTVSPSSGGGGSPEDVVTWLSAALTNQDTCSEGFEGVNGTVKDQMTEKLKDLTELVSNCLAIFSATNGGDFSGVPIQNKRRLMTEDGDISEEDNFPSWLGRRERRLLGLPVSAIQADIIVSGDGSGTFKTISEAIKKAPEHSNRRTIIYVRAGRYVEDNLKVGRKKWNLMFIGDGMGKTIITGSRSVFNHITTFHTASFAATGAGFIARDMTFENWAGPAKHQAVALRVGADHAVVYRCSIIGYQDTLYVHSNRQFYRECDIYGTVDFIFGNAAVVLQNCSIYARKPMASQKNTITAQNRKDPNQNTGISIHACKILAASDLAPSKGTFPTYLGRPWKLYSRTVYMLSFMGDHIHPRGWLEWDASFALDTLYYGEYMNYGPGAAVGQRVKWPGYRVITSTVEANKFTVAQFIYGSSWLPSTGVAFLAGL

SEQ ID NO: 19266 - protein, 668 aa, Populus trichocarpa
MGFSLKHRAGSFMVAAIFLLGSLLTVSIAKEEATKLGTVIGIDLGTTYSCVGVYKNGHVEIIANDQGNRITPSWVAFTDSERLIGEAAKNQAAANPERTIFDVKRLIGRVYGDKEVQKDMKLFPYKIVNKDGKPYIEVKIKDGETKVFSPEEISAMVITKMKETAEAFLGKKIKDAVITVPAYFNDAQRQATKDAGVIAGVRVARIINEPTAAAIAYGLDKKGGEKNILVFDLGGGTFDVSILTIDNGVFEVLATNGDTHLGGEDFDQRIMEYFIKLIKKKHGKDVSKDNRALGKLRRECERAKRALSSQHQVRVEIESLFDGVDFSEPLTRARFEELNNDLFRKTMGPVKKAMEDAGLEKHQIDEIVLVGGSTRIPKVQQLLKDYFDGKEPNKGVNPDEAVAYGAAVQGGILSGEGGDETKDILLLDVAPLTLGIETVGGVMTKLIPRNSVIPAKKSQTFTTYQDQQTTVTIQVFEGERSLTKDCRSLGKFDLSGIAPAPRGTPQIEVTFEVDANGILNVKAEDKASGKSEKITITNDKGRLSQEEIERMVREAEEFAEDDKKVKEKIDARNSLETYVYNMKNQVNDKDKLADKLEADEKEKIETAVKEALEWLDDNQSAEKEDYEEKLKEVEAVCNPIITSVYQRSGGAPGGAADGGDDDDSNDEL

SEQ ID NO: 19267 - protein, 723 aa, Populus trichocarpa
MEIEADHEECSIKQVDLTVPKTDDPTMPVLTFRMWVLGLGSCIILSFVNQFFWYRSQPLTVTSISAQIAVVPLGHLMAKKLSTRKFFEGTRWEFTLNPGPFNIKEHVLITIFANSGAGTVYAAHILTSVKIYYQRKLTFIPALFIMITTQVLGFGWAGLFRKYLVEPGEMWWPSNLVQVSLFRALHEKEKRLKGYTSRTQFFLLVIICSFAYYVLPGYLFTMLTSFSWVCWLGSKSVLVQQLGSGLQGLGIGAVGFDWATVSAYLGSPLASPWFATANVAVGFSLIMYVMTPICYWLNVYNAKNFPLYSNELFTEKGEEYDILNIINSKFHLDRDAYAKFGPIHMSTFFSMTYGLGFATLSATVMHVLLFNGSDLWKQSKRAFGGRRKIDIHTRLMKKYKSVPTWWFYIILVINIAAIIFACEHYNESLQLPWWGVLLACAIAFFFTLPIGIISATTNQQPGLNVITEYIIGYMYPERPVANMCFKVYGYISMTQALTFLADFKLGHYMKIPPRSMFMAQVVGTLVAVLVYLGTAWWMMDAIPNLCSQDNGPWKCPMDRVFFDASVIWGLVGPRRIFGNLGEYGGVNWFFLGGAVAPLIVWIFHKAFPRKEWISLIHMPVLLGATSMMPPASAVNYTSWIVVGFLSGYVLFRYRTEWWKRYNYVLSGGLDAGTAFMTLLIFFALGYWDVDLTWWGSNSSNPEGCLLASCPTAKGIIVDGCPVL

SEQ ID NO: 19268 - protein, 484 aa, Populus trichocarpa
PLVGALKASAEKNAASFHFPGHNRGRAAPSSLTQLIGLRPFIHDLPELPELDNLFSPEGPILEAQMQAAKLFGSSETWFLVGGTTCGIQAAIMATCSPGEHIVLPRNSHISAISAMVLSGAIPKYIMPGYDCKWDIAGGVTPLQVGKAIKELEMDGKKPAAVFITSPTYHGICSNLSEISQLCHAYGIPVIVDEAHGAHLGFHPQMPHSALKQGADLVVQSTHKVLCSLTQSSMLHMSGNIVDRDRICRCLQTLQSTSPSYLLLASLDAARAQLAENPGTVFNKALELAIEASTLIKKIPGISVLDLASFNEFPAIDPLRLTLGFWSLGLSGYEADDILDRDHGVISELVGTQSITFAINLGTCREHNQRLVSGLKKLPTSSLHSKTTEKRVESREHAPFNDICISLNPRDAFFANKRSVSVRESLGKVCGELICPYPPGIPVMIPGEIITERALNYLLDVRRKGAVVTGASDSHLSSIVICDV

SEQ ID NO: 19269 - protein, 329 aa, Populus trichocarpa
MQDTHSIGGGGRLFSGGGGGDRKLRPHHHQNQQALKCPRCDSLNTKFCYYNNYNLSQPRHFCKSCRRYWTKGGVLRNVPVGGGCRKTKRSRPKQNTPITTCDTITASSTTPQELQEQHQQRDHKSSDSHSSSESSSLTATNNTNANTTAEAVSALSVSSVVSNNLLNGIVESKIFPHGNVNPSFEPSLLEQGSDCGIFSEIGSFTSLITSTNDLFGFSNMMSQHQPPHQQQGLEHHVQHNQNQQQWQNHQQQEMTGGGGLIDQTVHVELSALPSSRSTKNDDGEFGALDWQLGSGDQATSLFDLPNAVDQAYWSQSQWNDQDHPSLYIP

SEQ ID NO: 19270 - protein, 268 aa, Populus trichocarpa
MMSFADVHQANGSTRPFFRPYDHEDNGDDDLDEYFHQPEKKRRLTVDQVQFLERSFEVENKLEPERKIQLAKDLGLQPRQVAIWFQNRRARWKTKQLEKDYEVLQSSYNGLKADYDNLFKEKEKLKAEVNLLTNELLLKEKEKGSSELSDKDALSQEPPKKAIADSASEGEVSKTSTVACQQEDISSAKSDMFDSDSPHFADGVHSSLLEAGDSSHVFEPDQSDLSQDEEDNLSKSLLPPYVFPKLEDGDYSDPPASFEDHAFWCWSY

SEQ ID NO: 19271 - protein, 268 aa, Populus trichocarpa
KLSPVLLLVIVIFAVVFFVSGLLHLLVRFLLKRASFSPIYHSNRYPETSGSHSLQRQLQQLFRLHDSGLDQAFIDALPVFYYEDIMGLKEPFDCAVCLCEFADQERLRLLPLCSHAFHINCIDTWLLSNSTCPLCRGTLSGSKCGSVNCQKSATIVEDKSDGEKRVFSVRLGKFRTLNDGEGIGEKQHGETSRCNLDARRCYSMGTVQYVEGESNLQVALSQGNLNGRGGDNGCPSTDGDLEDKKIRGRTRGDSFSVSKIWLWSKKSR

SEQ ID NO: 19272 - protein, 412 aa, Populus trichocarpa
MTNKIAEKRRQQEEDDEEDGDLDGWGERNYSDERSWEALQEDESGLLRPLDNKAMYHAQYRRRLRSLSTASNSQRIQKGLIRFLYIVLDLSRAASVMDFRPSRMAVVAQNVEAFIREFFDQNPLSQIALVTIKDGVAYSLTELGGSPESHIKALMAKLECSGDSSLQNALELVHEYLDKIPSYGNREVLILYSALTTCDPGDIMETIQKCKKSKMRCSVIGLSAEMFICKHLCQETGGLYSVALDESHFKELILEHAPPPPAIAEFAIANLIKMGFPQRAAEGSISICSCHKESKVGEGYICPRCKARVCELPTECRICGLTLVSSPHLARSYHHLFPIAPFDEVKPSRQNEPHRRSQKTCFGCQQSLVNPGNKPSLQVACPKCKQYFCLDCDIYIHESLHNCPGCESLRAS

SEQ ID NO: 19273 - protein, 511 aa, Populus trichocarpa
METWVSYAFAWLATVSLILLASRLRRRKLKLPPGPKPWPIIGNLNLIGELPHRSLHALSQKYGPIMQVQFGSFPVVVGSSVEMAKTILKTHDVIFSGRPKTAAGKYTTYNYSDITWSPYGPYWRQARKMCLMELFSAKRLESYEYIRVEELKALLKTLHKSSGRPINLKDHLTDVSLNVISRMVLGKKYTVKSSENEKEIVTPEEFKEMLDELFLLNGVLDIGDSIPWIAFLDLQGYIKRMKVLSKKFDKFMEHVLDEHESRRKTEDENWEPKDMVDVLLQLASDPNLEVKLERHGVKAFSQDLIAGGTESSAVTVEWAISEILRKPEVFEKASEELDRVIGRERWVEEKDMVNLPYIYAIAKEVMRLHPVAPMLVPREAREDINVNGYDIKKGSRVLVNVWTIGRDPKVWDKPDEFCPERFIGNSIDVRGHDYELLPFGAGRRMCPGYPLGLKVIQATLSNLLHGFKWRLPDGVRKEELSMEEIFGLSTPKKYPLVAVAEPRLPAHVYPK

SEQ ID NO: 19274 - protein, 513 aa, Populus trichocarpa
MDNPPPPAITYTAAGLATVVLILLSRRLFSRKLKLPPGPKPWPIIGNFNLIGPLPHRSLHELAKKYGPIMQIKFGSIPVVVGSSAEVAEAILKTHDISLADRPKIAAGKYTTYNYSDITWSQYGPYWSHLRKFCNMEIFSPKRLDFYQHVRVEELHSLLKSLYKTSGTPFKTREKFSDLSLSVISRLVLGRNYTLESEKGKGVYTPHEFKKILDELFVLNGVLEIGDWIPWLSYFDLQGNIKKMKAVAKKVDRFIEHELEEHDARRNGVKNYVAKDMMDILLQLSDDPSLDVEFGRTGVKALTLDLIAGGTESTAVTAEWALAELLKKPEIFEKATEELDRVIGRERWVEEKDIVDLPYVTAIMKETMRLHNVSPLLVPRVAREDVQISGYDIPKGTVVMVNVWTIGRDPKIWDNPNEFCPERFLGEEIEVEGQNFKLMPFGAGKRICVGYPLGLKIIQSSVANLLHGFNWKLPKGMKKEDLDMEEIFALSTPKKNPLVAVAEPRLPPHLYSV

SEQ ID NO: 19275 - protein, 378 aa, Populus trichocarpa
MCGGAIISDFIPPTTTARSSRRFAEGFEWFGMKKPLDNKKYSKPVVINLDDDFEADFQEFKDESDVDENYDVFVDAKPFSFSATASAPAKKRSAPVKSAEFSGQAEKSAKRKRKNQYRGIRQRPWGKWAAEIRDPRKGVRVWLGTFNTAEEAARAYDAEARRIRGKKAKVNFPDEAPLASSKQSIKENSRKPLPKTNSSQSFSYLSNPELNYNNMGFVEEKPLVNQFGSMNSFPVNGDSGMKTLAPSDSAPMCFNSDQGSNSFDCDFGWGEQTPMTPESLTVLAATPEADEYLLANPEELESYSENAVPVEEKNGKSLSEELLAFDSQLKYLQMPDAEGSSWEASLDSFLNVETTQDGTNAMDLWSFDDFPSMVGGVY

SEQ ID NO: 19276 - protein, 481 aa, Populus trichocarpa
MARVSLDTINPKVLKCEYAVRGEIVTLAQAVQEELKSKPGSRPFDEILYCNIGNPQSLGQQPITFFREVLALCDHPSILDKSETRGLFSADAIERARQILDQIPGRATGAYSHSQGIKGLRDAIAAGIEARDGFPADPNDIFLTDGASPAVHMMMQLLIRSEKDGILCPIPQYPLYSASIALHGGTLVPYYLDEATGWGLEVSELKKQWADAKSKGITPRALVVINPGNPTGQVLAENNQKEIVDFCKKEGLVLLADEVYQENVYVPEKKFHSFKKVARSMGYGEKDISVVSFQSVSKGYYGECGKRGGYMEVTGFGPEIREQIYKLASVNLCSNISGQILASLVMSPPKVGDESYESYSAEKDGILSSLKRRAKTLEDAFNKLDGVTCNKAEGAMYLFPCIRLSEKAIKAAEAAKTTPDNFYCRCLLNATGIVFVPGSGFRQVPGTWHFRCTILPQEDKIPAVVSRLTEFHKSFMEEFRE

SEQ ID NO: 19277 - protein, 563 aa, Populus trichocarpa
MSKKNKRLVLAIFASFLLVATIIAIAIGVNSRKNSTKNEAAHALLMASCNSTRYPDLCYSAATSFPDQASGDDPKTVILNNINKTIDAINSKKIRDDKILSTEDLTAQQKTALKDCRQNYDSSLADLDNVWGELNRNPNKKKLQQKSYAAELQTKVSSCISGQQSCLDGFSHSWLSRLFRKALGPSEDNAGKMCSNALALINKLIEDTDAIANRLKTTSRKLKEEDDSDEGWPEWLSVTDRRLFQSSLLTPDVVVAADGSGKYRTVSAAVAAAPKHSAKRYIIKIKAGVYRENVEVPSEKTNIMFLGDGRKKTIITASRNVVDGGTTYHSATVAVVGQGFLARDITFQNTAGASKYQAVALRVESDFAAFYKCGMLAYQNTLYVHSNRQFFTNCYIAGTVDFIFGNSAAVFQDCDIHARRPNPGQTITITAQGRSDPNQNTGIVIQKSRIGATADLQHARSNFSAYLGRPWKEYSRTVIMQSSISDVISPAGWREWKGRFALNTLHFAEYENSGAGAGTAGRVPWKGYKVITDATEAQAFTARNFITGSSWLKSTTFPFSLGL

SEQ ID NO: 19278 - protein, 572 aa, Populus trichocarpa
MTQAGQYTSMSKKNKRLVLAIFASFLLVATIIAIAIGVNSHKNSTKNDAAHALLMASCNSTRYPDLCYSAATSFPDASGGDPKAVILNNINATIDAINSKKIEADSILSTKDLTQQQKTALEDCRQNYDSSLADLEKVWGALKRNPNNQLLQQQSYAEDLTTQVSSCKSNEDSCLDGFSHKSLLRKLREWFRDPSKDDAGKMCSNTLALIKKLIEDTKAIANRLKTTSRKLKEEDDSDEGWPEWLSVTDRRLFQSSLLTPDVVVAADGSGKYRTVSAAVAAAPKHSGKRYIIKIKAGVYRENVEVPSEKTNIMFLGDGRKKTIITASRNVVDGGTTYHSATVAVVGQGFLARDITFQNTAGASKYQAVALRVESDFAAFYKCGMLAYQNTLYVHSNRQFFTNCYIAGTVDFIFGNSAAVFQDCDIHARRPNPGQTITITAQGRSDPNQNTGIVIQKSRIGATADLQHARSNFSAYLGRPWKEYSRTVIMQSSISDVISPAGWREWKGRFALNTLHFAEYENSGAGAGTSGRVPWKGYKVITDATEAQAFTARNFITGSSWLKSTTFPFSLGL

SEQ ID NO: 19279 - protein, 319 aa, Populus trichocarpa
MTQAGQYISMSKKNKRLVLAIFASFLLVATIIAIAIGVNSHKNSTKNDAAHALLMASCNSTRYPDLCYSAATSFPDASRGDPKAVILNNINATIDAINSKKIEADKILSTKQLTQQQKTALEDCRQNYDSSLADLEKVWGGLKRNPNNGLLQQKSYAEDLTTKVSSCKSNEDSCIDGFSHSWLSRKLRDIFRDPSEDDAGKMCSNTLALIKKLIEDTKAIANRLKTTSRKLKEEDDIDEGWPKWLSVTDRRLFQSSLLTPDVVVAADGSGKYRTVSAAVAAAPKHSGKRCFLEMEGKKLSSQQVGMWLMAAQPTILPLL

SEQ ID NO: 19280 - protein, 573 aa, Populus trichocarpa
MTQAGQYISMSKKNKRLVLAIFASFLLVATIIAIAIGVNSRKNPTKNDAAHALLMASCNSTRYPDLCYSAATSFPDASRGTDPKAVILNNINATIDAINSKKIEADKILSTKQLTQQQKTALEDCRQNYDSSLADLEKVWGGLERNPNNELLQQKSYAEDLTTKVSSCKSNEDSCIDGFSHSWLSRKLRDIFRGPSEDDAGKMCSNTLALIKKLIEDTKAIANRLKTTSRKLKEEDDIDEGWPEWLSVTDRRLFQSSLLTPDVVVAADGSGKYRTVSAAVAAAPKHSGKRYIIKIKAGVYRENVEVPSEKTNIMFLGDGRKKTIITASRNVVDGGTTYHSATVAVVGQGFLARDITFQNTAGASKYQAVALRVESDFAAFYKCGMLAYQNTLYVHSNRQFFTNCYIAGTVDFIFGNSAAVFQDCDIHARRPNPGQTITITAQGRSDPNQNTGIVIQKSRIGATADLQHARSNFSAYLGRPWKEYSRTVIMQSSISDVISPAGWREWKGRFALNTLHFAEYENSGAGAGTSGRVPWKGYKVITDATEAQAFTARNFITGSSWLKSTTFPFSLGL

SEQ ID NO: 19281 - protein, 329 aa, Populus trichocarpa
MRSIFCGNFEYDARQTELERLFKRYGRVERVDMKAGFAFIYMEDERDAEDAIRGLDRVEFGRKGRRLHVEWTKQERGARQPGGSSRKSANTRPSKTLFVINFDPHHTRTKDLERHFEPYGRIVSVRIRRNFAFVQYEAQEDATKALDATNMSKLLYRVISVEYAARDDGERKDGHSPDRSRDRSPDRRGHDRRRSPSPYRRERGSTDYGHGPSPYRKERVSPDSGCRRSPSPYRRDRASPDYGRGSTRSPSRRERAGSDHGHGPSRGPYRKDKASPVNGNGPSDSPYQREEKLSPENGRVPSRSPYGRERPNPDKGRTSSHSPSERDGS

SEQ ID NO: 19282 - protein, 214 aa, Populus trichocarpa
MARGKVQLKRIENATSRQVTFSKRKNGLLKKAYELSILCDAEVAVIIFSQKGTLFKFASIDQIQKTIDRYRKNAKQLHTDRIDVEQSKEQLRQESANMAKKIEIIEILQRKLLGQDLDSCSPEELHDIDNQLEISLSNIRARKTQLFKEQIEQLQAKERLLLMENARLTKQCDAQPLQQSTQSNQVVSYLTSCSKSSDIVETDLYIGLPHMRCL

SEQ ID NO: 19283 - protein, 588 aa, Populus trichocarpa
MRRRRGCGCSCTKNDFLPEESFQSIGNYLQALKETPMRFKDRLLTRSLDSTELHEIKSRSDHEMKKNLTWWDLIWFGIGAVIGAGIFVLTGLEAKEHAGPAVVLSYVVSGVSAMLSVFCYTEFAVEIPVAGGSFAYLRVELGDFMAFIAAGNIILEYVIGGAAVARSWTSYFATLCNHKPDDFRIIAHSLPEDYGHLDPISVFVCAAICVLAVLSTKGSSRFNYVASIIHVVVILFIIVAGLAKADTKNYADFSPNGARGIFVASAVLFFAYIGFDAVATMAEETRNPARDIPIGLVGSMSITTIAYCLMAVTLCLMVPYKKIDEDAPFSVAFETVGWGWAKYVVAAGALKGMTTVLLVSAVGQARYLTHIARTHMMPPWLAHVNERTGTPVNATIVMLAATAIVGFFTKLDILSNLLSISTLFIFMLVALALLVRRYYVSGITTQENRVKLIMCIVAILGSSIATAVFWGTADEDSWLGYVITIPLWFCATLALKLLVPQARDPKLWGVPLVPWLPSASILINIFLLGSIDKKSFIRFAAWTGFLLVYYFLFGLHASYDTAKASGENKVEDGLKNVEEGAVPSRNGS

SEQ ID NO: 19284 - protein, 949 aa, Populus trichocarpa
MSIKESFSNVVNVLLDWDDVHNEDFCSWRGVFCDNVSLSVVSLNLSNLNLGGEISPAIGDLRNLQSIDFQGNKLTGQIPEEIGNCASLFNLDLSDNLLYGDIPFSISKLKQLDTLNLKNNQLTGPIPSTLTQIPNLKTLDLAKNQLTGEIPRLIYWNEVLQYLGLRGNLLTGTLSEDMCQLTGLWYFDVRGNNLSGTIPSSIGNCTSFEILDISYNQISGEIPYNIGFLQVATLSLQGNSLTGKIPEVIGLMQALAVLDLSDNELVGPIPPILGNLSYTGKLYLHGNKLTGPIPPELGNMSKLSYLQLNDNQLVGRIPPELGMLEQLFELNLANNHLEGPIPNNISSCRALNQLNVYGNHLSGIIASGFKGLESLTYLNLSSNDFKGSIPIELGHIINLDTLDLSSNNFSGPIPASIGDLEHLLILNLSRNHLHGRLPAEFGNLRSIQAIDMSFNNVTGSIPVELGQLQNIVTLILNNNDLQGEIPDQLTNCFSLANLNFSYNNLSGIVPPIRNLTRFPPDSFIGNPLLCGNWLGSVCGPYVLKSKVIFSRAAVVCITLGFVTLLSMIVVVIYKSNQRKQLTMGSDKTLQGMCPPKLVVLHMDMAIHTFDDIMRNTENLSEKYIIGYGASSTVYKCVLKNSRPLAIKRLYNQYPYNLHEFETELETIGSIRHRNIVSLHGYALSPRGNLLFYDYMKNGSLWDLLHGSSKKVKLDWETRLKVAVGAAQGLAYLHHDCNPRIIHRDVKSSNILLDEDFEAHLSDFGIAKCIPTTKSHASTFVLGTIGYIDPEYARTSRLTEKSDVYSFGIVLLELLTGKKAVDNESNLQQLILSRADDNTVMEAVDPEVSVTCMDLTHVKKSFQLALLCTKRHPSERPTMQDVSRVLVSFLPALPTKASLLPKPIDYAKFVIDKGQQQQPIVNQQQPSQENNSSDAQWFVRFKEVVSKNTL

SEQ ID NO: 19285 - protein, 198 aa, Populus trichocarpa
MAKSSLVLLLLSILYIAGTATSASTTSSSASATNFIKASCTATTYPALCVQSLSLYATSINQSPRQLIQTALAVSLDKAQSTKTFVYKLTKFKGVKPREKAAIKDCFEEIDDTVDRLVKSVKELKNMGSSKGSDFQWHISNVQTWISAGLTDENTCVDGFAGKALNGRIKNSIKARFVHVERVTSNALALINKFGSKY

SEQ ID NO: 19286 - protein, 356 aa, Populus trichocarpa
MSLLSDLINLDLSDTTDKIIAEYIWIGGSGMDLRSKARTLNGVVSDPHKLPKWNYDGSSTGQAPGEDSEVILYPQAIFKDPFRRGNNILVMCDAYTPAGEPIPTNKRYNAAKIFSHPDVVAEVPWYGIEQEYTLLQKDLKWPIGWPVGGYPGPQGPYYCGAGADKAFGRDVVDSHYKACLYAGINISGINGEVMPGQWEFQVGPSVGISAGDELWVARYILERITEIAGVVVSFDPKPIAGDWNGAGAHTNYSTKSMRNDGGFEVIKKAIGKLQLKHKEHIAAYGEGNERRLTGRHETADINTFSWGVANRGASVRVGRDTEKAGKGYFEDRRPASNMDPYVVTSMIADTTILWKP

SEQ ID NO: 19287 - protein, 185 aa, Populus trichocarpa
MGSRAIAISTLVLRIFTLLALVACVVLFITNTFRYAMFDAGSKVTFKDLTTYRFVLSTAVIGAAYTLLQLPFALYYALTEKRLIKVDILPELDLYGDKIIAFLLASGVGAGFAVSVEIKSLLKDLFDAFALAGFQDTEDSKALYDNFINKGIIATSALAFGFVCMALVSVLSSVNRTKTTKGFFG

SEQ ID NO: 19288 - protein, 218 aa, Populus trichocarpa
MVARMGWGIPEKGWRKGPWTPEEDKLLIEYVSLHGEGRWSSVSRCPGLNRSGKSCRLRWVNYLRPGLKRGQITPQEEGIIIELHALLGNKWSTIARYLPGRTDNEIKNYWRTHSKKKEKSSQKQLEKRKAQILKQEEEHQQHLQQQQQQQQQQLEAGDMNMVNTIAHEKMHGAPEMMYPTVEDQCLPVMSQDVVSWADSVVEDYYRLWGGFWNLDDHP

SEQ ID NO: 19289 - protein, 244 aa, Populus trichocarpa
MGRGRVELKRIENKINRQVTFAKRRNGLLKKAYELSVLCEAEVALIIFSNRGKLFEFCSTSNMLKTLERYQKCSYGAEEVNKPAKELESSYREYLKVKAKFETLQRTQRNLLGEDLGPLNTKELEQLERHLESSLKQVRSTKTQYMLDQLGDLQNKEHMLLEANRALTIKLDEISARNNLRPSWEGDDQQSMSYGHQHAQSQGLFQHLECNPTLQIGYNSVGSDQITATHAAQQVHGFIPGWML

SEQ ID NO: 19290 - protein, 215 aa, Populus trichocarpa
MYSSKGRSESHNEADQAERASSRASDEDENGSARKKLRLSKDQSAFLEESFKEHNTLTPKQKLALAKELNLRPRQVEVWFQNRRARTKLKQTEVDCEYLKRCCETLTEENRRLHKELQELRALKTSNPFYMQLPATTLTMCPSCERVATTSTSTAAATTTTATPTATAATTTTTTNNQNNTADPTSKTTGLSLGSTRPRFYPFSHTQTHPHQHTA

SEQ ID NO: 19291 - protein, 187 aa, Populus trichocarpa
MSRVYVGNLDPRVSERDLEDEFRRFGVIRSVWVARRPPGYAFIDFDDKRDAQDAIHELDGKNGWRVELSHNSRGGGGGGGGGRGGGRGRSGGSDLKCYECGEPGHFARECRLRVGSGGGGRRRSRSPRYRRSPSYGRRSYSPRGRSPKRRSLSPRGRSYSRSPQYRGREELPYANGNGIRDRRRSRS

SEQ ID NO: 19292 - protein, 327 aa, Populus trichocarpa
MRVDIMSSSKKTTSSKEDDAELRRGPWTLEEDTLLVHYIARHGEGRWNLLAKRAGLRRTGKSCRLRWLNYLKPDVKRGNLTPQEQLLILDLHSKWGNRWSKIAQHLPGRTDNEIKNYWRTRVQKQARHLRIDANSTAFQDIIRRSWMPRLLQKIGGSSTSSSAMTCQSPAVSQLIPNYAPQLSAFPTALPPPQQQEAPLDMSVMMHCMEHREQTSDSEHGTSSCISSAESMNVSQMSHLSEYPKSPFQAMGNNGDYSTLVKDCYYVDSNFYDMEAINLATMSVPGELGISAVDRHMGDGDWAGYDFGDTVWNMDELWQFRNLQGKEI

SEQ ID NO: 19293 - protein, 60 aa, Populus trichocarpa
MSRVYVGNLDPRVSERDLEDEFRRFGVIRSVWVARRPPGYAFIDFDDKRDAQDAIHELDG

SEQ ID NO: 19294 - protein, 316 aa, Populus trichocarpa
MEGDAKDETLPPGFRFHPTDEELITYYLQSKISDADFSCRAIGDVDLNKCEPWDLPGKAKMGEKEWYFFSLRDRKYPTGVRTNRATNTGYWKTTGKDKEIFNSVTSQLVGMKKTLVFYRGRAPRGEKTNWVMHEYRFHSKAAFRASKDEWVVCRVFQKSAGVKKYPSNQSRAANPYNLEIGPSVIPSQMMQAAENFQLPIGRNYMMSNAELQAELTRVFRAGGSTGINLPMQSPLNNTYSVGGGGPGGGGCFTISGLNLNLGGAASQPMLRPMAPPVMNQQDAAAYGAEMNTANGHANRFMGMEQCMDLENYWPPY

SEQ ID NO: 19295 - protein, 857 aa, Populus trichocarpa
MVSSSCISLLDLASGNMMNFSQAPRALPRIMTVPGIISDIDGDGTNDGNSDAPSTVKKIIVSNFLPLNAQKDLKSGKWSFSFDEDSLLLQMKDGFSENTEVVYVGSLRVDVDTSEQEEVSQQLLEEFNCVPTFIPSEIYKNFYHGFCKHHLWPLFHYMLPMCPDHGNRFDRLLWQSYVSTNKIFADKVMGVINSEEDYVWVHDYHLMVLPTFLRKRFNRIKLGFFLHSPFPSSEIYRTLPVRDEILKALLNADLIGFHTFDYARHFLSCCSRMLGLYYESKRGHIGLEYFGRTVYIKILPVGIHMGRVESALNHPSSSIKVKEIQKQFKGKRLVVGVDDMDIFKGISLKLLAMEHLLQQNSGMRGKLVLVQIVNPARSSGKAVQEAKMETHTITKRINDTFGFPGYEPVVLIDRHVPFCEKTAYFALAECCIVNAVRDGMNLIPYKYIACRQGTPKMDEALGVASGSRHTSSLVVSEFTGCSPSLSGAIRVNPWDIEAVANALNVAITMPDLEKQLRHEKHYRFVSSHDVAYWARSFMQDLTRACEDHYSKRCWGIGFGLNFRILSLSPSFRKLSNDYIISAYKRTSKRAIFLDYDGTVVAQTSIPKTPSPEVISVLNNLCSDPRNNVFIVSGRGKKSLSDWFAQCENLGIAAEHGYFLRWSGMSDWETRSFAADFDWKNIAEPVMKLYTEATDGSYIETKESALVWHHQDADPDFGSCQAKELLDHLENVLANDPVVVKRGQNIVEVKPQGVTKGFVAEKVLSSMIANGKPPDFVLCIGDDRSDEDMFESMSNTAYGSSLPSAPAIFACTVGQKPSKARYYLDDTVDVLALLQCLADASNSKSSSTETQVSFDNVV

SEQ ID NO: 19296 - protein, 113 aa, Populus trichocarpa
MSKQAALKKAKELASSAPVVVFSKTYCGYCNRAKQLLTQVGATYKVIELDELSGGYELQSALGHWTGQSTVPNVFIEGKHIGGCDSVLEKHKNNQLLPLLNDAGAVAINSAQL

SEQ ID NO: 19297 - protein, 296 aa, Populus trichocarpa
MAQVIARLPLNYRSFEENVGFSDDPAYFTDIVFGFLEEQEVSPDGSCASGGEYNEEDEDEISPCNVEENKKFWDEQNQLLQATLYRTSSLEAKIRQATKDTLKEIDVVGMHCLCGKLVAGDCRDCLQREISIRLQNEGYNCAICKSKWKRSEEIPSGEHTFLEVVGKLSSKKGEVRVVIELNFRAEFEMAKANQEYNQLISRLPEVFVGKAERLTALIKILCSAAKKCMKEKKMHLGPWRKHKYMQSKWIATCERTTPAPLPGGFSDRTAKPRASMLTYDLLETLPVLHCTAVEVL

SEQ ID NO: 19298 - protein, 346 aa, Populus trichocarpa
MGGWKDQTRSSSSEHFMDWNLKATSWDLTEFEQGAVPSICIDAFGRPTNFGANRTGGGFSIDLKLGRVGNSSDESMVNWKQPGVSKLESSPSGSTKRARGANNGTQVAMCLVDGCNSDLSTCRDYHRRHKVCELHSKTPQVTIGGQKQRFCQQCSRFHSLEEFDEGKRSCRKRLDGHNRRRRKPQPDPFSHPPSFLPNHQGTQIFPFSSSHVYHSTAVVNSTWSGVANTEADGGHYNLHQLPDKQNLFLGSSSNSYKGGKLFPFLQCDNPCLNNQTSEASVCLPLPRAIAFPGSSGASSHSMFCDRLATQVQDSDCALSLFCHQHRRMHGETPCCNDITQSPFRIP

SEQ ID NO: 19299 - protein, 345 aa, Populus trichocarpa
MITPKKRSFYAIASAGNPPSLDITNGKKVNGIHVRETPSPYISNTNAGGLAIHSNVAEPHTYLLGRFVEDRLIYRQTFSIRSYEIGPDKTATMETLMNLLQETALNHVTSSGLAGNGFGATREMSLRKLIWVVTRIHVQVQRYSCWGDVVEIDTWVDATGKNGMRRDWIIRDYNTKEIITRATSTWVIMNRETRKLSKIPDEVREELVPFYINRLSIAAEHNDVEKIDKLNNETAGRIRSGLAPRWSDMDANQHINNVKYIGWILESVPMHVLEHYNMTSMTLEYRRECRQSNLLESLTSTSEDSNSGSSNRKAGMEYTHLLRMQSDKAEIVRARTEWKSKLKHK

SEQ ID NO: 19300 - protein, 359 aa, Populus trichocarpa
MAAFSYQHPPLFLDSVILPNITTPIMNMNNSMYWFYDEAGGINTNSFYQVYPPETFHEAPLDVRFHEFSHHDHSSKVSLSDNETSLTKKQSTGSSTVVDKLETGEQVTQEVTPVDRKRKTTNGSLNSAQSKDVKEVKSKRQKKCRGDMKQEEKRPKAVKKVPEEPPTGYVHVRARRGQATDSHSLAERVRREKISERMKMLQRLVPGCDKVTGKALMLDEIINYVQSLQNQVEFLSMKLASVNPMFYDFGMELDAFMVRPERLSSMSPPLPSLQQCSPIQPTAFADAAAAATTTATPTTSFATANNYPLIDNSTSLLLQGMRPSAFTTEDSCNLMWDVDERRQKFLSPSGLTSNLCSFH

SEQ ID NO: 19301 - protein, 202 aa, Populus trichocarpa
MGAKITSSSSSFNVLALLLTLLLCISTNVQLSLADTTSKTYTNYLQTACNSTTYPQLCFKSLSSYTSTIKTNYLKLCRTALTVTLKAASNTSSLVKALSKQKGLSKTEAGIVKDCIEEIGDSIDELNQSLKALGSLKGSDIEFQIANIKTWISAAITDEDTCTEGFEERNITDEVMIKIRKSIVNVARLTSNALALINKLSY

SEQ ID NO: 19302 - protein, 1126 aa, Populus trichocarpa
MSSSRPSHSSSNSARSRHSARIIAQTTVDAKLHADFEESGSSFDYSSSVRVTDSVGGDQPPRSDKVTTTYLHHIQKGKLIQPFGCLLALDEKTFKVVAYSENAPELLTMVSHAVPSVGEHPVLGIGTDIRTIFTAPSASALQKAMGFGDVSLLNPILVHCKTSGKPFYAIVHRVTGSLIIDFEPVKPYEVPMTAAGALQSYKLAAKAITRLQSLPSGSMERLCDTMVQEVFELTGYDRAMAYKFHDDDHGEVVSEVTKPGMEPYLGLHYPATDIPQASRFLFMKNKVRMIVDCHAKHVKVLQDEKLPFDLTLCGSTLRAPHSCHLQYMENMNSIASLVMAVVVNDGDEDGDTPDSVNPQKRKRLWGLVVCHNTSPRFVPFPLRYACEFLAQVFAIHVNKELELENQIVEKNILRTQTLLCDMLMRDAPLGIVTQSPNIMDLVKCDGAVLFYRNKIWRLGITPSDLQLQDIAFWLSEYHMDSTGLSTDSLYDAGYPGALALGDVVCGMAAVRITSKDMLFWFRSQTAAEIRWGGAKHEPGEKDDGRRMHPRSSFKAFLEVVKTRSLPWKDYEMDAIHSLQLILRNAFKDIETMDVDTKTIHARLSDLKIEGMQELEAVTSEMVRLIETATVPILAVDVDGLVNGWNTKISELTGLLVDKAIGKHLLTLVEDSSVDIVKRMLFLALQGKEEQNIQFEIKTHGSKSECGPICLVVNACASRDLHENVVGVCFVGQDITGQKMVMDKFTRIEGDYKAIVQNRNPLIPPIFGTDEFGWCSEWNPAMTNLTGWKREEVLDKMLLGEVFGLNMACCRLKNQEAFVNLGVVLNTAMTGQESEKVSFGFFARTGKYVECLLCVSKKLDREGAVTGVFCFLQLASQELQQALHVQRLSEQTALKRLKALAYLKRQIWNPLSGIIFSGKMMEGTELGAEQKELLHTSAQCQCQLSKILDDSDLDSIIEGYLDLEMVEFTLREVLVAATSQVMMKSNEKGIRIINDAAEETMAETLYGDSIRLQQVLADFLQMSVNFTPSGGLLSVSASLTKDQLGQSVYLVHLELRIRHPGAGIPEALLDQMFGEDTDASVEGISLVISRKLVKLMNGDVRYMREAGKSSFIISVELAGGHKSQKRA

SEQ ID NO: 19303 - protein, 351 aa, Populus trichocarpa
MGKSPCCEKNGLKKGPWTEEEDKKLISYIQKHGHGRWRLLPKNAGLKRCGKSCRLRWTNYLRPDIKRGKLSFEEEETIIQLHSVLGNKWSAIATRLPGRTDNEIKNYWNTHIRKRLLRMGIDPVTHKPHLDLLQLYSVLNSTVHNSSQLNISSSLGIGPILSPDLLNLATPYLSCQGNYISQDVSPKLVQDSQVGNNHVQNQFQCFQPNELQNQIQACTNTLSAQFLYETQISAANLEQLSCNPTNFSCQNSLRSSWHANGESTPDICESLMSNYVYHDSNNKPITNDISFETLQSLSFGSLLSTPSSSTTPLRSSSTTYVNVSTEDEKDSYCSNMLVFDMPNSLDASRLI

SEQ ID NO: 19304 - protein, 539 aa, Populus trichocarpa
MALANFLFILFLLPSLEALSNVIPSEEQELNTQALILQACSNVENLSSCLSNFQAELQKSGPPTAQSIIHAALRATLDEARRAIDTITKFNSLSISYREQVAIEDCKELLDFSVSELAWSLMEMNKIRAGIKNVHYEGNLKAWLSAALSNPDTCLEGFEGTDRHLENFISGSIKQVTQLIGNVLGLYTQLHSLPFKPTRNDNATTPKSSSDKFPEWMTEGDQELLKGSSLGMHVDAIVALDGSGHYRTITEAINEAPSYRTRRYIIYVKTGVYRENIDMKRKKSYIMLVGDGIGKTVVTGNRNFMQGWTTFRTATVAVSGKGFIARDMTFRNTAGPLNHQAVALRVDSDQSAFYRCSMEGYQDTLYAHSLRQFYRECEIHGTIDYIFGNGAAVFQECKIYTRVPLPLQKVTITAQGRKNPHQSTGFSIQNSYIFASQPTYLGRPWKQYSRTVFMNTYMSALVQPRGWLEWYGNFALGTLWYGEYRNRGPGALLSGRVKWPGYHIIQDARTAKFFTVTQFIDGMSWLPSTGIKFTVGLGN

SEQ ID NO: 19305 - protein, 660 aa, Populus trichocarpa
MRVKHKAAFAFLFLFVSEYYFLGLVVAADDGPKLGTVIGIDLGTTYSCVAVSRDGHVEIIANDQGNRVTPSWVAFTDTERLIGEAAKNQAPMNPERTIFGVKRLIGRKFDDPEVQRDIKFLPYKVVNKDGKSYIQVKVKGETKVFSPEEISAMILGKMKETAESYLGKKIKNAVVTVPAYFNDAQRQATKDAGIIAGLNVPRIINEPTAAAIAYGLDKKGGDMNILVYDLGGGTFDVSILTIDNGVFEVLSTSGDTHLGGEDFDQRLMDYFINLVKKKYNKDMSKDKKALGKLRRECERAKRALSSQHQVRVEIESLIDGIDFSEPITRARFEELNMDLFKKTLGIVKKAMDDAGLKKADIKEIVLVGGSTRIPKVQEMLKEYFDGKEPNKGVNPDEAVAYGAAVQGGILSGEGGEETKGLLLLDVTPLSLGIETVGGVMTKLIPRNTVIPTKKSQIFTTYQDQQTTVSIKVYEGERSLTKDCRELGRFDLSGIPPAPRGVPQIEVTFEVDANGILHVKAEDKAAKKSQSITITNDKGRLSQEEIDRMVKEAEEMAEEDKKVREKIDARNKLETYIYNMRSTINDKDKLADKIDSDDKERIETALKEALEWLDDNQNAEKDDYEEKLKEVEEVCDPVIKQVYEKSGSSADSEYEEPNDEL

SEQ ID NO: 19306 - protein, 604 aa, Populus trichocarpa
MGGVQADRGEGIKKRGCSCTKDDFLPEESFRSWTNYVHAIRQTPVRFSDRLLTRSLDSTELNEIKSRSEHDMKKNLTWWDLMWFGVGAVVGAGIFVLTGLEARENTGPAVVLSYVVSGVSAMLSVFCYTEFAVEIPVAGGSFAYLRVELGDFMAFIAAGNILLEYVIGGAAVARSWTSYFATLCNHQPDDFRIIAHSLPDDYGHLDPIAVVVSSLICVLAVLSTKGSSRFNYITSIMHVAVIVFIIIAGLTKADRGNYKPFMPYDVRGIFVGSAVLFFAYVGFDAVSTMAEETENPARDIPIGLLGSMTIVTVAYCLLAATLCLMVPYKQLDGEAAFSSAFDYVGLHWAKYIVALCALAGMTTALLVSAVGQARYLTHIARTHMMPPWLAHVNAKTGTPVNATVIMLGATAIVAFFTKLNILSNLLSISTLFIFTLVAVALLGRRYYVSGVTTPVNHIKFILCIATILGSSTATSIIWGLGGDGWVGYVITVPIWFLGTLALEVLVPQARDPKLWGVPLVPWLPSASIFINIFLLGSIDKASFERFGVWTGILLIYYFLFGLHASYDTAKESGENKAADGWKKMEEGVVSSQVEPESLNANSAN

SEQ ID NO: 19307 - protein, 386 aa, Populus trichocarpa
LIRQSSVYSLTFDEFQNTWGGGLRKDFGSMNMEELLKNIWTAEETQAMTNTLGVGSEGSAPGGNLQRQGSLTLPRTLSQKTVDELWRDLIKETSGAAEDGSGSAGSNLPQRQQTLGETTLEEFLVRAGVVREDTQQIGRPDNSGFFGELSLLNNNNDSSLAIGFQQPNGNNGLMGTWRMENNGNLVANQPPSLTLDAGGIRPTQQLPQSRQLSQQQQLLFPKPAATVAFASPLHLSNNAQLASPGVRRSVVGIADRSVNNGLAHSGGMGIVSLATGGSNADTSSLSPVPYVFSRGRKASTALEKVAERRQRRMIKNRESAARSRTLKQAHTQKLEDEVAKLKELNEVLQRKQAEIIEMQQNQFFETKKAQWGGKRQCLRRTLTGPW

SEQ ID NO: 19308 - protein, 588 aa, Populus trichocarpa
MSSLSVRFLTPQLSPTVPSSSARPRTRLFAGPPTVAQPAETGVDAGRLEPRVEKKDGYYVLKEKFRQGINPQEKVKIEKEPMKLFMENGIEELAKLSMEEIDKEKSTKDDIDVRLKWLGLFHRRKHQYGRFMMRLKLPNGVTTSAQTRYLASVIRKYGKDGCADVTTRQNWQIRGVVLPDVPEILRGLAEVGLTSLQSGMDNVRNPVGNPLAGIDPDEIVDTRPYTNLLSQFITANSRGNPEFTNLPRKWNVCVVGSHDLYEHPHINDLAYMPAMKDGRFGFNLLVGGFFSPKRCAEAIPLDAWVSADDVLPSCKAVLEAYRDLGTRGNRQKTRMMWLIDELGIEGFRSEVVKRMPRQELERESSEDLVQKQWERRDYFGVHPQKQEGLSYAGLHIPVGRVQADDMDELARLADIYGTGELRLTVEQNIIIPNIEDSKIEALLKEPLLKDRFSPEPPLLMQGLVACTGKEFCGQAIIETKARAMKVTEEVQRLVSVSKPVRMHWTGCPNTCGQVQVADIGFMGCMARDENGKICEGADVYVGGRVGSDSHLGELYKKSVPCKDLVPLVVDILVKQFGAVPREREEVDD

SEQ ID NO: 19309 - protein, 225 aa, Populus trichocarpa
MDSSFFHYQNSQFSPESSSSFNSLDSSSCNAQNFYSQPLPFNENDSQEMLLLGLLNEAPINSFDTTSSTNSNYDEVSSRADYQGEQPREISYRGVRRRPWGKYAAEIRDSTRNGVRVWLGTFDTAEAAALAYDQAAFAMRGSMAVLNFPAQKVYESLKETGYGFQEGQSPILAMKKRHSMNRKAESRKRKEKEIRTEMENVVVLEDLGAEYLEELLAISESASPW

SEQ ID NO: 19310 - protein, 294 aa, Populus trichocarpa
MALLSLLFLLSIGGASSASALSICPDESALFLYDIQSQCPVSIYPNPPLQVDGDFLDRALTSKQRNAYTSVLFYASWCPFSCSMLPKFEILSSMFPQIEHLAVEQSSALPSIFSRYGIHSLPSILIVNQRSKVQYRGPKNLQSLAQFYKKTTGLEPVQLFTKDDSSSTEGHEKSILQPWNGPSLEEIIKREPYLALATLFLCLRVLLYASPKALSHLKAFYVSYIPHFNLEIFGETSQFFGRILHMIDVRRIWTKLRLCKTRNFHERAKNCRVWASSLASVSLGESSSSTRSQS

SEQ ID NO: 19311 - protein, 502 aa, Populus trichocarpa
MQACSDVENQSSCLSNFQAELKKSGPTAHSILHAALRATLDEAMRAIDMITKFNALSVSYREQVAIEDCKELLDFSVSELAWSLKEMNNIRAGIKNVHYEGNLKAWLSAALSNPDTCLEGFEGTDGHLENFIRGSLKQVTQLIGNVLALYTQLHSLPFKPPRNDNGTTTNSGSDKFPEWMTEGDQELLKGSSLGMHIDAIVAGDGTGHYRTITEAINEAPSYSNRRYIIYVKKGVYRENIDMKRKKSNIMFVGDGIGQTVVTGNRNFMQGWTSFRTATVAVSGKGFIARDMTFRNTAGPLNHQAVALRVDSDQSAFYRCSMEGYQDTLYAHSLRQFYRECEIYGTIDYIFGNGAAVFQNCKIYTRVPLPLQKVTITAQGRKNPHQSTGFSIQDSYIFASQPTYLGRPWKQYSRTVFMNTYMSALVQPRGWLEWYGNFALGTLWYGEYRNHGPGALLSGRVKWPGYHIIQDVATAKFFTAAQFIDGLSWLPSTGVKFTAGLSN

SEQ ID NO: 19312 - protein, 565 aa, Populus trichocarpa
MLKQVIVATKNERITTEADAKESSCQKEQDDQLESARAEMGEVRKENQRLKIHLDRVVKDYRTLQVQFYEIIQQEETKKSTDTVDDHQGTEEHELVSLTLGRISSEPKRDGKNNKTSSQGKNHDEQVKESLSLGSLCTFEASKSATNETLPNPSPVNSFGEPKEEAGETWPPSKALKTMRGGDDEVPQQNPAKKARVSVRARCDTPTMNDGCQWRKYGQKIAKGNPCPRAYYRCTVAPSCPVRKQVQRCAEDMSILTTTYEGTHNHPLPISATAMASTTSAAASMLLSGSSSSSAGTAGFNNSGTIAVDLHGLNYYLSDNSKSKQFYLHNSSLSSSSPYPTITLDLTSNPSSASSHFNRFTTSSYRPTIQKFASTSLNFGSSDSSNAMPWGNGFLTASGQSHNRINQLGTLNIGRPAMDQSNIYDQFYTQNINDLAAATSQQSLSADTIAAATKAITADPSFQSALAAALTSIIGTGTGSSATGVANLGVVNNLFPKSERGPVINSFSSSPPNGNPCASYFNKTTSSINSQPAPSSMTMFVPPSLPFSTPTNASASAVDKNDRAN

SEQ ID NO: 19313 - protein, 589 aa, Populus trichocarpa
NLQAANVGFGRVFSLAKPDAGKLIIATLALLIASTSNILIPKFGGKIIDIVSGDIETPEQKAEGLRAVNSTKSFSLSYSVCAALRAWLFSSTSERVVARLRKNLFNHLINQEIAFFDVTRTGELLSRLSEDTQIIKNAATSNLSEALRNVSTALIGLGFMLATSWKLTLLALVVVPAISVAVNQFGRFLREISHKTQAAAAAAASIAEESFGAIRTVRSFAQEGYESSRYSEKVDETLKLGLKQAKLVGLFFGGLNAASTLSVIIVVIYGANLTITGSMTTGALTSFILYSLTVGGSISGLSGLYTVAMKAAGASRRVFQLLDRVSSMPKSGNKCPLSEQVGDVELDDVWFAYPSRPNHMVLQGITLKLQPGSKVALVGPSGGGKTTIANLIERFYDPIKGKVLLNGVPLVEISHEHLHRKISIVSQEPVLFNCSIEQNIAYGCEGKVSSMDIENAAKMANAHDFISKFPDKYQTFVGERGLRLSGGQKQRVAIARAILMNPRILLLDEATSALDAESEYLVQDAMDSLMKGRTVLVIAHRLSTVQSADIVAVVSDGQIVERGTHEELLSKDGVYTALVKRQLQGPKTE

SEQ ID NO: 19314 - protein, 593 aa, Populus trichocarpa
NLQAANVGFGRVFSLAKPDAGKLIIATLALLIASTSNLLIPKFGGKIIDIVSGDIETPEQKAEGLRAVNSTILQIFLVVVVGSVCTALGAWLMSSTSERVVARLRKNLFNHLINQEIAFFDVTRTGELLSRFSEDTQIIKNAATSNLSEALRNVSTALIGLGFMLATSWKLTLLALVVVPAISVAVNQFGRFLREISHKTQAAAAAAASIAEESFGAIRTVRSFAQEGYESSRYSEKVDETLKLGLKQAKLVGFFFGGLNAASTLSVIIVVIYGANLTITGSMTTGALTSFILYSLTVGGSISGLSGLYTVAMKAAGASRRVFQLLDRVSSMPKSGNKCPLSEQVGDVELDDVWFAYPSRPNDMVLRGITLKLQPGSKVALVGPSGGGKTTIANLIERFYDPIKGKVLLNGVPLVEISHEHLHRKISVVSQEPVLFNCSIEQNIAYGCEGKVSSMDIENAAKMANAHDFISKFPDKYQTFVGERGLRLSGGQKQRVAIARAILMNPRILLLDEATSALDAESEYLVQDAMDSLMKGRTVLVIAHRLSTVQSADIVAVVSDGQIVERGTHEELLSKDGVYTALVKRQLQGPKTE

SEQ ID NO: 19315 - protein, 594 aa, Populus trichocarpa
NLQAANVGFGRVFSLAKPDAGKLIIATLALLIASTSNILIPKFGGKIIDIVSGDIETPEQKAEGLRAVNSTILQIFLVVVVGSVCTALGAWLMSSTSERVVARLRKNLFNHLINQEIAFFDVTRTGELLSRFSEDTQIIKNAATSNLSEALRNVSTALIGLGFMLATSWKLTLLALVVVPAISVAVNQFGRFLREISHKTQAAAAAAASIAEESFGAIRTVRSFAQEGYESSRYSEKVDETLKLGLKQAKLVGFFFGGLNAASTLSVIIVVIYGANLTITGSMTTGALTSFILYSLTVGGSISGLSGLYTVAMKAAGASRRVFQLLDRVSSMPKSGNKCPLSEQVGDVELDDVWFAYPSRPNDMVLRGITLKLQPGSKVALVGPSGGGKTTIANLIERFYDPIKGKVLLNGVPLVEISHEHLHRKISVVSQEPVLFNCSIEQNIAYGCEGKVSSMDIENAAKMANAHDFISKFPDKYQTFVGERGLRLSGGQKQRVAIARAILMNPRILLLDEATSALDAESEYLVQDAMDSLMKGRTVLVIAHRLSTVQSADIVAVVSDGQIVERGTHEELLSKDGVYTALVKRQLQGPKTEG

SEQ ID NO: 19316 - protein, 362 aa, Populus trichocarpa
MGRAPCCDKNGLKKGPWTPEEDQKLTAYIQLQGPGNWRSLPKNAGLQRCGKSCRLRWTNYLRPDIKRGRFSFEEEESIIQLHSILGNKWSAIAARLPGRTDNEIKNYWNTHIRKRLLRNGIDPVTHASRLDLLDLSSILSSALCNPSSLLTLSTLVGNTQALLNPDIFRLSTTLSSLKQENSDLFLQQLQENELCSSLLQNQAIPTLSSQSNQFQNQAELIPACTTTTSTGTFLNQTTPLMLANVEGFSPNTTSTFSCQNSQENSVPLNEGLVSQPNFYCNSTTTTNPTVPELEEYSGFQSANNGYRNFSIGSVISTRFTSPDPLNSPSTYVNSSSTEDDRECYSSLLKFEIPESFDIDDFL

SEQ ID NO: 19317 - protein, 302 aa, Populus trichocarpa
MLLLGLVHAQLSTTFYATTCPKALSTIRTAVLKAVVKEHRMGASLLRLHFHDCFQGCDASVLLDDTSSFTGEKTAGPNANSLRGYDVIDTIKSQLESICPGVVSCADILAVAARDSVVALSGPSWTVQLGRRDSTTASLGAANSDLPSPLMDLSDLITSFSNKGFTAKEMVALSGSHTIGQARCLLFRNRVYNETSLDSTLATSLKSNCPNTGSDDSLSSLDATTPVTFDNSYFKNLANNKGLLHSDQQLFSGGTTDSQVKTYSINSATFYADFASAMVKMGSISPLTGSDGQIRTNCAKVN

SEQ ID NO: 19318 - protein, 320 aa, Populus trichocarpa
MAAIQSFLYFATLVAILIPVSAQLTPDFYDKVCPQALPIIRKITKQAIRREPRMGASLLRMHFHDCFVNGCDGSVLLDDTANFTGEKTALPNLNSLRGFEVVDQIKSAINQACSANVVSCADILAVAARDSVNLLGGPAYKVLLGRRDSRTASKNDANTNLPPPFFNFSQLLSNFQSHGLNLTDLVVLSAGHTIGLARCTTFRDRIYNDTNINYKFAASLKYSCPRTGGDNNTKPFDSTTTRFDAQYFRDLLAKKGLLHSDQELFKGDGSGSDSLVKYYGYINPDRFLTDFSASMVKMGNMKPLTGTNGEIRMNCRKVNN

SEQ ID NO: 19319 - protein, 206 aa, Populus trichocarpa
METSFLGLALAAILILQFSTPINSSFSATTSLPSRNTYIEYIKTSCYNTTFYPKLCYHTLVIYASTIKTNPKLLAKTALNVSLINTNSTSRLMIRVSKIPGLEPRVVAATLDCVEEVGDSVYELQRSMEEIGHAGGSDFSKAMSDVETWVSAALTDDDACLDGFAEEVMNKKVTAIVKRHIRRIARLTSNALALVNRYASTQANLP

SEQ ID NO: 19320 - protein, 492 aa, Populus trichocarpa
MSGSVKDVKSKAELDNITKSGEAVIIHFWASWCDASKQMDQVFSHLSTDFPNTHFLTVEAEEQPEISEAFSVSSVPYFVFVKDGKTVDTLEGADPSSLATKVARVAGSANPGEPAAPASLGMAAGPTVLETVKEFAKENGSSPQANQAQPGLSDTLKNRLQQLIDSHPIMLFMKGNPEAPRCGFSQKVIDILKDENVKFGTFDILSDNEVRDGLKLLSNWPTFPQLYCKGELLGGCDIAIAMHESGELKEVFRDHGIDAIGSVEAKVGGSENGKGGITQSTGLSTTLTSRLESLINSSPVMLFMKGKPTEPKCGFSGKVVAILQEEKVTFESFDILTDEEVRQGLKVYSNWSSYPQLYIKGELIGGSDIVLEMQKSGELKRILVEKGIVQKETLEDHLKSLITSSPVMLFMKGTPDAPRCGFSSKVVNALKEKGVSFGSFDILSDEEVRQGLKVFSNWPTFPQLYYKGELIGGCDIILELRDNGELKSTLSE

SEQ ID NO: 19321 - protein, 307 aa, Populus trichocarpa
MMCSARIRIPFDQQNLMSNVNQFELLDQPAPSLSDMVFGFLEDGESWSESGSSEGYHENKIMDLEEEEEENNGNVEENRSFWENQHQLLHATLCRTSSLESSIRSITKDALKERQMAGNCGCGRPMAAGCRSCLMAEVSSRLRNAGHNSAICKTKWRSSPDIPAGEHTFMDVIDNTVSKRGEVRVIIELNFRAEFEMAKASEEYNQLVHRLPEVFVGKVERLNSVIKTLCLAAKKCMKEKKMHLGPWRKQRYMQAKWLATACERATSMPPLSMGHSGRLLRPKASMLTVDLKEMLPHVHCTAATVVW

SEQ ID NO: 19322 - protein, 967 aa, Populus trichocarpa
MKHIFKKLHIGSNHESSPNRTSNETATSASSPPPSGSSDQRASATINSPASPPLTSPSPATTVQPSAISNLTDYFTSEEEFQVQLALAISASNSEFRDDTEKDQIRAATLLSLGGGNNRVDVDREKGEEKVEDMSRYYWEYNVLDYGEKVMDGFYDVLCTSSAVQGKMPSLTDLETNASSSGFEAVIVNRKIDPTLEELMQIAQCIALDCPATNVAVLVQQLAELVTGHMGGPVKDANLILAKWIERSSELRTSLQTSVLPIGSINIGLSRHRALLFKVLADTIKLPCRLVKGSHYTGIEDDAVNIIKLKDEREFLVDLMAAPGTLIPADVPSAKDSTFKIPSLRSTNDTGVVFTRPNPLPGEGTSQSSSVDGISPFNSRLNSENAESLPFFSGSSSDAGVGSSGVANKAAPTNQFGNISSTAIGTSVYKGSRGGHAVGDGVRMNVNVVPYGPNSPEDSKNLFSDLNPFQIKGTGKSFMHHKPVENKINEFPGRKNNPVPGPPAPLVWKNRYAYNEVPRRKENELVEGLYPRINREPNNYNQSLASTSSSEKVYPQGFKSSSNFNPSNKESDTRNYASSVSSALSSDPSQCYSFPSVEEANSNFKENKLWDAKNLQNDSEAMAKEHEDNEIDFHDRRKCTYDRFMGTNLKLKDPESPSASVDPISHRVDQIMDDVDVGDEICWEDLIIGERIGLGSYGEVYHADWNGTEVAVKKFLDQDFSGAALDEFKREVRIMRRLRHPNVVLFMGAVTRPPNLSIITEFLPRGSLYRILHRPQCQIDEKRRIRMALDVARGMNCLHASIPTIVHRDLKSPNLLVDKNWTVKVCDFGLSRLKHNTFLSSKSTAGTPEWMAPEVLRNEPSNEKCDVYSFGIILWELATIRLPWSGMNPMQVVGAVGFQNRRLEIPKEVDPLVARIIWECWQTDPNLRPSFAQLTVALKPLQRLVIPSHLDQPSPPLQQEIAVNSTP

SEQ ID NO: 19323 - protein, 356 aa, Populus trichocarpa
MSLLTDLINLNLSDTTDKIIAEYIWIGGSGMDLRSKARTLDGAVSDPQKLPKWNYDGSSTGQAPGEDSEVILYPQAIFKDPFRRGNNILVMCDAYTPAGEPIPTNKRHSAAKIFSHPDVVAEVPWYGLEQEYTLLQKDLKWPLGWPVGGYPGPQGPYYCGAGADKAFGRDIVDSHYKACLYAGINISGINGEVMPGQWEFQVGPSVGISAGDELWVARYILERITEIAGVVVSFDPKPIPGDWNGAGAHTNYSTKSMRNDGGFEIIKKAIGKLQLRHKEHIAAYGEGNERRLTGRHETADIHTFSWGVANRGASVRVGRDTEKEGKGYFEDRRPASNMDPYIVTSMIAETTILWKP

SEQ ID NO: 19324 - protein, 252 aa, Populus trichocarpa
MSGGQRRLSKVANPTNHLSIVGNFVGALLGASMGLKEGPIFFFAVGLAHYTVLFVTLYQRLPTNETIPEELHPVFFLFVAAPSVASMAWANIQGSFDHGSRIPYFIALFLYLSLAVRVNFFRGFKFSLSWWAYTFPMTGAAIATIRYSNEVTNVVTQVLAVIFSTVSTLTVSALLVSTIVHAFVLQDLFPNDIAIAISNRKPRQHHQRKWFHLRRGSSVEKEIEHYLKFTNSDGKDIESSLDPTTSSSDSSH

SEQ ID NO: 19325 - protein, 725 aa, Populus trichocarpa
MEYGSVGGGTSGGGGGDHDSSDPQRRKKRYHRHTALQIQKLESMFKECPHPDEKQRLQLSRELGLAPRQIKFWFQNRRTQMKAQHERADNSSLRAENDKIRCENIAIREALKNVICPSCGGPPVTEDSYFDEHKLRMENVQLKEELDRVSSIAAKYIGRPISQLPPVQPFHISSLDLSMGNFGAQGIGGPSLDLDLIPTSSNLAFQPPVISDMDKSLMTDVAANAMEELLRLLQTNEPLWMKSSADGRDVLNLDSYQRIFPRAMSHLKNPNVRIEASRDSGVVIMNGVALVDMFMDSNKWVESFPTMVSVAKTIEVISSGMLGSHSGSLQLMYEELQVLSPLVPTREFCILRYCQQIEQGLWAIVSVSYDIPQFASQFRCHRLPSGCLIQDMPNGYSKVTWVEHVEIEDKTTTHQLYRDLIHSGMAFGAERWLATLQRMCERVACQMVSGNSTRDLGGVIPSPEGKRSMMKLAQRMVSSFCSSISTSNSHRWSTLSGLHDVGVRVTLHKSTDPGQPNGVVLSAATTFSLPVSPQNVFSFFKDERTRPQWDVLSSGNAVQEVAHITNGSHPGNCISVLRVRLSLFGSFSTFYSDCFTAYNTSQNNMLILQESCVDSSGSLVVYCPVDLPAINIAMSGEDPSYIPLLPSGFAISPDGRPDQGDGASTSSNTQGSTARLSGSLITVAFQILVSSLPSAKLNLESVNTVNNLIGTTVQQIKAAMNCPSS

SEQ ID NO: 19326 - protein, 598 aa, Populus trichocarpa
MACLEVCKEDKFKEGEGECTFDGTVDWHGRPAIKAKSGQWAAGIIILLNQGLATLAFFGVGVNLVLFLTRVLQQSNADAANNVSKWTGTVYIFSLVGAFLSDSYWGRYKTCAVFQVIFVIGLVILSLASHLFLIRPKGCGDELTPCGSHSSMEVSLFYLSIYLIALGNGGYQPNIATFGADQFDEDDPREGYSKVAFFSYFYLALNLGSLFSNTILGYFEDEGMWALGFWMSAGSAFAALVLFLGGTARYRHFKPSGNPLSRFGQVIIAAMKKCRVEMPPDGEEELYDVDRKDCSMNGNRKILHTDGFKFLDRAAFISSRDIDDQKRGCRNPWRLCPITQVEEVKCILRLLPIWLCTIIYSVVFTQMASLFVEQGAAMKTTISNFKIPPASMSTFDILSVAFFIFLYRRVLDPLVSSFKQTSSKGLTELQRMGVGLVIAIMAMVSAGLVECYRLKYARKDCKHCEGSSSLSIFWQAPQYALIGASEVFMYVGQLEFFNAQTPDGLKSFGSALCMTSISLGNYVSSLLVTMVVKISTEDHMPGWIPGNLNTGHLDRFYFLLAGLTTIDLVVYMACARWYKSIKLEKKCEENDHEENFRV

SEQ ID NO: 19327 - protein, 377 aa, Populus trichocarpa
MGSKFCVTVVAVHKCDISEPLNFGNGKPTIPVLNNQTLPKFLESARVDKTVNRNDTRLKLFSGTANPALSQEVARYMGLELGKINIKRFADGEIYVQLQESVRGCDVFLLQPTCPQANENLMELLIMIDACRRASAKNITAVIPYFGYARADRKASFMAGQLLTQGRESIAAKLVANLITEAGATRILACDLHSGQSMGYFDIPVDHVYGQPVILDYLASKTICFSDLVVVSPDVGGVARARAFAKKLSDAPLAIVDKRRHGHNVAEVMNLIGDVKGKVAVMVDDMIDTAGTIAKGAALLHEEGAREVYACCTHAVFSPPAIERLSSGLFQEVIITNTIPVAEKNYFPQLTVLSVANLLGETIWRVHDDCSVSSIFQ

SEQ ID NO: 19328 - protein, 500 aa, Populus trichocarpa
VRLRSGADMMRKLKWYDLIALGIGGMLGVGVFVTTGLVAHQISGPSVFISYIIAGISALLSSLCYTEFSVQIPVAGGAFSYLRVTFGEFVGYFAGANILMEYVLSNAAVARTFTEYLCHAVGENPNSWRFEVDGLVEGYNKLDFPAVALILLLTLCLTKESSVLNLVMTVFHLIFFGFIIIAGFYKGSAKNLVEPGGLAPFGVKGILDGAATVYFSYIGYDSVSTMAEEIRNPAKSLPVGIVGSVLIVTGLYCLVALSLCFLVPYNMIDKDASFSVAFQKIGWKWAGNVVGAGASLGIVASLLVAMLGQARYLCVIGRARLVPSWLAKVNPSTGTPLNATLFLGLCTASIALFTELHIIIDIISISTLLVFYLVANALIYRRYVIVSHNPPSQTLLFLFLLSSCSIGFSMSWKLEEQWWVLPVFGGFMITITAFFQYMVPSICQTNEEWSVPFMPWPAVASIFLNVFLVTSLKIPSFQRFGIWACLITLFYVLYGVHSTY

SEQ ID NO: 19329 - protein, 300 aa, Populus trichocarpa
MLICCMLFISEARNRAALDLIERSARIDPESVIVNKFEDRVYNRIRFTIVSYVVVDSTGSPIYSPLHQTVLAIVEAAYGAINLELHSGAHPRLGVVDDIAFHPLAEASLDEAAWLAKAVAADIGSRFQVPVFLYAAAHPTGRAPDTIRRELGYYRPNFMGSQWAGWNIPEILPENPDHGPNHVSRTRGVTLIGARSWVTLYNIPIMCTDVSTARRIARMVSARGGGLPTVQSLALFHGDDSAEIACMLLEPNRIGPDRVQAQVEMLAAQEGLDVEKGYFTDLSPEMIVQKYMNLISARRD

SEQ ID NO: 19330 - protein, 290 aa, Populus trichocarpa
MLACCKVYISESRNKVALESIERAAKLFPEAPIVNKFEDVTYNRVGYTLVSSLAPKPSLDSCALKGVVLAMVKAALETIDFGLHCGSHPRLGVVDHICFHPLAQSSLDQAAGIAKSLAVDAGSSLQVPTFLYGAANVEGRTLDSIRRELGYFKPNSGNQWAGGPKSESLPLKPDEGPAQVNQAKGVLVIGATRWVDNYNVPVFSTDIAAVRRIAKRVSGRGGGLPSVQAMALAHGDDVIEVACNLLEPSNVGGEMVQQEVERLAKEEGMAVGKGYFTDFSQDKIIENYLK

SEQ ID NO: 19331 - protein, 591 aa, Populus trichocarpa
MAASSGSLDTSGNSHPQSSNNYFSFSTNSSNHYPFMTSSSFTDLLASNDEEPVNNNTGNSKLGDRIAERTGSGVPKFKSTPPPSLPLSPPPVSPSYYFAIPPGLSPTELLDSPVLLNPSNILPSPTTGTFPGQGLNWKSSSGNIQQNVKKEDRSFSDFSFQQPARPSTTSSAMFQSSNSTVQPGQQQTWGFQEPAKQDEFVSGKSNMVKMEYNSNSMKSFSPEIAAIQANPQSNNGFQSDHGNQPQQYQSVREQKRSDDGYNWRKYGQKQVKGSENPRSYYKCTFPNCPTKKKVERSLDGQITEIVYKGSHNHPKPQSTRRSSSTGSNPAMIPAPNSNSNEIQDQSYVTHGNGQMDSSVATPDNSSISIGDDDFDSQKSKSVGGDDLDEDEPEAKRWKRERDNEGISAPGSRTVREPRVVVQTTSDIDILDDGYRWRKYGQKVVKGNPNPRSYYKCTFQGCPVRKHVERASHDLRAVITTYEGKHNHDVPAARGSGSRSLQDHSNNGNNNAAMAIRPSTVNHVSNNPIRNQRAPPTATSEGDMPFTLEMLQSPGSFGFSGFGNLMGSYMSQSSTDEVLSRAKRELEVESFW

SEQ ID NO: 19332 - protein, 312 aa, Populus trichocarpa
MVSVTLALLLIYTSSSSAHLSTDFYDKSCPQLFGTVKSVVQSAIAKERRMGASLVRLFFHDCFVKGCDASILLEDTATFKGEQGAGPNNNSVRGYNVVAKIKSKLEKVCPGIVSCADIVVIAARDSTVLLGGPYWKVKLGRRDSKTANMNAASKSLPSDTSTVSQLIKRFKSKGLSATDMVALSGSHTIGQTKCKTFRARIYNETNIDKSFATMRQKMCPLTTGDDNLAPLDFQTPNVFDNNYYKNLIHKKGLLHSDQVLFSGESTDSLVRTYSNNPDIFFSDFAAAMVKMGDIDPRTGTRGEIRKKCSCPN

SEQ ID NO: 19333 - protein, 325 aa, Populus trichocarpa
MARPSSFSSYMAIFTLAFLVIFTSHSSAQLSTNFYSKSCPKVFGAVKSVVQSAVSKERRMGASLVRLFFHDCFVKGCDGSILLEDTSSFTGEQTAGPNNNSVRGFNVVAKIKSQVEKVCPGIVSCADIVAIAARDSTVILGGPFWNVKLGRRDSKTASLSAANSGVIPPPTSTLSNLINRFNSKGLSVKDMVALSGSHTIGQARCTSFRARIYNETNIDSSFATTRQKNCPFPGPKGDNKLAPLDVQTPTSFDNKYYKNLISQKGLLHSDQVLFNGGSTDSLVRTYSSNPKTFSSDFVTAMIKMGDIDPLTGSQGEIRKICSKRN

SEQ ID NO: 19334 - protein, 300 aa, Populus trichocarpa
MLVSCMLYISEARNRAVLDLIERAARLDPESVIVNKFEDRVYNRIRFTIVSYVVVDSTGSPIYSPLHQTVLAMVEAAYGAINLELHSGAHPRLGVVDDIVFHPLARASLDEAAWLAKTVAADIGSRFQVPVFLYAAAHPTGRAPDTIRRELGYYTPNFMGNQWAGWTIPEILPGAPDEGPTHVSRTRGIVMIGARPWVALYNIPVVCTDVSTARQIARMVRARDGGLPTVQALALVHGDDSFEIACILLEPNQVGAERVQAEVEMLAAQEGLEVEKGYFTDFPPEMIVEKYMNLISSRRD

SEQ ID NO: 19335 - protein, 298 aa, Populus trichocarpa
MAQVIARIPLNYRGFEEDVGFSDDPAYFTDIVFGSWEEQEVSHESLCTSGDYNEDDGDDDEISPCNVEENNKFWETQLQLLQGTLYRTSSLETKIRQATKEAMKEIDGVGMYCLCGKPMPGACRNCLQREISIRLQNQGYNCAICESKWKRSEEIPSGEHTFLEVVDKLNSKKGEARVVIELNFRAEFEMAKANQEYKQLINRLPEVYVGKTERLKALIKILCSAAKECMKEKKMHLGPWRKLKYMQSKWAGTCERTTPAPYFPGGFSDRPPKSRASMLTCDLSEALPVWHCTAVQVL

SEQ ID NO: 19336 - protein, 333 aa, Populus trichocarpa
MRGIHYLSKLKAANIPPELLEKGQNRVIDASLTLIRERAKLKGELLRALGGVKASATLLGVPLGHNSSFLQGPAFAPPRIREAIWCGSTNSSTEEGKELNDPRVLTDVGDVPVQEIRDCGVDDDRLMNVISESVKLVMEEDPLHPLVLGGDHSISFPVVRAVSEKLGGPVDILHLDAHPDIYHCFEGNKYSHASSFARIMEGGYARRLLQVGIRSITKEGREQGKRFGVEQYEMQTFSRDRQMLENLKLGEGVKGVYISIDVDCLDPAFAPGVSHIEPGGLSFRDVLNILHNLQADVVAADVVEFNPQRDTVDGMTGMVAAKLVRELAAKISK

SEQ ID NO: 19337 - protein, 331 aa, Populus trichocarpa
MAVSTDCHKAQQDFPKVLILKPISFLAHVGERHVASNKFTFLKAYESSLPLHQFLSTHSPSIKAILSSVGTPITADILQLLPEVGVVVTTSVGLNQVDLPECRRRGIKVANAGSVFSDDVADFAVGLLIDVLRKVSASDGYVRKGLWATKGDYPLGSKLGGKRIGIVGLGNIGFAVAKRLEAFGCSISYNSRKRKPHVSYPFYESVCELAANCDVLVICCELTDQTRHMINKEVLSALGKEGVIVNIGRGAIINEKEMVQCLVQGEIAGAGLDVFENEPDVPVELFAMDNVVLSPHIAVFTPESFLDLMDLVMGNLEAFFSNKPLLSEYGD

SEQ ID NO: 19338 - protein, 339 aa, Populus trichocarpa
MENQEEQQDNTSDQNHKPQDLPQVLLLKPPPVLSVIGEQPFLSKKYQFLKAWESPLPLLQFLTAHADSIQAILCSGAAPVTDDLLQLLPSVRLVVTASAGTNHIDLEACHRRGISVTNAGNVFSDDGADAAVGLLIDVLRKITASDRYVRQGLWVNKGDYPLGSKLRGKRVGIVGLGGIGLEIAKRLEAFGCNVLYNSRKKKAHLSYPFYSDVRQLAANSDALIICCALTNQTRHMIDKDVFSALGKEGVIVNIGRGAIVDEKEMVRCLVHGEIAGAGLDVFENEPDVPKELFELDNVVLSPHRAVFTSESFMALCELVVGNLEAFFSNTPLLSPVIDV

SEQ ID NO: 19339 - protein, 392 aa, Populus trichocarpa
MATESSVIAWGSGEDGQLGIGNNEEKEWVCIVKALEPYKVRSVVAGSRNSLAICDDGKLFTWGWNQRGTLGHPPETKTENIPSQVKALANVNIVQAAIGGWHCLAVDDQGRAYAWGGNEYGQCGEEPERKDDTGRPLRRDIVIPQRCASKLVVRQVAAGGTHSVVLTREGHVWSWGQPWPPGDIKQISVPVRVQGLERVRLIAVGAFHNLALQEDGTLWAWGNNEYGQLGTGDTQPRSQPITVQGLSGLTLVDIAAGGWHSTALTDDGEVYGWGRGEHGRLGFGDNDKSSKMVPQRVNLLVGEDIVQVSCGGTHSVALTRDGRMYTFGRGDHGRLGYGRKVTTGQPMEVPIDIPPPKNLTDSGDAGRWIAKLVASGGRHTLAIVEWHTGDSK

SEQ ID NO: 19340 - protein, 411 aa, Populus trichocarpa
MDGSDHHIVPSFFICPISLQIMKDPVTISTGMTFDRESIQKWLFSYKNIACPITKQPLSDFRLTPNSNLLRLIQSWHLQHASSSTTKFAEPNHDALMKVLLEEIKQPHLQVKSLRKIKSLIQENHGDNSRISCIRDDSLFSLAVSLVVQTELPGIPQITGNDTPVIAEAVSLLCLLCPSDEALKMVSQNENGLLICSLCSIMTQYLSNLQLRIQAALVLKSIFEVVDDMYKEGLKFEFFENIIEILKDQNSKHGSMAVLAILIRVLSYGKNKEKAIKGGCIPILIELLAEENERHVCEMMLVVLEKLCQKAEGRAAFLSHPAGMAAVVSKILKVSHVGDDKSISLLSCVLRFCTSSGEAAQEFMEVGGMTKICLVIQSGSNSKTKEKAREILGFHFKTWNKSPCFPSSFKA

SEQ ID NO: 19341 - protein, 282 aa, Populus trichocarpa
MDARVRKHGLASTEDQDMGTRKGPWTVEEDSLLAHYITNHGEGQWNTAARCAGLKRTGKSCRLRWLNYLRPNVRRGNITLQEQLLILQLHSHWGNRWSKIAQQLPGRTDNEIKNYWRTRVQKQAKQLKCDVNSKQFRDTMRYAWIPRLIERIQAESESPVDQPIISTPTYHSSQIDIPVAASESGSDLIGPNFMPDISGSCTYSDSLDAQVSSGSDLTNSQNPPCSHYMQNGACSYPENDSVSWDWDQHGVDMQGMEQGRYGLTGGGDTMENLWSEENIWFL

SEQ ID NO: 19342 - protein, 224 aa, Populus trichocarpa
MAPIEKPSSSNPNSPTRSEIRFRGVRKRPWGRYAAEIRDPGKKTRVWLGTFDTAEEAARAYDAAAREFRGAKAKTNFPTVGELIPIPTRSPSQSSTVESSSPTHPRAASPPPPLDLTLNSAHHNTARHQFPDGVSFHGGAWFPLPAAQRPVFFFDAFAQAKNNDKISIANNINMCRFDRTAMVNGGGVQSDSDSSSVLDYDHHHDNKGLSLDLDLNLPPPPEVA

SEQ ID NO: 19343 - protein, 857 aa, Populus trichocarpa
MEGSSESAWQKSGSYRGFNTSVVTNRNLRSASYNSGFRKETDRVVLARQNLKNQAGTLSGVCEDEAAVDHFVQNMEWNDVSLRHWLNKPERSVDEFECLHIFRQIVEIVNVAHSQGIVVHNVRPSCFVMSSFNHVSFIESASYSDSGSDSLDDGLNRQTVEVKNASSFSHDMCQQRNLPLGEETEENKVLGTRNVEHEEERKQPFPMKQILLMESSWYTSPEEVAGSPSSCASDIYQLGVLLFELFSPFTSREDKSRTMSSLRHRVLPPQLLLKWPKEASFCLWLLHPEPSSRPKMGELLQSEFLNEPRDYLEEREAAIQLRERIEEQELLLEFLLPMQQRKQDAANKLQGTVSLLCSDIEEVTKHQTFLKKKGSTCKERGEGDHLASNLPPLNIYDIDDSSSLGSRKRFCSGLQILNTEGCDDNLNEGRNSDTFVESQESPLFRSSRLMKNFKKLESAYFLTRSRPVRPPGKPPFVRNSPVSGDGRGSIVVTERSSINSLALKDRFIKGRQSGWISPFLEGLCKYLSYSKLKVKADLKQGDLLNSSNLVCSLSFDRDGEFFATAGVNKKIKVFECDTIINEARDIHYPVVEMVSRSKLSSICWNRYITSQIASSNFEGVVQVWDVTRSQVVTEMREHERRVWSIDFSSADPTMLASGSDDGSVKLWSINQGVSIGSIKTKANVCSVQFPMDSSRSIAFGSADHRIYYYDLRNSKVPLCTLIGHNKTVSYVKFVDTTNIVSASTDNTLKLWDLSMGTSRVIDNPLQSFTGHMNVKNFVGLSVSDGYIATGSETNEVFVYHKAFPMPVLSFKFNNTDPLSGHEMDDAAQFISSVCWRGQSSTLVAANSTGNIKILEMV

SEQ ID NO: 19344 - protein, 102 aa, Populus trichocarpa
MDKVRDLASRNAAVIFTKSSCCMCHSIKTLFYELGASPAIHELDREANGKEMEWALRGLGCNPTVPAVFIGGKWVGSAKDVLSLHLDGSLKQMLMEAKAIWF

SEQ ID NO: 19345 - protein, 101 aa, Populus trichocarpa
MDKVLRLASEQGVVIFIKSTCCLCYAVKILFQEIGVDPLVHEIDQDPEGREMEKALTRMGCSAPVPAVFVGGKLLGSTNEVMSLHLSGSLNQMLKPYQSQT

SEQ ID NO: 19346 - protein, 89 aa, Populus trichocarpa
LTPALKTTLDKVVTSHKVVLFMKGTKDFPQCGFSQTVVQILKSLNVPFESVNILENELLRQGLKDYSSWPTFPQLYIDGEFFGGCDITV

SEQ ID NO: 19347 - protein, 316 aa, Populus trichocarpa
MGSTKFFVTLCVVPLLASSFCSAQLSATFYASTCPNLQTIVRNAMTGAVNGQPRLAASILRLFFHDCFVNGCDGSILLDDTATFTGEKNANPNRNSARGFEVIDTIKTRVEAACNATVSCADILALAARDGVVLRGGPSWTVPLGRRDARTASQSAANSQIPSPASSLATLISMFSAKGLSAGDMTALSGGHTIGFARCTTFRNRIYNDTNIDASFATTRRASCPASGGDATLAPLDGTQTRFDNNYYTNLVARRGLLHSDQELFNGGSQDALVRTYSTNGATFARDFAAAMVKMGNISPLTGRNGEIRRNCRVVN

SEQ ID NO: 19348 - protein, 322 aa, Populus trichocarpa
MDSSSFSKAIVTLAILVMLSMGSSNAQLSIDFYSKSCPHLLSTVKPVVQSAINKEARMGASILRLFFHDCFVNGCDGSLLLDDTSSFTGEKNAAPNKNSARGFEVIDNIKSAVEKACPGVVSCADILAIAARDSTVILGGPEWDVKLGRRDARTASQAAANNSIPRPTSNLNQLISRFNALGLSTRDMVALSGSHTIGQARCTNFRARIYNETTIDSSLAQTRRSNCPRTSGSGDNNLAPLDLQTPTRFENNYYKNLINRRGLLHSDQQLFNGGSTDSIVSTYSSNENTFRSDFVAGMIKMGDIRPLTGSRGEIRNNCRRIN

SEQ ID NO: 19349 - protein, 387 aa, Populus trichocarpa
MAMKRAATSAIRAFSSSSPASSVSSGSSTRLLHASAESKKIVGVFYKANEYASLNPNFVGSLEGALGIRDWLESQGHQYIVTDDKEGLDSELEKHIPDLHVLITTPFHPAYVTAERIKRAKNLQLLLTAGIGSDHIDLEAAAAAGLTVAEVTGSNVVSVAEDELMRILILVRNFLPGYHQVINGEWNVAAIAYRAYDLEGKTVGTVGAGRIGKLLLQRLKPFNCNLLYHDRLKMDPELEKQTGAKFEEDLDSLLSKCDVVVINTPLTEKTRGMFDKERIAKMKKGVLIVNNARGAIMDTQAVVDACSSGQIGGYSGDVWNPQPAPKDHPWRYMPNHAMTPHISGTTIDGQLRYAAGVKDMLDRYFKGEEFPPQNYIVKEGKLASQYL

SEQ ID NO: 19350 - protein, 401 aa, Populus trichocarpa
MTSAEIKPRDVCVVGVARTPMGGFLGSLSSLPATKLGSIAIEAALKRANVDPSTVQEVFFGNVLCANLGQAPARQAALGAGISNSVVCTTINKVCASGMKATMLAAQSIQLGINDVVVAGGMESMSNVPKYLAEARKGSRLGHDSLVDGMLKDGLWDVYNDYGMGNCAELCADTHSIPRDDQDNYAIQSFERGIAAQDSGAFAWEIVPVEVPGGRGRPSTIIDKDEGLGKFDPAKLRKLRPSFKESGGSVTAGNASSISDGAAALVLVSGEKALQLGLKVLAKVTGYADAAQAPELFTTSPALAIPKAISNAGLDASQVDYYEINEAFAVVALANQKLLGLNPEKVNVHGGAVSLGHPLGCSGARILVTLLGVLKQKHGKYGVGGVCNGGGGASAVVVELL

SEQ ID NO: 19351 - protein, 289 aa, Populus trichocarpa
MEVGFLGLGIMGKAMSMNLLKNGFKVTVWNRTLSKCNELVEFGASIGETPAQVVKKCRLTIAMLSDPAAALSVVFDKDGVLEQIDSGKGYIDMSTVDPETSSKISQAITSKGGAFLEAPVSGSKQPAETGQLVILAAGDKGLYEESIPAFDVLGKKSFFLGQVGNGAKMKLVVNMIMGSMMNAFSEGLVLSERSGLNPHDLLDILDLGGIANPMFRGKGPAMLKSNHSPAFPLKHQQKDMRLALALGDENAVSMPVAAAANESFKKARSMGLGDLDFSAVHEILKMTKD

SEQ ID NO: 19352 - protein, 253 aa, Populus trichocarpa
MAEIGTTRMPNHQRKKILNRDQASHAMSFSKRTKTLKKKAHELQTLCDVKICMVCFGPDSTVQTWPEGAVEVKDAIMSYKGLGDRKKYESSLLGYLHDKKMKLEVKKRKVMKKKVNKELIVKWSDHVDGLSDDALRDTVNTLESRLFDLKEKIKLCMQRDKVEAIQDHVDMEFEMDGSSVPSSAAGATAWPADVMDTYTVGNNDKDAASTSFEMPPLPKDSSDWMESLRNWMENDEAYQHGFEIDDWFNEWEA

SEQ ID NO: 19353 - protein, 606 aa, Populus trichocarpa
MACLNICKEEGSVQGKLVKKEQEVCTRDGSVDRHGDPAIRGRTGTWFAGILILVNQGLATLAFFGVGVNLVLFLTRVLGQDNAEAANNVSKWTGTVYIFSLLGAFLSDSYWGRYKTCAIFQAIFVTGLVLLSLSSYLFLLKPRGCGDEHSPCGSHSTYQNVFFYFSIYLVALGNGGYQPNIATFGADQFDEEDPKEGHSKIAFFSYFYLALNLGSLFSNTILGYFEDRGMWALGFWASAGSALLALVLFLIGTPRYRHFTPKGNPLSRCCQVMVAATRKWKVQRMPNQGDDQFESDVPKDGSKNGDRKILHTQGFRFLDRAAIITSKDYTENRIHDPWRVCTVNQVEEFKCILRLLPIWLCTILYSVVFTQMASLFVEQGADMKTTISKFHIPPASMSSFDILSVAAFIFIYRRVLDPLVARIRKDPKGLTELQRMGIGLVIAIIAMVSAGIVELFRLKYARKDCPRCESASSLSILWQIPQYVLIGASEVFMYVGQLEFFNGQAPDGLKSFGSALCMTSISLGNYVSSLLVTVVMKISTRDEMPGWIPGNLNKGHLDRFFFLLAVLTTADLVLYIICARWYKYIKFERQQEADSILSNEEADLRV

SEQ ID NO: 19354 - protein, 401 aa, Populus trichocarpa
MASLLQCPTSPFPSSFSSNNPRSPFLRFHFPLRHAVRCNLVEPIKFANGKPYIPLLNTSAHHLSSTATSHLDNTLPPFNKHDTRLRIFSGTANPALSQEIACYMGLELGKIKIKRFADGEIYVQLQESVRGCDVFLVQPTCPPANENLMELLIMIDACRRASAKNITAVIPYFGYARADRKTQGRESIAAKLVANLITEAGANRVLACDLHSGQSMGYFDIPVDHVYGQPVILDYLASKTICSDDLVVVSPDVGGVARARAFAKKLSDAPLAIVDKRRHGHNVAEVMNLIGDVKGKVAVMVDDMIDTAGTITKGAALLHQEGAREVYACTTHAVFSPPAIERLSSGLFQEVIITNTIPVSEQNYFPQLTVLSVANLLGETIWRVHDDCSGGIEPYSSLGID

SEQ ID NO: 19355 - protein, 102 aa, Populus trichocarpa
MDQVRDLASKNAAVIFTKSSCCMCHSIKTLFYELGASPAIHELDREANGREMEWALRGLGCNPTVPAVFIGGKWVGSAKDVLSLHLDGSLKQMLMEAKAIWF

SEQ ID NO: 19356 - protein, 99 aa, Populus trichocarpa
MDKVMGLASEKGVVIFSKSSCCLCYAVKILFQEIGVDPLVYEIDQDPEGREMEKALTRLGCNAPVPAVFIGGKLMGSTNEVMSLHLSGSLIPMLKPYQN

SEQ ID NO: 19357 - protein, 197 aa, Populus trichocarpa
MAFAGTTQKCMACDKTVYLVDKLTADNRAYHKACFRCHHCKGTLKLGNYNSFEGVLYCRPHFDQLFKRTGSLDKSFEGTPKIVKPEKPVDGEKPVSTKVSTMFAGTREKCFGCKNTVYPTEKVSVNGTPYHKSCFKCIHGGCTISPSNYIAHEGRLYCKHHHNQLIKEKGNLSQLEGDIEKDSMNNKTNGREVAAES

SEQ ID NO: 19358 - protein, 205 aa, Populus trichocarpa
MARLSLFILLLLLSLVCITGAEKPVRFPRRSRSRAYIENACTKTLYPSLCIQYLSVSANSMTIQTPQQLAQAALSVSLYKALQTRTFMLKVVKELKARKSKDYQAVKDCLDQIGNSVDQLSESVRELHRLERPDAEGGDNVFWHISNVETFVSSAMTDASTCLDGFPGRNMNKSRAMIKAKVLNVAQTASNALALFHRYAAKYKP

SEQ ID NO: 19359 - protein, 914 aa, Populus trichocarpa
MDPGKFTHKTNEALATAHELAVGAGHAQITPLHLAVALISDPSGILRQAVANAGDGENTAQAAERVFNQVLKKLPSQSPPPEEVPPSTSLIKVIRRSQALQKSRGDSYLAVDQMILGLLEDSQIRDLLKEVGVSASTVKSEVEKLRGKEGKKVENASGDTNFQALKTYGRDLVEGAGKLDPVIGRDEEIRRVVRILSRRTKNNPVLIGEPGVGKTAVAEGLAQRIVRGDVPSNLADVRLIALDMGALVAGAKYRGEFEERLKAVLKEVEEAEGKVILFIDEIHLVLGAGRTEGSMDAANLFKPMLARGQLRCIGATTLEEYRKYVEKDAAFERRFQQVYVAEPSVPDTISILRGLKEKYEGHHGVRIQDRALVVAAQLSSRYITGRHLPDKAIDLVDEACANVRVQLDSQPEEIDSLERKRMQLEVELHALEKEKDKASKARLAEVVKELDDLRDKLQPLLMKYKKEKERIDEIRRLKQKREEIHFSIQEAERRYDLARVADLRYGALEEVEAAIARLEGSTTDENLMLTETVGPEHIAEVVSRWTGIPVTRLGQNEKERLIGLADRLHHRVVGQDQAVNAVAEAVLRSRAGLGRPQQPTGSFLFLGPTGVGKTELAKTLAEQLFDNENQLVRIDMSEYMEQHSVSRLIGAPPGYVGHEEGGQLTEAVRRRPYSVVLFDEVEKAHISVFNTLLQVLDDGRLTDGQGRTVDFRNTVIIMTSNLGAEHLLSGLLGKCSMQVARDRVMQEVRKQFRPELLNRLDEIVVFDPLSHDQLRKVARLQMKDVASRLAERGIALAVTDAALDYILAESYDPVYGARPIRRWLERKVVTELSRMLVREEIDENSTVYIDAGPDGQDLVYRVEKNGGLVNATTGQKTDVLIQIPKAPRDDAAQKVKKMKIQEIVDNDDDDEMIE

SEQ ID NO: 19360 - protein, 219 aa, Populus trichocarpa
MVRGKTQMRRIENATSRQVTFSKRRNGLLKKAFELSVLCDAEVALIVFSPRGKLYEFASTSMQETIERYRRHVKENNTNKQPVEQNMLQLKEEAASMIKKIEHLEVSKRKLLGECLGSCTVEELQQIEQQLERSVSTIRARKNQVFKEQIELLRQKEKLLAAENARLSDECGAQSWPVSREQRDLPREDLRESSSISDVETELFIGPPETRTKRIPPRN

SEQ ID NO: 19361 - protein, 262 aa, Populus trichocarpa
MKAIFCGNLDYDARQSDLERLFRRYGRIDRVDMKSGFAFVYMEDERDAEDAIRRLDRAEFGRKGRRLRVEWTKQERESRRPAGSRRSSTNTTPSKTLFVINFDPVHTRTRDLERHFDPHGKILSTRIRRNFAFVQYELQEDATKALEATDMSKFMDRVISVEYAARDDERRNGYSPERRDRDRSPDRNYNRERSPSPDRRDRGSPDYGHRSKTNSRPEPRGNHNYDKAESPENERYRRFILFSTSNSLLFFALCSLSNFSTM

SEQ ID NO: 19362 - protein, 102 aa, Populus trichocarpa
MDRVAKLASQKAVVIFSKSSCCMCHAIKRLFYDQGVSPAIYELDEDSRGKEMEWALMRLGCNPSVPAVFIGGKFVGSANTVMTLQLNGSLKKLLKEAGALWL

SEQ ID NO: 19363 - protein, 608 aa, Populus trichocarpa
MGQCYGKTSPANENDATTVTIVASSTDHNQPTSLPSSTSRNGVLSVKNTPARSSSTHPSPWPSTYPHGVAASPLPGGVSPSPARASTPRRFFRRPFPPPSPAKHIAASLVKRLGGGGKPKEGPIPEHGGVEAEQQQQQQQSLDKSFGYSKNFGAKYELGKEIGRGHFGHTCSATVKKGELKDQTVAVKIISKAKMTTAISIEDVRREVKILKGLSGHRHLVKFYDACEDANNVYIVMELCEGGELLDRILARGGRYTEEDAKAIIVQILCVVAFCHLQGVVHRDLKPENFLFTSGSEDADMKLIDFGLSDFIRPDERLNDIVGSAYYVAPEVLHRSYSLEADIWSIGVITYILICGSRPFWARTESGIFRAVLRSDPNFEDLPWPSVTPEAKDFVKRLLNKDYRKRMTAVQALTHPWLRDDSRPINLDILIYKLVKAYLHATPFKRAALKALSKALTEDELVYLRAQFSLLEPNGDGSVSLDNFRMALVRNATDAMRESRAPEILNAMESLAYRKMYFEEFCAAAISTYQLEALEGWEQIAFTAFEHFEQEGNRVISVEELARELNVGPSAYTFIKDWIRNSDGKLSLIGYTKFLHGVTLRSSNTRPR

SEQ ID NO: 19364 - protein, 955 aa, Populus trichocarpa
MKHIFKKLHIGSNNESSPNRTSNDTATSASTPPPPPPSCSSDHRAAGTGNSPANPPSTSPSPATTAQPLAFGNRTDYFASEEDFQVQLALAISASNSEFRDDTEKDQIRAATLLSLGGGNNRIDVGREKGEGKVEDLSRYYWEYNVLDYGERVMDGFYDVFCTSSAVQGKMPSLMDLETNAGGSGFEAVIVNRKVDPALEELMQIAQCIALDWLATDVTILVQQLAELVTGHMGGPVKDANLILAKWMDRSTELRTSLQTSVLPIGSINIGLSRHRALLFKVLADTIKLPCRLVKGSHYTGIEDDAVNIIKLEDEREFLVDLMAAPGTLIPADVPSAKDTTFKIPAPRSNETGVVFARSKPLTGEGTSQNSSVDGISPLDRILCSENAESLPSFSGSSNNAGVGSSGVSNKTAPTNQLGNIASTAFGTSVYKGSRGVHAIGDGLRMNVNVVPYVPNTSEDSKNLFADLNPFQIKGTGKSFMHNKPAENKINEFQGRKNNPVPSPPAPLMWKNRFAYNEVPRRKDNDNVEGLYPRINREPNNYNHSSLASTSLSEKVYPQGFKSSSNLNTSNRESDTRNSASSASSELSSYTNQGYSLPSVEEVNSNFEEKLWDAKNLQNDMEASVKESEDNEIGFHDRRKCIHDRFMGTNLKLKGPESPSTSVDSSTHRVDRILDDVDVGDEICWEDLVFGERIGLGSYGEVYHADWNGTEVAVKKFLDQDFSGAALDEFKREVRIMRRLRHPNVVLFMGAVTRPPNLSIITEFLPRGSLYRILHRPQCQIDEKRRIKMALDVARGMNCLHASTPTIVHRDLKSPNLLVDENWTVKVCDFGLSRLKHNTFLSSKSTAGTPEWMAPEVLRNEPSNEKCDVYSFGVILWELATLKSPWSGMNPMQVVGAVGFQNRRLEIPKEVDPLVARIIWECWQTDPNLRPSFAELAVALMPLQRLVVPSHLRSI

SEQ ID NO: 19365 - protein, 195 aa, Populus trichocarpa
MRTISILITFLFLSWLTCATSRGSDNGDTYVREACSVTRYHDLCMHSLASFSHTAGRSPSKWARAGVSVTIGEAKNASQYLNKLKKDRIMRGRNRIALSDCIECFQDAIDNLHKSLGILRKLDATNFDTQMGDLTTWLSAALTDEDTCLDGFEDRSSKQVKMLLNQVSRVTYITSNALALVNKLAAAGLGSLNGP

SEQ ID NO: 19366 - protein, 487 aa, Populus trichocarpa
LKVSCEAASVDVLEMNKTDNQAETQLTCVMKFGGSSLASAERMREVAELILSFRNERPVIVLSAMGKTTNKLLLAGEKAVSCGVTNVESIEELSIIKELHLLTAKELGVDESVIAKHLEELEQLLKGIAMMKELTPRTKDYLVSFGECMSTRIFAAYMNKIGAKARQYDAFKIGFITTDDFTNADILEATYPAVAQSLHGDWIRDTAIPIVTGFLGKGWRSCAITTLGRGGSDLTATTIGKALGLREIQVWKDVDGVLTCDPNIYPHAEPVPYLTFDEAAELAYFGAQVLHPQSMRPAREGDIPVRVKNSYNSNAPGTLITRTRDMSKAVLTSIVMKRNVTMLDIVSTRMLGQFGFLAKVFSIFEDLGISVDVVATSEVSISLTLDPSKLWSRELIQQASELDHVVEELEKIAVVNLLQHRSIISLIGNVQRSSLILEKVFNVLHIKGINVQMISQGASKVNISLIVNDDEAEQCVRSLHSAFFESD

SEQ ID NO: 19367 - protein, 103 aa, Populus trichocarpa
MSGVTGQPQEEDKKPNDQSAHINLKVKGQDGNEVFFRIKRSTQLKKLMNAYCDRQSVEFNSIAFLFDGRRLRGEQTPDELDMEDGDEIDAMLHQTGGAMKTSN

SEQ ID NO: 19368 - protein, 913 aa, Populus trichocarpa
DMDDGNGPNFIPDSAFENFSGSSMDLDFMDDLLYEGCWLETADEFNFLQAGTISSSDLNDPRQYFPLFEPNSSNSNVNSHQENYQDQSGSFPVESNELGRRLWIAPTATGPSSPVRDRLMHAIGQVKECTKDRDVLIQIWVPVKKEGKNVLTTIGQPYLLDRKCQSLASYRNVSKDFQFPADEDSKELVGLPGRVFLRELPEWTPDVRFFSGVEYLRKNHAKQFNIRGSLAVPVFEQGSRTCLGVIEVVTTTRDISYRPDLENVCKALEAVDLRSPQDFCPPSLKAKVCQAAAPEISKILESVCKAHRLPLALAWAPCFREGKGGCRHFDESYSYFISLVNSAYFVAERDDWGFYMACSEQYLSFGHGIVGRAFATNKQCLSTDVAAFSKTDYPLSHHAKMFGLHAAIAIPLQSSYAGSADFVLELFLPKDCRNTEEQKQMWDILPITVQQACQSWHVIMDKELEETVNKKMVVASDERFHKDESQKFASSLFKDSSKAESSWIARTVEAQQKGKGVSVSWDHTKEEPREEFKVKSQWGRTQDDTYHKQAFPAFGQFQQNSGPKSSIEAGTDSSSAGRHSLGSIKFGDKRRTKTEKTISLEVLRQHFAGSLKDAAKSIGVCPTTLKRICRQHGITRWPSRKIKKVGHSLKKLQLVIDSVQGAEGAIQMGSFYATFPELTSPNLSGNGGLPSTKTDENFKQLNPQPESGIFSAAPSALKSPSSSCSHSSGSSICCSIGVKQDTTTNNGSVSGDPLMVEDHGDVLKRTHSDAELHALNRDETKLLVRSQSHKTFGDLPSPKTLPPLPKSSSRVIRDGGGFRVKATFGADKIRFTLQPNWGFRDLQQETARRFNLDDISGIDLKYLDDDLEWVLLTCDADLEECRDVYKLSEIHTIKISLHQPAQPHLGSSLESRG

SEQ ID NO: 19369 - protein, 379 aa, Populus trichocarpa
MGYVCDFCGEQRSMVYCRSDAASLCLSCDRNVHSANALSKRHSRTLLCERCNSQPALVRCAEERISLCQNCDWIGHGTSTSASTHRRQTINSYSGCPSASELSSIWSFVLDFPSRGESTCEQELGLMSIAENSTTDSWGPTENTIGQNASGVVEVNDRREIAKSGVWLGSSSIPESSSVPNNLDQTTRSANTSLPKDFNMDEMDLSLENYEELFGVTLNNSEELLENGGIDSLFGTKDMSVVNAVQPASSNAASADSMMSNKTEPILCFTEKQGHSSLSFSGLNVESSAADYQDCGASSMLLMGEPPWCPPCPESPFSSANRSDAVMRYKEKKKTRMFEKKVRYASRKARADVRRRVKGRFVKAGEAYDYDPLSQTRSF

SEQ ID NO: 19370 - protein, 495 aa, Populus trichocarpa
MAKSCPILYRIFCMLLSFVLLTHSAPETALVTQLPGFSGTFPSKHYSGYVTIDESQGKRLFYYFVESERNPPKDPVVLWLNGGPGCSSFDGFVYEHGPFNFEAAETKGDLPKLHLNPYSWSKVSSVLYLDSPAGVGLSYSKNETDYITGDTKTASDSHAFLLKWFELYPEFLSNPFFISGESYAGIYVPTLAYEVVKGLDAGVKPILNFKGYLVGNGVTDEEFDGNALVPFAHGMGLIPDELFEEVTKECTGNFYNPLGETCESKLQKVYKDVEGLNIYDILEPCYHGSNIREVTDDRIRLPSSFRQLGETERPLPVRKRMFGRAWPFRAPVRPGIVPTWPQLLDGESVPCTDDEVATSWLNNEAVRKAIHAELESVSGTWELCTDRIRFHHDAGSMIKYHRNLTLRGFRALIFSGDHDMCVPYTGSEAWTRSMGYDIVDEWRPWTSNGQVAGYTQGYANNLTFLTMKGAGHTVPEYKPREALDFYSRFLSGKPI

SEQ ID NO: 19371 - protein, 108 aa, Populus trichocarpa
MSASAGGGGGGGQEEDKKPGGDQSAHINLKVKGQDGNEVFFRIKRSTQLRKLMTAYCDRQSVEFNSIAFLFDGRRLRGEQTPDELDMEDGDEIDAMLHQTGGGHASLD

SEQ ID NO: 19372 - protein, 427 aa, Populus trichocarpa
MESGKNAAFSSAKALPREDTPLIPNSPTLSSQSKTFANVFIAIVGAGVLGLPYAFKRTGWIMSLMMLFSVAGLTHYCMMLLIHTRRKLQSLSGDFAKINSFGDLGFTVCGSLGRFVVDVMIVLSQAGFCIGYLIFIGNTMANLFNASSPDSLTSQVIAFSMSAKSWYIWGCFPFQLGLSSVATLTHLAPLSIFADVVDLAAMGVVIAKDVFLMMENRPEVRAFGGLSVFFYGMGVAVYAFEGVGMVLPIESEMKERETFGKILGLSMGLISVIYGAFGVLGYFAFGNDTQDIITANLGPGLISLLVQLGLCINLFFTFPLMMNPVYEIVERRFWGGRYCLWLRWLSVMLVTLVALTVPNFADFLSLVGSSVCCGLGFVLPALFHLLVFKEEMNWKGWTIDVGIVSLGLVLAVSGTWYALMEIFAIKA

SEQ ID NO: 19373 - protein, 303 aa, Populus trichocarpa
MSEDIIMSSLKKSMTSSKEDGSELRRGPWTLEEDTLLVHYIGRHGEGRWNLLAKRAGLRRTGKSCRLRWLNYLKPDVKRGNLTPQEQLLILDLHSKWGNRWSKIAQHLPGRTDNEIKNYWRTRVQKQARHLKIDANSTAFQNIIRWFWMPRLLQKIGGSSTSSSAMPSQRPAVVSQPNLNYAPQFSTFPPALPPLVQQQEAPLDMSVTMHYLEPHEQTSDSELGTSSCISSAESMNVSQMSQLSEYPTSPFQAIGNNSSEYSTLAKGCYYVDSNCYDMEAINLATMPVPGELGISAGDRHMED

SEQ ID NO: 19374 - protein, 268 aa, Populus trichocarpa
MMSFEDVHQANGSTRPFFRSFDHEDNGDDDLDEYFHQPEKKRRLTVDQVQFLEKSFELENKLEPERKIQLAKDLGLQPRQVAIWFQNRRARWKTKQLEKDYDVLQSSYNSLKADYDNLLKEKEKLKAEVNLLTDKLLLKEKEKGISELSDKDALSQEPPKRAIADSASEGEVSKISTVACKQEDISSAKSDIFDSDSPHYADGVHSSLLEAGDSSYVFEPDQSDLSQDEEDNFSKSLLPPYVFPKLEDDDYSDPPASFEDHAFWSWSY

SEQ ID NO: 19375 - protein, 269 aa, Populus trichocarpa
KISPVLLLVIGVLAVIFFVSGLLHLLVRFLLKRASFSPIYHSNRFPETSGSHSIQRQLQQLFRLHDSGLDQAFVDALPVFYYKDIMGSKEPFDCAVCLCEFSGQERLRLLPLCSHAFHIDCIDTWLLSNSTCPLCRGTLLGSRESGSSNCQKSVTIVEDKGVGEKRVFSVRLGKFKSLNGGEGSGQKQHGETSRSNLDARRCYSLGTVQYVEGESSLQVAMSPGNLNCRGRDKGCPSIDGDLEDKKIRGRTGGDSLSVSKIWLWSKKSK

SEQ ID NO: 19376 - protein, 381 aa, Populus trichocarpa
MAQRRWLQTVTRHALPLLSSKPTTSLKPLPHLPAPISLKSILSPKPLQQFLYTDPTLFHARSFSSSSRDDSENEEDDVEEGGEEEEDYDSDSNEAEVDDVTVSDMKREYSAEEIEAEAAAIGYKVIGPLLPSDRVLKHREPVFAVVQIGSHQFKVSNGDCIYVERLKFCEVNDKLILNKVLMLGTSTQTIIGRPILPDAAVHAVVEEHLKKTERIRFVMGSLGSCIWCLKDPTNCTWAWRKVLKLRRISWDLIDLVVGNGRNVQSVCSVVHPLSEDFSVQNLTLDGKFSSRSAWQYLRVKGTKVEWFDLVWVTFPGMALDAKVIIFKKKRRKNYRRTKGHRQELTRLRIADIQGIEKPKPKVDPKQKMVAVKQQEKVAVAA

SEQ ID NO: 19377 - protein, 363 aa, Populus trichocarpa
MAAAVTAAVSFPSSTKSTSLSSRTTLIAPERITLKKAPVYYRDASASGRVISIRAQVTTEAPVKVEKVSKKDDEGVVVNKFKPKNPYTGRCLLNTKITGDDAPGETWHMVFSTEGEVPYREGQSIGVIPDGIDKNGKPHKLRLYSIASSAIGDFGDSKTVSLCVKRLVYTNEQGEIVKGVCSNFLCDLKPGAEVKITGPVGKEMLMPKDPNATIIMLGTGTGIAPFRSFLWKMFFEKHDDYKFNGLAWLFLGVPTSSSLLYKEEFEKMKEKAPDNFRLDFAVSREQTNDKGEKMYIQTRMAEYAEELWELLKKDNTYVYMCGLKGMEKGIDEIMVSLAAKDGIDWLEYKRSLKKAEQWNVEVY

SEQ ID NO: 19378 - protein, 371 aa, Populus trichocarpa
RICAGCNTEIGHGQFLNCMGGVWHPDCFCCNACNLPITDYEFSMSGNRRYHESCYRKQDHPRCDVCNKFIPTNSAGLIEFRAHPFLLQKYCPSHQRDRTPRCCSCERMEPRDTRYISLDDGRKLCLECLDSAIMDTHECQPLYFEIRKFYEGLNMKVEQEIPLLLVERPALNEAMEGEKNGHHHLPETRGLCLSEEQTVTTVISRHKIGAGNRFIDIRTEPYRLSRRCEVTAILILYGLPRLLTGSILAHEMMHAWLRLKGYPNLRPEVEEGICQVLAHMWLDSEIYSSSGGEGASSSSSSSSPSSSSSTSSKKGPRSDFEKKLGEFFKHQIESDTSPAYGEGFRIGNQAVLKYGLRRTLDHIQMTGTFPV

SEQ ID NO: 19379 - protein, 163 aa, Populus trichocarpa
PQVESGDDFIKTSCGVTRYPDLCYEKLSAYADTIQDNPTQLANVSLSETLKNAESTLIMVQKLLKKRKLRPREADAIKECVETMKDSVDELQKSMLAMSDLEGPDFDMEMSNIQTWVSAALTDEDTCMDDSEENSIDGKVKDTIRSYIVTVAQLTSIALALIN

SEQ ID NO: 19380 - protein, 208 aa, Populus trichocarpa
MEAKIIPSSTSFNVLSLLFTFLLCISSSNVQTSSAAITTTTTPSITYTNYLKTACNSTTYPQLCLKSLSSYTSTIKTNELKLCSTALTVALKASSNTSKLVKSLSKIRGLSKTEAAIIRDCIEEIGNSIDEIKQSVKVLRSLTGSDRELQIDNLKTWVSGAITDQTTCTDGFDGNNVNYAVKRAITKSIVNVARLTSNALTFINNLSY

SEQ ID NO: 19381 - protein, 184 aa, Populus trichocarpa
PSSSSLFKKPSHLLLLSPLTKPTKLKVIAQTSTNNPTPPEKKPSTVSPGQGFGSQSAAAATTSKTASGSESKNKPKGNRRERASIIRRAPAEKPGFISQENEVKVKEQGRNETAFLLAWLGLGGIILVEGILLAASGFLPEEWDKFFVKYLYPSFTPTVGLFVAGTVAYGVSKYLQNENLKDLK

SEQ ID NO: 19382 - protein, 602 aa, Populus trichocarpa
MGGGDIHIDHQEEGLRRRGCGCSCSKNDFLPEESFQSFGNYLQALKETPMRFKDRLLTRSKDTTEIHEIKARSEHEMKKTLTWWDLIWFGIGAVIGAGIFVLTGLEAREHAGPAVVLSYVVSGVSAMLSVFCYTEFAVEIPVAGGSFAYLRVELGDFMAFIAAGNILLEYVIGGAAVSRAWTSYFATLCNHKPDDFRIIAHSLPDDYGHLDPIAVLVGVVICILAVLSTKGSSRFNYVASIIHVVVILFIIVAGLAKADTKNYADFAPNGAHGIFTASAVLFFAYVGFDAVSTMAEETKNPARDIPIGLVGSMAITTLAYCLLAVTLCLMVPYKMIDVDAPFSVAFESVGWGWAKYIVAAGALKGMTTVLLVSAVGQARYLTHIARTHMMPPWLAHVNAKTGTPVNATVVMLAATAIIAFFTKLDILSNLLSISTLFIFMLVAVSLLVRRYYVSGVTTPVNRVKLIVCIVAILVSSIATALIWGTSDQASWIGYVITIPIWFFATLALKISVPQAKDPKLWGVPLVPWLPSASILINMFLLGSIDVQSFKRFAVWTGILLIYYLLFGLHASYDTAKASGENKDEGGFKNVEDGTVSSQNDAL

SEQ ID NO: 19383 - protein, 241 aa, Populus trichocarpa
MSTGSEPDVTVEEVTGNRSFPAGKNKGKVPRRIHKAEREKLKREQLNELFLDLASALELSEPNTGKASILCETTRLLKDLLTQIESLKKDNVALLSESRYVTVEKNELREENSVLENQIGKLQGELESRVAAQSTPVLNVPPPEFQQPPHFPGDSFRLPAVDAAAAALQQTPAVFVVPIRPDHVQGLPMATSNVRKPHARYPTAADSWPSQLLGEQQIARKEVQFSGKDSAICNPGERCHP

SEQ ID NO: 19384 - protein, 280 aa, Populus trichocarpa
MGSPMAQNLIKSGCDVTVWNRTKSKCDPLISLGAKYKPSPEEVTAACDVTFAMLADPECAVEVACGKHGAASGMGPGKGYVDVSTVDGGTSKLICGHIKASGASFLEAPVSGSKKPAEDGQLIFLTAGDKSLYETVAPFLDIMGKSRFYLGEVGNGAAMKLIVNMIMGSMMATFSEGLLLSEKVGLDPNVLVEVVSEGAISAPMYSLKGPSMVKSLYPTAFPLKHQQKDMRLALGLAESVSQPTPIAAAANELYKVAKSHGLSDSDFSAVIEALKGKVQS

SEQ ID NO: 19385 - protein, 605 aa, Populus trichocarpa
MDYGRLGPTESDPGEGSGTSFNINEPQLATPRVSPTRKKRIIFLAIFSIALIAASAVSAVLLLGIRTKASGQPDPSSLTHRKPTQAISKTCSKTRFPNLCVSSLLDFPGSVSASESDLVHISFNMTLQHFSKALYLSSAISYVNMETRVRSAFDDCLELLDDSIDALSRSLSTVAPSHGGGTGGGSPADVVTWLSAALTNQDTCSEGFDGVNGAVKNQMTGRLKDLTELVSNCLAIFSSANGDDFSGVPVQNKRRLLTENEDISYEENFPRWLGRRDRKLLDVPVPAIHADIIVSGDGNGTCKTISEAIKKAPEYSTRRTVIYVRAGRYEENNLKVGRKKWNLMFIGDGKGKTIISGGKSVLNNLTTFHTASFAATGAGFIARDMTFENWAGPAKHQAVALRVGADHAVVYRCNIIGYQDTLYVHSNRQFFRECDIYGTVDFIFGNAAVVFQNCSIYARKPMAFQKNTITAQNRKDPNQNTGISIHACRILATSDLTPLKGSFPTFLGRPWKLYSRTVYMLSYIGDHVHPRGWLEWNTTFALDTLYYGEYMNYGPGGAVGQRVKWPGYRVVTSTIEASKFTVAQFIYGSSWLPSTGVSFLAGLSL

SEQ ID NO: 19386 - protein, 447 aa, Populus trichocarpa
MSSVSSQSQFRLTQPPSKVLHLRNLPWECTEEELVELGKPFGNVVNTKCNVGPNRNQAFIEFADLNQAIAMISYYASSSEPAQVRGKTVYLQYSNRQEIVNNKTTADAGGNVLLITIEGADARLVSIDVLHLVFSAFGFVHKITTFEKMDRFQALVQFSDVETASSAKNALDGRNIPSYLLPEHLGPCTLRIAYSGHTDLSVKFQSHRSRDYTNPNLPVAQSAIDANGMFSMGLDGKKLEPESNVLLASIENMQYAVTLDVLHMVFSSFGPVQKIAMFDKNSGLQALIQYPDVQTAVVAKEALEGHCIYDGGFCKLHLSYSRHNDLSIKVNNDRSRDYTIPNNVMVNPQPSILGQQPVATHGPPSHLYTGAQFAPTTEHSMIPQPSSGWATGFPPVPNSMPGQMNNNPYLPPGTMPPQMGHGMMQMPSHGGPPHTHAMPPYRPYHMQ

SEQ ID NO: 19387 - protein, 321 aa, Populus trichocarpa
MQDTHSIGGGGRLFSGGGGGDRRLRPHHHQNHQALKCPRCDSLNTKFCYYNNYNLSQPRHFCKSCRRYWTKGGVLRNVPVGGGCRKTKRSKLKQNTPSTTSDAITTSSTRPQELQEQHQRRDHMSSNSHSSSESSSLTATNNTNANTAVEAVSALSVNSVSNNLLNGIVESKIFPRGDMNPSFEPALLEQGSDCGIFSEIGSFTSLITSTNDLSFGFSNTTNQQQQQGLEHHVQNNQNQQQWQNQHQEMTGGGLIDQTIHAELSALPSSSRSTENTGGGFGALDWQLGSGDQAGGFFYLPNTVDQAYWSQSQWNDMTAYLP

SEQ ID NO: 19388 - protein, 865 aa, Populus trichocarpa
MVSRSCISLLDFASGNMMNFSQSPRSLPRIMTVPGIISDVDVDGINDGISDAPSTGSGAKMIIVSNFLPLNAQKDLNSGKWSFSFDEDSLLLQMKDGFSAIPEVVYVGSLRVDVDSSEQEEVSQKLLEEFNCVPTFIPPDIYKNFYHGFCKHHLWPLFHYMLPLCPDHGNRFDRLLWQAYVSANKIFADKVTEVINNTEEDYVWVHDYHLMVLPTFLRKRFNRIKLGFFLHSPFPSSEIYRTLLVRDEILKALLNADLIGFHTFDYARHFLSCCSRMLGLDYESKRGHIGLEYFGRTVYIKILPVGIHMGRVESALNHPSSSIKVKEIQEQFKGKRLVIGVDDMDIFKGISLKLLAVEHLLLQNSELRGKLVLVQIVNPARSSGKDVQEAKMEIYSITKRINNTFGFPGYEPVVLIDRHVPFCEKTAYYALAECCIVNAVRDGMNLIPYKYIVCRQGTPKMDEALGVASGSRHTSSLVVSEFTGCSPSLSGAIRVNPWDIEAVANAVNTAINMPDLEKQLRHGKHYCYVSSHDVAYWARSFMQDLKRACKDHYSKRCWGIGFGLNFRILALSPSFRKLSNDYIISAYKRTSKRAIFLDYDGTMVPHTSLAKTPTPEVISVLNNLCADPMNSVFIVSGRGKKSLSDWFVQCENLGIAAEHGYFFRWSGMSDWETSSLAVDFDWKNIAEPVMKLYTEATDGSYIEVKESALVWHHQDADPDFGSCQAKELLDHLENVLANDPVAVKRGQNIVEVKPQGVTKGFVAEKVLSKMIASGKPPGFVLCIGDDRSDEDMFESISKTPYSSSLPSAPAIFACTVGQKPSKARYYLDDTVDVLALLQCLADASSSNLSSTETQVSFDNVVRKEL

SEQ ID NO: 19389 - protein, 126 aa, Populus trichocarpa
MGSLLSSSIKMSKQELDAALKKAMELASSAPVVVFSKTYCGYCNRVKQLLTQVGATYKVVELDEISDGSQLQSALAQWTGRGTVPNVFIGGKNIGGCDTVVEKHQRNELLPLLQDAAATAKNSAQL

SEQ ID NO: 19390 - protein, 278 aa, Populus trichocarpa
MGNQHTEEIGLGYGHKRMDSLEENVSVFFPEDFADESDRSFEDEDDYESDHGFHDPMERAIFWESQEALLQEVLNRCSKTGSKLRQEVYRITGVAKEADFCSCLKPSKGCTSCLRQRVVNLLTQKRFVAALCTSKWKNTKKYPGGKHEYVEMIASTIGSKKKIPYLIELEFRDQFEMAKACDEYRNLVAQLPEYYIGKAEHLNAIVGILCDAAKRSMKEKKIHMGPWRKRSFMQMKWSNTSGRRSVEEPSSKISSLPSSRQAHESCFHFSAAPALTVT

SEQ ID NO: 19391 - protein, 650 aa, Populus trichocarpa
MAAAAAATSTSTTPIRKPSSIYPLPISKFTLPFAFNPKKPCSLHISNSLSKPASTTTASPATTEKFSFSRFAPDQPRKGADILVEALEREGVKDVFAYPGGASMEIHQALTRSNIIRNVLPRHEQGGVFAAEGYARASGLPGVCIATSGPGATNLVSGLADALLDSVPIVAITGQVPRRMIGTDAFQETPIVEVTRSITKHNYLVLDVDDIPRIVREAFFLATSGRPGPVLIDIPKDIQQQLAVPNWDVPMKLPGYLSRLPKNPNELHLEQIVRLISESKKPVLYVGGGCLNSSEELRRFVELTGIPVASTLMGLGAFPVGDELSLQMLGMHGTVYANYAVDKSDLLLAFGVRFDDRVTGKLEAFASRAKIVHIDIDSAEIGKNKQPHVSVCGDVKVALQGMNKILESRGAKGKMDFRAWREELNEQKMNNPLSFKTFGEAIPPQYAIQVLDELTDGNAIVSTGVGQHQMWAAQFYKYKRPRQWLTSGGLGAMGFGLPAAIGAAVANPDAIVVDIDGDGSFIMNVQELATIRVENLPIKIMLLNNQHLGMVVQWEDRFYKANRAHTYLGDPSNESEIFPNMLKFADACGIPAARVTRKDDLRAAIQKMLDTPGPYLLDVIVPHQEHVLPMIPSGGAFKDVIIEGDGRRKY

SEQ ID NO: 19392 - protein, 381 aa, Populus trichocarpa
MDWNLKATSWDLTEFEQGAVPSISIDAFDRSTNFGVNRSGGGFSIDLKLGRVGDSSDESIINWKQPGVSKLQPLPSGSTKRARGANSGTQVAMCLVDGCNSDLSACRDYHRRHKVCELHSKTPQVTVGGQKQRFCQQCSRFHSLEEFDEGKRSCRKRLDGHNRRRRKPQPDPHSRPPSFLSNYQGTQLFPFSSSHVYPSSTVLNPTWSGVASTEADGRHHNLHQLPDKQNLFFGSSSSSYHGVKQFPFLHWHSPGLNNQTSPEASVCQPLLRTIALPGSSGASSHSMFCDRLTQIQDSDCALSLLSSTQTHASGNLMVQHNSVPLSHPIGPTVHDHGLGPIDSVLVFNNRDANVHFPGTFQPQSGGSSGNKAPQTLPFNWE

SEQ ID NO: 19393 - protein, 323 aa, Populus trichocarpa
MKNGKKVNGIHVKETPSPYIGNTNPRGLAIDSNVGEPHTYLLGRFVEDRFVYRQTFSIRSYEIGPDKTATMETLMNLLQETALNHVTSSGLAGNGFGATREMSLRKLIWVVTRIHVQVQRYSCWGDVVEIDTWVDATGKNGMRRDWIIRDYNTQEIITRATSTWVIMNRETRKLSKIPGEVREELQPFYINRLAIPAEHNDIEKIDKLTDETAGRIQSGLAPRWSDMDANQHVNNVKYIGWILESVPMHVLEHYNLTSMTLEYRRECRQSNLLESLTSTSEDSNSNSSNRKADMEHTHLLRMQADKAEIVRARTEWKSKLKHD

SEQ ID NO: 19394 - protein, 357 aa, Populus trichocarpa
MAGFSYQHQPLFPDSAFLPSIATPTKNMNNNMYGSFEEAGNMMNTNGFSQIYSPETFHETPSLDVRFHQSSHPDDHSYKVSLSDNETSLTKKQSTNSSTVVDKLESEHVTQEVTPMARKRKSANGFLNSAQSKDARKVKSKRQNKCSGDMKHEEKKPKVEKKVHGEPPAGYIHVRARRGQATDSHSLAERVRRERISERMKILQLLVPGCDKITGKALMLDEIINYVQSLQNQVEFLSMKLASVNPLLYDFGMDRDAFMVRPERLSSMSPPLPSLQHNSPIQPTAFADTASATTATFATEENNYPLIDNSATLFLQGMRPSDFTTHQDSGYLMWDVDEQRQKFLNPSGLATNLCSFH

SEQ ID NO: 19395 - protein, 228 aa, Populus trichocarpa
MGSGFGESTSGVPQNPSFTSSNGNGDAGDFECNICFDLAQDPIVTLCGHLFCWPCLYKWLHFHSKSRECPVCKALVEEEKLVPLYGRGKTSTDPRSKSIPGVNIPNRPAGQRPETAPPPEPNHFGQHGFGLTGGLGGFAPTATARSGNFTFSAAFGGLIPSLFNLQVHGFPNAAMYGPAAGFPYGFHSFHGGHPRGYHRHQGQGQQDYYLKRLLLFIGFCVLLALVWQ

SEQ ID NO: 19396 - protein, 203 aa, Populus trichocarpa
MAALSSNSLAEFLLLLIAISSYLNSSSAARVTTKSSTEFIRTSCSTTTYPRLCYTSLSIHSSTIQTSPKLLANAALNVTLSSAKSTSTMISTLSQTHRMKPREVSAMKDCVEELGDAVNELGKSMDEMSHARQSNFQSMIDDVQTWVSAALTDESTCSDGFAGNAMNGNLKTAVRGRIVNIAQLTSNALALINNYASDPEMLG

SEQ ID NO: 19397 - protein, 181 aa, Populus trichocarpa
LIAISFFINSSSAATVTPQSSIEFIRTSCSTTTYPRLCYTSLSIHSRTIHTSPKLIANAALNVTLSSAKSTSTMMSKLSQSHGLKPKEVSAMKDCVEELSDAVYELRESIDEMDHVKRSDFEVMISDVRTWVSAAMTDESTCSDGFAGNAMNGNLKRAVRGRIMNIAQLTSNALALVNNYA

SEQ ID NO: 19398 - protein, 197 aa, Populus trichocarpa
MAGSASKSFTLILLAMSFYFNSSSAARVTPQSSIDFIRTSCSTTIYPKLCYTSLSIHSSTIQTSPELLANAALNVTLSSAKSTSAKMSTLSQSHGLKPREVSAMEDCVEELTDAVYELKKSIDEMSHAKKSNFRMMISDVQTWVSAALTDESTCSDGFEGNAMNGNLKTAVRGKIVHTAQLTSNALALINNYAFRHG

SEQ ID NO: 19399 - protein, 199 aa, Populus trichocarpa
MAKPSLIWLLISLLYIASTANCASTTTKSSSRASNFIKASCSATTYPALCVQSLSLYASSIKQSPRQLIQTALSVSLDKAQSTKTFVYKLTKFKGIKPREKAAIKDCFEEIDDTLDKLVKSVKELKNMGSSKGQDYQWHISNVQTWISAALTDENTCVDGFAGKALDGRVKNSITARFVHVERVTSNALALINKFGSQY

SEQ ID NO: 19400 - protein, 199 aa, Populus trichocarpa
MEAKIFIPSNALALLLAFLLCISLADATTTKNSSETYTNYLKKACNSTLYPQLCFESLSSYTSTIKTNDLKLSTKALTVTLKAASNTSKLVTSLSKGGNLSMTEAGIIKDCIDEMGDSIDMLKQSLKALGSLNGSDHIQFQISNIKTWMSAALTDETTCTDGISERKISDEAMRKIRKTIVHIAMLTSNALALLNKLPY

SEQ ID NO: 19401 - protein, 870 aa, Populus trichocarpa
MSIKESFSNVVNVLVDWDDVHNEDFCSWRGVFCDNDSFSVVSLNLSNLNLGGEISPGIGDLRNLQSIDFQGNMLTGQIPEEIGNCASLYHLDLSGNLLYGDIPFSLSKLKQLDTLNLKNNQLTGPIPSTLTQIPNLKTLDLAKNQLTGEIPRLIYWNEVLQYLGLRGNLLTGTLSEDICQLTGLWYFDVRDNKLTGTIPSSIGNCTSFEILDISYNQFTGEIPYNIGFLQVATLSLQGNNLTGRIPEVIGLMQALAVLDLSDNELVGPIPAILGNLSYTGKLYLHGNKLTGPIPPELGNMSKLSYLQLNDNQLVGSIPPELGKLGQLFELNLANNHLEGPIPHNISFCRALNQFNVHGNHLSGIIPSGFKDLESLTYLNLSSNDFKGSVPVELGRIINLDTLDLSSNNFSGPIPAMIGDLEHLLTLNLSRNHLHGRLPAEFGNLRSIQIIDLSFNNVTGSIPVELGQLQNIVSLILNNNDLQGEIPELTNCFSLANLNFSYNNLSGIVPPIRNLTRFPPDSFIGNPLLCGNRLGSICGPYVPKSKGPPKLVVLHMDMAIHTFDDIMRNTENLSEKYIIGYGASSTVYKCVLKNSRPLAIKRLYNQYTCNLHEFETELETIGSIRHRNIVSLHGYALSPRGNLLFYDYMENGSLWDLLHGPSKKVKLDWETRLKVAVGAAQGLAYLHHDCNPRIIHRDVKSSNILLDENFEAHLCDFGIAKCIPTTKTHASTFVMGTIGYIDPEYARTSRLTEKSDVYSFGIVLLELLTGKKAVDNESNLQQLILSRADDNTVMEAVDPEVSVTCMDLTHVKKSFQLALLCTKRHPSERPTMQDVSRQQPTLHQPQLLQENNSSDAHWFMRFKEVVSKNTL

SEQ ID NO: 19402 - protein, 343 aa, Populus trichocarpa
MRPIFCGNFEYDARQTELERLFKRYGRVERVDMKSGFAFIYMEDERDAEDAIRGLDRVEFGRKGRRLRVEWTKQERGIRRPGGTSRRSTNTRPSKTLFVINFDPHHTRTKDLERHFEPYGRIVSVRIRRNFAFVQYEAQEDATKALDATNLSKLLDRVISVEYAVRDDDERKDGYSPDRSRDRSPDRRGHDRRRSPSPYRRERGSPDYGRGPSPYRKERGSPDYGRRRSPSPYRRDRASPDYGRGTSRSPYRRERAGKRISPENGRGPSRSPYRRERSNQGHGRGSSHSPYGRERPNPDNGRGSSRSPTERDGDSPENGQLRSPSSIPDERDSPNGGAESPMR

SEQ ID NO: 19403 - protein, 226 aa, Populus trichocarpa
MFGEKSLESGFDVLECNINTVASTSNVNAPTFYKSLSFSNIYSTESWGDLPLKQDDSEDMIVYNALRDAVNFGWLPSILSLQSNMTTTTEEFPQTAVPLEVAPRESGPQPLKEKGLQYKGVRRRPWGKYAAEIRDPKKNGARMWLGTYETPEDAALAYDRAAFKMRGSKAKLNFPHLIGSNNNWEPTRVTSKKRSSPEPSSSISISDYDSPRWTKQSKISSGICFH

SEQ ID NO: 19404 - protein, 191 aa, Populus trichocarpa
FQRGIDMNRVPAAVTDCDDETGVSSPNSTLSSLSGKRSEREQIGEETEAERASCSRDSDDEDGAGGDASRKKLRLSKEQSLVLEETFKEHNTLNPKEKLALAKQLNLRPRQVEVWFQNRRARTKLKQTEVDCEYLKRCCENLTEENRRLQKEVQELRALKLSPQLYMHMNPPTTLTMCPSCERVAVSSASS

SEQ ID NO: 19405 - protein, 291 aa, Populus trichocarpa
MSTIKTCRETLLAAFTDNSDNYKKLVSKSYNNYSATSSLMDTEIPAVAVVPGQKRSRKGGDARNKKVVNGGGSGESEHEIHIWTERERRKKMRNMFSSLHALLPQLPAKADKSSIVDEAVKYIKTLQQTLQTLQKQKVEKFQGAIIDFEPSVITSLTDTVGSREASFAALGPSKNSPLTSKMSQNSFSVSLSPACFQTWFSPNVVMNMCGDDAQFSLCSTRKPGLLATILYILEKHNLDVVSAHISSDQYRSIYMIHAHADGASDQYPEAMSVEDTFKLAAGEMNLWVMSC

SEQ ID NO: 19406 - protein, 597 aa, Populus trichocarpa
MAATSSWNFMVTPTKPSLSWKLSFFSPLTTVNVTRRQNRTAKRFVVFATVFLDPKPTVLVAEKLGEAGLELLKTFANVDCSYNLDHEELCTKISLCDALIVRSGTKVTREVFERSGGRLKVVGRAGVGIDNVDLSAATEHGCLVVNAPTANTIAAAEHGIALLTAMARNIAQADASIKSGKWQRSKYVGVSLVGKTLAVMGFGKVGSEVARRAKGLGMHVIAHDPYAPADRARAIGVDLVSFEEAISTADFISLHMPLTPATSKMFNDESFSQMKKGVRIVNVARGGVIDEEALVRALDSGTVAQAALDVFTEEPPSKDSKLVLHENVTVTPHLGASTTEAQEGVAIEVAEAVVGALKGQLAATAVNAPMLPAEILSELAPFVTLSEKLGRLAVQLVAGGRGVQSVKVTYASARGPDDLDTRLLRAMITKGLIEPISSVFINLVNADFSAKQRGLRITEERILLDGSPENPLEFIQVQIANVESKFSIAMSDSGEIKVEGRVKDGKPHLTMVGSFGVDVSMEGSLILCRQVDQPGMVGSVGSILGEENVNVSFMSVGRIAPRKQAVMTIGVDEEPSKEALKRIREIPAVEEIVFLKL

SEQ ID NO: 19407 - protein, 1491 aa, Populus trichocarpa
MEHRGGCGADNDSGDGSGLMTSIPWELFDKWAESEGIGSFDKSHTGVGMVFFPKDDNLVKEAKKAIVNIFEQEGLEVLGWRSVPVNTSVVGFYAKETMPNIQQVFVKVIKEENVDDIERELYICRKLIERAANSANWGNELYFCSLSNQTIVYKGMLRSEVLGMFYSDLQNDIYKSPFAIYHRRYSTNTSPRWPLAQPMRFLGHNGEINTIQGNLNWMQSRETSLKSSVWHGRENEIRPYGNPKASDSANLDSAAELLIRSGRAPEEALMILVPEAYKNHPTLTIKYPEVVDFYDYYKGQMEAWDGPALLLFSDGKTVGACLDRNGLRPARYWRTVDNFVYVASEVGVVPMDESKVTMKGRLGPGMMIAVDLPGGQVYENTEVKKRVALLNPYGKWVKENLRSLKPANFLSATVMDNEVTLNRQQAFGYSSEDVQMVIENMASQGKEPTFCMGDDIPLAILSQKPHMLYDYFKQRFAQVTNPAIDPLREGLVMSLEVNIGKRRNILEVGPENASQVILSSPVLNEGELELLLKDPYLKPQVLPTFFDIRKGVEGSLEKTLIKLCEAADEAVRNGSQLLVLSDRSDELEPTRPAIPILLAVGAVHQHLIQNGLRMSTSIVADTAQCFSTHQFACLIGYGASAICPYLALETCRQWRLNKRTVNLMMNGKMPTVTIEQAQKNFCKAVKSGLLKILSKMGISLLSSYCGAQIFEIYGLGKEIVDLAFCGSVSNIGGATFDELARETLSFWVKAFSQATAKRLENYGFIQFRPGGEYHGNNPEMSKLLHKAVRQKSENAFSIYQQHLSNRPVNVLRDLLEFKSDRAPIPVGKVEPATSIVQRFCTGGMSLGAISRETHEAIAIAMNRLGGKSNSGEGGEDPIRWSPLTDVVDGYSPTLPHLKGLQNGDTATSAIKQVASGRFGVTPTFLVNADQLEIKIAQGAKPGEGGQLPGKKVSAYIARLRNSKPGVPLISPPPHHDIYSIEDLAQLIYDLHQVNPKAKVSVKLVAEAGIGTVASGVAKGNADIIQISGHDGGTGASPISSIKHAGGPWELGLTESHQTLIENGLRERVILRVDGGFKSGVDVMMAAVMGADEYGFGSVAMIATGCVMARICHTNNCPVGVASQREELRARFPGIPGDLVNFFLYVAEEIRGMLAQLGYQKLDDIIGHTDLLRPRDISLVKTQHLDLSCIMSSVGLPKLRSTDIRNQDVHTNGPVLDDVVLADPEILDAINNEKVVNKTIKIYNVDRAVCGRIAGVVAKKYGDTGFAGQLNITFTGSAGQSFACFLTPGMNIRLIGEANDYVGKGMAGGELVVTPVENTGFVPEDAAIVGNTCLYGATGGQVFVRGKAGERFAVRNSLAQAVVEGTGDHCCEYMTGGCVVVLGKVGRNVAAGMTGGLAYILDEDDTLMPKVNKEIVKVQRVTASVGQMQLKSLIEAHVEKTGSSKGAAILKEWDTNLPLFWQLVPPSEEDTPEACAAYEANSAGQVTSLQSA

SEQ ID NO: 19408 - protein, 603 aa, Populus trichocarpa
MSRALSLRRSLLHLHHHRPKPLSPTTPPPPKPTQNPFSPLNPARKFCTSPTPTPSTNSEVRKYIGYTALVIFCGAATYYSFPFPGNAKHKKAQLFRYAPLPEDLHTVSNWSGTHEVQTRNFYQPENIEQLEKLVKENNEKKARIRPVGSGLSPNGIGLARSGMVNLALMDKVLEVDKEKRRVRVEAGIRVQELVDGIKEYGLTLQNFASIREQQIGGIVQVGAHGTGARLPPIDEQVISMKLVTPAKGTIEISKEKDPELFYLARVGLGGLGVVSEVTLQCVERQELVEHTFISNMKDIKKNHKKLLSENKHVKYLHIPYTDAVVVVTCNPVSKWKGPPKYKPKYTTDEALQHVRDLFKESLEKYRIAAAKSSDDNEPDINELSFTELRDKLLALDPLNKDHVVKINRAEAEFWRKSEGYRVGWSDEILGFDCGGQQWVSENCFPAGTLAKPSLKDLEFIEKLKQLIEKEEIPAPAPIEQRWTARSQSSMSPASSSAEDDIFSWVGIIMYLPTMDARQRKEITEEFFHYRHLTQVELWDKYSAYEHWAKIEVPKDKDELAALRERLRRRFPVDAYNKARKELDPNKILSNNMLEKLFPLSETN

SEQ ID NO: 19409 - protein, 935 aa, Populus trichocarpa
MDEHSSSSPNSTFGIFSGNPMNWDLMDEILYQGWAENDGEFSFLQQGPSISNVLYDHPSLYMPFMGSNNLSIASNQQNYQEETERHCHGNPPLDYPKSMELLQTEPQVEDSVDTSTSLLHTTSYRVEAAGLGVEWQMVPRVNPLTSFSVKERAMQAIRYLKNCIQYKDSLIQIWLPVEKEGKKVLATIDQPYFVNPSCKSLASYRNVSVAYHFQVEGDAKFSVGFPGRVFLEKLPEWTPDVRLFRSEEYPRRDHAVQHNIRGSLALPLFKQGSETCLGIVEIVTTTEKITYRPELEDIRKALKAVDLRSSEDFCSPGVKTCNGLNQVAVPELSEIVKSVCKTYGLPLALTWALCSRQGKGGRQQFAEKSGACISTVDSACFLADRDFSGFHMASFEQYIFLGQGIVGRAFTTQKQCFANDITSFSKKDYPLAHHAKIFGLHAAIAIPMRSIATGLVEFVLELFLPIDCKDTEEQKKMWDLLPIAIQQVCWSLQVVMDTGLGNGENQSFESSPSKQPPLDESSWISRMVEAQKKSKSFCVTWGYPKEPKEEFKMITHWDESAVELDHKQVISELGQLQQNSRTNSNTEGDGVSSAFGRHLSFGSRKTGKKRRTKTDIQTISLEVLRQYFAGSLKDAAQSLSVCPTTLKRICRQHGITRWPSRKIKKVDHSLRKLQQVIDTVQGAKGAIQIESFYSAFPELSSTKLSSHAPSSSFRRSDSSKHFDSPPDDTIFSGTTSKSHSSPCSRSSCSSNCCSARAQQHAATVITGSSNGNGGLPAETSNGVLKRTSSSELAEFYSLNNEVEPDFLSRSYIHKTRTINEQIHQSLLETPPQFGQSRRGGDVFRVKAIFGVEKVRLFLQPNWGLRELQQEIGKRFKIDDFTGIGLKYMDDDGEWIRLTRDDDLEECKETHKFCQSNTIKLSLYKYSTAFGCRGSC

SEQ ID NO: 19410 - protein, 302 aa, Populus trichocarpa
MMAGKEDLGLSLSLSVPQNQHSLQLNLMPSLVPSTASSSLSGFHPQKPSWNVTFPSSDPNSNSYRAETRSLLRGIDVNRLPSTADCEEEAGVSSPNSTISSISGKRSEREGINGDEHEMERASSHGISDEEDGETSRKKLRLSKDQAAILEESFKEHNTLNPKQKMALAKQLGLRPRQVEVWFQNRRARTKLKQTEVDCEFLKRCCENLTEENRRLQKEVQELRALKLSPQFYMQMTPPTTLTMCPSCERVAAPPTASSTVDARPHPHIGPTRHRPVPMNPWAPAAPVTRGPTPFDAIRPRS

SEQ ID NO: 19411 - protein, 534 aa, Populus trichocarpa
YLQSLSQTPHRLRKRMLATWTPDQELNQVRLRSGADMMRKLKWYDLIALGIGGMLGVGVFVTTGPVALKTSGPSVFISYIIAGISALFSSLCYTEFSVQIPVAGGAFSYLRVTFGEFIGYFAGANILMEYVLSNAAVARTFTEYLCHAVGENPSSWRIEVDGVAEGYNMLDFPAVALILLLTLCLCHSTKESSILNLIMTVFHVIFFGFIIIVGFSKGSARNLVEPGGLAPFGVKGVLDGAAIVYFSYIGYDSVSTMAEEIQNPAKSLPVGILGSVLIVTGLYCLMALSLCVLVPFNMIDKDASFSVAFEKIGWKWASNVVGAGASLGIVASLLVAMLGQARYLCVIGRARLVPSWFAKVNPSTGTPLNATLFLGLCTASIALFTELSIILEIISISTLLVFYMVANALIYRRYVVISHNPPSRTLLFLVLLSSTAIGFSMSWKLDEQWWALPVLGGFMIAITAFFQYKVPSVCQPNEEWSVPFMPWPAVTSIFLNVFLMTTLKARSFQRFGIWAFLITLFYVLYGVHSTYRAE

SEQ ID NO: 19412 - protein, 227 aa, Populus trichocarpa
MDDADEGAAISSPNSAASSFQMDFGIRSGRDRKRDLDAIDAERASSRASDDDENGLTRKKLRLSKEQSAFLEESFKEHNTLNPKQKLALAKQLNLRPRQVEVWFQNRRARTKLKQTEVDCEYLKRCCETLTEENRRLQKELQELRALKTSQPFYMQLPATTLTMCPSCERVATTTTSSSGTTTTTTTTNPSTTTTTSTTSSKPLSLPAKPRLFPLSHGQVQPHHAAS

SEQ ID NO: 19413 - protein, 382 aa, Populus trichocarpa
MELPLLFRTPSHSSTATATATTSFRVGAWFSKTSDLPASRRRLNLRENGVNRIQIRCSKASTERTGAGSEGIEERERRRFTGSAMEVTTFDQSFGDAASDFPLWEKIGAVVRLCYGIGIYGGMALAGRFICSITGIDSLGGFNPSLDAFLEGLGYAAPPVMALLFILDDEVVKLSPHARAIRDVEDEELRNFFYGMSPWQFILIVAASSVGEELFYRAAVQGALADIFLRGTNLMEDARGMASLTGVLPPFVPFAQAFAAVLTAVLTGSLYYVATSPKDPTYVVAPVLPSYSGREDLKKLFAAWYERRQMKKIYSPLLEGLLALYLGFEWIQTNNILAPIITHGIYSAVVLGHGLWKIHEHRRRLRRRIQLLKSEEMNSNKR

SEQ ID NO: 19414 - protein, 579 aa, Populus trichocarpa
MAQDKHGLTGISDSGNHISILKKNKRLFLASFAAFFLVATIAAVVTGVNSHKNGKNEGAHAILKSACSSTLYPELCYSAIATVPGVTSNLASLKDVIELSINLTTKTVQQNYFTVEKLIAKTKLTKREKTALHDCLETIDETLDELHEALVDINGYPDKKSLKEQADNLKTLLSSAITNQETCLDGFSHDGADKKVRKALLKGQTHVEKMCSNALAMIRNMTDTDIANELQNTNRKLKEEKEGNERVWPEWMSVADRRLLQSSSVTPNVVVAADGSGDYKTVSEAVAAVPKKSSTRYVIQIKAGVYRENVEVPKDKHNVMFLGDGRKTTIITASRNVVDGSTTFKSATVAAVGQGFLARGVTFENTAGPSKHQAVALRVGSDLSAFYECDMLAYQDTLYAHSNRQFFINCLIAGTVDFIFGNAAAVFQDCDIHARRPDSGQKNMVTAQGRTDPNQNTGIVIQKSRIGATSDLLPVQSSFPTYLGRPWKEYSRTVIMQSSITDVIQPAGWHEWSGTFALSTLFYAEYQNSGSGAGTSSRVTWEGYKVITSATEAQAFAPGNFIAGSSWLGSTSFPFSLGL

SEQ ID NO: 19415 - protein, 921 aa, Populus trichocarpa
MGSWLLLLFSLLLFFHASSAQPGFLSLDCGGPANFTDALGLSWTSDVNFIYGEAASISVANETRKQYTTVRHFPADTRKYCYRLDVTSRTRYLLRATFLYGDFDNNNVYPKFDISVGPTHWSTIVISDANTIESIELIFLASSSSISVCLSNATTGQPFISTLELRQFNGSVYFTAFENQFFLSVSARINFGADSVDPVRYPDDPYDRIWESDSVKKANYLVDVAAGTKKVSTDMPINVNIDERPPEKVMQTAVVGTNGSLTYRLNLDGFPGFGWACTYFAEIEDLDPTESRKFRLVLPGNPDMSKAVVNIEENAQGKYRLYEPGYTNLSLPFVLSFRFGKTSDSSRGPLLNAMEINKYLEKNDGSLDGDVISGVILLYSTADWAQEGGDPCMPVPWSWVQCNSEARPRIVKLSLSSKNLSGSVPSDLTKLTGLVELWLDGNSLTGPIPDFTGCTDLEIIHLENNQLTGELPSSLLNLPNLRELYVQNNMLSGTIPSGLGRKVVLNYSGNINLHEGARRGRHMGIIIGSSVGAAVLLITTLVSCMFMQKGKKRHPDQEQLRDSLPVQRVVSTLSNAPGEAAHRFTSFEIEDATKKFEKKIGSGGFGVVYYGKMKDGREIAVKVLTSNSFQGKREFSNEVSLLSRIHHRNLVQFLGFCQEVGKSMLVYEFMHNGTLKEHLYGPLKQGRSISWIKRLEIAEDAAKGIEYLHTGCVPAIIHRDLKTSNILLDKNMRAKVADFGLSKLAVDGASHVSSIVRGTVGYLDPEYYISQQLTNKSDVYSFGVILLELMSGQEAISNESFGVNCRNIVQWAKLHIESGDIQGIIDPSLCNEFDIQSMWKIAEKALTCVQPHGHMRPSISEVLKEIQDAILIEREVTAARGFSDEMSRNSVQSSFNLGSLDLGGTENCLALDESIARPTAR

SEQ ID NO: 19416 - protein, 340 aa, Populus trichocarpa
LNDRTLPKFLESDRVEKTVSRNNIRLKLFSGTANPSLSQEIARYMGLELGKINIKRFADGEIYVQLQESVRGCDVFLLQPTCPPANENLMELLIMIDACRRASAKNITAVIPYFGYARADRKASFMTQGRESIAAKLVANIITEAGANRILACDLHSGQSMGYFDIPVDHVYGQPVILDYLASKTIYSSDLVVVSPDVGGVARARAFAKKLSDAPLAIVDKRRHGHNVAEVMNLIGDVKGKVAVMVDDMIDTAGTIAKGAALLHEEGAREVYACCTHAVFSPPAIERLSSGLFQEVIITNTIPVAEKNHFPQLTVLSVASLLGETIWRVHDDCSVSSIFQ

SEQ ID NO: 19417 - protein, 591 aa, Populus trichocarpa
MQGKFKEGREECTFDGTVDWHGRPAIKDKSGQWVAGIIILLNQGLATLAFFGVGVNLVLFLTRVLQQSNADAANNVSKWTGTVYIFSLVGAFLSDSYWGRYKTCAIFQVIFVIGLVILSLSSYLFLIRPKGCGNELTPCGSHSSMEVSLFYLSIYLVALGNGGYQPNIATFGADQFDEEDPREGHSKVAFFSYFYLALNLGSLFSNTILGYFEDEGVWALGFWASAGSAFAALVLFLGGTSRYRHFKPSGNPLSRFCQVIIAAMKKWKLEMPRDGEEELYNVHAKDCSMNGNRKILHTDGFKFLDRAAFISSRDIDDQKRGCRNPWRLCPITQVEEVKCILRLLPIWLCTIIYSVVFTQMASLFVEQGAAMKTTVSNFKIPPASMSSFDILSVAFFIFLYRRVLDPLVSRVKKTGSKGLTELQRMGVGLVIAIVAMISAGLVECYRLRYARKDCTHCEGSSSMSIFWQVPQYALIGASEVFMYVGQLEFFNAQTPDGLKSFGSALCMTSISLGNYVSSLLVTMVMKISTEDHMPGWIPGNLNKGHLDRFYFLLATLTTIDLVVYIACARWYKSIQLEGKCELNDQEENFRV

SEQ ID NO: 19418 - protein, 605 aa, Populus trichocarpa
MDTKIGSLDTCRPTSNDMINPTNGAVAAIQSSVSPTIINASESTLGRHLARRLVQIGVNDVFSVPGDFNLTLLDHLIAEPELNLVGCCNELNAGYAADGYARSRGVGACVVTFTVGGLSVLNAIAGAYSENLPVICIVGGPNSNDYGTNRILHHTIGLPDFSQELACFSTVTCFQAVVNNLEDAHELIDTAISTALKESKPVYISVSCNLSAIPHPTFSREPVPFSLTPKLSNKLGLEAAVEAAAEFLNKAVKPVLVGGPKLRSAHAGEAFVELADASGYALAIMPSAKGLVPEHHPHFIGTYWGAVSTAFCAEIVESADAYLFAGPIFNDYSSVGYSLLLKKEKAIIVQPDRVVIANGPAFGCILMKDFLSALAKRLKCNTTAYDNYHRIFVPEGQPLRGAPKEPLRVNVLFEHIQKMLSSETAVIAETGDSWFNCQKLKLPRGCGYEFQMQYGSIGWSVGATLGYAQAVPEKRVISFIGDGSFQVTAQDVSTMLRCGQKTIIFLINNGGYTIEVEIHDGPYNVIKNWNYTGLVDAIHNGEGKCWTAKVFCEEDLVEAIETATGSKKDSLCFIEVIAHKDDTSKELLEWGSRVSAANSRPPNPQ

SEQ ID NO: 19419 - protein, 380 aa, Populus trichocarpa
MAPKSLSAFLFPLSLPHNLTYSTPKFLRIYTKPSPILCKSQQTPTATAHSSVSIPDQDGTGAAAPSRGDQFLERQKSFEAAKLVMKEVKKSKRREKGKALKLNTAVASCYGCGAPLHTLDPDAPGFVDPDTYELKKRHRQLRTVLCGRCRLLSHGHMITAVGGNGGYSGGKQFVSADELREKLSHLRHEKALIVKLVDVVDFNGSFLARLRDLVGANPIILVVTKVDLLPRDTDLNCVGDWVVEATTKKKLSVLSVHLTSSKSLVGIAGVVSEIQREKKGRDVYILGSANVGKSAFISALLKTMALRDPAAAAARKYKPIQSAVPGTTLGPIQIDAFLGGGKLYDTPGVHLHHRQAAVVHSEDLPALAPRSRLKGQSFPV

SEQ ID NO: 19420 - protein, 127 aa, Populus trichocarpa
MASNKHGDWKDFDKYEEYRYLLAIAILSTFYTAGQVLRHVQELSTGKQMLEKRTSAMFDFFGDQIVAYLLVSSASSAVPLTNRMREGADNIFTDSSAAAISMGFFAFISLALSALISGYKLSTQSYI

SEQ ID NO: 19421 - protein, 317 aa, Populus trichocarpa
MASFNSSSSTITTFKFHFGAFLLLVGVASAQLASNFYGTSCPSVLSVIKSAVDSAVSNEARMGASLLRLHFHDCFVNGCDASVLLDGGEKTAPANTNSLRGFEVIDSIKTQLESSCPGVVSCADILSVAARDSVVALGGPSWQVQLGRRDSATAGSVSDVNNNVPSPALSVSGLISAFSNKGFTAKEMVALSGSHTIGQARCTTFLTRINNETNIDSSFKTSTQAQCQNTNNFVPLDVTSPTSFDSAYYRNLLNQKGLLHSDQQLFSGGSTDAQVRAYSSNQAAFRTDFANAMIKMGNLSPLTGTNGQIRTNCRKAN

SEQ ID NO: 19422 - protein, 293 aa, Populus trichocarpa
LSPYYYNHVCPKALATIKRVVEAAVYKERRMGASLLRLHFHDCFVNGCDASILLDSTSTIDSEKNALPNINSLRGFEVIDQVKSEVDKICGRPVVSCADIVAVAARDSVVALGGPTWAVQLGRKDSNTASRDKANNDLPSPFMDLPALINNFKRQGLNERDLVALSGGHTLGSAQCFTFRNRIHNETNIDPKFVKQRKPTCPLVGGDSNLAPLDPTPAHFDVAYFNSLVKKRGLLRSDQALFNGGSTDGLVKAYSSNAKAFWADFAKSMVKMGNINVLTGKQGQVRLNCRKVN

SEQ ID NO: 19423 - protein, 321 aa, Populus trichocarpa
MVSLGIFTLISTLFLVLAAVPTTASSSKLSPNYYDHVCPKALPAIKRVVEAAVNKERRMGASLLRLHFHDCFVHGCDASILLDSTSAFDSEKKAGPNKNSIRGFEVIDQIKLEVDKVCGRPVVSCADILAVAARDSVVVLGGPTWAVQLGRRDSTTARKTTADKDIPTPLMNLTDLINNFKKHGLDERDLVALSGAHTIGSAQCFTFRDRIYNEANIDPKFARERRLSCPRTGGNSNLAALDPTHANFDVKYFNKLLKKRGLLHSDQELFNGGSTDSLVEAYSSDAKAFWADFAKSMMKMGNINPLTGKRGQVRLNCRKVN

SEQ ID NO: 19424 - protein, 551 aa, Populus trichocarpa
IKARDFHVKSGPLDFKASSVTETFNAVPDYGYDEGKGNEEGLEISRLGISQEIVGALAKKGITKLFPIQRAVLEPAMQGKDMFGRARTGTGKTLAFGIPILDKILQFNAQHGRGRYPLGIVMAPTRELARQVEKEFREAAPSLDITCLYGGTPISQQMRDLEYGVDVVVGTPGRIIDLMKRGSLVLSEVQHVVLDEADQMLGVGFVDDIETILSSVPQKRHSMCFSATMPSWIRELVRKYLKDPLTIDLVGDSDKKLAEGITLYSIASDLYAKASILGPLITEHAKGGKCIVFTETKRDADRLAYAMAKTYKCEALHGDISQSVRERTLSGFREGHFNILVATDVAARGLDVPNVDLIIHYALPRCSETFVHRSGRTGRAGKKGTAILIYTQDESRQVRIIERDTGCKFLELPKIAVDGESIDMYNDMGRGRFNSFGSPRGFGDGGRYGGQGNYGSGQGFRNSGFGRSDGQFSGSSRNGYNRNQSGNFGRSSNFGEPRTDRSSNFGDFGSGRSSSFGDFGSGRSSSFGDSGSGRSSSFGNNSGLTNRSQND

SEQ ID NO: 19425 - protein, 324 aa, Populus trichocarpa
MSSGPVRRVLPKDIQVVQNLIERCLQLYMNQTEVVETLLAQAKIEPGFTELVWQKLEEENGEFFRAYYLRLKVKQQIEEFNKLLVQQAHLMHDLNSTGVAPMPPSNGFHISPLHQNTACYGPDHTGPTLKPESMHHPIGSSLTNAYTNGGSSLHSSMHAAVEISARANRIDAPPNMLSMQSSNIGLLQGMNGGMIKSEAGYSGTSPYMFGADGNVLEARPSIADASVASFSSVDSSSQALNESILDADTSSFGFLSQIPQVFSLSDLTADFTQSSEILENYSRSPFLAADNDNFPDSREREHPGDNRRLDSISEGMSYDDFGSE

SEQ ID NO: 19426 - protein, 412 aa, Populus trichocarpa
MEDIEVPSFFLCPISLQIMKDPVIVPTGITYDRESIEKWLFSSKNDTCPVTKQVISGCEVTPNHTLRRLIQSWCTLNASYGVERIPTPKPPISKAQIAKLLNDAKSPEQQVTCLRKLRSFANENETNKRCMEAAGAVEFLVSMLNNFHSLSFEVTSDDGFEISRPSDEALSILYGLQISESGLKNLVMGRNGEFIETLTKVMQGGNYESRAYAVFLLKSMLEVADTLKLISLKHELFDEIVQVLRDQISHQASKATLQLLISLCPWGRNRIKAIEAKAVPVLIDLLLDSPEKRTCEMVLMVLDLLCQCAEGRAELLGHGAGLAIVSKKILRVSQVASERAVRIILSISKYSITTSVLQEMLQIGIVAKLCLVLQVDCGSKIKDKAREVLKMQARVWKSSPCIPANLLSSYPE

SEQ ID NO: 19427 - protein, 408 aa, Populus trichocarpa
MDDIEVPRFFICPIYLQIMKDPVTTITGITYDRESIERWLFTSENTTCPVTKQSLPKDSDLTPNHTLRRLIQAWCTENASHGVDRIPTPKPCLDKAYVLKLIKNLSHHKLQIEALTQMEVLAAENERNRKCMVDAGLPKALLVFIVSCFENGQVSGIQEALSILRLIKIPRSESRVFLCENGKIIESLTWLLGYKMDNYATVKSHAVSVLRILLEDASSSVLKRLKPEFFERIVGVLREKITQQGIKDALEVLLDACPWAGNRKMMVESGAVFELIELELGSPERRTTELNLGVLFHLCCCAEGRAQFLSHGGSIAVVAKRILRVSPEVNDRAILILSLICKFSGTSMVIQEMVDVKAVPKLFMLLQADCAPYLKDKAREILRSHFDEWKNFPCIFSSLSSLEYKVSR

SEQ ID NO: 19428 - protein, 569 aa, Populus trichocarpa
MAETDYTNNGTVDIEGNPANKKKTGNWKSCRFILGNECCERLAYYGMSTNLVNYLGDRLNQGNVAAANNVTNWSGTCYVTPLIGAFLADSYLGRYWTIASFVIIYIIGMTLLTLSASVTGLKPSCDKDSCHPTTGQTAACFVALYMIALGTGGIKPCVSSFGADQFDETDETERKKKSSFFNWFYLSINIGALVASSVLVWIQMNVGWGWGFGVPAVAMAVAVVFFFLGSKLYRIQKPGGSPITRIVQVIVASFRKSNVQVPADKSLLYETAEEESQIQGSRKLEHTNKFKFFDKAAVKTQDDNIKGLTSPWRLCTVTQVEELKSIIRLLPVWASGIVFSTVYSQMNTMFVLQGNTMDQHMGPHFQIPSASLSLFDTLSVIFWAPVYDRIIVPYARKFTGHERGFTQLQRMGIGLVISIVSMITAGILEVVRLNFVQKNNYYDLKYIPMSIFWQVPQYFLIGCAEVFTFIGQLEFFYDQAPDAMRSLCSALSLTTVALGNYLSTLLVTIVTKITTRGGKLGWIPDNMNRGHLDYFYWLLAILSFLNFILYLWISKWFTYKKATGHPQRD

SEQ ID NO: 19429 - protein, 485 aa, Populus trichocarpa
MDAPAYEQVSPAVPSWLNKGDNAWQMIASILVATQSMPGLVILYASIVKKKWAVNSAFMALYAFAAVLICWVLLCYRMAFGDELLPFWGKGAPALGQKYLIAQARIPESTHTHEDGTRETVAPLYPMATLVYFQFTFAAITLILLAGSVLGRMNIKAWMAFVPLWLIFSYTVGAFSLWGGGFLYHWGVIDYSGGYVIHLSSGIAGLTAAYWVGPRLKSDRERFPPNNVLLMLAGAGLLWMGWSGFNGGAPYAANIDASMAMLNTNVCAATSLLVWTSLDVVYFGKPSVIGAVQGMMTGLVCITPGAGLVQSWAAIVMGILSGSIPWVSMMILHKKFALLQKVDDTLGVFHTHAVAGLLGGLLTGLLAEPELCDLILQVNTRGAFYGGNGGVQFLKQMVAALFVIGWNIVSTTLILLFIRLFIPLRMPEEQLAIGDDAVHGEEAYALWGDGEKYDPSKHGRITSLFGEETTQSPYVNGARGVTINL

SEQ ID NO: 19430 - protein, 534 aa, Populus trichocarpa
MDNLSWGLYDHGTNDRIGIEIPNYKSFQPFSPPPVSPSSYFAIPPGLSPTELLDSPVLFPTSNGLASPTTGAFAGQTFNWRGNSNDNQQGVSGEEKNYSDFSFPTQTRPPAISSSFFQSSSNSVTVEKSLKRKQEEWNFDQLKQTDFSSDQKTGVKSEFAPEQSFSSELVPLQANMQSVNTAAQPSFNQYNQSAHYMRENKRSDDGYNWRKYGQKQVKGSENPRSYYKCTYPNCPTKKKVERSLDGQITEIVYKGSHNHPKLQSSRRSSSQLVQPSGGASSEISDQSIAPIESSMMQEDSSISLGEDEFDQSSSMNSGEEDNANEPDAKRWQGQNENESILGAGSRTVREPRIVVQTTSDIDILDDGYRWRKYGQKVVKGNPNPRSYYKCTSVGCPVRKHVERASQDLRAVITTYEGKHNHDVPAARGSGYMNKAPSIANSTANAPIPIRPSVMANHSNQTSYPNSLHSTRSLPASGSQAPFTLEMLQGQGSFEYSSFGKQNGTYMNQTQYSEGVFPRAKEEPKNDSFFDPFLN

SEQ ID NO: 19431 - protein, 190 aa, Populus trichocarpa
MDKTPSNSQDVEVRKGPWTLEEDLILTNHIANHGEGVWNSLAKAAGLKRTGKSCRLRWLNYLRPDLRRGNITPEEQLLIMELHAKWGNRWSKIAKHLPGRTDNEIKNYWRTRIQKHIKQAETFAAQSSETNEHGSSSSQVSSTTELMVSNCLPSYQGDVEAFSGGNIPQELNENYWSMEDLWSMQLLNGD

SEQ ID NO: 19432 - protein, 538 aa, Populus trichocarpa
MSSSGGAAIEERAVQFGLTSREDSGSSQEAKKEEVIESAKSEMGDVREENHRLKMMLERIEKDYQSLQLRFFDILQHETSSKQSTDSAPSHDETEESNELVSLCLGRSPSEPKKEDKSTNSAKSRENEELKANLTLGLDSKILTSTETASNPSPAESVEEPKEEAGETWPPSKIIPKRNGDHDEAAQQSQAKRARVCVRTRCETPTMNDGCQWRKYGQKISKGNPCPRAYYRCTVAPLCPVRKQVQRCAEDTSILITTYEGTHNHPLPVSATAMASTTSAAASMLLSGSSTSQQGLGSHINATSARTELNGVSFSLHDHLRAKQIYFPNSSSPTFPTITLDLTTSPSTSTTPFGRFSSSFSSTSRYPSTSLNFSSTEPNSLPPIWGNGLHNYGTRSYNHQQLYQSFMEKNHQAAASQQVLTDTLTKAITSDPSFRTVIATAISSMIGGGGSAIANNRNQRAGDQNCFGQNLNFGETMTTSAFSINSLSQNGKGCASSCFNGLSSSTSQKGSSQLQPALPFSVFNSASMPNNDNEEHKS

SEQ ID NO: 19433 - protein, 522 aa, Populus trichocarpa
ERKRPKDSPGKRGDSQIHLAARTGNLSRVREILQNSDGNDLKVLLATQNQDGETPLYAAAENGHAGVVAKMLEYMNLETASVAARNGYDPFHVAAKQGHLDVLTELLRVFPNLVMTTDLSCTTALHTAATQGHIDVVNLLLETDVNLVKIARNNGKTVLHSAARMGHLEIVRSLLSKDPSTGFRTDKKGQTALHMAVKGQNEEIVLELLKPDRTVMHVEDNKGNTALHIAVMKGRTQNVHCLLSVEGININAINKAGETPLDIAEKLGIQELVSILKKAGANNSKDCGKPPNAAKQLKQTVSDIKHDVQSQLQQTRQTGFRVQKIAKKLKKLHISGLNNAINNSTIVAVLIATVAFAAIFTVPGQYVEEKIEGAAIGQANVARNPAFLVFFVFDSLALFISLAVVVVQTSIVVIEQKAKKQLVFVINKLMWLACLFISAAFISLTYVVVGKNSRWLAIYATVIGGLIMLATIGSMCYCVVLHQMEESKLRNIRRETRPGSYSMSVESDQEILNSEYRRMYAL

SEQ ID NO: 19434 - protein, 274 aa, Populus trichocarpa
LLHLLVRFLIKHPASSASSQSNRYPGISGSDALQRQLQQLFHLHDSGLDQAFIDALPVFQYKEIVGLKEPFDCAVCLCEFSEKDKLRLLPMCSHAFHINCIDTWLLSNSTCPLCRGTLFSPAGFSMENPMFDFDDLREDDGCPGNRDNGFVPTQKTLQIDEIVVEKGVLPVRLGKFRKLNGGAGDAGGETSSSNLDARRCFSMGSYQYVLDDTDLRVALGKERHSHDITHARGTEQDVNLSVDRDLEENKISSLIKGESFSVSKIWLWRKKGKF

SEQ ID NO: 19435 - protein, 476 aa, Populus trichocarpa
MSTSGQPQFRYTQTPSKVLHLRNLPWECTEEELIELCEPFGKIVNTKCNVGNNRNQAFVEFAEQNQAIQMVSYYASSSEPAQVRGKTVYIQYSNRHEIVNNKSPGDNPGNVLLVTIEGVEAGDVSIDVIHLVFSAFGYVHKIATFEKAAGFQALIQFTDAETASSARNALDGRNIMFKKFRYLLPEHVGSCNLRISYSAHTDLNIKFQSHRSRDYTNPYLPVNPTAIDGPVQSTVGADGKKKEPESNVLLASIENMQYAVTVDVLHTVFSGFGTVQKIAIFEKNGGTQALIQYPDVATAAVAKETLEGHCIYDGGYCKLHLSYSRHTDLNVKAFSDKSRDYTIPDASFLTAQAPGLHTAPTTWQNPQAGSMYLGSNYATTAAAPAQVPPGQVAAWDPSMQAGGPGYSSVRGMYPGQTYPTPPAYASSALPPGSSPHSYSSPISPGVASMGMTHPGVQPNMRPGGASPPGQTPYYGR

SEQ ID NO: 19436 - protein, 589 aa, Populus trichocarpa
IQAANVGFSRVFALAKPDAGKLIVGTIALLIASTSSLLIPKYGGMIIDIVSRDIKTPEQQSEALDAVMNTILYIVLIVVVGSLCTALRAWLFSSASERVVARLRKDLFSHLINQEIAFYDVTRTGELLSRLSEDTQIIKNAATTNLSEAFRNLTTALIGVCFMFSSSWKLTLLALAIVPLISVAVKKFGRYLRELSHATQAAAAVAASIAEESFGAIRTVRSFAQEEFTISHYSEKVDETLMLGLRQARIVGLFFGGINAASTLSVIVVVVYGAYLTITGVMTTGSLTSFILYSLTVGSSVSSLSGLYTTAMKAAGASRRVFQLLDRISSMPKSGDKCPRSDLDGDVELNDVWFAYPSRPSHMVLKGITLKLSPGSKVALVGPSGGGKTTIANLIERFYDPLKGQILLNGVPLAEISHKYLHGKVSIVSQEPVLFNCSIEENIAYGYNGKASFADIENVAKMANAHDFIDAFPEKYQTVVGERGLRLSGGQKQRVAIARALLMNPRVLLLDEATSALDAESEYLVQDAMDSLMQGRTVLVIAHRLSTVKSADTVAVISDGQIAESGTHEELLNKDGIYNALVRRQLQGP

SEQ ID NO: 19437 - protein, 347 aa, Populus trichocarpa
MGDSSDSLSIDMETPSLSGKEYVIETCYGHVSVSVYGDQDKPALVTYPDLALNHTSCFQGLLFCPEACSLLLHNFCIYHISPPGHELGAATISPDDPLLSVDDLADQIAEVLNYFGLDAVMCMGVTAGAYILTLFAMKYRQRVLGLILISPLCNAPSWTEWLYNKVLSNLLYYYGMCGVVKELLLKRYFSKEALGSSQVPESDAVQACKRLLDERQGLNVWRFLEAINGRQDISNGLRKLLCCSLIFVGENSPFHFESLDMTSELDRRYSALVEVQACGSMVTEEQPHAMLIPMEYFLTGYGMYRPPKLSVSPRSTLSPICISPELLSPESMGLKLKPIKTRISLEV

SEQ ID NO: 19438 - protein, 486 aa, Populus trichocarpa
MHKRQRKRRWIGPKPWPIIGNFNLLGPLPHQSLHQLSLKYGKTMQLHFGSYPVMVTSSLDMAKQILKTYDHMFASRPQTAAGKYTTYEYSDLAWAPYGPYWRQGRKIYLTELFSAKRLESYEYMRVEEMREFTRRLYRNCGKSIELKDYLSHYTLSIISRIVLGKKYFSASESEKEIVSLEEFQEMLDELFLLNGVLNIGDWIPWLDFLDLQGYVKRMKKLKVRFDKFHDHVIDEHNVRRKTTKNWQPKDMVDLLLQLADDPELEVKLTRDNMKGLTQDLIAGGTDTAATMGDWSMSELLKKPQLFKRVTDELDRVVGRERWVEEKDIPQLPYIEAIMKEAMRMHPSAVMLAPHLALQDCKVGGYDIPKGTRIFINTWSMGRDPDLWEDPEDFRPERFIGKGVDIKGHNFELLPFGSGRRMCPGYPLGTKMILVSLANMLHGFTWELPPGIKPEDVKRDEVFGLATQRKYPTVAVAKPRLPLHLYN

SEQ ID NO: 19439 - protein, 593 aa, Populus trichocarpa
MVFQDFDLLSERRRLERQQKLRKKIAIAAVSGIAFFVIVGAGVLALVSNHKSSPGNNGGSAVPQPVESAKPISRVSRVIKTVCNATTYQETCQKTLEKEVEKDPSLAQPKNLLKIAIKAADEEMKKVLKKASSFKFDDPREKAAFEDCLELVENAKEELKDSVAHVGDDLGKLAKNAPDLNNWLSAVMSYQETCIDGFPEGKLKSDMEKTFKASKELTSNSLAMVSSLTSFMKSFPFPAALNRRLLAKEDNSPALNKDDLPGWMSNEDRRILKGASKDKPQPNVTVAKDGSGDFKTISEALAAMPAKYEGRYVIFVKQGIYDETVTVTKKMSNITIYGDGSQKTIVTGNKNFADGVQTFRTATFAVLGDGFLCKAMGFRNTAGPEKHQAVAIRVQADRAIFLNCRFEGYQDTLYAQTHRQFYRSCVITGTVDFIFGDATAIFQNCLITVRKPLENQQNLITAQGRVDGHETTGIVLQNCRIEPDKDLVPVKTKIRSYLGRPWKEFSRTIIMESTIGDFIHPDGWLPWQGEFGLKTLYYAEYNNKGAGAKTTARIKWPGYHIINNEEAMKFTAEPFYQGDWISATGSPIHLGLF

SEQ ID NO: 19440 - protein, 174 aa, Populus trichocarpa
MGFFAEESGLIVAHLIYKAALALAVLIWAWDWALRFKNRAHLSSSSNDSLQQYHPVPSPHQVMDGLISTTFNDVIERVPGVCDTCAVCLSQLRDQDEVRELRNCGHVFHKECIDRWVDHDHDHDHDHDHDENHNTCPLCRAPLPTTSRSLAWTRTEPSWAVERILYLFGDDLIT

SEQ ID NO: 19441 - protein, 168 aa, Populus trichocarpa
MQEQTTSSIPANSLPSSSERSSSSAPQLEVKEGMESDEEIRRVPEMSGEPAGTSASGRETGSNAGPDRVQPTGEGQSQRKRGRSPADKENKRLKRLLRNRVSAQQARERKKAYLTELETRVKDLEKKNSELEERLSTLQNENQMLRQILKNTTASRKGGSSGTNADGS

SEQ ID NO: 19442 - protein, 444 aa, Populus trichocarpa
MMKKVTRKVGKYEVGRTIGEGTFAKVKFAQNRETGESVAMKILSKSAILKHRMVDQIKREISIMKLVRHPYIVMLHEVLASRTKIYIILEFVTGGELFDKIVHQRRLEENESRRYFQQLIDAVAHCHCKGVYHRDLKPENLLLDAFGNLKVSDFGLSALPQKGVGLLHTTCGTPNYVAPEVLGHQGYDGAAADVWSCGVILFVLMAGYLPFEETDLPTLYRKINAAEYSCPFWFSPGAKALIDKILNPNPKTRIGIEGIKKHPWFQKNYEPVGHREDEEVNLDDVHAVFDDIEDQYVAEQLENSEDGPLVMNAFEMITLSQGLNLSALFDRRQDYIKRQTRFVSRKPAKDIISAIEAVAESMNLKVHTRNYKTRLEGVSENKAGQFAVVLEVYEVAPSLFMVDARKASGETLEYHKFYKNFCTKLENIIWKPPEGAKLPACFEQ

SEQ ID NO: 19443 - protein, 229 aa, Populus trichocarpa
MKPVLLLSTPDSVSNHSQADCSYSMVRAPYADPYFGGLCNPYELHAFIQPHLGSHMVGMTAGRVPLPVDLADDGPIYVNAKQYRGIIRRRQSRAKLEAQNKLVKNRKPYLHESRHIHALNRVRGSGGRFLSKKKLQESDPTPSQCNVTDTIHSHVKNDASELESYQSGTGQSGASNTTCSDITSVSYSNVTFRQPERRFSGIATHLGGGMEINSRLICRGTQHHTSVVQ

SEQ ID NO: 19444 - protein, 323 aa, Populus trichocarpa
MDSRSIPDQSSEIALNHVARHFSKETRLGSEQTSCSSKELSLSCSSYKTGQSSQVLLGSRYLHVIQEILAQIASYSLENLDQGFKTGASTLFSSSYAMEGGMPLMGFDKSPDGTLQKRALEAKRTQLLTLLQVVDERYSQCLDEIHTVISAFHAATELDPQIHTRFSLQTISFLYKRLRERISNQILAMGAHLDSGDTIETEGSFGTSYLQKQWTLQQLKKNDHQLWRPQRGLPERSVSVLRAWMFQNFLHPYPKDAEKHLLAAKSGLTRSQVSNWFINARVRLWKPMIEEMYAEMNRRKAHQNEEGTNSNHRISISAIQDLM

SEQ ID NO: 19445 - protein, 573 aa, Populus trichocarpa
MSSSDNHNTLKNKKRLFLSLFSSILLVTAIVSIVAGVTSSKNSTESNNDHQVAHTILKSSCSSTLYPHLCFSALSAVPDATSKIKSKKDVIDLSLNRTMSATRHSYFKIQKLTSTRRSFTERENTALHDCLVMLNETLDQLSKAYQELQDYPSLKKSLSVHADDLKILLSAAMTNQETCLDGFSHDKADKKVRELFIDEEMHVYHMSSIALAIIKNVTDTDMAKEQSLSSGRKLEEENGTEWPEWLSAGDRRLLQATTVTPNVVVAADGSGNYRTVSEAVAAAPERSSSRYIIRIKAGVYRENVDVPRSKTNIMFMGDGRTTTIITASRNVVDGSTTFNSATVAAVGDGFLARDITFQNSAGPSKHQAVAIRVGSDLSAFYRCDMIAYQDTLYVHSLRQFYVSCIIIGSVDFIFGNAAVVFQDCDIHARRPNPGQKNMVTAQGRSDPNENTGIVIQKCRIGATQDLLAAKSSFRSYLGRPWKLYSRTIVMQTEISDIIDPAGWFEWDGDFALDTLVYREYQNTGPGANTANRVNWKGFKVVTSAIEVQPFIARNFIRGASWLPSTGFPYSFDL

SEQ ID NO: 19446 - protein, 198 aa, Populus trichocarpa
MSRVYVGNLDPRVSERELEDEFRRFGVIRSVWVARRPPGYAFIDFDDKRDAQDAIHELDAGKNGWRVELSHNSRGGGGGGGGGGGGRGGGRGRSGGSDLKCYECGEAGHFARECRLRVGSGGGGGGGGAGRRRSRSPRYRRSPSYGRSRSHSPQGRSPKRRSLSPRGRSYSRSPQYRGREELPYTNGNGTRDRRRSRS

SEQ ID NO: 19447 - protein, 393 aa, Populus trichocarpa
MDSIMKPSPSEAHPETMDFLSSTWCNFAVQALQPDLQNQPIILLDNPIKKLDCDVMKPPFSKMDKSVKMDDAFKSLPPWKSNDMKSWIWMQQAMHPELNYNSCFRKKWVHNLFPWKNILPFKTISIKKWLKEIKLKRKEEERLQKAEVHAAISVAGVAAALAAIAAENSKKDESSTAKEAAIASAAALVAAKCAQVAEAMGAKREQLSSAIGSAMSGTNASDIVTLTAAATTSLKGAATLKARTGCKNRLNAPVLPLEDNNDIDFDFEKCRSVLANGTELHVETPDGNFRVRSVSIILSSKAKVILKLRKLNILKGKKESIVLDLHAELYKDLEADRETGHTCYLIVLTTNMGIIKLDMGDDYHRYKTWATTINHMLMLSTSYANYGLQFYEH

SEQ ID NO: 19448 - protein, 160 aa, Populus trichocarpa
MSDEEHHFESKADAGASKTYPQQAGTIRKNGYIVIKNRPCKVVEVSTSKTGKHGHAKCHFVGIDIFNGKKLEDIVPSSHNCDVPHVNRTDYQLIDISEDGFVSLLTENGNTKDDLRLPTDDSLLTPIKDGFGEGKDLVVTVMSAMGEEQICALKDIGPKN

SEQ ID NO: 19449 - protein, 263 aa, Populus trichocarpa
MGANEEGKFVPKKGGTPKKGEIIFTAPTGEEIASKRQLEQYLRAHAGGPAVSEFDWGTGETPRRSARISEKAKVTPVKESEPPKKRSRKSAASKESKETETTFEGTEEAKEEAEKTEMNDMEVEEGKDIMKENQDENKGPCAETQTEAAPVEEAGEEVKTSAKIDEEKVQEKDGQQQGEATTKQGSGEQEKTGAAIDDEKKDEAVDDKEKLNRTAPESEGEIKGKEAENCTSEKPDHTGVDGIKEKVDAKAIENGSNAGEVKP

SEQ ID NO: 19450 - protein, 207 aa, Populus trichocarpa
MEAEGYCDTRLGLGLGGDNHEPWPQKKKEKPVVRLDLSFTLCPKNDAMDMDHHDKADGICFKSEEDEEYGIKRRDNSIDSNIDGSGRKKLRLTKEQSSLLEESFRRHTTLNPAQKHSLAEQLNLKPRQVEVWFQNRRARTKLKQTEVDCEFLKKCCESLSNENRRLKKELQQLRSQKMGRSSPLYTQLAKEGTSTMCCSSCKGKYHD

SEQ ID NO: 19451 - protein, 136 aa, Populus trichocarpa
MATRIRLPSILATAVTLTVLAASLTWAAGSPEATFVKKTISSHQIVIFSKSYCPYCKKAKGVFKELNQTPHVVELDQREDGHDIQDAMSEIVGRRTVPQVFIDGKHIGGSDDTVEAYESGELAKLLGVASEQKDDL

SEQ ID NO: 19452 - protein, 225 aa, Populus trichocarpa
MDSSYFHSQNSQFFPGSSSSFNSLDSFSCNVQNFYSQPLPFNENDSQEMLLSGVPNEPPINSFDTSSSTNTNYDEASSRANYQEEPPQEIAYRGVRRRPWGKYAAEIRDSTRKHVRVWLGTFDTAEAAALAYDQAAFTIRGSMAVLNFPVQKVYESLQQMGYGFQEGQSPIVAMKKRHSMNRKAESRKRKEKGTRIGMENVVVLEDLGADYLEDLLTISESARPS

SEQ ID NO: 19453 - protein, 244 aa, Populus trichocarpa
MGRTGIHCKLSGVEDNPTGKNLSLSSTNRMEEYNIAMKRMMRNPYEYHHDLGMNYTLITDNVIVGSQPQKPEDIEHLRHEENVAYILNLQQDKDIEYWGIDLQSIKQRCQQLGIRHMRRPATDFDPDSLRSALPKAVSSLEWATSEGKGRVYLHCTAGLGRAPAVAIAYMFWFCCMNLNTAYDTLTSKRPCGPSKRSIRAATYDLAKNDPWKEPFESLPEYAFEDIADWERHLIQDRVRSLRGT

SEQ ID NO: 19454 - protein, 179 aa, Populus trichocarpa
MSRVYVGNLDPRVSERDLEDEFRMYGVLRSVWVARRPPGYAFVEFDDRRDAIDAIRALDGKNGWRVELSHNSKGGGGRSGDGHGRGGGEDSKCYECGEPGHFARECRLRIGSRGLGSSRRRSPSPRRRGSPSYGYGRRSYSPRERRSPRRRSLSPRRGRSYSRSPPYRHGRRDSPYAIG

SEQ ID NO: 19455 - protein, 260 aa, Populus trichocarpa
MDSLEEKVSVFFHEDSADEESGRSMEEEDDYESDNNLHDPMERALYWESQDALLQGVLERYSSIGSKLRQEVSRVVGVAKESDFCNCMKPTDGCTSCLRQRVVNLLTQKGFEASLCTSKWKNTRKHPGGKHEYIEIIAATMGRKKPIPYLIELEFRDQFEIAKASDEYRNLVARLPEYYVGKADYLNAIVGILCDAAKRSMKEKKIHMGPWRKRSFMQMKWSNCSERRSVDKSSSKSFPSSRQAHESCLHLSAAPALTVT

SEQ ID NO: 19456 - protein, 296 aa, Populus trichocarpa
MSLLSALFLLYIGVLTASALSDCPNESALSLHHIQSQCPVSIPPNPPLQVDGKFLDRALTSKQRNAYTSVLFYASWCPFSRSMLLKFDMLSSMFPQIKHLALEQSSAHPSIFSRYGIHSLPSILIVNQTSKVQYRGPKNLQSLAQFYRKTTGLEPVQHFAKDDDDSTSTEGREQSIMQPWNRPSLEDIIKSEPYLVLATLFLCFRVLLLYVYPKALSHIKAFYVCYVPHFNLEIFGETSQLFGRILHMVDVRRIWTKLRLFKTRNFHERAKNFRVWASSLASVSLGESSASARSQS

SEQ ID NO: 19457 - protein, 495 aa, Populus trichocarpa
MDKWSFFSGISICVLLNFASVEAAPKGSLITGLPGFNGVFPSNHYSGQVNFPFTCLNLFYYFIVSERNPSKDPVVLWLNGGPGCSSFDGFVYEHGPFNFEEGKPKGSLPILHLNPYSWSKVSNIIYLDSPCGVGMSYSKNQSKYINDDLQTAADTHNFLLQWFQLYPEFVNNQFYISGESYAGIYVPTLSAEVVKGIQAGQDPVINFKGYLIGNGVSHSQFEGLSALVPFTHGMGLVSDDIFEEIERACKGNYQNASDSCYNSIGKIDQALSGLNIYNILEPCYHDPASDQQAKGNTSSNLPISFQQLGATDRPLKVRKRMFGRAWPLWAFEKDGNFPSWSELALQGSVPCVNDEVATTWLNDESVRTAIHAEPKSIAGPWQICSDRLDYGYGAGNMLPYHKNLTAQGYRALIYSGDHDMCVPFTGTQAWTRSLGYKIIDEWRSWVSNEQVAGYLQGYDNNLTFLTIKGAGHTVPEYKPRESLDFFGRWLDGKPI

SEQ ID NO: 19458 - protein, 129 aa, Populus trichocarpa
SQDFSPPYVDASRPSLGFPLGAALLLISILSLSGVFSCCYHWDKLRAFCRRRSSSEHPDPGAYIETSPSKSKLFQMDLKQYHNQGMPVVMPGDDVPKFIALPCPCEPPRGSERVTIEVQRPPKAPPRLP

SEQ ID NO: 19459 - protein, 660 aa, Populus trichocarpa
YNDDVYNRYWRLDVNLNDSVSISTETNIDIQGSGNPCRLPVEVLRTAVQPRNVLNSLSYNRTLWYPKNFTPEFLVFFHFAEIEQIAPGEIREFTITLNGLNYGLFTLEYLKPLTIRSNITQVQEGQVRFSIHATLRSDLPPILNAFEIFQLWPVPDSPTNQTDVDAIMAIKKAYKIDRVDWQGDPCLPLPTWSGLQCNNDNPPRIISLNLSSSQLSGNIAVSLLNLRAIQSLDLSNNELTGTVPEAFAQLPELTILYLNGNKLTGAVPYSLKEKSNSGQLQLSLDGNLDLCKMDTCEKKQRSFLVPVIASVISVSVLLLLSIITIFWRLKRVGLSRKELSLKSKNQPFTYTEIVSITNNFQTIIGEGGFGKVYLGNLKDGHQVAVKLLSQSSRQGYKEFLAEVQLLMIVHHRNLVSLVGYCNEHENMALVYEYMANGNLKEQLLENSTNMLNWRERLQIAVDAAQGLEYLHNGCRPPIVHRDLKSSNILLTENLQAKIADFGLSKAFATEGDSHVITDPAGTLGYIDPEFRASGNLNKKSDVYSFGILMCELITGQPPLIRGHKGHTHILQWVSPLVERGDIQSIIDSRLQGEFSTNCAWKALEIALSCVPSTSRQRPDMSDILGELKECLAMEMSSKMSMCDSVEMNLVLGTDMAPNLR

SEQ ID NO: 19460 - protein, 849 aa, Populus trichocarpa
LVFSSNQNSEGFISIDCGAEEDYLDRNTGISYKTDKDFISTGKNMFVAPEYNLPTRFKNSVRTFPEGKRNCYTLKPRQGKNQNYYVRAFFYYGNYDSKNKTQMFDLYLGVNRWATVNINVEDMFTTYSDIIHYSVTDTIYVCLVNTGSGVPFINGLDLRFMNDSPYRNMNGSLRPRVQADLGGHQTQSSTRYKDDVYDRIWRFDVNLNDSVSISTETNIDIQGSDNPCRLPVEVLRTAVQPRNGLNSLSYNYTLGYTENSEFLVFFHFAEIEQIAPGEIREFTITLNGLNYGLFTLEYLKPLTIGPYKLQDQVRFSIDATLRSDLPPILNAFEIFELGPLPDSPTNQTDGMFSISILLNAIGFGATNINIKFTSLLFENNNNKICLFRRNLSSSQLSGNIAVSFLNLTAIQSLDLSNNELTGTVPEAFAQLPDLTILYLSGNKLTGAVPHSLKEKSNSGQLQLSLEGNLDLCKMDTCENKKRSFLVPVIASVVSVSVLLSIITVIWRLKRGRLNVSLSSLVGLSRKELSLKSKNQPFTYTEIVSITNNFQTIIGEGGFGKVYLGNLKDGRQVAVKLFSQSSRQGYKEFLSEVQLLMIVHHRNLVSLVGYCNEHENMAVVYEYMANGNLKEQLLENSTNMLNWRERVQIAVDAAQGLEYLHNGCRPPIVHRDLKSSNILLTENLQAKIADFGLSKAFATEGDSHVITNPAGTPGYIDPEFRASGNLNKKSDVYSFGILLCELITGQPPLIRSHQGHTHILQWVSPLVERGDIQSIIDPRLNGEFNTNCAWKALEIALSCVPPTSTQRPDMSDILGELKECLAMEMSSQMSMRNSVKISLVLDTNMAPNLR

SEQ ID NO: 19461 - protein, 811 aa, Populus trichocarpa
EGFISIDCGAEEDYLDRDTAITYITDKDFISTGKNVFVAPEYNLTTLYYGNMINSLRIFPEGKRNCYTLKPREGKNQNYYVRAFFYYGKYDSKNQAHKFDLYLGVNYWATVGVEDRQWKYYNIIHYSVTDTIYVCLVNTGSGVPFINGLDLRFMNDSPYGSKNESLINIYLCYCFSHAFRYNDDVYDRTWRVDVNLIDSVSIGTETNIDIQGSDDPYRLPVEVLRTAVQPRNGLNSLSYNYTLVYTENFTPEFRVYFHFAEIEQIAPGKLREFTITLNGLKYGPFTLEYLKPLTKGPYKLQVPEDQVRFSIDATLRSDLPPILNAFEIFILWPLPHSPTNQTDVDAIMAIKKAYKIDRVDWQGDPCLPLTTWTGLQCNNDNPPRIISLNLSSSQLSGNIAVSLLNLTSIQSLDLSNNELTGTVPEAFVQLPDLTILNLSNNELTGTVPEAFAQLPDLTILLDGNLDLCKLDTCEKKQRSFPVPVIASVISVLVLLLLSIITIFWRLKRVGLSRKELSLKSKNQPFTYVEIVSITNNFQTIIGEGGFGKVYLGNLKDGRQVAVKLLSQSSRQGYKEFLAEVQLLMIVHHKNLVSLVGYCNEHENMALVYEYMANGNLKEQLLENSTNMLNWRERLQIAVDAAQGLEYLHNGCRPPIVHRDLKSSNILLTENLHAKIADFGLSKAFATEEDSHVITVPAGTPGYIDPEFRASGHLNKKSDVYSFGILLCELITGQPPLIRGHKGHTHILQWVSPLVERGDIQSIIDPRLQGEFNTNYAWKALEIALSCVPSTSTQRPDMSDILGELKECLAME

SEQ ID NO: 19462 - protein, 603 aa, Populus trichocarpa
MASSPGSLDTSANSHSEGSSNYFSFNTYSSSHYPFMTSSSLTDLLASSDEEPNNHITNNSKLSDRIAERTGSGVPKFKSIPPPSLPLSPPPVSPSSYFAIPAGLSPAELLDSPVLLNPSNILPSPTTGTFPAQAFNWKSSYGNSLQNVKKEDKTFSDFSFQQPARPPTTSTAMFQSSNATIQPEQQQTWGFQESAKQGAFVSGKSSMVKMEYNSNSMQSFSPEIAAIQTNPQSNNGFQSDYGNQQQQYQSVREQRRSEDGYNWRKYGQKQVKGSENPRSYYKCTYPNCPTKKILERSLEGQVTEIVYKGSHNHPKPQSTRRSSSSTTASNLGMIPAPNSNPNEIQEQSYVTHGSGQMDSSVATPENSSISIGDDDFDSQRSRSGGGDDFDEDEPEAKRWKREGDNEGISAPGSKAVREPRVVVQTTSDIDILDDGYRWRKYGQKVVKGNPNPRSYYKCTYQGCPVRKHVERASHDLRAVITTYEGKHNHDVPAARGTGSRSLPGHNNNGNNNGNNNSNHAVMAIRPSAVNHVFNNSINNPVRDQRVPTTTSEGNMPFTLEMLQSPGSFGFSGFGNLMGPYMNQSSTDEVFSRAKRELEVENFW

SEQ ID NO: 19463 - protein, 316 aa, Populus trichocarpa
MAVKVAAAFIFMLFFLTTACQAKLSSTFYHKSCPNAESAIRTAIRTAIARERRMAASLIRLHFHDCFVQGCDASILLDETSSIKSEKTAGANKNSARGYEVIDKAKAEVEKICPGVVSCADIIAVAARDASAYVGGPSWAVKLGRRDSTTASPTLAITELPAFSDDLGRLISRFQQKGLTARDMVALSGSHTLGQAQCFTFRDRIYNASNIDAGFASTRKRRCPRAGGQANLAPLDLVTPNSFDNNYFKNLMRNKGLLQSDQVLFNGGSTDSIVSEYSRNPAKFSSDFASAMIKMGDIRPLTGSAGQIRRICSAVN

SEQ ID NO: 19464 - protein, 413 aa, Populus trichocarpa
MEDIEVPSFFLCPISLQIMKDPVIVPTGITYDRESIEKWLFSGKNDTCPITKLVISGCEVTPNHTLRRLIQSWCTLNASYGIERIPTPKPPINKTQVAKLLNDAKSPQQQVKCIRKLRSIANENETNKRCMEAAGAVEFLVSVVNNFNSLSFEETSDDGFEIARPGDEALSILYGLEISESGLKNLIMGINGELIIETLTKVMQGGNYESRAYAVLLLKSMLEVADPLKLISLKHELFSEIVQVLRDQISHKASNASLQLLINLCPWGRNRIKAIEAKAVSVLIDLLLDSSERRTCEMVLMVLDLLCQCAEGRAELLGHGAGLAVVSKKILRVSQVASERAVRIILSISKYSTTTSVLQEMLQIGIVAKLCLVLQVDCGSKTKDKAREVLKIHARVWKSSRCIPANLLSSYPA

SEQ ID NO: 19465 - protein, 360 aa, Populus trichocarpa
GAINLGQGFPNFDGPEFVKEAAIQAIKDGKNQYARGYGVPDFSSAIAERFKKDTGLVVDPEKEITVTSGCTEAIAATMLGLINPGDEVILFAPFYDSYEATLSMAGAKIKCITLHPPDFAVPIDELKSAITQDTRAVLINTPHNPTGKMFSREELSTIASLCIENDVLVFTDEVYDKLAFELDHISMASLPGMYERTVTLNSLGKTFSLTGWKIGWAIAPPHLTWGVRQAHSFLTFATSTPMQWAAAVALRAPESYFVELKRDYMAKKEILVEGLKAVGFKVFPSSGTYFVVVDHTPFGLENDIAFCEYLIKEVGVVAIPTSVFYLNPEDGKNLVRFTFCKDEGTLRAAVDRMKEKLKRK

SEQ ID NO: 19466 - protein, 665 aa, Populus trichocarpa
MRDGKLPDGAAVLRAKIDMASPNINLRDPAIYRVRHAEHHNTGNQWCIYPMYTFAHPIEDALEHITHSICTLEFEDQRPFYDWLLDHLREGGLIAAPQPRQYEFSRLHLTYVITSKRKLKHLVDNGIVSGWDDPRMPTIVGLRRRGYTPQSIQAFCERIGVTKDYAWIDYSTLEGCLREDLENQAHRGMVALDPLKLELTNWAEVFGSAEHLEACELPALPHAAEGQQVPVRRFTLGREVWIEREDFAEVPPKGYKRLFPGNKVRLKGGYVIECTGCEKDAEGNVTKVLATVVPDTKSGTPGADSVKVKAAITWVGVADGVQAEVRLYDRLFTDPQPDAGGKDFLTLLNPDSLKVVTAYVEPSLANAQPDDKFQFERFGYFVADRKDHTPGKPVFNRATGLKDSWGKGGPSHIGAFAGTVASAQCQAMNQALPQAASAAKFDTSRAAEYETQSRIALAGYDACHELAACLLAASLDAGPKSVLIGGAGGTGQEILATARLRPQWKFTAADPSAPMLDQTMDRIAAAGLSAQVQAAACAVQDLPTGTVFDAATLIGVLHHVPDDADKLQLLQALSARLAPGAPFILACNRHRYDSEPLFLEAWAMRWRMAGVDEAAVHAKLGKIRQGAVPPASEEVVEQMLAHAGFVQPKRFFSSLFWCAWIAFKA

SEQ ID NO: 19467 - protein, 354 aa, Populus trichocarpa
MDRRVVRFDYWLDAAFDRIVSAAPGVQLLTCRREGDDAAAWQALAGARVYQITAAKDELPRHWFATADLLARCPDLLAVSSSGSGCDTVDIEACTRAGVAVMNQSGGNADSVAEMAIGLMLSVLRRINESDRLLRAPARGFSREDVMGHELRGRTLGLVGVGEAGSRVAALGRAFGMQVIGCDPAYDAAGLAARGAEAVGFDELLQRADIVSLHCPRDASTLGLMDAAAFAAMKPGAVFVSTARGGIHDEAALHAALARGHLAGAGLDVWDQEPPPASHPLLALPQVVATFHTAGVTHEARRNNAELAATQIVQLLADGQRPARLVNPEVWPHARERIARALDPSRSPSFSPSR

SEQ ID NO: 19468 - protein, 110 aa, Populus trichocarpa
MSLKLWELAGLALPILVVLLAQVVVMATYSIFVTYRMMGRDYDAVVLSAGHCGFGLGATPTAVANMQAVTSHFGPSHKAFLIVPMVGAFFIDLLNSVALNIFLNIVDVLH

SEQ ID NO: 19469 - protein, 297 aa, Populus trichocarpa
MAVLMNLNHNGQAITLSSKLAEKGVKDGASLKALMSREKRDYVFAQTFPTGTHAMWLYYWLAANGIDPMRDAKAITVPPPQMVANMRVGNMDGFCVGEPWGARAIADKIGFTAETTQAIWKDHPEKTLGTTAEFVQKYPNTARAMVAAVLDASKFIDASASNRRKTAETIAAKSYVNTDMDIILDRMLGRYSNGLGKTWDDPDSMKFYQDGLANYPFLSDGMWFLTQHKRWGLLKEHPDYLAVAKQVNRIDIYKQAAVAAQVPLPKSDFRTARLIDGVTWDATKDPKAYADGFKIKA

SEQ ID NO: 19470 - protein, 242 aa, Populus trichocarpa
MTERKGITVPIARIEMRRRLTLIGSMLLHKGEVDGLITGTWGQTSHHLQYVDQVIGRRAGVQTYACMNGLLLPDRQVFLVDTHVNYDPTAEQLAEITIMAAEEMMRFGVKPKAALLSHSNYGSSNQPSAVKMRQTLELLREQAPWLEVDGEMHGDVALDGKARAQLMPNSTLLGNANLLVMPNIDAANISYNLLKQAAGGGIAIGPVLLGAARPVHILTPSTTVRRIVNMTALTVADANANR

SEQ ID NO: 19471 - protein, 219 aa, Populus trichocarpa
MGSLPPSLDLPSPNAKSQQIDQTTLLNLFKSQQNHLNYFFRNLDLSQTLTFTQTLLHCNGTIFFSGVGKSGFVANKISQTLISLGIRAGFLSPLDALHGDIGALSASDILVLFSKSGNTEELLRLVPCAKAKGAYLVSVTSVEGNALTAVCDLNVRLPLERELCPFDLAPVTSTAIQMVFGDTVAIALMGARNLSKEEYAANHPAGRIGKSLIFKLDYN

SEQ ID NO: 19472 - protein, 233 aa, Populus trichocarpa
MQIAFFHWGFHIWAIYGLVGLVLAYFSFRHGLPLSMRSALFPIIGERIHGPIGHTVDLFAILGTMFGIATTLGLSVAQINAGINYLWPAIPVGTTVQVIAISVITGLALFSVLAGLDKGVKNLSILNMGLAVLLMLFVFFAGPTIFILETFLQNTGSYLNNIIERTFNLQAYTRSDWIGNWTLFIFGWTIAWAPFVGLFIAKISRGRTIRQPTMPWPCSNCMSVCPLPVSSPL

SEQ ID NO: 19473 - protein, 166 aa, Picea sitchensis
MSFQSPVEIPGVSNMDFLRMACNARRSTLGLTELGPLEFYGFLSPKLAMLNMDPKFLDRNVNEGFSGGEKKRNEILQLAVLEADLAILDEIDSGLDVDALQDVAKAVNGLLTTKNAVLMITHYQRLLDSIKPTYVHIMENGRIVRTGNASLAKQLEEGGYRAIADV

SEQ ID NO: 19474 - protein, 350 aa, Picea sitchensis
MAMSSGKQEVEYTEMSVLDQIRSHLLGDFEPSFFVTGNWGSDPTRNSSPEEENFIQTALTADSVDDSRRETETETLIAAVKSSRPLLSVSVTRHESFDWEKISVDWALKNSVTPSVSPCFSAAWTKLPLDENDSEDMVLYGILKEAATKGWLPRTPKEEPVTEIKKEAALPVKPDADIRQETGATPPPPPPPTVKNNAGRHYRGVRQRPWGKFAAEIRDSSRQGARVWLGTFTTAEEAALAYDRAAYKMRGSRALLNFPLQVGAEDSNTCNNNTSTIEKVESNLSKKRQREEVEVQWNRQCRVRFEDSNTMDHEMVEELLGGKLATPPLTPSGIDMSFTGFLSAGQLMVN

SEQ ID NO: 19475 - protein, 369 aa, Picea sitchensis
MQGVECKEHRESDGQPNLSSAVPGMPWWNGFGTQFPQSAWCAPVKSLFMDHPSRVPGAIKQVASQSQQLEQPSTQVAVQSQSEGEAVLAGTTRMQSMSNQSGYSGANGEKQHQHQSTKSIIASAPTEYLVPHAQLEFNHSIACAAYPYAEPYFGGILAAYPAQAMIHPNMLGVQQARMPLPLDMTEEEPVYVNAKQYHGILRRRQLRAKAESENKLIKTRKPYLHESRHLHAMKRARGCGGRFLNTKKLEDLKANMDNGKTSEGHPAQAGSSSGSEVLQSENGNGNSTQEVHGACGLSGSEVTSIAQSSENGTTYQYAHTNGTYLNHYQHQHFHISAFHPLSSGGEEGSSAKSGSILSGGSQQRVVVIQ

SEQ ID NO: 19476 - protein, 528 aa, Picea sitchensis
MDFLEVVSEAANAVQNRLAAAAICITVLLSTLILFMKIHRINNRSAEKLPPGPPGLPIIGHLHMLGKLPHRKLCLLSRRYGPLMSLRLGSVPTVIVSSAEMAQQFLKNHDHVFSSRPTVRCGKNLFYNSVDMIFSPYGQYWKQVRRISVSELLSTKNLEALRFQREEEVSVMIHSLLEKCARVSNPVVDVSKTVLAVAVDIICRMAFGRKYSDEEAYDNRGFEEMIKEFGFLLGAFDIGDFIPYLGWMDLQGLGRRQKAISRTADAFYEKLIEEHLAQKDVRETRDFVDVLLALSEHNIRRDNIKAILIDMLHAGSDAPSTALEWAMSELLRRPLVMTKAQEELEKVVGLNRKVRESDLPHLPYLQAVVKETLRLYPSAPLLAPHESMESCTVCDYEIPARTRVIVNAWAIGRDPKSWEDAEEFKPERFTESPSSCVDVRGQDFELIPFGSGRRGCPGMQLGMVIVEFVLAQLLHCLDWRLPAEIQGRDLDMTENFGLAIPRAVPLLAIPTPRLAAEALGSSQDQGIK

SEQ ID NO: 19477 - protein, 517 aa, Picea sitchensis
MANELGSDRAVQRCLEFYLQLASTAILLFLMAAWAFFFRGRKLKLPPGPFRFPIIGNLHLMGRLQHKALAALSVKYGPLFSLRLGSALTLVVSSPDMAKEFLKTHDLVFASRPPSTATKYLWYNSSDVTFSPYGRYWRQMRRLFVSQLLSSRRVDSFRFIREEEVSAMIRSIIISYHEGSLPVNIGKIVSVLGIDIICRIAFGRKYTDQQLMDGRGIHSMIQETFLLAGSFNIGDYIPYLAWMDLQGLNRRLKNIHKTQDALLEKIVEEHFSQNKPNAMPDLLDVLLAASADENLGLQITRDNIKSAVYDILSAGSDTSSTSIEWAMSEVLRNPPVLKKIQEELERVVGMGRMVHESDLPRLVYLQAVVKETLRLHPPGPLLLPHISIETCNVLGYKIPSGTRLLVNVWAIGRNPKSWGEDAESFKPERFMEAGFLDAKVENFEWIPFGAGRRGCPGQQMAMIVVEFAVAQLLHCFNWRLPDDMDEQKLDMSEKNHGITVSRAHELFAVPTPRLPVL

SEQ ID NO: 19478 - protein, 355 aa, Picea sitchensis
MSLLTDLINLNLSDVTEKIIAEYIWIGGSGTDIRSKARTLSHEVSDPKDLPKWNYDGSSTGQAPGKDSEVIIYPQAIFRDPFRRGKNILVICDTYTPAGEPIPTNKRANAAKIFSHPDVVAEEPWFGIEQECTLLQKDVQWPLGWPIGGYPGPQGPYYCGTGADKAYGRDIVDAHYKACLYAGINISGINGEVMPGQWEFQVGPTVGISSGDQVWAARYILERITEVAGVVLSFDPKPIQGDWNGAGAHTNYSTKSMREEGGIKVIKKAIEKLGLRHKEHISAYGEGNERRLTGRHETADINTFSWGVANRGASIRVGRDTEREGKGYFEDRRPASNMDPYIVTSMITETTILLK

SEQ ID NO: 19479 - protein, 303 aa, Picea sitchensis
MDFGKVVWTCCLLGLVALHSYAEAAPANARITSLPGYSGSLPSDHYAGYVKVSKAKNLYYYFVTSEGNATKDPVVLWLNGGPGCSSFDGFVYEHGPFNYEAGKTVGSLPKLYLNPYSWTKVSNIIYLDSPVGVGLSYSENVDDYNTGDLQTASDTHAFLLKWFEEYPEFLSNPFYISGESYAGIYVPTLGSEVVKGIEARVTPILNFKGYMVGNGVTDNIFDGNALVPFVHGMALISEVQFQDAVDACKGKYYDTVDSICDTKLAAIDQEVSRLNIYNILEPCYHDPEMQKAVENMENVPESF

SEQ ID NO: 19480 - protein, 391 aa, Picea sitchensis
MAGINPGVRCLWDRPPLVDKAVIVGGGLGGLSAAIHLRNIGVDAHVYDKYHRLSGGEGTVISICPNGCKVLHHANPLILDKMKEAGKTDMPSCGITPQGDRISEWSLSSHMEELYGQPLIAMFWQDALKILSDSLPEDCKHTGYECANISQGEEGAIVHFRKGDETVTIEAPLVIGADGIHSTIRRVLFGGIEPRDNGRTMWRAIIDGKLCSHKALTMGSFATLQNGRTAFIINGVQGKLYWAFSVTDESTQGEARIRSRDQKEAKERLLKYYEGWDVATHIIQATDPELILERRVLDVPVLSKWSCGRVVLLGDAAHAVTPSFGQGANLAFEDGLELAKQIVTSSDISALEAYEKARIPRASIISEKSQSMGVRQTDEFYNWLYTAVPEV

SEQ ID NO: 19481 - protein, 345 aa, Picea sitchensis
MASPTEKEQLQHTEKDPETETQPDSAEVVSVELPAPPGWKKQFLPKKGGTPKRNEIIFIAPTGEEIKNRRQLSQYLKAHPGGPDITEFEWGTGDTPRRSARLSEKPKTTETPESESKRTTPKRSRKSEGASENAKEKKKKGAESPSEEVEAGKEEEMQDVENVDDSAKGKTSASETTEDVGKDRQDDKEEKPEIKPEEKQEDNGEEPESEPDVKTDGPKSDEAVEAAVDKGEETPLKDPEVQEVEEAGTEQTEVKQKAEKQEEHHGGDDKPEEITIVVPGESLGGKEENKCAGANVDNSKNGEPVEQKEVAHEPNEKHASQENAQLREINSLRCEQLPEPSSVSC

SEQ ID NO: 19482 - protein, 428 aa, Picea sitchensis
MRWLDKIFKGSNHRISEGQYQGVFADENRVWDMPSGSLDGHAHSGNEDLDHAIALSLSEEEQRKANNIGGSSQVDDDEELARAVWHPQCFRCHACGEPISEHEFSMSGNDPYHKSCYKELYHPKCDVCNHFIPTNRAGLIEYRAHPFWGQRYCPSHEHDNTPRCCSCERMEPRNVQYISLDDGRKLCLECLDSAIMDTNECQPLYLEIRDFYEGMNMKINQQIPMLLVERQALNEAMQGEKEGSHHMPETRGLCLSEEQTVSSISRRPRIGGNRIIDMFTESKKLTRRCEVTAILILYGLPRLLTGSILAHELMHAWLRLNGFRTLSPDVEEGICQVLSHMWLESEVMAGSGSSSHGASTSSGISSSSSSKKGAKSQFEKKLGDFFMHQITMDSSPAYGDGFRAGNAAMLRYGLKRTLDHIRLTGNFP

SEQ ID NO: 19483 - protein, 1132 aa, Picea sitchensis
MASNSRHTQSQSTGSNNRRSSINTNTTTNKATAMAQYNADARLLQVFEQSGESGKSFDYTRSIKSTTESVPEQQITAYLSRIQRGGRIQPFGCVLAVEETTFRIIAYSENAVEMLDLAPQSVPSMEQPQLEVLTIGTDVRTLFTAASAHSLEKAAVAQEISLMNPIWVHCKNSRKPFYAIVHRIDVGMVIDFEPLKTGDAFVSAAGAVQSQKLAVRAISRLQSLPCGDIELLCDSVVENVRELTGYDRVMVYKFHEDEHGEVVAEIRRSDLEPYLGLHYPATDIPQASRFLFMQNRVRMICDCMATPVQVIQSEELMQPLCLVGSTLRAPHGCHAQYMANMGSIASLVMAVIINGNDDEGAGSGRNSMKLWGLVVCHHTSPRAVPFPLRYACEFMMQAFGLQLNMELQLAAQLTEKHILRTQTLLCDMLLRDAPIGIVTQSPSIMDLVKCDGAALYYGGMCWMLGVTPTEAQIKDIADWLLEHHGDSTGLSTDSLADAGYPGAASLGDAVCGMASARITSKDFLFWFRSHTAKEMKWGGAKHHPDDKDDGRRMHPRSSFKAFLEVVKRRSLPWDNVEIDAIHSLQLILRGSFQDIDDSGTKTMVHSRLNDLRLQGIDELSSVASEMVRLIETATAPILAVDYNGLVNVWNAKVAELTGLPVGEAMGMSLVQDLVFEESVERVKKMLCNAIRGEEEKNVEMILRTFGPQKQKEAVFLVVNACSSRDFTNNIVGVCFVGQDVTGQKVVMDKFIRIQGDYRSIVQNPNPLIPPIFASDESACCSEWNAAMENVTGWARDEVIGKMLVGEIFGGCCRLKGQDAVTKFTIVLHSAIDGHEIEKFPFAFFDKQGKYVEALLTANKRTDADGRITGSFCFLQIASSELRQALEVQRQQEKKCFARLKELAYIRQEIKNPLYGMMFTRKLLEETDLSDDQKQFVETSAVCERQMQKVIDDMDLDSLEDGYMELDTAEFILGTVIDAVVSQGMIILREKGLQLIREIPGEVKTMHLYGDQVRLQQILADFLLNALRFTPSPEGWVAIKVLPTLKQLSGALHVVLLEFRITHPGPGLPAELVQDLFDRSRWTTQEGVGLSMCRKLLKLMNGDVQYVRESGKCYFLVNVELPLAQREDASSMK

SEQ ID NO: 19484 - protein, 199 aa, Picea sitchensis
MAPSAIILSVIVMTAILASGAATKVLNPVHSDAQMAEFIRTSCNVTLYPQVCVSSLSSYAGPLKPKQSDLVNAAVQVSLVNTHNVSVWAAGLKTRRATMSKREKAALKDCMENFGTTMDQIHQSLAELKHLRRNTFKIQMSNVETWMSAALTNEDSCLDGFEVAKGRVKAMVTGRVHYLSKLISNALALVNTFAATGGH

SEQ ID NO: 19485 - protein, 404 aa, Picea sitchensis
MASTSELDSLKPRDVCIVGVARTPLGGLSGSLSTLPATKLGSITIAAALKRAGVESGMVQEVFFGNVLSANLGQAPARQAALGAGIPNSVVCTTINKVCASGMKATTLAAQSIQLGNNDIVVAGGMESMSNAPYYLPDARKGYRLGHGSLVDGMMKDGLWDVYNDYGMGVCGELCADSHNISREEQDNHAVQSFERGINAQNSGAFAWEIVPVEVSGGRGKPSTVVDKDEALGKFDAAKLRKLRPAFKEGGTVTAGNASTISDGAAALVLVSGEKALELGLQVIAKITGYADAAQAPELFTTAPSLAIPKAISRAGLEASQIDYYEINEAFSVVALANQKILDLKPETVNVHGGAVSLGHPLGCSGARIMVTLLGVLRQRNGKYGVAGVCNGGGGASAVVIERM

SEQ ID NO: 19486 - protein, 445 aa, Picea sitchensis
MANGYSSTTTATSSFHLHLYSTIYNGPVPISSGLSALSLFRNEKLRKDPSMGLQNLIAKSNRKSAKNLKGIGSRMPVACSLLETASSTSSTSASYHERLQGENNNKTTTMFKEEERERRKQGDSNSVGVRILIAGAGIGGLVLALAAKKKGFDVKVLERDVSAIRGEGAYRGPIQIQSNALAALEAIDKDVAEEVMENGCITGDRINGLVDGISGAWYIKFDTFTPAAERGLPVTRVISRMALQEILARAVGQEIIENNSNVVDFEDDGTKVTVRLEDGRHYEGDLLVGADGIWSKVRKQLFGPKEATYSGYTCYTGIADFVPPDIETVGYRVFLGHKQYFVSSDVGCGKMQWYAFYNEPAGGVDPPNGKKERLLKLFGHWCDKVVDLLMATPEERILRRDIYDRIPIMTWSKGHVTLLGDSVHAMQPNLVRVAVWQLRMAISLL

SEQ ID NO: 19487 - protein, 383 aa, Picea sitchensis
MKRAIQRSQERLEKLQITSAVNTHQMKDIETPVTPDIGSGEYLIQMAIGTPALSLSAIMDTGSDLVWTKCNPCTDCSTSSIYDPSSSSTYSKVLCQSSLCQPPSIFSCNNDGDCEYVYPYGDRSSTSGILSDETFSISSQSLPNITFGCGHDNQGFDKVGGLVGFGRGSLSLVSQLGPSMGNKFSYCLVSRTDSSKTSPLFIGNTASLEATTVGSTPLVQSSSTNHYYLSLEGISVGGQSLAIPTGTFDIQSDGSGGLIIDSGTTLTFLQQTAYDAVKEAMVSSINLPQADGQLDLCFNQQGSSNPGFPSMTFHFKGADYDVPKENYLFPDSTSDIVCLAMMPTNSNLGNMAIFGNVQQQNYQILYDNENNVLSFAPTACDTL

SEQ ID NO: 19488 - protein, 655 aa, Picea sitchensis
MRPACPLRGYGRLSEEARALEAARNTKAKRRKLVIIVFTLCALIIAAALVSVTVGILVVGSKRRTRSGPDSNGAANAAGGWKSKAIDTACRKTLYPQLCMSTLVTYQGGAQLREPKDLAHITLNVTMDRVQQAYQVISVNISAHDGKMGHRELVAYEDCVELLQDTIYHLSASSVKMQAMSKNPKSIKAHIADVNTWLSAALTNQDTCLEGFKLAGDGGASQLSNFSVKAQIEEESTNLAELVSNSLAMFQILFCNTSSDIGALEGHNYHVQTNNFTVPSPPSNRRRLLAEGGEEMNNADLNQEFYDQYGLVQGGQHEFPLWLSARDRRLLQLPVAAMQPDAVVAKDGSGKYKSIVDALKDAPSQLTSKRYVIYVKAGVYYENVTVSRKKTNIMIVGDGIQKTVVAAGRNVADGSSTFRSATFAASGTGFIARDMTFLNNAGQDKHQAVALRVGADFSAIYRCSIIGYQDTLYVHSLRQFYRECDIYGTVDFIFGNAAVVLQKCTMFARKPMPNEKITITAQGRKDPNQNTGISIHDCKVTAAIDLVPVKASYRAYLGRPWKLYSRTVYLQTFLDDIIDPAGWLEWYGDFALNTLYYGEYMNSGPGAGLVKRVTWPGYRVFKTADQVYPFTVAQFISGSKWLPSTGITFIGGLLV

SEQ ID NO: 19489 - protein, 188 aa, Picea sitchensis
MARGKIQMTRIENAARRQVTFSKRNNGLLKKAYELSVLCDAEVGLMIFSPGGKLHEFANPSMEKMLEKYREGSRENSINKEQDTEYLNREIANMEARIRILKSTHRKMLGEDLETCSMEELDQLDIQFEQGLSHIRARKTEILMAEVDQLERKVLTMAEIGFGSVQKIEVDTELGITFPIYTRLHFHE

SEQ ID NO: 19490 - protein, 601 aa, Picea sitchensis
MNSTSMNYAKFNAVSEQSPMRATRWKSGKRILVTAVASTLLVISVICLSVGIAGRFKKEKNEDDDRQIGHIKNWKSVPKVVQDACSSTLYPELCVSSVSSFPGLSDRAGPIEIVHVVLSVSIAAVEKANALARIMWTRPGLSHRKRGALQDCLELFDETLDELYETVSNLKNGSCMSAPEKVNDLETLLSAAITNQYTCLDSSARSNLRQELQGGLMSISHLVSNSLAIVKNIATRASNVTVNSIHNRRLLSDDQGSEFMAMESDGFPSWMSAKERSLLQSSRDNIMPNAVVAKDGSGHHTSIGDAVNAAPQKSRTRYVIHIKAGIYWENVEVNKKKTHLMFIGDGIGATVVAGNRNVKDGYTTYRSATVAVNGNGFIARDITFENTAGAAKHQAVALRVGSDFSAFYRCSFQGYQDTLYVHSLRQFYRECNVYGTVDFIFGNAAVVLQNCNLFARKPLANQQIVYTAQGRQDPNENTGISIQNCQVIAASDLIPVKRSFPAYLGRPWRQYSRTVFMQSYLGDLIQPAGWLEWNGNFALNTLYYGEFMNRGPGAGVANRVRWPGYRAIRSSNEAKQFTVSQFIKGDSWLPSTGVKYVSGFT

SEQ ID NO: 19491 - protein, 236 aa, Picea sitchensis
MSATGATEVQQQQQQVATAVVDGSSSSSASGGRMMEPSPAAGAAAPAPMSRYESQKRRDWNTFGQYLKNHRPPLALSKCSGAHVLEFLRYLDQFGKTKVHVPQCPFFGHPHPPAPCACPLRQAWGSLDALIGRLRAAYEEHGGKPESNPFGARAVRLYLREVRDLQSKARGIAYEKKKRKRPPPPQPPQQQLQQPPPVQQQHHQQALHLSGMPDPASASVSYMIQSLNPNLNHNQT

SEQ ID NO: 19492 - protein, 115 aa, Picea sitchensis
MASTPVDVKEYPNSYVFIIDMPGLKSNDIKVQVEDENVLNISGERKRNEKEEEGEVKYIRMERRVGKFMRKFTLPADCNLEAISAACQDGVLTVTVPKLPPPEPKKPKTIEVKIG

SEQ ID NO: 19493 - protein, 156 aa, Picea sitchensis
MGFISFAGRVLFSSIFILAAWQKINDFGADGGSAAKSMEPKLLLFKNHVTTLLGVQVPEVEIKHLLMVAIGLEGIGGILFIFGSTLGAYLLLIFLASVSPIMHDFYNYEMTKPEYVTEFIQFLKNLSLFGALLFFLGMKNSFTKKPKKKMSKSKTN

SEQ ID NO: 19494 - protein, 404 aa, Picea sitchensis
MGSTSELGSLKPRDVCIVGVARTPLGGLSGSLSTLSATKLGSIAIVAALKRAGVESGMVQEVFFGNVLSANLGQAPARQAALGAGIPNSVVCTTINKVCASGMKATTLAAQSIQLGSNDIVVAGGMESMSNAPYYLPDARKGYRLGHGTLVDGLMKDGLWDVYNDFGMGVCAELCADNHIISREEQDNHAVQSFERGINAQNSGAFAWEIVPVEVSGGRGKPSTVVDKDEAFGKFDAAKLRKLRPAFKEGGSVTAGNASTISDGAAALVLVSGEKALELGLEVIAKITGYADAAQAPELFTTAPSLAIPKAISRAGLEASQIDYYEINEAFSVVALANQKILDLKPETVNVHGGAVSLGHPLGCSGARIMVTLLGVLRQKNGKYGVAGVCNGGGGASAVVIERV

SEQ ID NO: 19495 - protein, 247 aa, Picea sitchensis
MELLVMVDACRRASARNITAVIPYFGYARADRKTLGRESIAAKLVANLITEAGANRVLACDLHSGQSMGYFDIPVDHVYGQPVILDHLSSKIISSRDLVVVSPDVGGVARARVFAKKLSDSPLAIVDKRRQGHNTSEVRNLIGDVNGKVAVMVDDMIDTAGTIANGAALLHEKGAREVYACSTHAVFSPPAIERLSGGLFQEVIVTNTIPLKDKNYFPQLTILSVANLLGETIWRVYDDVSVSSIFH

SEQ ID NO: 19496 - protein, 155 aa, Parasponia andersonii
VNKVFTEEQEALVVKAWAVMKKNSAELGLQFLKIFEIAPSAKNLFSYLKDSPVPLEQNPKLKPHATTFVMTTESAVQLRKAGKVTVKESDLKRIGAIHFKTGVVNEHFEVTRFALLETIKEAVPEMWSPEMKNAWGVAYDQLVAAIKFEMKPSST

SEQ ID NO: 19497 - protein, 318 aa, Sesuvium portulacastrum
MARLTCFLALAFVIVFVGSSSAQLTTNFYEKSCPHLFPVVRDVVQSAIRKEARMGASLLRLHFHDCFVNGCDGSNLLDDTSSFKGEKSASPNFQSARGFEVIDQIKAAVERVCPGVVSCADILAVTARDSVVGLGGPTWDVKLGRRDARTANQAAANSSIPPASSSLSRLISSFQNQGLTIKDLVALYGGHSIGQARCTNFRAHIYNDSDINASFAKSLKANCPPKNGTGDNNLAPLDPQTPNKFDHIYFQGLVNKKAPLHSDQELTNGASTSSWIQKYSTNPSLFSSDFGTSMIKMGDIKPLTGSNGEIRKNCRRIN

SEQ ID NO: 19498 - protein, 571 aa, Gibberella fujikuroi
MPSLGFLKKKRTREGNSDPSASSPTSPVTPTTSRSKSISKAFHLPRTSRQSTSAPSAQPTNGQSQQQQQQPDQIQEGAVSQSNQSSAPNEQTTAATDGQQQEDMSAINLHQPSYGAGSPMNHDHQNLPSINNLINPPQQQQQHNAQGNSYNNGQTNPQYLAATIDSHRPQTVSPGTDPAALQQQQQQALPQPSMPPQQQQSQAQNIHQQPPQQFQHQQNQSQNQAQQQQQYQHQPHHQQNASTGSVMRVTKGKYSLGDFDILRTLGTGSFGRVHSVQSKHNQRFYAVKVLKKAQVVKMKQVEHTNDERRMLADVKHPFLITLWGTFQDPKNLYMVMDFVEGGELFSLLRKSGRFPNPVAKFYAAEVTLALEYLHSKNIIYRDLKPENLLLDRHGHLKITDFGFAKRVPDKTWTLCGTPDYLAPEVVSNKGYNKSVDWWSLGILIYEMLCGYTPFWDSGSPMKIYENILKGKVKYPAYVNADAQNLLERLITADLTKRLGNLYGGPDDVKTHPWFAEVTWDRLARKDIDAPYTPPVKAGAGDASQFDRYPEDPEKYGVVTAPDEYGHMFTEF

SEQ ID NO: 19499 - protein, 636 aa, Vibrio cholerae
MCGVAGFISKRLSPVDCLTSMVGSIMHRGPNDSGLWVDDDFGVCLAHARLSIQDLSSAGHQPMHSKSERYVMIFNGEIYNHLTLREELIEIVPSYWNGHSDTETLLAGFEVWGIEQTIQKCVGMFAIVLWDKVLKQLILIRDRFGEKPLYYGWQRDTFLFASELKALKAHPSFEGSINRQALSHFFRLNYIPTPLSIYEGIFKLEPGVIAVFSHEGQLLSKQTFWDASHAVSLQNFSDHDAVDKLDDLIKQSIQDQALSDVPLGAFLSGGVDSSTVVGILQSLSTRPVKTFTIGFDHADFNEASEASDVAKHLGTDHVELIVSAEDALAIINQLPVMYDEPFADASQVPTFLVSKLAKKEVTVCLSGDGGDELFCGYNRYHYTAKVWSYLEKIPFPIRKMLSVFLLTLSPSSWDVLSKTLGLNTRLPNLGNKIQKGAQALKARDIEDLYTRVVSNWDLDEPLVKNTAVEKLPFLSDLTELSHLNDLEKMMLWDKQSYLMDDVLVKTDRATMACSLEGRVPLLDHRIAEFAASLPIHLKYRGGKGKWLLREVLYRYVPKKLIERPKKGFSLPIAEWLRGPLKDWANVLLDSDRIDKEGFLSSELVQKKWREHLAGKRDWSSQLWSVLMFQLWLEKNK

SEQ ID NO: 19500 - protein, 222 aa, Hordeum vulgare subsp. spontaneum
MDKHQLFGSSNVDTTFFAANGTAQGETSKQRARRRRRRSARCGGGDGDGGEMDGGGDPKKRRLTDEQAEILELSFREDRKLETARKVYLAAELGLDPKQVAVWFQNRRARHKNKTLEEEFARLKHAHDAAILHKCHLENELLRLKERLGATEQEVRRLRSAAGTHGASVDGGHAADAVGVCGGSPSSSFSTGTCQQQPGFSGADVLGRDDDLMMCVPEWFLA

SEQ ID NO: 19501 - protein, 222 aa, Hordeum vulgare subsp. spontaneum
MDKHQLFGSSNVDTTFFAANGTAQGETSKQRARRRRRRSARCGGGDGDGGEMDGGGDPKKRRLTDEQAEILELSFREDRKLETARKVYLAAELGLDPKQVVVWFQNRRARHKNKTLEEEFARLKHAHDAAILHKCHLENELLRLKERLGATEQEVRRLRSAAGSHGASVDGGHAAGAVGVCGGSPSSSFSTGTCQQQPGFSGADVLGRDDDLMMCVPEWFLA

SEQ ID NO: 19502 - protein, 291 aa, Arabidopsis thaliana
MEARCDFCGTEKALIYCKSDSAKLCLNCDVNVHSANPLSQRHTRSLLCEKCSLQPTAVHCMNENVSLCQGCQWTASNCTGLGHRLQSLNPYSDCPSPSDFGKIWSSTLEPSVTSLVSPFSDTLLQELDDWNGSSTSVVTQTQNLKDYSSFFPMESNLPKVIEEECSGLDLCEGINLDDAPLNFNASNDIIGCSSLDNTKCYEYEDSFKEENNIGLPSLLLPTLSGNVVPNMSLSMSNLTGESNATDYQDCGISPGFLIGDSPWESNVEVSFNPKLRDEAKKRYKQKKSKRM

SEQ ID NO: 19503 - protein, 618 aa, Streptomyces laurentii
MCGIAGWVAFGRDLGAERSAVEAMTRTMACRGPDAGGTWYGGPVALGHRRLAVIDIAGGAQPMLAEENGQVTAALSYSGEIYGFDELRARLVSAGHTFRTRSDTEVVLRACLEWGEDVTRHLTGMFAFALWDARGQELLLIRDRLGVKPLYYYPTPDGVLFGSEPKAILAHPEARARLTSDGLRELMTWVNTPGHAIFDGMRQVRPGHVVRVARGGITERAYWELPARPHEDDLDTTIGRVRDLLGSSVAGQTVADVPLCSLLSGGLDSSSVAALAVGALRDRGEDPLTCFSVGFSAAGSGPGFVTGPRGGDDSAYAAELARHIGARHEDLTLDAKLLSDPAARAAVLRARDLPQGLADMDTSLYLLFKAIRQRSTVALSGEGADELFGGYPWFHDENAVRAETFPWMYMAGVAAAGGPAFLDPALPERLSLDAYRADRYAEAVAAVPVLPGEAEEDRRMRKVGHLFLTRFLPMLLERKDRMSMAVGLEVRVPFLDHALVEYVFNVPWSMKTFDGREKSLLRAAMAPELPDSVLTRKKEPYPTIADPAYDQLLKGRLGALMDDTGAPVRALMDEKSAAEAYAAVRKASPEELRFLRVGFESLLKINDWMRDYRVELAE

SEQ ID NO: 19504 - protein, 585 aa, Raphanus raphanistrum
  misc_feature (142)..(142): Xaa can be any naturally occurring amino acid
  misc_feature (402)..(402): Xaa can be any naturally occurring amino acid
  unsure (1)..(585): unsure at all Xaa locations
TFVSRYAPDEPRKGADILVEALERQGVETVFAYPGGASMEIHQALTRSSTIRNVLPRHEQGGVFAAEGYARSSGKPGICIATSGPGATNLVSGLADAMLDSVPLVAITGQVPRRMIGTDAFQETPIVEVTRSITKHNYLVMXVDDIPRIVQEAFFLATSGRPGPVLVDVPKDIQQQLAIPNWDQPMRLPGYMSRLPQPPEVSQLRQIVRLISESKRPVLYVGGGSLNSSEELGRFVELTGIPVASTLMGLGSYPCNDELSLQMLGMHGTVYANYAVEHSDLLLAFGVRFDDRVTGKLEAFASRAKIVHIDIDSAEIGKNKTPHVSVCGDVKLALQGMNKILENRAEELKLDFGVWRSELSEQKQKFPLSFKTFGEAIPPQYAIQVLDELTDGKAIISTGVGXHQMWAAQFYKYRKPRQWLSSSGLGAMGFGLPAAIGASVANPDAIVVDIDGDGSFIMNVQELATIRVENLPVKILLLNNQHLGMVMQWEDRFYKANRAHTYLGDPARESEIFPNMLQFAGACGIPAARVTKKEELREAIQTMLDTPGPYLLDVICPHQEHVLPMIPSGGTFKDVITEGDGRTKY

SEQ ID NO: 19505 - protein, 585 aa, Raphanus raphanistrum
  misc_feature (142)..(142): Xaa can be any naturally occurring amino acid
  misc_feature (580)..(580): Xaa can be any naturally occurring amino acid
  unsure (1)..(585): unsure at all Xaa locations
TFVSRYAPDEPRKGADILVEALERQGVETVFAYPGGASMEIHQALTRSSTIRNVLPRHEQGGVFAAEGYARSSGKPGICIATSGPGATNLVSGLADAMLDSVPLVAITGQVPRRMIGTDAFQETPIVEVTRSITKHNYLVMXVDDIPRIVQEAFFLATSGRPGPVLVDVPKDIQQQLAIPNWDQPMRLPGYMSRLPQPPEVSQLRQIVRLISESKRPVLYVGGGSLNSSEELGRFVELTGIPVASTLMGLGSYPCNDELSLQMLGMHGTVYANYSVEHSDLLLAFGVRFDDRVTGKLEAFASRAKIVHIDIDSAEIGKNKTPHVSVCGDVKLALQGMNEILENRAEELKLDFGVWRSELSEQKQKFPLSFKTFGEAIPPQYAIQVLDELTDGKAIISTGVGQHQMWAAQFYKYRKPRQWLSSSGLGAMGFGLPAAIGASVANPDAIVVDIDGDGSFIMNVQELATIRVENLPVKILLLNNQHLGMVMQWEDRFYKANRAHTYLGDPARESEIFPNMLQFAGACGIPAARVTKKEELREAIQTMLDTPGPYLLDVICPHQEHVLPMIPSGGTFKDVITEGXGRTKY

SEQ ID NO: 19506 - protein, 585 aa, Raphanus raphanistrum
  misc_feature (234)..(234): Xaa can be any naturally occurring amino acid
  misc_feature (300)..(300): Xaa can be any naturally occurring amino acid
  misc_feature (383)..(383): Xaa can be any naturally occurring amino acid
  unsure (1)..(585): unsure at all Xaa locations
TFVSRYAPDEPRKGADILVEALERQGVETVFAYPGGASMEIHQALTRSSTIRNVLPRHEQGGVFAAEGYARSSGKPGICIATSGPGATNLVSGLADAMLDSVPLVAITGQVPRRMIGTDAFQETPIVEVTRSITKHNYLVMDVDDIPRIVQEAFFLATSGRPGPVLVDVPKDIQQQLAIPNWDQPMRLPGYMSRLPQPPEVSQLRQIVRLISESKRPVLYVGGGSLNSSEELGXFVELTGIPVASTLMGLGSYPCNDELSLQMLGMHGTVYANYSVEHSDLLLAFGVRFDDRVTGKLEAXASRAKIVHIDIDSAEIGKNKTPHVSVCGDVKLALQGMNKILENRAEELKLDFGVWRSELSEQKQKFPLSFKTFGEAIPPQYAXQVLDELTDGKAIISTGVGQHQMWAAQFYKYRKPRQWLSSSGLGAMGFGLPAAIGASVANPDAIVVDIDGDGSFIMNVQELATIRVENLPVKILLLNNQHLGMVMQWEDRFYKANRAHTYLGDPARESEIFPNMLQFAGACGIPAARVTKKEELREAIQTMLDTPGPYLLDVICPHQEHVLPMIPSGGTFKDVITEGDGRTKY

SEQ ID NO: 19507 - protein, 585 aa, Raphanus raphanistrum
  misc_feature (447)..(447): Xaa can be any naturally occurring amino acid
  unsure (1)..(585): unsure at all Xaa locations
TFVSRYAPDEPRKGADILVEALERQGVETVFAYPGGASMEIHQALTRSSTIRNVLPRHEQGGVFAAEGYARSSGKPGICIATSGPGATNLVSGLADAMLDSVPLVAITGQVPRRMIGTDAFQETPIVEVTRSITKHNYLVMDVDDIPRIVQEAFFLATSGRPGPVLVDVPKDIQQQLAIPNWDQPMRLPGYMSRLPQPPEVSQLRQIVRLISESKRPVLYVGGGSLNSSEELGRFVELTGIPVASTLMGLGSYPCNDELSLQMLGMHGTVYANYSVEHSDLLLAFGVRFDDRVTGKLEAFASRAKIVHIDIDSAEIGKNKTPHVSVCGDVKLALQGMNEILENRAEELKLDFGVWRSELSEQKQKFPLSFKTFGEAIPPQYAIQVLDELTDGKAIISTGVGQHQMWAAQFYKYRKPRQWLSSSGLGAMGFGLPAAIGASVANPDAIXVDIDGDGSFIMNVQELATIRVENLPVKILLLNNQHLGMVMQWEDRFYKANRAHTYLGDPARESEIFPNMLQFAGACGIPAARVTKKEELREAIQTMLDTPGPYLLDVICPHQEHVLPMIPSGGTFKDVITEGDGRTKY

SEQ ID NO: 19508 - protein, 585 aa, Raphanus raphanistrum
  misc_feature (112)..(112): Xaa can be any naturally occurring amino acid
  unsure (1)..(585): unsure at all Xaa locations
TFVSRYAPDEPRKGADILVEALERQGVETVFAYPGGASMEIHQALTRSSTIRNVLPRHEQGGVFAAEGYARSSGKPGICIATSGPGATNLVSGLADAMLDSVPLVAITGQVXRRMIGTDAFQETPIVEVTRSITKHNYLVMDVDDIPRIVQEAFFLATSGRPGPVLVDVPKDIQQQLAIPNWDQPMRLPGYMSRLPQPPEVSQLRQIVRLISESKRPVLYVGGGSLNSSEELGRFVELTGIPVASTLMGLGSYPCNDELSLQMLGMHGTVYANYSVEHSDLLLAFGVRFDDRVTGKLEAFASRAKIVHIDIDSAEIGKNKTPHVSVCGDVKLALQGMNEILENRAEELKLDFGVWRSELSEQKQKFPLSFKTFGEAIPPQYAIQVLDELTDGKAIISTGVGQHQMWAAQFYKYRKPRQWLSSSGLGAMGFGLPAAIGASVANPDAIVVDIDGDGSFIMNVQELATIRVENLPVKILLLNNQHLGMVMQWEDRFYKANRAHTYLGDPARESEIFPNMLQFAGACGIPAARVTKKEELREAIQTMLDTPGPYLLDVICPHQEHVLPMIPSGGTFKDVITEGDGRTKY

SEQ ID NO: 19509 - protein, 585 aa, Raphanus raphanistrum
  misc_feature (175)..(175): Xaa can be any naturally occurring amino acid
  unsure (1)..(585): unsure at all Xaa locations
TFVSRYAPDEPRKGADILVEALERQGVETVFAYPGGASMEIHQALTRSSTIRNVLPRHEQGGVFAAEGYARSSGKPGICIATSGPGATNLVSGLADAMLDSVPLVAITGQVPRRMIGTDAFQETPIVEVTRSITKHNYLVMDVDDIPRIVQEAFFLATSGRPGPVLVDVPKDIQXQLAIPNWDQPMRLPGYMSRLPQPPEVSQLRQIVRLISESKRPVLYVGGGSLNSSEELGRFVELTGIPVASTLMGLGSYPCNDELSLQMLGMHGTVYANYSVEHSDLLLAFGVRFDDRVTGKLEAFASRAKIVHIDIDSAEIGKNKTPHVSVCGDVKLALQGMNKILENRGEELKLDFGVWRSELSEQKQKFPLSFKTFGEAIPPQYAIQVLDELTDGKAIISTGVGQHQMWAAQFYKYRKPRQWLSSSGLGAMGFGLPAAIGASVANPDAIVVDIDGDGSFIMNVQELATIRVENLPVKILLLNNQHLGMVMQWEDRFYKANRAHTYLGDPARESEIFPNMLQFAGACGIPAARVTKKEELREAIQTMLDTPGPYLLDVICPHQEHVLPMIPSGGTFKDVITEGDGRTKY

SEQ ID NO: 19510 - protein, 585 aa, Raphanus raphanistrum
  misc_feature (200)..(200): Xaa can be any naturally occurring amino acid
  misc_feature (579)..(580): Xaa can be any naturally occurring amino acid
  unsure (1)..(585): unsure at all Xaa locations
TFVSRYAPDEPRKGADILVEALERQGVETVFAYPGGASMEIHQALTRSSTIRNVLPRHEQGGVFAAEGYARSSGKPGICIATSGPGATNLVSGLADAMLDSVPLVAITGQVPRRMIGTDAFQETPIVEVTRSITKHNYLVMDVDDIPRIVQEAFFLATSGRPGPVLVDVPKDIQQQLAIPNWDQPMRLPGYMSRLPQPPXVSQLRQIVRLISESKRPVLYVGGGSLNSSEELGRFVELTGIPVASTLMGLGSYPCNDELSLQMLGMHGTVYANYSVEHSDLLLAFGVRFDDRVTGKLEAFASRAKIVHIDIDSAEIGKNKTPHVSVCGDVKLALQGMNKILENRGEELKLDFGVWRSELSEQKQKFPLSFKTFGEAIPPQYAIQVLDELTDGKAIISTGVGQHQMWAAQFYKYRKPRQWLSSSGLGAMGFGLPAAIGASVANPDAIVVDIDGDGSFIMNVQELATIRVENLPVKILLLNNQHLGMVMQWEDRFYKANRAHTYLGDPARESEIFPNMLQFAGACGIPAARVTKKEELREAIQTMLDTPGPYLLDVICPHQEHVLPMIPSGGTFKDVITEXXGRTKY

SEQ ID NO: 19511 - protein, 585 aa, Raphanus raphanistrum
  misc_feature (112)..(112): Xaa can be any naturally occurring amino acid
  misc_feature (402)..(402): Xaa can be any naturally occurring amino acid
  misc_feature (579)..(579): Xaa can be any naturally occurring amino acid
  unsure (1)..(585): unsure at all Xaa locations
TFVSRYAPDEPRKGADILVEALERQGVETVFAYPGGASMEIHQALTRSSTIRNVLPRHEQGGVFAAEGYARSSGKPGICIATSGPGATNLVSGLADAMLDSVPLVAITGQVXRRMIGTDAFQETPIVEVTRSITKHNYLVMDVDDIPRIVQEAFFLATSGRPGPVLVDVPKDIQQQLAIPNWDQPMRLPGYMSRLPQPPEVSQLRQIVRLISESKRPVLYVGGGSLNSSEELGRFVELTGIPVASTLMGLGSYPCNDELSLQMLGMHGTVYANYAVEHSDLLLAFGVRFDDRVTGKLEAFASRAKIVHIDIDSAEIGKNKTPHVSVCGDVKLALQGMNKILENRAEELKLDFGVWRSELKEQKQKFPLSFKTFGEAIPPQYAIQVLDELTDGKAIISTGVGXHQMWAAQFYKYRKPRQWLSSSGLGAMGFGLPAAIGASVANPDAIVVDIDGDGSFIMNVQELATIRVENLPVKILLLNNQHLGMVMQWEDRFYKANRAHTYLGDPARESEIFPNMLQFAGACGIPAARVTKKEELREAIQTMLDTPGPYLLDVICPHQEHVLPMIPSGGTFKDVITEXDGRTKY

SEQ ID NO: 19512 - protein, 247 aa, Vitis hybrid cultivar
MESLGVRKGAWIQEEDVLLRKCIEKYGEGKWHLVPLRAGLNRCRKSCRLRWLNYLKPDIKRGEFALDEVDLMIRLHNLLGNRWSLIAGRLPGRTANDVKNYWHGHHLKKKVQFQEEGRNKPLTHSKTKAIKPHPHKFSKALPKFELKTTAVDTFDTQVSTSSKPSSTSPQPNDDIIWWESLLAELDQDTDFSASGEMLIASLRTEETATQKKGPMDGMIEQIQGGEDDFPFDVGFWDTPNTQVNHLI

SEQ ID NO: 19513 - protein, 250 aa, Vitis vinifera
MESLGVRKGAWIQEEDVLLRKCIEKYGEGKWHLVPLRAGLNRCRKSCRLRWLNYLKPGIKRGEFALDEVDLMIRLHNLLGNRWSLIAGRLPGRTANDVKNYWHSHHFKKKVQFQEEGRDKPQTHSKTKAIKPHPHKFSKALPRFELKTTAVDTFDTQVSTSSKPSSTSPQPNDDIIWWESLLAEHAQMDQETDFSASGEVLIASLWTEETATQTKGPMDGMVEQIQGGEGDFPFDVGFWDFPNTEVNHLI

SEQ ID NO: 19514 - protein, 250 aa, Vitis hybrid cultivar
MESLGVRKGAWIQEEDVLLRKCIDKYGEGKWHLVPLRAGLNRCRKSCRLRWLNYLKPGIKRGEFALDEVDLMIRLHNLLGNRWSLIAGRLPGRTANDVKNYWHSHHFKKKVQFQEEGRDKPQTHSKTKAIKPHPHKFSKALPRFELKTTAVDTFDTQVSTSSKPSSTSPQPNDDIIWWESLLAEHAQMDQETDFSASGEVLIASLWTEETATQTKGPMDGMVEQIQGGEGDFPFDVGFWDFPNTEVNHLI

SEQ ID NO: 19515 - protein, 247 aa, Vitis hybrid cultivar
MESLGVRKGAWIQEEDVLLRKCIEKYGEGKWHLVPLRAGLNRCRKSCRLRWLNYLKPDIKRGEFALDEVDLMIRLHNLLGNRWSLIAGRLPGRTANDVKNYWHGHHLKKKVQFQEEGRNKPLTHSKTKAIKPHPHKFSKALPRFELKTTAVDTFDTQVSTSSKPSSTSPQPNDDIIWWESLLAELDQDTDFSASGEMLIASLRTEETATQKKGPMDGMIEQIQGGEDDFPFDVGFWDTPNTQVNHLF

SEQ ID NO: 19516 - protein, 250 aa, Vitis hybrid cultivar
MESLGVRKGAWIQEEDVLLRKCIEKYGEGKWHLVPLRAGLNRCRKSCRLRWLNYLKPDIKRGEFALDEVDLMIRLHNLLGNRWSLIAGRLPGRTANDVKNYWHSHHFKKKVQFQEEGRDKPQTHSKTKAIKPHPHKFSKALPRFELKTTAVDTFDTQVSTSSKPSSTSPQPNDDIIWWESLLAEHAQMDQETDFSASGEVLIASLWTEETATQTKGPMDGMVEQIQGGEGDFPFDVGFWDFPNTEVNHLI

SEQ ID NO: 19517 - protein, 340 aa, Salicornia brachiata
MALVRERRQLNLRLPLPEKSQRRPSFPLPPPPTTTSSSAVSAATSTSAATTSTAVNTFALSDFTKLTVLGSGSGGTVYKVSHKVTGNIYALKLISSDPNPTHLRQLSREKEILRGMVSSSESPHIVRCHGVFEKADGDIAVLMEYMEGGTLQDKQKSDGTFSESRLSKVVYQILNGLKYLHSHKIVHRDIKPANLLVNEQGDVKISDFGVGRIMGRTLDPCNSYVGTCAYMSPERFDPDTYGNGGGNYNGYAADIWSLGLTVMELYLGHFPFLLPGQRPDWATLMCAICFGDPPSLPAGRGSLEFRNFVSCCLQKEATLRWSADQLLSHPFVSKYHHHTL

SEQ ID NO: 19518 - protein, 340 aa, Salicornia brachiata
MALVRERRQLNLRLPLPEKSQRRPSFPLPPPPTTTSSSAVSAATSTSAATTSTAVNTFALSDFTKLTVLGSGSGGTVYKVSHKVTGNIYALKLISSDPNPTHLRQLSREKEILRGMVSSSESPHIVRCHGVFEKADGDIAVLMEYMEGGTLQDKQKSDGTFSKSRLSKVVYQILNGLKYLHSHKIVHRDIKPANLLVNEQGDVKISDFGVGRIMGRTLDPCNSYVGTCAYMSPERFDPDTYGNGGGNYNGYAADIWSLGLTVMELYLGHFPFLLPGQRPDWATLMCAICFGDPPSLPAGRGSLEFRNFVSCCLQKEATLRWSADQLLSHPFVSKYHHHTL

SEQ ID NO: 19519 - protein, 192 aa, Physcomitrella patens
MPRSIDPLIVGKVIGDVIDTFVPRVDMAIHYSTRQVTNGCQLKPSATAQAPEIQLSDKSGDNNYYTLVMTDPDAPSPSEPSLREWLHWIVTDIPGNSGGSETNTGFPWLSEQATSTSSSGRELVPYIGPRPPIGIHRYIFVLFKQPSQSFLISPPAARNNFSTRNFAAYYGLGLPVAATYCNSQKEPASRNR

SEQ ID NO: 19520 - protein, 192 aa, Physcomitrella patens
MARSIDPLVVGKVIGDVIDTFVPSVDMAIHYSSRQVTNGCQMKPSATAQAPEIQLSDNSEGNNYYTLIMTDPDAPSPSEPSLREWLHWIVTDIPGNSGGSETTSGFSWLQEQVTHTSSSGRELVPYMGPRPPIGIHRYAFILFKQPSTPFLISPPTVRNNFSTRNFASHYGLGLPVAATYCNAQKEPGSRRR

SEQ ID NO: 19521 - protein, 225 aa, Physcomitrella patens
MSRSVDPLVVGRVIGVVIDMFAPSVDMAVVYTSRKVSNGCQMKPSATNEAPTVHVTGNNGDNNFFTLIMTDPDAPSPSEPSLREWVHWIVTDIPGNSSTTTSGQGSKRAREPASSAKQPNVERKKKGPAASTTDKELPSAADQGAAKPRTSGKEVVPYVGPCPPIGIHRYIFVLFKQPTGKPLLVTAPSVRNNFNTRTFAVEHGLGFPVAATYFNAAKEPGSRRR

SEQ ID NO: 19522 - protein, 192 aa, Physcomitrella patens
MARSIDPLVVGKVIGDVIDTFVPSVDMAIHYSTRQVTNGCQMMPSATAQAPEIHLSDKSGGNNLYTLIMIDPDAPSPSEPTLREWLHWIVTDIPGNSGGSEMTSGFPRLNELIAPSKSCGRELVPYMGPRPPVGIHRYIFVLFRQPLTPFHITPPTVRSNFNTRYFAAQCGLGLPVAATYLNAQKEPGSRRR

SEQ ID NO: 19523 - protein, 137 aa, Selaginella denticulata
GKQVNNGCELKPSATQSRPVVQVTAPNEEGNLFTLVMIDPDAPSPSEPSMREWVHWIVADIPANGDASQGKEILQYIGPKPPTGIHRYVFVVFRQVGPALMLPPLMRNNFSTRWFSREYFLGFPVAAVYYNAQKEPA

SEQ ID NO: 19524 - protein, 146 aa, Selaginella erythropus
DVLDMFVPAVEMSVCYGSKQVNNGCELKPSATQARPLVQVGSAPEEGALYTLVMVDPDAPSPSEPSMREWVHWIVADIPSGADASQGREILQYIGPKPPTGIHRYVFVVFRQMGPVLMLPPLMRNNFSTRWFAQEYFLGLPVGAVY

SEQ ID NO: 19525 - protein, 128 aa, Selaginella pallescens
KQVNNGCELKPSATQARPTVQVGSPQEEGALYTLVMVDPDAPSPSEPSMREWVHWIVADIPSGADASQGREILQYIGPKPPTGIHRYVFVVFRQMGPVLMLPPLMRNNFSTRWFAQEYFLGLPVGAVY

SEQ ID NO: 19526 - protein, 202 aa, Selaginella pallescens
MATFLSALMASVTMFLLGQAAASGARSLASHRFDVSSPDSDFQTIIPDWVDSYDAPYVSVSATFGSQVVATGQNFKQAQTRKPPVVSISDVHARKGDLFTLVMVDPDAVSPAKPIYRNYLHWIVTNIPTGTTDVYKHGTNVVAYAPPSPPMDVHRYYILLFKQKNEISAEPITSRQRFSVRKFSDKHSLSFPVGGLYFTVEA

SEQ ID NO: 19527 - protein, 682 aa, Kluyveromyces lactis
MSSVAASQNKINDLLEAIRQEFANVSQEANSYRLQNQKDYDFKINQQLAEMQQVRNTVYELELTHRKMKDAYEEEISRLKLELEQKDRQLASIAHGSTVGNVPGQVPQLSRNSGAQGNANIAPPNIPQPMVSQTVGTGMAPQMAPLNTQHPTQQTKSNAGEQAAANLAPVIQQQQQPQQQLPPQQQQQQQQQQQSNIPVTTAAPVQPAGGNLDQTVPNSISPQQQPTEQQQPASTATTAPATASTAPPTSAPSDQVGQDHYLVPADQRAVHAKPIPPFLLDLDSQLVPSHLKKQNNDYYVLHNPALPTDLDVELHKSLEHSSVVCCVRFSSDGEFLATGCNKTTQVYKVSTGELVARLSDDSASQPQPQPQNQTVTAETSTSNSNGSSAEDGTGNQNSAASTASSDLYIRSVCFSPDGKFLATGAEDKLIRIWDLETKKIVMTLKGHEQDIYSLDYFPSGNKLVSGSGDRTVRIWDLTTGTCSLTLSIEDGVTTVAVSPGEGKFIAAGSLDRTVRVWDSDTGFLVERLDSENELGTGHRDSVYSVVFTRDGKGVVSGSLDRSVKLWNLNGLSGQKSHAECEVTYTGHKDFVLSVATTQNDEYILSGSKDRGVLFWDTKSGNPLLMLQGHRNSVIYVTVANGHPLGPEYGVFATGSGDCKARIWKYSKKNGQQNSTQIKEIKE

SEQ ID NO: 19528 - protein, 570 aa, Aethionema saxatile
PYEVPMTATGALQSYKLAAKAITRLQSLPSGSMERLCDTMVQEVFELTGYDRVMAYKFHEDDHGEVVSEVAKPGLEPYLGLHYPATDIPQAARFLFMKNKVRMIVDCCAKHVRVLQDEKLSFDLTLCGSTLRAPHSCHLQYMENMNSIASLVMAVVVNEEDGEGDAPDPTQPQKRKRLWGLVVCHNTTPRFVPFPLRYACEFLAQVFAIHVNKEVELDSQIVEKNILRTQTLLCDMLMRDAPLGIVTQSPNIMDLVKCDGAALLYNDKIWKLGITPTDFQLQEIASWLCEYHMDSTGLSTDSLHDAGFPRALALGDSVCGMAAVRISSKDMIFWFRSHTAGEVRWGGAKHDPEDKDDARRLHPRSSFKAFLEVVKTRSLPWKDYEMDAIHSLQLILRNAPKDIEATNVNTKTIHSKLNDLRLDGIQELEAVTSEMVRLIETATVPILAVDADGLVNGWNTKIAELTGLPVDEAIGKHFLSLVEDSSVERVKRMLEMALEGTEEQNVQFEIKTHLSRADAGPISLVVNACASRDLNENVVGVCFVAQDLTGQKNVMDKFTRIEGDYKAIIQ

SEQ ID NO: 19529 - protein, 577 aa, Alliaria petiolata
DFEPVKPYEVPMTAAGALQSYKLAAKAITRLQALPSGSMERLCDTMAQEVFELTGYDRVMAYKFHDDDHGEVVSEVTKPGLEPYLGLHYPATDIPQAARFLFMKNKVRVIVDCNAKHVRVLQDEKLSFDLTLCGSTLRAPHSCHLQYMANMDSIASLVMAVVVNEEDGEGDAPDSTTQPPKRKRLWGLVVCHNTTPRFVPFPLRYACEFLAQVFAIHVNKEVELENQIVEKNILRTQTLLCDMLMRDAPLGIVSQSPNIMDLVKCDGAALLYKDKIWKLGTTPSEFHLQEIASWLCEYHTDSTGLSTDSLHDAGFPRALALGDSVCGMAAVRISSKDMIFWFRSHTAGEVRWGGAKHDPDDRDDARRMHPRSSFKAFLEVVRTRSLPWKDYEMDAIHSLQLILRNAFKDGETTDVNTRIIHSKLNDLKIDGIQELEAVTSEMVRLIETATVPILAVDSDGLVNGWNTKIAELTGLSVDEAIGKHLLTLVEDSSVEIVKRMLENALEGTEEQNVQFEIKTHLSGADAGPISLVVNACASRDLHENVVGVCFVAHDLTGQKTVMDKFTRIEGDYKAIIQ

SEQ ID NO: 19530 - protein, 562 aa, Arabidopsis lyrata
  misc_feature (388)..(388): Xaa can be any naturally occurring amino acid
  unsure (1)..(562): unsure at all Xaa locations
DFEPVKPYEVPMTAAGALQSYKLAAKAITRLQSLPSGSMERLCDTMVQEVFELTGYDRVMAYKFHEDDHGEVVSEVTKPGLEPYLGLHYPATDIPQAARFLFMKNKVRMIVDCNAKHARVLQDEKLSFDLTLCGSTLRAPHSCHLQYMANMDSIASLVMAVVVNEEDGEGDAPDASTQPQKRKRLWGLVVCHNTTPRFVPFPLRYACEFLAQVFAIHVNKEVELENQMLEKNILRTQTLLCDMLMRDAPLGIVSQSPNIMDLVKCDGAALFYKDKIWKLGTTPSEFHLQEIASWLCEYHMDSTGLSTDSLHDAGFPKALSLGDSVCGMAAVRISSKDMIFWFRSHTAGEVRWGGAKHDPDDRDDARRMHPRSSFKAFLEVVKTRSLPXRNAFKDSETTDVNTNVIHSKLNDLKIDGIQELEAVTSEMVRLIETATVPILAVDSDGLVNGWNTKIAELTGLSVVEAIGKHLLTLVEDSSVEIVKRMLENALEGTEEQNVQFEIKTHLSRADAGPISLVVNACASRDLHENVVGVCFVAHDLTGQKTVMDKFTRIEGDYKAIIQ

SEQ ID NO: 19531 - protein, 577 aa, Arabis alpina
DFEPVKPYEVPMTAAGALQSYKLAAKAITRLQSLPSGSMERLCDTMVQEVFELTGYDRVMAYKFHDDDHGEVVSEVTKPGLEPYLGLHYPATDIPQAARFLFMKNKVRMIVDCNAKHVRVLQDEKLSFDLTLCGSTLRAPHSCHLQYMANMDSIASLVMAVVVNEEDGEGDAPDSTTQPQKRKRLWGLVVCHNTSPRFVPFPLRYACEFLAQVFAIHVNKEVELENQIVEKNILRTQTLLCDMLMRDAPLGIVSQSPNIMDLVKCDGAALLYKDKVWKLGITPSDSHLQEIASWLCEYHTDSTGLSTDSLHDAGFPRALSLGDSVCGMAAVRISSKDMIFWFRSHTAGEVRWGGAKHDPEDRDDARRMHPRSSFKAFLEVVKTRSIPWKDYEMDAIHSLQLILRNAFKDGETTDVNTRIIHSKLNDLKIDGIQELEAVTSEMVRLIETATVPILAVDYDGLVNGWNTKIAELTGLPVDEAIGKHFLTLVEDSSVEIVKRMLDNALGGTEEQNVQFEIKTHESRADAGPISLVVNACASRDLHENVVGVCFVAHDLTGQKTVMDKFTRIEGDYKAIIQ

SEQ ID NO: 19532 - protein, 577 aa, Aubrieta deltoidea
DFEPVKPYEVPMTAAGALQSYKLAAKAITRLQFLPSGSMERLCDTMVQEVFELTGYDRVMAYKFHDDDHGEVVSEVTKPGLEPYLGLHYPATDIPQAARFLFMKNKVRMIVDCNAKHVRVLQDEKLSFDLTLCGSTLRAPHSCHLQYMANMDSIASLVMAVVVNEEDGEGDAPDSTTQPQKRKRLWGLVVCHSTTPRFVPFPLRYACEFLAQVFAIHVNKEVELESQIVEKNILRTQTLLCDMLMRDAPLGIVSQSPNIMDLVKCDGAALLYKEKIWRLGTTPSEFHLQEIASWLCDYHTDSTGLSTDSLHDAGFPRALALGDSVCGMAAVRISSKDMIFWFRSHTAGEVRWGGAKHDPDVKDDARRMHPRSSFKAFLEVVKTRSLPWKDYEMDAIHSLQLILRNAFKDGETTDVNTKIIHSKLNDLKIDGIQELEAVTSEMVRLIETATVPILAVDSDGLVNGWNTKIAELTGLPVDEAIGKHFLTLVEDSSVEIVKRMLDNALEGTEEQNVQFEIKTHMSRADAGPISLVVNACASRDLHENAVGVCFVAHDLTGQKTVMDKFTRIEGDYKAIIQ

SEQ ID NO: 19533 - protein, 577 aa, Barbarea vulgaris
DFEPVKPYEVPMTAAGALQSYKLAAKVITRLQSLPSGSMERLCDTMVQEVFELTGYDRVMAYKFHEDDHGEVVSEVTKPGLEPYLGLHYPATDIPQAARFLFMKNKVRMIVDCNAKHARVLQDEKLSFDLTLCGSTLRAPHSCHLQYMANMDSIASLVMAVVVNEEEGEGDAPDSTTQPQKRKRLWGLVVCHNTTPRFVPFPLRYACEFLAQVFAIHVNKEVELENQIVEKNILRTQTLLCDMLMRDAPLGIVSQSPNIMDLVKCDGAALLYKDKIWKLGTTPSDFHLQEIASWLYEYHTDSTGLSTDSLHDAGFPKALSLGDAVCGMAAVRISSKDMIFWFRSHTAGEVRWGGAKHDPDDRDDARRMHPRSSFKAFLEVVKTRSLPWKDYEMDAIHSLQLILRNAFKDGESTDVNTKIIHSKLNDLKIDGIQELEAVTSEMVRLIETATVPILAVDSDGLVNGWNTKIAELTGLSVDEAIGKHLLTLVEDSSVEIVRRMLENALEGTEEQNVQFEIKTHLSRADAGPISLVVNACASRDLHENVVGVCFVAHDLTGQKTVMDKFTRIEGDYKAIIQ

SEQ ID NO: 19534 - protein, 577 aa, Boechera platysperma
DFEPVKPYEVPMTAAGALQSYKLAAKAITRLQSLPSGSMERLCDTMVQEVFELTGYDRVMAYKFHEDDHGEVVSEVTKPGLEPYLGLHYPATDIPQAARFLFMKNKVRMIVDCNAKHARVLQDEKLSFDLTLCGSTLRAPHSCHLQYMANMDSIASLVMAVVVNEEDGEGDAPDSTIQPQKRKRLWGLVVCHNTTPRFVPFPLRYACEFLAQVFAIHVNKEVELENQIVEKNILRTQTLLCDMLMRDAPLGIVSQSPNIMDLVKCNGAALLYKDKIWKLGTTPSEFHLQEIASWLCEYHTDSTGLSTDSLHDAGFPRALSLGDSVCRMAAVRISSKDMIFWFRSHTAGEVRWGGAKHDPDDRDDARRMHPRSSFKAFLEVVKTRSLPWKDYEMDAIHSLQLILRNAFKDSETTDVNTKVIHSKLNDLKIDGIQELEAVTSEMVRLIETATVPILAVDSDGLVNGWNTKIAELTGLSVDEAIGKHLLTLVEDSSVEIVKGMLENALEGTEEQNVQFEIKTHLSRADAGPISLAVNACASRDLHENVVGVCFVAHDLTGQKTMMDKFTRIEGDYKAIIQ

SEQ ID NO: 19535 - protein, 579 aa, Brassica oleracea
DFEPVKPYEVPMTAAGALQSYKLAAKAITRLQSLPSGSMERLCDTVVQEVFELTGYDRVMAYKFHDDDHGEVVSEVTKPGLEPYLGLHYPATDIPQAARFLFMKNKVRMIVDCNAKHVRVLQDEKLSSDLTLCGSTLRAPHSCHLQYMANMDSIASLVMAVVVNEEDGGEGDATAPDSTPPRKRKRLWGLVVCHNTTPRFVPFPLRYACEFLAQVFAIHVNKEVELENQIVEKNILRTQTLLCDMLMRDAPLGIVSQSPNIMDLVKCDGAALLYKDKVWKLGITPSEFHLQEIASWLCEYHTDSTGLSTDSLHDAGFPRALALGDSVCGMAAVRISSKDMIFWFRSHTAGEVRWGGAKHDPDDRDDARRMHPRSSFKAFLEVVKTRSLPWKDYEMDAIHSLQLILRNAFKDGETTDVNTKIIHSKLNDLKIDGIQELEAVTSEMVRLIETATVPILAVDSDGLVNGWNTKITELTGLPVDEAIGKHLLTHVEDSSVEIVKRMLENALEGTEEQNVQFEIKTHLSRADAGPISLVVNACASRDLHENVVGVCFVAHDLTGQKTVMDKFTRIEGDYKAIIQ

SEQ ID NO: 19536 - protein, 573 aa, Brassica oleracea
DFEPVKPYEVPMTAAGALQSYKLAAKAITRLQSLPSGSMERLCDTMVQEVFELTGYDRVMAYKFHEDDHGEVVSEVTKPGLEPYLGLHYPATDIPQAARFLFMKNKVRMIVDCNAKHVKVLQDEKLSFDLTLCGSTLRAPHTCHLQYMANMDSIASLVMAVVVNEEEDGEATTTPQKRKRLWGLVVCHNTTPRFAPFPLRYACEFLAQVFAIHVNKEVELENQIVEKNILRTQTLLCDMLMRDAPLGIVSQSPNIMDLVKCDGAALLYKEKVWKLGKTPSEFHLQEIAFWLCEHHADSTGLSTDSLHDAGFPGALALGDSVCGMAAVRISSKDMIFWFRSHTAGEVRWGGAKHDPDDRDDARRMHPRSSFKAFLEVVKTRSLPWKDYEMDAIHSLQLILRNAFKDGEATDVNTNIIHSKLNDLKIDGIQELEAVTSEMVRLIETATVPILAVDSDGLVNGWNTKIAELTGLPVDEAIGKHLLTLVEDSSVDIVQRMLENALEGTEEQNVQFEIKTHLSRTDAGPISLVVNACASKDLHENVVGVCFVAHDLTAQKTVMDKFTRIEGDYKAIIQ

SEQ ID NO: 19537 - protein, 576 aa, Cakile maritima
DFEPVKPYEVPMTAAGALQSYKLAAKAITRLQSLPSGSMERLCDTMVQEVFELTGYDRVKAYKFHDDDHGEVVSEVTKPGLEPYLGLHYPATDIPQAARFLFMKNKVRMIVDCNAKHVRVLQDEKLSFDLTLCGSTLRAPHSCHLQYMANMDSIASLVMAVVVNEEDGEGDAPDSTAPQKRKRLWGLVVCHNTSPRFVPFPLRYACEFLAQVFAIHVNKEVELENQIVEKNILRTQTLLCDMLMRDAPLGIISQSPNIMDLVKCDGAALLYKEKVWKLGITPSDFHLQEIASWLCEYHTDSTGLSTDSLHDAGFPRALALGDSVCGMAAVRISSRDTIFWFRSHTAGEVRWGGAKHDPDDKDDARRMHPRSSFKAFLEVVKTRSSPWKDYEMDAIHSLQLILRNAFKDGETADMNTKIIHSKLNDLQIDGIQELEAVTGEMVRLIETATVPILAVDSDGLINGWNTKIAELTGLRVDEAIGKHLLTLVEDSSVEIVKRMLDNALEGTEEQNVQFEIKTHLSRADAGPISLVVNACASRDLHENVVGVCFVAHDLTGQKTVMVKFTRIEGDYKAIVQ

SEQ ID NO: 19538 - protein, 577 aa, Camelina microcarpa
DFEPVKPYEVPMTAAGALQSYKLAAKAITRLQSLPSGSMERLCDTMAQEVFELTGYDRVMAYKFHEDDHGEVVSEVTKPGLEPYLGLHYPATDIPQAARFLFMKNKVRMIVDCNAKRARVLQDEKLSFDLTLCGSTLRAPHSCHLQYMANMDSIASLVMAVVVNEEDGEGDAPDSTAQPQKRKRLWGLVVCHNTTPRFVPFPLRYACEFLAQVFAIHVNKEVELENQIVEKNILRAQTLLCDMLMRDAPLGIVSQSPNVMDLVKCDGAALLYKDKVWKLGTTPSEFHLQEIASWLCEYHTDSTGLSTDSLHDAGFPRALSLGDSVCGMAAVRISSKDMIFWFRSHTAGEVRWGGAKHDPDDRDDARRMHPRSSFKAFLEVVKTRSLPWKDYEMDAIHSLQLILRNAFKDGESTDVNTKVIHSKLNDLKIDGIQELEAVTSEMVRLIETATVPILAVDSDGLVNGWNTKIAELTGLSVDEAIGKHLLILVEDSSVEIVKRMLENALEGTEEQNVQFEIKTQLTRADAGPISLVVNACASRDLHENVVGVCFVAHDLTGQKTVMDKFTRIEGDYKAIIQ

SEQ ID NO: 19539 - protein, 577 aa, Capsella bursa-pastoris
DFEPVKPYEVPMTAAGALQSYKLAAKAITRLQSLPSGSMERLCDTMVQEVFELTGYDRVMAYKFHEDDHGEVVSEVTKPGLEPYLGLHYPATDIPQAARFLFMKNKVRMIVDCNAKHARVLQDEKLSFDLTLCGSTLRAPHSCHLQYMANMDSIASLVMAVVVNEEDGEGDAPDSTTQPQKRKRLWGLVVCHNTTPRFVPFPLRYACEFLAQVFAIHVNKEVELENQIVEKNILRTQTLLCDMLMRDAPLGIVSQSPNIMDLVKCDGAALLYKDKIWKLGTTPSEFHLQELASWLCEYLTDSTGLSTDSLHDAGFPRALSLGDSVCGMATVRISSKDMIFWFRSHTAGEVRWGGAKHDPDDKDDARRMHPRSSFKAFLEVVKTRSLPWKDYEMDAIHSLQLILRNAFKDGETTDVNTKVIHSKLNDLKIDGIQELEAVTSEMVRLIETATVPILAVDSDGLVNGWNTKIAELTGLSVDEAIGKHLLTLVEDSSVEIVKRMLENALEGTEEQNVQFEIKTHLSRADAGPISLIVNACASRDLHENVVGVCFVAHDLTGQKTVMDKFTRIEGDYKAIIQ

SEQ ID NO: 19540 - protein, 577 aa, Catolobus pendulus
DFEPVKPYEVPMTAAGALQSYKLAAKAITRLQSLPSGSMERLCDTMVQEVFELTGYDRVMAYKFHEDDHGEVVSEVTKPGLEPYLGLHYPATDIPQAARFLFMKNKIRMIVDCNAKHARVLQDEKLSFDLTLCGSTLRAPHSCHLQYMANMDSIASLVMAVVVNEEDGEGDAPDSTTQPQKRKRLWGLVVCHNTTPRFVPFPLRYACEFLAQVFAIHVNKEVELENQIVEKNILRTQTLLCDMLMRDAPLGIVSQSPNIMDLVKCDGAALLYKDKIWKLGTTPSEFHLQEIASWLCEYHTDSTGLSTDSLHDAGFPRALSLGDSVCGMAAVRISSKDMIFWFRSHTAGEVRWGGAKHDPDDRDDARRMHPRSSFKAFLEVVKTRSLPWKDYEMDAIHSLQLILRNAFKDGESTDVNTKVIHSKLNDLKIDGIQELEAVTSEMVRLIETATVPILAVDSDGLVNGWNTKIAELTGLSVDEAIGKHLLTLVEDSSVEIVKRMLENALEGTEEQNVQFEIKTQLARADAGPISLAVNACASRDLHENVVGVCFVAHDLTGQKTVMDKFTRIEGDYKAIIQ

SEQ ID NO: 19541 - protein, 577 aa, Cusickiella quadricostata
DFEPVKPYEVPMTAAGALQSYKLAAKAITRLQSLPSGSMERLCDTMVQEVFELTGYDRVMAYKFHEDDHGEVVSEVTKPGLEPYLGLHYPATDIPQAARFLFMKNKVRMIVDCNAKHARVLQDEKLSFDLTLCGSTLRAPHSCHLQYMANMDSIASLVMAVVVNEEDGEGDAPDSTTQPQKRKRLWGLVVCHNTTPRFVPFPLRYACEFLAQVFAIHVNKEVELENQIVEKNILRTQTLLCDMLMRDAPLGIVSQSPNIMDLVKCDGAALLYKDRIWKLGTTPSEFHLQEIASWLCEYHTDSTGLSTDSLHDAGFPRALSPGDSVCGMAAVRISSKDMIFWFRSHTAGEVRWGGAKHDPDDRDDARRMHPRSSFKAFLEVVKTRSLPWKDYEMDAIHSLQLILRNAFKDGETTDVNTKVIHSKLNDLKIDGIQELEAVASEMVRLIETATVPILAVDSDGLVNGWNTKISELTGLSVDEAIGKHLLTLVEDSSVEIVKRMLENALEGTEEQNVQFEIKTHLSRADAGPISLVVNAYASRDLHENVVGVCFVAHDLTGQKTVMDKFTRIEGDYKAIIQ

SEQ ID NO: 19542 - protein, 577 aa, Descurainia sophia
DFEPVKPYEVPMTAAGALQSYKLAAKAITRLQSLPSGSMERLCDTMVQEVFELTGYDRVMAYKFHEDDHGEVVSEVTKPGLEPYLGLHYPGTDIPQAARFLFMKNKVRMTVDCNAKHARVLQDEKLSFDLTLCGSTLRAPHSCHLQYMANMDSIASLVMAVVVSEEDGEGDAPDSTTQPQKRKKLWGLVVCHNTTPRFVPFPLRYACEFLAQVFAIHVNKEVELENQMVEKNILRTQTLLCDMLMRDAPLGIVSQSPNIMDLVKCDGAALLYKDKIWKLGTTPSDFHLQEIASWMCEYHTDSTGLSTDSLHDAGFPRALSLGDSVCGMAAVRISSKDMIFWFRSHTAGEVRWGGAKHDPDDRDDARRMHPRSSFKAFLEVVKTRSLPWKDYEMDAIHSLQLILRNAFKDSETTDVNTKVIHSKLNDLKIDGIQELEAVTSEMVRLIETATVPILAVDSDGLVNGWNTKIADLTGLSVDEAIGKHLLTLVEDSSVEIVKRMLENALEGTEEQNVEFEIKTHLSRADAGPISLVVNACASRDLHENVVGVCFVAHDLTGQKTVMDKFTRIEGDYKAIIQ

SEQ ID NO: 19543 - protein, 577 aa, Dithyrea californica
DFEPVKPYEVPMTAAGALQSYKLAAKAITRLQSLPSGSMERLCDTMVQEVFELTGYDRVMAYKFHEDDHGEVVSEVTKPGLEPYLGLHYPATDIPQAARFLFMKNKVRMIVDCNAKHVRVLQDEKLSFDLTLCGSTLRAPHSCHLQYMANMDSIASLVMAVVVNEDDGEGDAPDSTTQPQKRKKLWGLVVCHNTTPRFVPFPLRYACEFLAQVFAIHVNKEVELENQIVEKNILRTQTLLCDMLMRDAPLGIVSQNPNIMDLVKCDGAALLHKDKIWKLGTTPSEYHLHEIASWLCEYHMDSTGLSTDSLHDAGFPMALSLGDSVCGMAAVRISSKDMIFWFRSHTAGEIRWGGAKHDPDDRDDARRMHPRSSFKAFLEVVKTRSLPWKDYEMDAIHSLQLILRNAFKDSETTDVNTKVIHSKLNDLKIDGIQELEAVTSEMVRLIETATVPILAVDSDGLVNGWNTKIAELTGLSVNEAIGQHLLTLVEDSSVEVVKRMLENALEGTEEQNVQFEIKTLPSTTDAGPISLVVNACASRDLHENVVGVCFVAHDLTGQKAVMDKFTRIEGDYKAIIQ

SEQ ID NO: 19544 - protein, 578 aa, Dontostemon senilis
DFEPVKPYEVPMTAAGALQSYKLAAKAITRLQSLPSGSMERLCDTMVQEVFELTGYDRVMAYRFHDDDHGEVVSEVTKPGLEPYLGLHYPATDIPQAARFLFMKNKVRMIVDCNAKHVRVFQDEKLSFDLTLCGSTLRAPHSCHLQYMANMDSIASLVMAVVVNEEDGEGDAPDSTTQPQKRKRLWGLVVCHNTSPRFVPFPLRYACEFLAQVFAIHVNKEVELENQIVEKNILRTQTLLCDMLMRDAPLGIVAQSPNIMDLVKCDGAALLYKDKVWKLGITPSEYQLQEIATWLSEYHTDSTGLSTDSLHDAGFPRALALGDSVCGMAAVKITSKDMIFWFRSHTAGEVRWGGAKHDPEDRDDARRMHPRSSFKAFLEVVKSRSMPWKEYEMDAIHSLQLILRNAFKDGETTDVNNTNIIYSKLNDLKIDGIQELEAVTSEMVRLIETATVPILAVDSDGLVNGWNTKIAELTGLPVDEAIGKHLLTLVEDSSVEIVKRMLENALEGTEEQNVQFEIKTHLSRADAGPISLVVNACASRDLHENVVGVCFVAHDLTGQKTVMDKFTRIEGDYKAIIQ

SEQ ID NO: 19545 - protein, 577 aa, Erysimum capitatum
DFEPVKPYEVPMTAAGALQSYKLAAKAITRLQSLPSGSMERLCDTMVQEVFELTGYDRVMAYKFHDDDHGEVVSEVTKPGLEPYLGLHYPATDIPQAARFLFMKNKVRMIVDCNAKHARVLQDEKLSFDLTLCGSTLRAPHSCHLQYMANMDSIASLVMAVVVNEEDGEGDAPDSTTQPQKRKRLWGLVVCHNTSPRFVPFPLRYACEFLAQVFAIHVNKEVELENQIVEKNILRTQTLLCDMLMRDAPLGIVSQSPNIMDLVKCDGAALLYKEKIWRLGTTPSEFHLQEIASWLCEYHTDSTGLSTDSLHDAGFPRALSLGDSVCGMAAVRISSKDMIFWFRSHTAGEVRWGGAKHDPDDRDDARRMHPRSSFKAFLEVVKTRSLPWKDYEMDAIHSLQLILRNAFKDGETTDVNTKVIHFKLNDLKIDGIQELEAVTSEMVRLIETATVPILAVDSDGLVNGWNTKIAELTGLSVDEAIGKHLLTLVEDSSVEIVKKMLENALEGTEEQNVQFEIKTHLSRADAGPMSLVVNACASRDLHENVVGVCFVAHDLTGQKTVMDKFTRIEGVYKAIIQ

SEQ ID NO: 19546 - protein, 575 aa, Exhalimolobos weddellii
DFEPVKPYEVPMTAAGALQSYKLAAKAITRLQSLPSGSMERLCDTMAQEVFELTGYDRVMAYKFHEDDHGEVVSEVTKPGLEPYLGLHYPATDIPQAARFLFMKNKVRMIVDCNAKHARVLQDEKLSFDLTLCGSTLRAPHSCHLQYMANMDSIASLVMAVVVNEEDGDGDAPDSTTQPQKRKRLWGLVVCHNTTPRFVPFPLRYACEFLAQVFAIHVNKEVELENQIVEKNILRTQTLLCDMLMRDAPLGIVSQSPNIMDLVKCDGAALLYKDKIWKLGTTPSEFHLQEIASWLCEYHTESTGLSTDSLHDAGFPRSLGDPVCGMAAVRISSKDMIFWFRSHTAGEVRWGGAKHDPDDRDDARRMHPRSSFKAFLEVVKTRSLPWKDYEMDAIHSLQLILRNAFKDSETTDVNTKVIHSKLNDLKIDGIQELEAVTSEMVRLIETATVPILAVDSDGLVNGWNTKIAELTGLLVDEAIGKHLLTLVEDSSVDIVKRMLENALEGTEEQNVQFEIKTHLSRADAGPISLVVNACASRDLHENVVGVCFVAHDLTGQKTVMDKFTRIEGDYKAIIQ

SEQ ID NO: 19547 - protein, 577 aa, Hesperis matronalis
DFEPVKPYEVPMTAAGALQSYKLAAKAITRLQSLPSGSMERLCDTMVQEVFELTGYDRVMAYKFHDDDHGEVVSEVTKPGLEPYLGLHYPATDIPQAARFLFMKNKVRMIVDCNAKHVRVFQDEKLSFDLTLCGSTLRAPHSCHLQYMANMDSIASLVMAVVVNEEDGEGDAPDSTAQPQKRKRLWGLVVCHNTSPRFVPFPLRYACEFLAQVFAIHVNKEVELENQIVEKNILRTQTLLCDMLMRDAPLGIVTQSPNIMDLVKCDGAALLYKDKVWKLGTTPSEFQLQEIASWLCEYHTDSTGLSTDSLHDAGFPRALSLGDSVCGMAAVRISSKDMIFWFRSHTAGEVRWGGAKHDPEDRDDARRMHPRSSFKALLEVVKTRSLPWKDYEMDAIHSLQLILRNAFKDGETTDVNTKIIYSKLNDLKIDGMQELEAVTSEMVRLIETATVPILAVDSDGLVNGWNTKIAELTGLPVDEAIGKHFLALIEDSSVEIVKRMLENALEGTEEQNVQFEIKTHLSRADAGPISLVVNACASRDLHENVVGVCFVAHDLTGQKTVMDKFTRIEGDYKAIIQ

SEQ ID NO: 19548 - protein, 577 aa, Hirschfeldia incana
DFEPVKPYEVPMTAAGALQSYKLAAKAITRLQSLPSGSMERLCDTMVQEVFELTEYDRVMAYKFHDDDHGEVVSEVTKPGLEPYLGLHYPTTDIPQAARFLFMKNKVRMIVDCNAKHCRVLQDEKLSFELTLCGSTLRAPHSCHLQYMANMDSIASLVMAVVVNEEDGEGADAPDSTAPQKRKRLWGLVVCHNTTPRFVPFPLRYACEFLAQVFAIHVNKEVELENQIVEKNILRTQTLLCDMLMRDAPLGIVSQSPNIMDLVKCDGAALLYKDKVWKLGITPSDYHLQEIASWLCECHTDSTGLSTDSLHDAGFPRALALGDAVCGMAVVRISSKDMIFWFRSHTAGEVRWGGAKHDPDDRDDARRMHPRSSFKAFLEVVKTRSLPWKDYEMDAIHSLQLILRNAFKDGETTDVNTKIIHSKLNDLKIDGIQELEAVTSEMVRLIETATVPILAVDSDGLVNGWNTKIAEQTGLPVDEAIGKHLLTLVEDSSVEIVKRMLENALEGTEEQNVQFEIKTHLSRADAGPISLVVNACASRDLHENVVGVCFVAHDLTGQKTVMDKFTRIEGDYKAIVQ

SEQ ID NO: 19549 - protein, 574 aa, Hirschfeldia incana
DFEPVKPYEVPMTAAGALQSYKPAAKAITRLQSLPSGSMERLCDTMVQEVFELTGYDRVMAYKFHDDDHGEVVSEVTKPGLEPYLGLHYPATDIPQAARFLFMKNKVRMIVDCNAKHVKVLQDDKLSFDLTLCGSSLRAPHTCHLQYMANMDSIASLVMAVVVNEEDGGEDAETAQKRKRLWGLVVCHNTTPRFVPFPLRYACEFLAQVFAIHVNKEVELENQIVEKNILRTQTLLCDMLMRDAPLGIVSQSPDIMDLVKCDGAALLYKERVWKLGTTPSEFHLQEIASWLCEYHADSTGLSTDSLHDAGFPSALALGDSVCGMAAVRISSRDMIFWFRSHTAGEVRWGGAKHDPDNRDDARRMHPRSSFKAFLEVVKTRSLPWRDYEMDAIHSLQLILRNAFKDGGETTDLNTNAIHSKLNDLKIDGMQELEAVTSEMVRLIETATVPILAVDSDGLVNGWNTKIAELTGLTIDEAIGKHLLTLVEDSSVEIVKRMLEKALEGTEEQNVQFEIKTHLSRADAGQISLVVNACASRDLHESVVGVCFVAHDLTGQKTVMDKFTRIEGDYKAIVQ

SEQ ID NO: 19550 - protein, 577 aa, Hymenolobus procumbens
DFEPVKPYEVPMTAAGALQSYKLAAKAITRLQSLPSGSMERLCDTMVQEVFELTGYDRVMAYKFHDDDHGEVVSEVTKPGLEPYLGLHYPATDIPQAARFLFMKNKVRMIVDCNAKHARVLQDEKLSFDLTLCGSTLRAPHSCHLQYMANMDSIASLVMAVVVNEEDGEGDAPDSTTQPQKRKRLWGLVVCHNTTPRFVPFPLRYACEFLAQVFAIHVNKEVELENQIVEKNILRTQTLLCDMLMRDAPLGIVSQSPNIMDLVKCDGAALLYKDKVWRLGTTPSEFHLQELASWLCEYHTDSTGLSTDSLHDAGFPRALSLGGSVCGMAAVRISSKDMIFWFRSHTAGEVRWGGAKHDPDDRDDARRMHPRSSFKAFLEVVKTRSLPWKDYEMDAIHSLQLILRNAFKDGETTDVNTKVIHSKLNDLKIDGIQELEAVTSEMVRLIETATVPILAVDSDGLVNGWNTKIAELTGLSVDEAIGKHLLTLVEDSSVEIVKRMLESALEGTEEQNVQFEIKTHLSRADAGPISLVVNACASRDLHENVVGVCFVAHDLTGEKTVMDKFTRIEGDYKAIIQ

SEQ ID NO: 19551 - protein, 577 aa, Ianhedgea minutiflora
DFEPVKPYEVPMTAAGALQSYKLAAKAITRLQSLPSGSMERLCDTMVQEAFELTGYDRVMAYKFHEDDHGEVVSEVTKPGLEPYLGLHYPATDIPQAARFLFMKNKVRMIVDCNAKHARVLQDEKLSFDLTLCGSTLRAPHSCHLQYMANMDSIASLVMAVVVNEEDGEGDAPDSTIQPQKRKRLWGLVVCHNTTPRFVPFPLRYACEFLAQVFAIHVNKEVELENQMVEKNILRTQTLLCDMLMRDAPLGIVSQSPNIMDLVKCDGAALLYKDKIWKLGNTPSDFHLQEITSWLCENHTDSTGLSTDSLHDAGFPRALSLGDSVCGMAAVRISSKDMIFWFRSHTAGEVRWGGAKHDPDDRDDARRMHPRSSFKAFLEVVKTRSLPWKDYEMDAIHSLQLILRNAFKDGETTDVNTRVIHSKLNDLKIDGIQELEAVTSEMVRLIETATVPILAVDSDGLVNGWNTKIAELTGLSVDEAIGKHFLTLVEDSSVEIVKRMLENALEGTEEQNVEFEIKTHLSRADAGPISLVVNACASRDLHENVVGVCFVAHDLTGQKTVMDKFTRIEGDYKAVIQ

SEQ ID NO: 19552 - protein, 579 aa, Idahoa scapigera
VKPYEVPMTAAGALQSYKLAAKAVTRLQSLPSGSTERLCDTMVQEVFELTGYDRVMAYKFHDDDHGEVVSEVTKPGLETYLGLHYPATDIPQASRFLFMKNKVRMIVDCNAKHATVLQDEKLSFELTLCGSTLRAPHSCHLQYMANMGSIASLVMAVVVNEEDGEVDAAPPDSSSTTQPQKRKRLWGLVVCHNTTPRFVPFPLRYACEFLAQVFAIHVNKEVELENQYVEKNILRTQTLLCDMLMRDAPLGIVTQSPNIMDLVKCDGAALLYKDKIWKLGITPSEFHLQEIASWLCEYHTDSTGLSTDSLHDAGFPKALALGDSVCGMAAVRISSSSEDMIFWFRSHTAGEVRWGGAKHDPDDRDDARRMHPRSSFKAFLEVVKTRSLPWKDYEMDATHSLQLILRNAFKDGETTDDNTNIIHSKLNDLKIDGIQELEAITSEMVRLIETATVPILAVDSDGLVNGWNTKIADLTGLPVDEAIGKHLLSLVEDSSLEIVKRMLENALQGTEEHSVEFEIKTYQSMAESGPISLVVNACASRDLHENVVGVCFVAHDLTGQKTVMDKFTWIEGDYKAILQ

SEQ ID NO: 19553 - protein, 577 aa, Idahoa scapigera
DFEPVKPYEIPMTAAGALQSYKLAAKAITRLQALPSGSMERLCDTMVQEVFELTGYDRVMAYKFHEDDHGEVVSEVTKPGLEPYLGLHYPATDIPQAARFLFMKNKVRMIVDCNARHVKVLQDEQLSSDLTLCGSTLRAPHSCHAQYMANMDSIASLVMAVVVNEEDGEGDAPDSTTQPQKRKKLWGLVVCHNLTPRFVPFPLRYACEFLAQVFAIHVNKEVELENQIVEKNILRTQTLLCDMLMRDAPLGIVSQSPNIMDLVKCDGAALLYKDKIWKLGITPKDYHLQELASWLCECHTDSTGLSTDSLHDAGFPRALALGDSVCGMAAVKISSKDMIFWFRSHTAGEVRWGGAKHDPDDRDDARRMHPRSSFKAFLEVVKTRSSPWKDYEMDAIHSLQLILRNAFKDGESTDGNTKIIHSKLNDMKIDGIQELEAVTSEMVRLIETATVPILAVDSDGLVNGWNTKIAELTGLPVDEAIGRHLLNLVEDSSVEIVKRMLENALEGTEEQDVQFEIKTHMSRADAGPISLVVNACASKDLHENVVGVCFVAHDLTGQKTVMDKFTRIEGDYKAIIQ

SEQ ID NO: 19554 - protein, 576 aa, Isatis tinctoria
DFEPVKPYEVPMTAAGALQSYKLAAKAITRLQSLPSGSMERLCDTMVQEVFELTGYDRVMAYKFHDDDHGEVVSEVTKPGLEPYLGLHYPATDIPQAARFLFMKNKVRMIVDCNAKHVRVLQDEKLSFDLTLCGSTLRAPHSCHLQYMANMDSIASLVMAVVVNEEDGEGDAPDATIPQKRKRLWGLVVCHNTTPRFVPFPLRYACEFLAQVFAIHVNKEVELENQIVEKNILRTQTLLCDMLMRDAPLGIVTQSPNIMDLVKCDGAALLYKDKVWKLGITPSEFHLQEIASWLCEYHTDSTGLSTDSLHDAGFPRALALGDSVCGMAAVRISSRDMIFWFRSHTAGEVRWGGAKHDPDDRDDARRMHPRSSFKAFLEVVKTRSLPWKDYEMDAIHSLQLILRNAFKDGEATDVNTKIIHSKLNDLKIDGIQELEAVTSEMVRLIETATVPILAVDSDGLVNGWNTKIAELTGLPVDEAIGKHLLTLVEDSSVEIVKRMLENALEGTEEQNVQFEIKTHLSRADAGPISLVVNACASRDLHENVVGVCFVAHDLTGQKTVMDKFTRIEGDYKAIIQ

SEQ ID NO: 19555 - protein, 577 aa, Lepidium draba
DFEPVKPYEVPMTAAGALQSYKLAAKAITRLQSLPSGSMEGLCDTMVQEVFELTGYDRVMAYKFHEDDHGEVVSEVTKPGLEPYLGLHYPATDIPQAARFLFMKNKVRMIVDCNAKHARVLQDEKLSFDLTLCGSTLRAPHSCHLQYMANMESIASLVMAVVVNEEDGEGDAPDSTTQPQKRKRLWGLVVCHNTSPRFVPFPLRYACEFLAQVFAIHVNKEVELENQIVEKNILRTQTLLCDMLMRDAPLGIVTQSPNIMDLVKCDGAALLYKDKVWTLGTTPSEFHLQEIASWLCEYHTDSTGLSTDSLHDAGFPRALSLGDSVCGMAAVRISSKDMIFWFRSHTAGEVRWGGAKHDPDDRDDARRMHPRSSFKAFLEVVKTRSLPWKDYEMDAIHSLQLILRNAFKDGETTDVNTKVIHSKLNDLKIDGIQELEAVTSEMVRLIETAMVPILAVDSDGLVNGWNTKIAELTGLPVDEAIGKHFLTLVEDSSVEIVKRMLENALEGNEEQNVQFEIKTHLSRADAGPISLVVNACASRDLHENVVGVCFVAHDLTGQKTVMDKFTRIEGDYKAIIQ

SEQ ID NO: 19556 - protein, 577 aa, Lunaria annua
DFEPVKPYEVPMTAAGALQLYKLAARAITRLQSLPSGSMERLCDTMVQEVFELTGYDRVMAYKFHDDDHGEVVSEVTKPGLEPYLGLHYPATDIPQAARFLFMKNKVRMIVDCNAKHARVLQDEKLSFDLTLCGSTLRAPHSCHLQYMANMDSIASLVMAVIVNEEDGEGDAPDSTTQPQKRKRLWGLVVCHNTTPRFVPFPLRYACEFLAQVFAIHVNKEVELEYQIVEKNILRTQTLLCDMLMRDAPLGIVSQSPNIMDLVKCDGAALLYKDKIWKLGITPSEFHLQEIASWLCEYHTDSTGLSTDSLHDAGFPRALALGDSVCGMAGARISSKDMIFWFRSHTAGEVRWGGAKHDPDDRGDARRMHPRSSFKAFLEVVKTRSLPWKDYEMDAIHSLQLILRDAFKDGEATDANTKIIHSKLNDLKLDGIQELEAVTSGMVRLIETATVPILAVDSDGLVNGWNTKIAELTGLPVDEAIGNHLLTLVEDSSVEIVKRMLENALEGTEEQSVQFEIKTHLSRADAGPISLVVNACASRDLHENVVGVCFVAHDLTGQKTVMDKFTRIEGDYKAIIQ

SEQ ID NO: 19557 - protein, 569 aa, Neotorularia korolkowii
EVPMTAAGALQSYKLAAKAITRLQSLPSGSMERLCDTMVQEVFELTGYDRVMAYKFHEDDHGEVVSEVTKPGLEPYLGLHYPATDIPQAARFLFMKNKVRMIVDCNAKHVRVFQDEKLSFDLTLCGSTLRAPHSCHLQCMANMDSIASLVMAVVVNEEDGEGDAPDSTAQPQKRKRLWGLVVCHNTSPRFVPFPLRYACEFLAQVFAIHVNKEVELENQIVEKNILRTQTLLCDMLIRDAPLGIVTQSPNVMDLVKCDGAALLYKDKVWKLGITPSDYQLQEIASWLCEYHTDSTGLSTDSLHDAGYPRALSLGDSVCGMAAVRISTKDMIFWFRSHTAGEVRWGGAKHDPDDKDDARRMHPRSSFKAFLEVVKTRSLPWKDYEMDAIHSLQLILRNALKDGEPTDVNTKIIHSKLNDLKIDGMQELEAVTSEMVRLIETATVPILAVDSDGSVNGWNTKIAELTGLPVDEAIGKHFLTLVEDSSVEIVKRMLENALEGTEEQNVQFEIKTHLLRADAGPISLVVNACASRDLHENVVGVCFVAHDLTGQKTVMDKFTRIEGDYKAIIQ

SEQ ID NO: 19558 - protein, 577 aa, Olimarabidopsis pumila
DFEPVNPYEVPMTAAGALQSYKLAAKAITRLQSLPSGSMERLCDTMVQEVFELTGYDRVMAYKFHEDDHGEVVSEVTKPGLEPYLGLHYPATDIPQAARFLFMKNKVRVIVDCNAKHARVLQDEKLSFDLTLCGSTLRAPHSCHLQYMANMDSIASLVMAVVVNEEDGEGDAPDSTTQPQKRKRLWGLVVCHNTTPRFVPFPLRYACEFLAQGFAIHVNKEVELENQIVEKNILRTQTLLCDMLMRDAPLGIVSQSPNIMDLVKCDGAALLYKDKIWKLGTTPSEFHLQEISSWLCECHTDSTGLSTDSLHDAGFPRALSLGDSVCGMAAVRISSKDMIFWFRSHTAGEVRWGGAKHDPDDRDDARRMHPRSSFKAFLEVVKTRSLPWKDYEMDAIHSLQLILRNAFKDSETTDVNTKVIHSKLNDLKIDGIQELEAVTSEMVRLIETATVPILAVDSDGLVNGWNTKIAELTGLSVDEAIGKHFLTLVEDSSVEIVKRMLENALEGTEEQNVQFEIKTHLSRADAGPISLVVNACASRDLHENVVGVCFVAHDLTGQKTVMDKFTRIEGDYKAIIQ

SEQ ID NO: 19559 - protein, 577 aa, Polyctenium fremontii
DFEPVKPYEVPMTAAGALQSYKLAAKAITRLQSLPSGSMERLCDTMVQEVFELTGYDRVMAYKFHDDDHGEVVSEVTKPGLEPYLGLHYPATDIPQAARFLFMKNKVRMIVDCNAKHARVLQDEKLSFDLTLCGSTLRAPHSCHLQYMANMDSIASLVMAVVVNEDDGEGDIPDSTTQPQKRKRLWGLVVCHNTTPRFVPFPLRCACEFLAQVFAIHVNKEVELDNQIVEKNILRTQTLLCDMLMRDAPLGIVSQSPNIMDLVKCDGAALLYKDKIWKLGTTPSEFHLQEIASWLCIYHTDSTGLSTDSLHDAGFPRALSLGDSVCGMAAVRISSTDMIFWFRSHTAGEVRWGGAKHDPDDRDDARRMHPRSSFKAFLEVVKTRSLPWKDYEMDAIHSLQLILRNAFKDSETTDVNTKVIHSKLNDLKIDGIQELEAVTSEMVRLIETATVPILAVDSDGLVNGWNTKIAELTGLSVDEAIGMHLLTLVEDSSVEIVKRMLENALEGSEEQNVQFEIKTHLSRADAGPISLVVNACASRDLHENVVGVCFVAHDLTGQKTVMDKFTRIEGDYKAIIQ

SEQ ID NO: 19560 - protein, 578 aa, Sisymbriopsis mollipila
DFEPVKPYEVPMTAAGALRSYKLAAKAITRLQSLPSGSMERLCDTMVQEVFELTGYDRVMAYKFHEDDHGEVVSEVTKPGLEPYLGLHYPATDIPQAARFLFMKNKVRMIVDCNAKHVRVFQDEKLSFDLTLCGSTLRAPHSCHLQYMANMDSIASLVMAVVVNEEDGEGGDAPDSTAQPQKRKRLWGLVVCHNTSPRFVPFPLRYACEFLAQVFAIHVNKEVELENQIVEKNILRTQTLLCDMLMRDAPLGIVTQSPNVMDLVKCDGAALLYKDKIWKLGITPSDYQLQEIASWLCEYHTDSTGLSTDSLHDAGFPRALSLGDSVCGMAAVRISTKDMIFWFRSHTAGEVRWGGAKHDPDDKDDARRMHPRSSFKAFLEVVKTRSLPWKDYEMDAIHSLQLILRNAFKDGETTDVNTKIIHSKLNDLKIDGMQELEAVTSEMVRLIETATVPILAVDSDGLVNGWNTKIAELTGLPVDEAIGKHFLTLVEDSSVEIVKKMLENALEGTEDQNVQFEIKTHLSRADAGPISLVVNACASRDLHENVVGVCFVAHDLTGQKTVMDKFTRIEGDYKAIIQ

SEQ ID NO: 19561 - protein, 578 aa, Sisymbriopsis yechengnica
DFEPVKPYEVPMTAAGALQSYKLAAKAITRLQSLPSGSMERLCDTMVQEVSELTGYDRVMAYKFHEDDHGEVVSEVTKPGLEPYLGLHYPATDIPQAARFLFMKNKVRMIVDCNAKHVRVIQDEKLSFDLTLCGSTLRAPHSCHLQYMANMDSIASPVMAVVVNEEDGEGGDAPDSTAQPQKRKRLWGLVVCHNTSPRFVPFPLRYACEFLAQVFAIHVNKEVELENQIVEKNILRTQTLLCDMLMRDAPLGIVTQSPNVMDLVKWDGAALLYKDKIWKLGITPSDYQLQEIASWLCEYHTDSTGLSTDSLHDAGFPRALSLGDSVCGMAAVRISTKDMIFWFRSHTAGEVRWGGAKHDPDDKDDARRMHPRSSFKAFLEVVKTRSLPWKDYEMDAIHSLQLILRNAFKDGETTDVNTKIIHSKLNDLKIDGMQELEAVTSEMVRLIETATVPILAVDSDGLVNGWNTKIAELTGLPVDEAIGKHFLTLVEDSSVEIVKKMLENALEGTEDQNVQFEIKTHLSRADAGPISLVVNACASRDLHENVVGVCFVAHGLTGQKTVMDKFTRIEGDYKAIIQ

SEQ ID NO: 19562 - protein, 575 aa, Sisymbriopsis yechengnica
EPVKPYEVPMTAAGALQSYKLAAKAITRLQSLPSGSMERLCDTMVQEVFELTGYDRVMAYKFHEDDHGEVVSEVTKPGLEPYLGLHYPATDIPQAARFLFMKNKVRMIVDCNAKHVRVFQDEKLSFDLTLCGSTLRAPHSCHLQYMANMDSIASLVMAVVVNEEDGEGDDPDSPAQPQKRKRLWGLVVCHNTSPRFVPFPLRYACEFLAQVFAIHVNREVELENQIVEKNILRTQTLLCDMLMRDAPLGIVTQSPNIMDLAKCDGAALLYKDKIWKLGITPSEYQLQEIASWLCEYHTDSTGLSTDSLHDAGFPRALSLGDSVCGMAAVRISTKDMIFWFRSHTAGEVRWGGAKHDPDDKDDARRMHPRSSFKAFLEVVKTRSLPWKDYEMDAIHSLQLILRNAFKDGETTDVNTKIIHSKLNDLKIDGIQELEAVTSEMVRLIETATVPILAVDSDGLVNGWNTKIAELTGLPVDEAIGKHLLTLVEDSSMEIAKRMLENALEGTEEQNVQFEIKTHLSRADAGPISLAVNACASRDLHENVVGVCFVAHDLTGQKTVMDKFTRIEGDYKAIIQ

SEQ ID NO: 19563 - protein, 576 aa, Sisymbrium altissimum
DFEPVKPYEVPMTAAGALQSYKLAAKAITRLQSLPSGSMERLCDTMVQEVFELTGYDRVMAYKFHDDDHGEVVSEVTKPGLEPYLGLHYPATDIPQAARFLFMKNKVRMIVDCNAKHVRVLQDEKLSFDLTLCGSTLRAPHSCHLQYMANMDSIASLVMAVVVNEEDGEEDASNSTTPQKRKRLWGLVVCHNTTPRFVPFPLRYACEFLAQVFAIHVNKEVELENQIVEKNILRTQTLLCDMLMRDAPLGIVSQSPNIMDLVKCDGAALLYKDKVWKLGITPSEFHLQEIASWLCEYHTDSTGLSTDSLHDAGFPRALALGDSVCGMAAVRISSKDMIFWFRSHTAGEVRWGGAKHDPDDRDDARRMHPRSSFKAFLEVVKTRSLPWKDYEMDAIHSSQLILRNAFKDGETTDVNTKIIHSKLNDLKIGGIQELEAVTSEMVRLIETATVPILAVDSDGLVNGWNTKIAELTGLPVDEAIGKHLLTLVEDSSVEIVKRMLENALEGTEEQNVQFEIKTHLSRADAGPISLVVNACASRDLHENVVGVCFVAHDLTGQKTVMDKFTRIEGDYKAIIQ

SEQ ID NO: 19564 - protein, 576 aa, Schoenocrambe linifolia
DFEPVKPYEVPMTAAGALQSYKLAVKAITRLQSLPSGSMERLCDTMVQEVFELTGYDRVMAYKFHDDDHGEVVSEVTKPGLEPYLGLHYPATDIPQAARFLFMKNKVRMIVDCNAKHVRVLQDEKLSFDLTLCGSTLRAPHSCHLRYMANMDSIASLVMAVVVNEEDGEGDAPDSTTPQKRKRLWGLVVCHNTTPRFVPFPLRYACEFLAQVFAIHVNKEVELENQIVEKNILRTQTLLCDMLMRDAPLGIVSQSPNIMDLVKCDGAALLYIDKVWKLGITPSDFHLQEIASWLSEYHTDSTGLSTDSLHDAGFPRALALGDSVCGMAAVRISSKDMIFWFRSHTAGVVRWGGAKHDPDDRDDARRMHPRSSFKAFLEVVKTRSLPWKDYEMDAIHSLQLILRNAFKDGETTDVNTKIIHSKLNDLKIDGIQELEAVTSEMVRLIETATVPILAVDSDGLVNGWNTKIAELTGLPVDEAIGRHLLTLVEDSSVEIVKRMLENALEGTEEQNVQFEIKTHLSRADAGPISLVVNACVSRDLHENVVGVCFVAHDLTGQKSVMDKFTRIEGDYKAIVQ

SEQ ID NO: 19565 - protein, 577 aa, Sophiopsis annua
DFEPVKPYEVPMTAAGALQSYKLAAKAITRLQSLPSGSMERLCDTMVQEVFELTGYDRVMAYKFHEDDHGEVVSEVTKPGLDPYLGLHYPAADIPQAARFLFMKNKVRMIVDCNAKHARVLQDEKLSFDLTLCGSTLRAPHSCHLQYMANMDSIASLVMAVVVNEEDGEGDAPDSTTQPQKGKRLWGLVVCHNTTPRFVPFPLRYACEFLAQVFAIHVNKEVELENQIVEKNILRTQTLLCDMLMRDAPLGIVTQSPNVMDLVKCDGAALLYKDKIWKLGTTPCEFHLQEIASWLCEYHMDSTGLSTDSLHDAGFPRALSLGDSVCGMAAVRISSKDMIFWFRSHTAGEVRWGGAKHDPDDKDDARRMHPRSSFKAFLEVVKTRSLPWKDYEMDAIHSLQLILRNAFKDGETTDMNTKVIHSKLNDLKIDGIQELEAVTSEMVRLIETATVPILAVDSDGLVNGWNTKIAELTGLSVDEAIGRHFLTLVEDSSVEVVKRMLEAALEGTEEQNVQFEIKTHLSRADAGPISLVVNACASRDLHENVVGVCFVAHDLTGQKTVMDKFTRIEGDYKAIIQ

SEQ ID NO: 19566 - protein, 577 aa, Smelowskia calycina
DFEPVKPHEVPMTAAGALQSYTLAAKAITRLQSLPSGSMERLCDTMVQEVFELTGYDRVMAYKFHEDDHGEVVSEVTKPGLDPYLGLHYPATDIPQAARFLFMKNKVRMIVDCNAKHARVLQDEKLSFDLTLCGSTLRAPHSCHLQYMANMDSIASLVMAVVVNEEDGEGDAPDSTTQPQKRKRLWGLVVCHNTTPRFVPFPLRYACEFLAQVFAIHVNKEVELENQIVEKNILRTQTLLCDMLMRDAPLGIVTQSPNIMDLVKCDGAALLYKDKIWKLGTTPSEFHLQEIASWLCEYHMDSTGLSTDSLHDAGFPRALSLGDSVCGMAAVRISSKDLIFWFRSHTAGEVRWGGAKHDPDDRDDARRMHPRSSFKAFLEVVKTRSLPWKDYEMDAIHSLQLILRNAFKDGETTDMNTKVIHSKLNDLKIDGIQELEAVTSEMVRLIETATVPILAVDSDGLVNGWNTKIAELTGLSVDEAIGRHLLTLIEDSSVEIVKRMLENALEGTEEQNVQFEIKTHLSRADAGPISLVVNACASRDLHENVVGVCFVAHDLTGQKTVMDKFTRIEGDYKAIIQ

SEQ ID NO: 19567 - protein, 573 aa, Hedinia tibetica
VKPYEVPMTAAGALQSYKLAAKAITRLQSLPSGSMERLCDTMVQEVFELTGYDRVMAYKFHEDDHGEVVSEVTKPGLDPYLGLHYPATDIPQAARFLFMKNKVRMIVDCNAKHARVLQDEKLSFDLTLCGSTLRAPHSCHLQYMANMDSIASLVMAVVVNEEDGEGDAPDSTTQPQKRKRLWGLVVCHNTTPRFVPFPLRYACEFLAQVFAIHVNKEVELENQIVEKNILRTQTLLCDMLMRDAPLGIVTQSPNVKDLVKCDGAALLYKDKIWKLGTTPSEFHLQEIASWLCEYHMDSTGLSTDSLHDAGFPRALSLGDSVCGMAAVRISSKDLIFWFRSHTAGEVRWGGAKHDPDDRDDARRMHPRSSFKAFLEVVKTRSTPWKDYEMDAIHSLQLILRNAFKDGETTDMNTKVIHSKLNDLKIDGIQELEAVTSEMVRLIETATVPILAVDSDGLVNGWNTKIAELTGLSVDEAIGRHLHTLAEDSSVEIVKRMLENALEGTEEQNVQFEIKTHLSRADAGPISLVVNACASRDLHENVVGVCFVAHDLTGQKTVMDKFTRIEGDYKAIIQ

SEQ ID NO: 19568 - protein, 576 aa, Stanleya pinnata
DFEPVKPYEVPMTAAGALQSYKLAAKAITRLQSLPSGSMERLCDTMVQEVFELTGYDRVMAYKFHDDDHGEVVSEVTKPGLDPYLGLHYPATDIPQAARFLFMKNKVRMIVDCNAKHVRVLQDEKLSFDITLCGSTLRAPHSCHLQYMANMDSIASLVMAIVVNEEDGEGDAPDSTTPQKRKRLWGLVVCHNTTPRFVPFPLRYACEFLAQVFAIHVNKEVELENQIVEKNILRTQTLLCDMLMRDAPLGIVTQSPNIMDLVKCDGAALLYKDKVWKLGTTPNEFHLQEIASWLCEYHTDSTGLSTDSLHDAGFPRALALGDSVCGMAAVRISSKDMIFWFRSHTAGEVRWGGAKHDPDDRDDARRMHPRSSFKAFLEVVKTRSLPWKDYEMDAIHSLQLILRNAFKDGETTDVNTKIIHSKLNDLKIDGIQELEAVTSEMVRLIETATVPILAVDSDGLVNGWNTKIAELTGLLVDEAIGKHLLTLVEDSSVEIVKRMLENALEGTEEQNVQFEIKTHLSRADAGPISLVVNACASRDLHENVVGVCLVAHDLTGQKTVMDKFTRIEGDYKAIIQ

SEQ ID NO: 19569 - protein, 576 aa, Stanleya pinnata
DFEPVKPYEVPMTAAGALQSYKLAAKAITRLQSLPSGSMERLCDTMVQEVFELTGYDRVMAYKFHDDDHGEVVSEVTKPGLEPYLGLHYPATDIPQAARFLFMKNKVRMIVDCNAKHVRVLQDEKLSFDLTLCGSTLRAPHSCHLQYMANMDSIASLVMAVVVNEEDGEGDAPDSTTPQKRKRLWGLVVCHNTTPRFVPFPLRYACEFLAQVFAIHVNKEVELENQIVEKNILRTQTLLCDMLMRDAPLGIVSQSPNIMDLVKCDGAALLYKDKVWKLGITPSEFHLQEIASWLCENHTDSTGLSTDSLHDAGFPRALALGDSVCGMAAVRISSKDMIFWFRSHTAGEVRWGGAKHNPDDRDDARRMHPRSSFKAFLEVVKTRSLPWKDYEMDAIHSLQLILRNAFKDGDTTDVNTKIIHSKLNDLKIDGIQELEAVTSEMDRLIETATVPILAVDSDGLVNGWNTKIAELTGLPVDEAIGKHLLSVVEDSSVETVKRMLENALEGTEEQNVQFEIKTHLSSADAGPISLVVNACTSRDLHENVVGVCFVAHDLTGQKTVMDKFTRIEGDYKAIIQ

SEQ ID NO: 19570 - protein, 577 aa, Malcolmia africana
DFEPVKPYEVPMTAAGALQSYKLAAKAITRLQSLPSGSMERLCDTMVQEVFELTGYDRVMAYKFHEDDHGEVVSEVTKPGLEPYLGLHYPATDIPQAARFLFMKNKVRMIVDCNAKHVRVFQDEKLSFDLTLCGSTLRAPHSCHLQYMANMDSIASLVMAVVVNEEDGEGDAPDSTAQPQKRKRLWGLVVCHNTSPRFVPFPLRYACEFLAQVFAIHVNKEVELENQIVEKNILRTQTLLCDMLMRDAPLGIVTQSPNVMDLVKCDGAALLYKDKVWKLGITPSDYQLQEIASWLCEYHTDSTGLSTDSLHDAGYPRALSLGDSVCGMAAVKISTKDMIFWFRSHTAGEVRWGGAKHDPDDKDDARRMHPRSSFKAFLEVVKTRSLPWKDYEMDAIHSLQLILRNAFKDGEPTDVSTKIIHSKLNDLKIDGMQELEAVTSEMVRLIETATVPILAVDSDGLVNGWNTKIAELTGLPVDEAIGKHLLTLVEDSSVEIVKRMLENALEGTEEQNVQFEIKTHLSRADAGPISLVVNACASRDLHENVVGVCFVAHDLTGQKTVMDKFTRIEGDYKAIIQ

SEQ ID NO: 19571 - protein, 577 aa, Synthlipsis greggii
DFEPVKPYEVPMTAAGALQSYKLAAKAITRLQSLPSGSMERLCDTMVQEVFELTGYDRVMAYKFHEDDHGEVVSEVTKPGLEPYLGLHYPATDIPQAARFLFMKNKVRMIVDCNAKHVRVLQDEKLSFDLTLCGSTLRAPHSCHLQYMANMDSIASLVMAVVVNEEDGEGDAPDSTIQPQKRKKLWGLVVCHNTTPRFVPFPLRYACEFLAQVFAIHVSKEVELENQIVEKNILRTQTLLCDMLMRDAPLGIVSQNPNIMDLVKCDGAALLHKDKIWKLGTTPSEFHMHEIASWLCEYHMDSTGLSTDSLHDAGFPMALSLGDSVCGMAAVRISSKDMIFWFRSHTAGEIRWGGAKHDPDDRDDARRMHPRSSFKAFLEVVKTRSLPWKDYEMDAIHSLQLILRNAFKDGETIDENTKVIHSKLNDLKIDGIQELEAVTNEMVRLIETATVPILAVDSDGLVNGWNTKIAELTGLSVNEAIGKQLLTLVEDSSVEIVKRMLENALEGNEEQNVQFEIKTLPSKADAGPISLVVNACTSRDLHENVVGVCFIAHDLTGQKAVMDKFTRIEGDYKAIIQ

SEQ ID NO: 19572 - protein, 577 aa, Thlaspi arvense
DFEPVKPYEVPMTAAGALQSYKLAAKAITRLQSLPSGSMERLCDTMAQEVFELTGYDRVMAYKFHDDDHGEVVSEVTKPGLEPYLGLHYPATDIPQAARFLFMKNKVRMIVDCNAKHVRVLQDEKLSFDLTLCGSTLRAPHSCHLQYMANMDSIASLVMAVVVNEEDGEGDAPDSTTQPQKRKRLWGLVVCHNTTPRFVPFPLRYACEFLAQVFAIHVNKEVELENQIVEKNILRTQTLLCDMLMRDAPLGIVSQSPNIMDLVKCDGAALLYKDKIWKLGTTPSDFHLQEIASWLCEYHTDSTGLSTDSLHDAGFPRALALGDSVCGMAAVRISSKDMIFWFRSHTAGEVRWGGAKHDPDDRDDARRMHPRSSFKAFLEVVKTRSLPWKDYEMDAIHSLQLILRNAFKDGETTDVNTKIIHSKLNDLKIDGIQELEAVTSEMVRLIETATVPILAVDSDGLVNGWNTKIAELTGLSVDEAIGKHLLTLVEDSSMEIVKRMLENALEGTEEQNVQFEIKTHLSRADAGPISLVVNACASRDLHENVVGVCFVAHDLTGQKTVMDKFTRIEGDYKAIIQ

SEQ ID NO: 19573 - protein, 577 aa, Turritis glabra
  misc_feature (382)..(382): Xaa can be any naturally occurring amino acid
  unsure (1)..(577): unsure at all Xaa locations
DFEPVKPYEVPMTAAGALQSYKLAAKAITRLQSLPSGSMERLCDTMVQEVFELTGYDRVMAYKFHEDDHGEVVSEVTKPGLEPYLGLHYPATDIPQAARFLFMKNKVRMIVDCNAKHARVLQDEKLSFDLTLCGSTLWAPHSCHLQYMANMDSIASLVVAVVVNEEDGEGDAPDSTTQPQKRKRLWGLVVCHNTTPRFVPFPLRYACEFLAQVFAIHVNKEVELENQIVEKNILRTQTLLCDMLMRDAPLGIVSQSPNIMDLVKCDGAALLYKDKIWKLGTTPSEFHLQEIASWLCEYHTDSTGLSTDGLHDAGFPRALSLGDSVCGMAAVRISSKDMIFWFRSHTAGEVRWGGAKHDPDDRDDARRMHPRSSFKAFLEVVXTRSLPWKDYEMDAIHSLQLILRNAFKDGETTDVNTKVIHSKLNDLKIDGIQELEAVTSEMVRLIETATVPILAVDSDGLVNGWNTKIAELTGLSVDEAIGKHLLTLVEDSSVEIVKRMLEKALEGTEEQNVQFEIKTHLSRADAGPISLVVNACASGDLHESVVGVCFVAHDLTGQKTVMDKFTRIEGDYKAIIQ

SEQ ID NO: 19574 - protein, 177 aa, Capsella rubella
SYFGINLKPICKPSEVSYTIMPNMAYFEFLPHEVATEASELVELADVEIGKEYELVITTYAGLNRYRVGDILQVTAFYNSAPQFKFVRRKNVLLSIESDKTDEAELQGAVEKASMLLREQGTRVIEYTSYAETKTIPGHYVIYWELLMKDQTNPPSNEVMAQCCLEMEESLNSVYRQ

SEQ ID NO: 19575 - protein, 177 aa, Capsella grandiflora
SYFGINLKPICKPSEVSYTIMPNMAYFEFLPHEVATEASELVELADVEIGKEYELVITTYAGLNRYRVGDILQVTGFYNSAPQFKFVRRKNVLLSIESDKTDEAELQGAVENASMLLREQGTRVIEYTSYAETKTIPGHYVIYWELLMKDQTNPPSNEVMAQCCLEMEESLNSVYRQ

SEQ ID NO: 19576 - protein, 177 aa, Capsella grandiflora
  misc_feature (115)..(115): Xaa can be any naturally occurring amino acid
  unsure (1)..(177): unsure at all Xaa locations
SYFGINLKPICKPSEVSYTIMPNMAYFEFLPHEVATEASELVELADVEIGKEYELVITTYAGLNRYRVGDILQVTGFYNSAPQFKFVRRKNVLLSIESDKTDEAELQGAVENASXLLREQGTRVIEYTSYAETKTIPGHYVIYWELLMKDQTNPPSNEVMAQCCLEMEESLNSVYRQ

SEQ ID NO: 19577 - protein, 177 aa, Capsella grandiflora
SYFGINLKPICKPSEVSYTIMPNMAYFEFLPHEVATEASELVELADVEIGKEYELVITTYAGLNRYRVGDILQVTGFYNSAPQFKFVRRKNVLLSIESDKTDEAELQGAVENASLLLREQGTRVIEYTSYAETKTIPGHYVIYWELLMKDQTNPPSNEVMAQCCLEMEESLNSVYRQ

SEQ ID NO: 19578 - protein, 177 aa, Capsella grandiflora
SYFGINLKPICKPSEVSYTIMPNMAYFEFLPHEVATEKTELVELADVEVGKEYELVITTYAGLNRYRVGDILQVTGFYNSAPQFKFVRRKNVLLSIESDKTDEAELQGAVENASMLLREQGTRVIEYTSYAETKTIPGHYVIYWELLMKDQTNPPSNEVMAQCCLEMEESLNSVYRQ

SEQ ID NO: 19579 - protein, 177 aa, Capsella grandiflora
  misc_feature (76)..(76): Xaa can be any naturally occurring amino acid
  misc_feature (112)..(112): Xaa can be any naturally occurring amino acid
  unsure (1)..(177): unsure at all Xaa locations
SYFGINLKPICKPSEVSYTIMPNMAYFEFLPHEVATEASELVELADVEIGKEYELVITTYAGLNRYRVGDILQVTXFYNSAPQFKFVRRKNVLLSIESDKTDEAELQGAVEXASMLLREQGTRVIEYTSYAETKTIPGHYVIYWELLMKDQTNPPSNEVMAQCCLEMEESLNSVYRQ

SEQ ID NO: 19580 - protein, 177 aa, Capsella grandiflora
  misc_feature (76)..(76): Xaa can be any naturally occurring amino acid
  misc_feature (162)..(162): Xaa can be any naturally occurring amino acid
  unsure (1)..(177): unsure at all Xaa locations
SYFGINLKPICKPSEVSYTIMPNMAYFEFLPHEVATEASELVELADVEIGKEYELVITTYAGLNRYRVGDILQVTXFYNSAPQFKFVRRKNVLLSIESDKTDEAELQGAVENASMLLREQGTRVIEYTSYAETKTIPGHYVIYWELLMKDQTNPPSNEVMAXCCLEMEESLNSVYRQ

SEQ ID NO: 19581 - protein, 177 aa, Capsella grandiflora
SYFGINLKPICKPSEVSYTIMPNMAYFEFLPHEVATEASELVELADVEIGKEYELVITTYAGLNRYRVGDILQVTGFYNSAPQFKFVRRKNVLLSIESDKTDEAELQGAVENASLLLREQGTRVIEYTSYAETKTIPGHYVIYWELLMKDQTNPPSNEVMAQCCLEMEDSLNSVYRQ

SEQ ID NO: 19582 - protein, 177 aa, Capsella grandiflora
SYFGINLKPICKPSEVSYTIMPNMAYFEFLPHEVATEASELVELADVEIGKEYELVITTYAGLNRYRVGDILQVTGFYNSAPQFKFVRRKSVLLSIESDKTDEAELQGAVENASLLLREQGTRVIEYTSYAETKTIPGHYVIYWELLMKDQTNPPSNEVMAQCCLEMEESLNSVYRQ

SEQ ID NO: 19583 - protein, 260 aa, Dasypyrum villosum
SRLRHPNIVPLTGYCVEHAQRLLVYEYIGNATLHDMLHFSDEMSRRLTWNIRVRIALGTARALEYLHEVCLPSVVHRNFKSANILLDEEHNAHLSDCGLAALTPNTERQVSTEVVGSFGYSAPEFSMSGIYTVKSDVYSFGVVMLELLTGRKPLDSSRERSEQSLVRWATPQLHDIDALSKMVDPALNGMYPAKSLSRFADIIALCVQPEPEFRPPMSEVVQQLVRLMQRASIVRRQSGEELGFSYRAPEREGDARDISF

SEQ ID NO: 19584 - protein, 394 aa, Dasypyrum villosum
MCGGAILKGLKAPAVTRKVTEAALWPEKKKPKPAGGLARRLAGLRRRGGLGLDDGDEDFEADFEEFEADSGDSDLELGRGGVAEKDGDDEVVEIKPFAAVKRSLSQDDLSTMTTAGFDCLAQRSAKRKRKNQFRGIRQRPWGKWAAEIRDPSKGVRVWLGTFNSAEEAARAYDVEARRIRGKKAKVNFPEEPTVPQKRRARLAAPKAPKPSAAQEPTVIPAVNNLVNPNAFIYPSADFASNQPLVQPDNVPFVPAMNSAAPVEAPVMNMYSDQGSNSFGCSDLGWDYNTKTPDISSIAPISTIAEEGAESALVQSNTYNPAVIAAGAESALVQSNTVAPPVMENNAVDFEPWMRFLMDDDVDEPIDSFLNFDVPQDVVGNMDLWSFDDMPVCGF

SEQ ID NO: 19585 - protein, 933 aa, Medicago truncatula
MEYGGGLVADGGVFGPMVGGGGGDQADIIEELLGEGCWIEASENSLMAMQQTTPQSQYMSNNNNIPMGMGEGDHFNHHHHHHPHPHHQMECTAPAANHDDQQESGFVVGKRWWIGPRANPGPTTSVKERLVVAVGYLKEYTKNSSNNVLIQIWVPMRRRSALIHTQNHYLQQESSSAPVSVNPNMNVHVRFFRSHDYPRHQQQQQYGSLLALPVFERGSGTCLGVIEFVISNQTLINYRPQLDHLSNALEAVDFRSSHNMNIPQAVKVFEELYEAAVNEIMEVLASVCKTHNLPLALTWAPCLQQQQGGGKGSSGASGCGVSTMSCCISTVDSACYVGDMDVLGFQEACSEYHLFNGQGIVGTAFTTTKPCFAIDITAFSKSEYPLAHHANMFGLHAAVAIPLRSVYTGSAADFVLEFFLPKDCRDTEQQKQMLNSLSLVVQQACRSLHLHVVMDDNNNNNMNDNNSSADHDHDQFTFPTTNSYMPSSASEPLSQVDAVSGCSTKDTSSSCSWIAHMMEAQNKGKGVSVSLEYLQEPKEEFKVTTCNWDREREDNVFSEFGQVLQQQQHDQSSNSRASVVSVEAGEESPGACGRRSSSSSSGRKSGDKRRTKAEKTISLPVLRQYFAGSLKDAAKSIGVCPTTLKRICRQHGITRWPSRKIKKVGHSLKKLQLVIDSVQGAEGAIQIGSFYASFPELSNATANGGDGNDNSNNSFYNNNHGDGIVTSLKSPPSACSQTHAGNKLPMTTTTAINHHHVVMTENPTGAPLGVDHAFMHASNINIQDYHQLQEDLDTKQLLLHFNNNNQILPPRPTVAWNNNNSSSSTLLERGAFRVKATFADEKIRFSLQAMWGFRDLQLEIARRFNLTDMNNLVLKYLDDEGEWVVLSCDADLEECKDLHTSSHTRTIRLSLFQASPLNLPNTFRNSSSSSPSS

SEQ ID NO: 19586 - protein, 519 aa, Gentiana asclepiadea
MPIQMSPIYTTLTLHLATALFLFFHVQKLVHYLHGKATGHRCRRLPPGPTGWPILGALPLLGNMPHVTFANMAKKYGSVMYLKVGSHGLAIASTPDAAKAFLKTLDLNFSNRPPNAGATHLAYNAQDMVFAHYGPKWKLLRKLSNLHMLGGKALENWADVRKTELGYMLKAMFESSQNNEPVMISEMLTYAMANMLSQVILSRRVFNKKGAKSNEFKDMVVELMTSAGYFNIGDFIPSIGWMDLQGIEGGMKRLHKKFDVLLTRLLDDHKRTSQERKQKPDFLDFVIANGDNSDGERLNTDNIKALLLNLFTAGTDTSSSIIEWALAELLKNRTLLTRAQDEMDRVIGRDRRLLESDIPNLPYLQAICKETFRKHPSTPLNLPRIASEPCDVNGYYIPKGTRLNVNIWAIGRDPSVWGDNPNEFDPERFLYGRNAKIDPRGNHFELIPFGAGRRICAGTRMGILLVEYILGTLVHSFDWKLGFSEDELNMDETFGLALQKAVPLAAMVIPRLPLHVYAP

SEQ ID NO: 19587 - protein, 611 aa, Vitis vinifera
MLRALSLRRSLQAFHHYHHHHHQQQPTNPHSNLLKALSSTTSPNPNPNLTRPFSSLSSSPSSEAEFRKYLGYFALLLGCGIATYYSFPFSDSAKHKKAQLFRYAPLPDDLHTVSNWSGTHEVQTRVFHQPESLEELEQIVKEANEKKQKIRPVGSGLSPNGIGLTRAGMVNLALLDNVLDVDVEKKRVRVQAGIRVQQLVDAIKDYGITLQNFASIREQQIGGIVQVGAHGTGARLPPIDEQVISMKLVTPAKGTIEVSKEKDPELFYLARCGLGGLGVVAEVTLQCVERQELVEHTVVSNMKEIKKNHKKLLSENKHVKYLYIPYTDTVVVVTCNPVSKWKGPPKFKPKYSHDEAIQHVRHLYQESLKKYSPEAITAKSSDNSEPDINELSFTELRDKLLALDPLNKDHVIQVNQAEAEFWRKSEGYRVGWSDEILGFDCGGQQWVSETCFPAGTLAKPSMKDLEYIEDLKKLIEKEEIPAPAPIEQRWTASSKSPMSPASSSAEDDIFSWVGIIMYLPTMDARQRKEITEEFFHYRRLSQTQLWDLYSAYEHWAKIEVPKDKDELAALQARLRKRFPVDEYNKARKELDPNRILSNNMQGKLFPSSDTI

SEQ ID NO: 19588 - protein, 852 aa, Arabidopsis thaliana
MEEFRFLYLIYSAAFALCLVVSVLAQDQSGFISIDCGIPSGSSYKDDTTGINYVSDSSFVETGVSKSIPFTAQRQLQNLRSFPEGSRNCYTLIPIQGKGKKYLIRASFMYGNYDGENGSPEFDLFLGGNIWDTVLLSNGSSIVSKEVVYLSQSENIFVCLGNKGKGTPFISTLELRFLGNDNTTYDSPNGALFFSRRWDLRSLMGSPVRYDDDVYDRIWIPRNFGYCREINTSLPVTSDNNSYSLSSLVMSTAMTPINTTRPITMTLENSDPNVRYFVYMHFAEVEDLSLKPNQTREFDISINGVTVAAGFSPKYLQTNTFFLNPESQSKIAFSLVRTPKSTLPPIVNALEIYVANSFSQSLTNQEDGDAVTSLKTSYKVKKNWHGDPCLPNDYIWEGLNCSYDSLTPPRITSLNLSSSGLTGHISSSFSNLTMIQELDLSNNGLTGDIPEFLSKLKFLRVLNLENNTLTGSVPSELLERSNTGSFSLRLGENPGLCTEISCRKSNSKKLVIPLVASFAALFILLLLSGVFWRIRNRRNKSVNSAPQTSPMAKSENKLLFTFADVIKMTNNFGQVLGKGGFGTVYHGFYDNLQVAVKLLSETSAQGFKEFRSEVEVLVRVHHVNLTALIGYFHEGDQMGLIYEFMANGNMADHLAGKYQHTLSWRQRLQIALDAAQGLEYLHCGCKPPIVHRDVKTSNILLNEKNRAKLADFGLSRSFHTESRSHVSTLVAGTPGYLDPLCFETNGLNEKSDIYSFGVVLLEMITGKTVIKESQTKRVHVSDWVISILRSTNDVNNVIDSKMAKDFDVNSVWKVVELALSSVSQNVSDRPNMPHIVRGLNECLQREESNKNY

SEQ ID NO: 19589 - protein, 871 aa, Arabidopsis thaliana
MKNLRGLLLAFLVLSLGISDFLRAQDQQGFISLDCGLQADESPYTEPLTKLTFTSDADFIKSGKSGKIQNVPGMEYIKPYTVLRYFPDGVRNCYTLIVIQGTNYLIVAMFTYGNYDNLNTHPKFDLYLGPNIWTTVDLQRNVNGTRAEIIHIPRSTSLQICLVKTGTTTPLISALELRPLRNNTYIPQSGSLKTLFRVHLTDSKETVRYPEDVHDRLWSPFFMPEWRLLRTSLTVNTSDDNGYDIPEDVVVTAATPANVSSPLTISWNLETPDDLVYAYLHVAEIQSLRENDTREFNISAGQDVNYGPVSPDEFLVGTLFNTSPVKCEGGTCHLQLIKTPKSTLPPLLNAIEAFITVEFPQSETNANDVLAIKSIETSYGLSRISWQGDPCVPQQLLWDGLTCEYTNMSTPPRIHSLDLSSSELTGIIVPEIQNLTELKKLDFSNNNLTGGVPEFLAKMKSLLVINLSGNNLSGSVPQALLNKVKNGLKLNIQGNPNLCFSSSCNKKKNSIMLPVVASLASLAAIIAMIALLFVCIKRRSSSRKGPSPSQQSIETIKKRYTYAEVLAMTKKFERVLGKGGFGMVYHGYINGTEEVAVKLLSPSSAQGYKEFKTEVELLLRVYHTNLVSLVGYCDEKDHLALIYQYMVNGDLKKHFSGSSIISWVDRLNIAVDAASGLEYLHIGCKPLIVHRDVKSSNILLDDQLQAKLADFGLSRSFPIGDESHVSTLVAGTFGYLDHEYYQTNRLSEKSDVYSFGVVLLEIITNKPVIDHNRDMPHIAEWVKLMLTRGDISNIMDPKLQGVYDSGSAWKALELAMTCVNPSSLKRPNMSHVVHELKECLVSENNRTRDIDTSRSMDINLSFGTDVNPKAR

SEQ ID NO: 19590 - protein, 648 aa, Arabidopsis thaliana
MPQSVMKTAAVPKNASEPWLLWWTLDENTAQSYVYMHFAEVQNLTANETREFNITYNGGLRWFSYLRPPNLSISTIFNPRAVSSSNGIFNFTFAMTGNSTLPPLLNALEIYTVVDILQLETNKDEVSAMMNIKETYGLSKKISWQGDPCAPQLYRWEGLNCSYPDSEGSRIISLNLNGSELTGSITSDISKLTLLTVLDLSNNDLSGDIPTFFAEMKSLKLINLSGNPNLNLTAIPDSLQQRVNSKSLTLILGENLTLTPKKESKKVPMVAIAASVAGVFALLVILAIFFVIKRKNVKAHKSPGPPPLVTPGIVKSETRSSNPSIITRERKITYPEVLKMTNNFERVLGKGGFGTVYHGNLDGAEVAVKMLSHSSAQGYKEFKAEVELLLRVHHRHLVGLVGYCDDGDNLALIYEYMANGDLRENMSGKRGGNVLTWENRMQIAVEAAQGLEYLHNGCRPPMVHRDVKTTNILLNERCGAKLADFGLSRSFPIDGECHVSTVVAGTPGYLDPEYYRTNWLSEKSDVYSFGVVLLEIVTNQPVIDKTRERPHINDWVGFMLTKGDIKSIVDPKLMGDYDTNGAWKIVELALACVNPSSNRRPTMAHVVMELNDCVALENARRQGSEEMYSMGSVDYSLSSTSDFAPGAR

SEQ ID NO: 19591 - protein, 828 aa, Arabidopsis thaliana
MRFLSFLIFVFAVLGLVQAQDQSGFISLDCGLVPTEITYVEKSTNITYRSDATYIDSGVPGKINEVYRTQFQQQIWALRSFPEGQRNCYNFSLTAKRKYLIRGTFIYGNYDGLNQLPSFDLYIGPNKWTSVSIPGVRNGSVSEMIHVLRQDHLQICLVKTGETTPFISSLELRPLNNNTYVTKSGSLIVVARLYFSPTPPFLRYDEDVHDRIWIPFLDNKNSLLSTELSVDTSNFYNVPQTVAKTAAVPLNATQPLKINWSLDDITSQSYIYMHFAEIENLEANETREFNITYNGGENWFSYFRPPKFRITTVYNPAAVSSLDGNFNFTFSMTGNSTHPPLINGLEIYQVLELPQLDTYQDEVSAMMNIKTIYGLSKRSSWQGDPCAPELYRWEGLNCSYPNFAPPQIISLNLSGNKNLNRSVPETLQKRIDNKSLTLIRDETGKNSTNVVAIAASVASVFAVLVILAIVFVVIRKKQRTNEASGPRSFTTGTVKSDARSSSSSIITKERKFTYSEVLKMTKNFERVLGKGGFGTVYHGNLDDTQVAVKMLSHSSAQGYKEFKAEVELLLRVHHRHLVGLVGYCDDGDNLALIYEYMEKGDLRENMSGKHSVNVLSWETRMQIAVEAAQGLEYLHNGCRPPMVHRDVKPTNILLNERSQAKLADFGLSRSFPVDGESHVMTVVAGTPGYLDPEYYRTNWLSEKSDVYSFGVVLLEIVTNQPVMNKNRERPHINEWVMFMLTNGDIKSIVDPKLNEDYDTNGVWKVVELALACVNPSSSRRPTMPHVVMELNECLALEIERKQGSQATYIKESVEFSPSSASDFSPLAR

SEQ ID NO: 19592 - protein, 524 aa, Arabidopsis thaliana
MIVNAIKNIKATYRLSKTSWQGDPCLPQELSWENLRCSYTNSSTPPKIISLNLSASGLTGSLPSVFQNLTQIQELDLSNNSLTGLVPSFLANIKSLSLLDLSGNNFTGSVPQTLLDREKEGLVLKLEGNPELCKFSSCNPKKKKGLLVPVIASISSVLIVIVVVALFFVLRKKKMPSDAQAPPSLPVEDVGQAKHSESSFVSKKIRFAYFEVQEMTNNFQRVLGEGGFGVVYHGCVNGTQQVAVKLLSQSSSQGYKHFKAEVELLMRVHHKNLVSLVGYCDEGDHLALIYEYMPNGDLKQHLSGKRGGFVLSWESRLRVAVDAALGLEYLHTGCKPPMVHRDIKSTNILLDERFQAKLADFGLSRSFLTENETHVSTVVAGTPGYLDPEYYQTNWLTEKSDVYSFGIVLLEIITNRPIIQQSREKPHLVEWVGFIVRTGDIGNIVDPNLHGAYDVGSVWKAIELAMSCVNISSARRPSMSQVVSDLKECVISENSRTGESREMNSMSSIEFSMGIDTEVIPKAR

SEQ ID NO: 19593 - protein, 913 aa, Arabidopsis thaliana
MGAHSVFLILFSVIAIAIVVHGQGQAGFISIDCGSPPNINYVDTDTGISYTWDAPFINAGVNLNVSEEYGYPKNPVLPFPLADVRSFPQGNRNCYTLTPSDGKGNLYLIRASFMYGNYDGKNALPEFDLYVNVNFWTSVKLRNASENVIKEILSFAESDTIYVCLVNKGKGTPFISALELRPMNSSIYGTEFGRNVSLVLYQRWDTGYLNGTGRYQKDTYDRIWSPYSPVSWNTTMTTGYIDIFQSGYRPPDEVIKTAASPKSDDEPLELSWTSSDPDTRFYAYLYFAELENLKRNESREIKIFWNGSPVSGAFNPSPEYSMTVSNSRAFTGKDHWISVQKTAESTRPPILNAIEIFSAQSLDEFYTRIDDVQAIESIKSTYKVNKIWTGDPCSPRLFPWEGIGCSYNTSSYQIKSLNLSSSGLHGPIAFAFRNLSLLESLDLSNNNLKGIVPEFLADLKYLKSLNLKGNNLTGFIPRSLRKRATANGLALSVDEQNICHSRSCRDGNRIMVPIVVSTLVIILIAALAIICIMRRESKIMYSGAYSGPLLPSGKRRFTYSEVSSITNNFNKVIGKGGFGIVYLGSLEDGTEIAVKMINDSSFGKSKGSSSSSSSSQVSKEFQVEAELLLTVHHRNLASFVGYCDDGRSMALIYEYMANGNLQDYLSSENAEDLSWEKRLHIAIDSAQGLEYLHHGCRPPIVHRDVKTANILLNDNLEAKIADFWLSKVFPEDDLSHVVTAVMGTPGYVDPEYYNTFKLNEKSDVYSFGIVLLELITGKRSIMKTDDGEKMNVVHYVEPFLKMGDIDGVVDPRLHGDFSSNSAWKFVEVAMSCVRDRGTNRPNTNQIVSDLKQCLAAELAREPKSNHEKKEVVKEKYTKTKSTVQNYSSNEYNSSSGSVSLSFGDYSTFGPMAR

SEQ ID NO: 19594 - protein, 884 aa, Arabidopsis thaliana
MDSPCWLLLLLLGAFAIIGCVQAQDQQEFISLDCGLPMTEPSSYTESVTGLRFSSDAEFIQTGESGKIQASMENDYLKPYTRLRYFPEERRNCYSLSVDKNRKYLIRARFIYGNYDGRNSNPIFELHLGPNLWATIDLQKFVNGTMEEILHTPTSNSLNVCLVKTGTTTPLISALELRPLGNNSYLTDGSLNLFVRIYLNKTDGFLRYPDDIYDRRWHNYFMVDDWTQIFTTLEVTNDNNYEPPKKALAAAATPSNASAPLTISWPPDNPGDQYYLYSHFSEIQDLQTNDTREFDILWDGAVVEEGFIPPKLGVTTIHNLSPVTCKGENCIYQLIKTSRSTLPSLLNALEIYTVIQFPRSETNENDVVAVKNIEAAYKLSRIRWQGDPCVPQKYAWDGLNCSNNTDVSKPPRVLSLNLSSSGLTGIIAAAIQNLTHLEKLDLSNNTLTGVVPEFLAQMKSLVIINLSGNNLSGPLPQGLRREGLELLVQGNPRLCLSGSCTEKNSKKKFPVVIVASVASVAIIVAVLVIIFVLSKKKSSTVGALQPPLSMPMVHDNSPEPSIETKKRRFTYSEVIKMTNNFQRVVGEGGFGVVCHGTINGSEQVAVKVLSQSSSQGYKHFKAEVDLLLRVHHTNLVSLVGYCDERDHLALIYEFLPKGDLRQHLSGKSGGSFINWGNRLRIALEAALGLEYLHSGCTPPIVHRDIKTTNILLDEQLKAKLADFGLSRSFPIGGETHISTVVAGTPGYLDPEYYQTTRLGEKSDVYSFGIVLLEIITNQPVIDQSRSKSHISQWVGFELTRGDITKIMDPNLNGDYESRSVWRVLELAMSCANPSSVNRPNMSQVANELKECLVSENLRENMNMDSQNSLKVSMSFDTELFPRAR

SEQ ID NO: 19595 - protein, 316 aa, Piriformospora indica
MSDAKNVKKVKTPKEFAIDFMMGGVSAAVAKTSAAPIERIKLLIQNQDEMIKQGRLSHKYNGIIDCFSRTYRDEGLVSLWRGNTANVIRYFPTQALNFAFKDYFKSLFGFKKQDGYWKWFAGNVASGGAAGASSLLFVYSLDYARTRLANDAKSAKGGGERQFNGLVDVYRKTLKSDGIAGLYRGFVPSVVGIIVYRGLYFGVYDSLKPVVLVGALQGSFLASFLLGWGVTIGAGLASYPLDTIRRRMMMTSGWVGVHYKSMFDAGSQIIAKEGTKSLFKGAGANILRGVAGAGVLSLYDQLQVILFGKVYSGGSG

SEQ ID NO: 19596 - protein, 320 aa, Tamarix hispida
MEFPTVVVCLVWFFSGILASAQLTTSFYKTTCSGKSAVDHFKTEGEEKAVANEENAWGLPCFGFIFHDCFVNGCDASGSIRRHCQLHRKRKTAQPNNGSLRGFDVVDTIKSKVESVCPGVVPCADILAVAARDSVVALGGKSWGVLLGRRDSTTASLSAANTGIPAPTLNLSGLITSFSNVGLSTKDLVVLSGAHTIGQARCTSFRARIYNETNINSSFAKSLQANCPSTGGDNNLSPLDTSSPTTFDVGYYTDLIGQKGLLHSDQQLYNGGSTDSQVTSYSSSSSTFLTDFGTSMINMGNISPLTGSRGQVRTNCRKTN

SEQ ID NO: 19597 - protein, 328 aa, Pseudomonas putida
MELLIQPKNRIIPFSAGANLLEVLRENGVAISYSCLSGRCGTCRCRVIDGSVIDSGAENGQSNLTDKQYVLACQSVLTGNCAIEVPEADEIVTHPARIIKGTVVAVESPTHDIRRLRVRLSKPFEFSPGQYATLQFSPEHARPYSMAGLPDDQEMEFHIRKVPGGRVTEYVFEHVREGTSIKLSGPLGTAYLRQKHTGPMLCVGGGTGLAPVLSIVRGALKSGMTNPILLYFGVRSQQDLYDAERLHKLAADHPQLTVHTVIATGPINEGQRAGLITDVIEKDILSLAGWRAYLCGAPAMVEALCTVTKHLGISPEHIYADAFYPGGI

SEQ ID NO: 19598 - protein, 667 aa, Descurainia sophia
MAAATTSSSISFSTKPSHPSSSSKSPLPISRFSLPFSLNPHKSSSSRRRGIKSRALSCSAVQNTTTNVSTTSSPPTKSTGNKKFISRFAPDQPRKGADILVEALERQGVENVFAYPGGASMEIHQALTRSSSIRNVLPRHEQGGVFAAEGYARSSGKPGICIATSGPGATNLVSGLADALLDSVPLVAITGQVSRRMIGTDAFQETPIVEVTRSITKHNYLVMDVEDIPRIVEEAFFLATSGRPGPVLVDVPKDIQQQLAIPNWDQPMRLPGYLSRMPKPPEDSHLEQIVRLISESKKPVLYVGGGCLNSSDELRRFVELTGIPVASTLMGLGSYPCDDELSLHMLGMHGTVYANYSVEHSDLLLAFGVRFDDRVTGKLEAFASRAKIVHIDIDSAEIGKNKTPHVSVCGDVKLALQGMNKVLEKRAEELKLDFGVWRNELNEQKQKFPLSFKTFGEAIPPQYAIQVLDELTDGKAIISTGVGQHQMWAAQFYKYKKPRQWLSSGGLGAMGFGLPAAIGASVANPDAIVVDIDGDGSFIMNVQELATIRVENLPVKILLLNNQHLGMVMQWEDRFYKANRAHTFLGDPAQENEIFPNMLLFAAACGIPAARVTKKEHLRDAIQKMLDTPGPYLLDVICPHQEHVLPMIPSGGTFSDVITEGDGRTKY

SEQ ID NO: 19599 - protein, 322 aa, Mangifera indica
MASKLCDSCKSATATLFCRADSAFLCVSCDTKIHTANKLASRHARVWVCEVCEQAPAHVTCKADAAALCVACDHDIHSANPLARRHERVPVTPFYDSVNSADKHNGVVNFFDDVEGGGDASREEAEAASWLLPNPKVVEDGPEMNTGQYVFSDMDPYLDLDYGPVDPKLEAQEQNSSGTDGVVPVQSQTAPVPLVNDHCFDLDFSGPKSFGYGYNNTQCLSHSVSSSSLDVGVVPDGSATTESTNQTVQLSSADREARVLRYREKRKNKKFEKTIRYASRKAYAEMRPRIKGRFAKRTDMDVEADRSSNSSSIYGFGVVPSY

SEQ ID NO: 19600 - protein, 623 aa, Streptomyces collinus
MSGIAGWVDFERDLTPEAPTVRAMAAALAHRGPDGFGEWIEGHAALAHRRLSLIGSEHAGQPAIVESEAGSPVAVLTLDGSVTNAVELRRELAAKGHRFTGDGDAEVALHAYLEWGAAFPERLEGLFALAVWDVRRQELLLVRDRLGVKPLCYFLTPSGVVFGSEPKALLAHPAVRPVVDADGLRELFAHSRKPGTGVFRGTREVLPGHTMTVRAPGTGHRRYWSLPARPHTDSLETTVATVRRLLSEAVATHLRADVPVGAMLSGGIDSSALTALAAHRRRAEGAGLRSFSVNFSGYAENFEPHPTMRATPDAPYAALAAEHIGTEHTEILLDTAALADPGTHAAALRSQDAPSPLGDMDVSLLLFFEALRGAGITAVLSGETADEVFNGYFWAYDPGHSNSTTFPWVSFERGHDAAAGGLGCSLVDRTLRKELDFMDYADQHYRDALTEVPQVAGESPAERRAREVTYLALTRWAPTHLDRADRMSMAHGVQLRPPFCDRALVEYVYNVPAELKRVNGQEKSLLRAAVADLLPERVLNRPKSAYPTVQEAAYGEFVRHRFEDVAADRTAPVAPLLDAEATRVALGAAAAPSGAFAWVERASMEMVLQLNTWLSEYGVELRV

SEQ ID NO: 19601 - protein, 179 aa, Cucumis sativus
MPRDRDPLVVGRVIGDVVDPFSRSISIRVTYSTKEVNNGCELKPSQVVNQPRVEIGGTDLRTFFTLVMVDPDAPSPSDPNLREYLHWLVTDIPATTGATFGQEIVCYESPRPTVGIHRFVLVLFRQLGRQTVYAPGWRQNFNTRDFAELYNLGLPVAAVYFNCQRESGSGGRRRVQDDY

SEQ ID NO: 19602 - protein, 353 aa, Diaphorobacter sp. PCA039
MSYQLTIEPLGATIEVEEGQTVLDAVLRQGLYLPHACGHGLCGTCKVQVCDGEVDHGAANPFALMDFERDDGKTLACCATLQADTTIEADIDEEPDARVIPVRDFAATVSRVEDLTPTIKAIHLQLDKAIDFQAGQYVQVEIPGVGSRAFSIANQPADVAATKGIELNVRKLPGGAGTTWLHEQLKAGDRLRVAGPYGRFFVRESARQPMLFMAGGSGLSSPRSMIADLLSRGCTLPITLVYGQRSHEELYYDAEFRALAEQHANFSYVPALSHEPEGSDWDGFRGFVHEAAKAHFGGSFVGQKAYLCGPPPMIEACISTLMQGRLFERDIYTEKFLSAADAQAARSPLFRQV

SEQ ID NO: 19603 - protein, 219 aa, Capsicum annuum
MQKSTATAFENSSSSGNGSNDAGDFECNICFELAQDPIVTLCGHLYCWPCLYRWLRLHSQSHECPVCKALIQEEKLVPLYGRGRTSTDPRSKPVPGVEIPRRPAGQRPETAPPPESNTFPNSGFGLMGGLFPGATASFGNFTMSAGFGGFIPSLLSFQFHGFPGPTAFGTTPNYQYGYPPAYHGANVQNAAHPSQGQADNNLKFMFLLVGFLVFLYLFG

SEQ ID NO: 19604 - protein, 508 aa, Echinops bannaticus
MTILTFLLYTCITGLVFYALHLFNLRTPHRNRLPPGPTPWPIVGNLPHLGRVPHHSLADLATKYGPLLHLRLGFVDVVVAGSASVAAQFLKVHDANFASRPPNSGAKHMAYNYQDMVFAPYGPKWRMLRKICSVHLFSTKALDDFRHVRQEEVAILARALVGAGESTVKLGQLLNVCTTNALARVMLGRRVFGDGSGGGDSKSDEFKDMVMEMMVLAGEFNIGDFIPALDWLDLQSVTKKMKKLHVRFDSFLNTILEEHKSGNMDFVSRLISVKDDADGQGGKLSDTEIKALLLNLFAAGTDTSSSTVEWAIAELIRHPQLLKQAQEEMDTIVGRDRLVTEVDLSRLTFLQAIVKEIFRLHPSTPLSLPRIASDTCEVDGYYIPKGSTLLVNVWAISRDPKIWSNPLEFQPTRFLPGGEKPDADVKGNDFELIPFGAGRRICAGMSLGLKMVQLLTATLVHAFDWELANGLDPDKLNMEEAYGLTLQRATPLMVHPRPRLAPHVYQSG

SEQ ID NO: 19605 - protein, 514 aa, Centaurea cyanus
MTFLPLVLYTSVALLLLYVLLNLRTPRSNRRLPPGPTPWPIVGNLPHLGKMPHHALAAMADKYGPLMHLRFGVVDVVVAASASVAAQFLKVHDANFASRPPNSGAKHLAYDYQDLVFAPYGLKWRMLRKICSVHLFSNKALDDFRHVREEEVAVLTRALAGAGGSTVALGQLLNVCTTNALARVMLGRRVFGDGSGGGDRKADEFKEMVVEMMVLAGEFNIGDFIPALDWLDLQGVTKKMKNLHLRFDSFLNEILEDHKNGGDIITSGNVDLLTTLISLKDDADGEGGKLSDIEIKAILLNLFTAGTDTSSSTVEWAMAELIRYPQLMQKAQEEIESVVGRDRLVSELDLPRLTFLEAVVKETFRLHPSTPLSLPRMALESCEVDGYYIPKGSTLLVNVWAIARDPKMWDDPLEFRPRRFLPRGEKPNANVKGNDFEIIPFGAGRRICAGMSLGLRMVQLLTATLVHAFDWKLANGLDSEKLNMKEAYGLTLQRDVPLMVHPSPRLAPELYKSG

SEQ ID NO: 19606 - protein, 321 aa, Chromobacterium sp. 2002
MSHTIHGDGAIRRTSLYGSSIENTYAGVLSFMRRNYTRDLSGVDVAISGIPLDLAVTFRPGARLGPAAVRAASVQLAELKPFPWGFDPFDDLAVIDYGDCWFDAHNPLTIKDSIIEHARTILASGAKMLTFGGDHYVTYPLLIAHAEKFGKPLSIIHFDAHCDTWPDDSPDSLNHGTMFYKAVKDGLIDPQTSVQVGLRTWNDDFMGIQRLDAPWVHDHGTDAAIARIKEIVGDNPTYLTFDIDCLDPAFAPGTGTPVPGGLTTAQALKIVRNLGDVNLVGMDVVEVSPPFDQSEITALAAAHIACDLLCLLRNRKLAGTL

SEQ ID NO: 19607 - protein, 556 aa, Chromobacterium sp. 2002
MTAWLPGWLRHYRRAWLPGDAVAGVVVALLLVPQGLAYALVAGLPAEAGLYASLPPLLLYGLIGKSHAQSVGPMALTSLLAAATLSRLAAPGSTEYLALAVWLALLSGAMLVALGAARLGFLVDFLSTPVLAAFTSASALLIVLAQLAPLLGLHGGGAALPALLAAVLDGWQRFNPLALGVGALALLWLAGARRLLPPALARAAPVLAVLLGIVAVREAGWATRLPVVGAVPAGLPALSLPLLPWELLAELMLPAFFMALINYVQSLSVAQLLAEPRHERVEPDRELLALGVCNLGAGLFGGFPVTGGLSRSLVNAAAGAHSPLASWISAGGIALVLLFAGAALSSLPLAVLAATIVVAVYPSIGFGALRQAWRADRADAVAFVLTFALVLLLGVESGIVAGVLVSLGAWLWRSSRPHMAEVGRLPGTQHYRNVTRFATETLPGVLFLRVDESLYFGNARLVRDTVLDRLAERPQLSTLVLIMSAVNRLDASAVAMLQWLDDSLARRGVTLALAEVKGPVGTVLARAGLLKRFAGRHFLSTDQAWRHYAPPPDFHI

SEQ ID NO: 19608 - protein, 586 aa, Chromobacterium sp. 2002
MQISGAEIVVRCLQEEGVEFVFGYPGGAVLEIYDAIFKQSQFKHVLVRHEQAAVHAADAYSRSSDKVGVALVTSGPGATNAVTGIATAYMDSIPMVVLSGQVPTPAIGLDAFQEVDMVGITRPCVKHNFLVKDINELAETIKKAFYIAKTGRPGPVVVDIPKDVTQKLAEFHYPESVSIRSYVPVLRGHPGQIRKAVNLLLEAKRPYVYVGGGAVQGAAEQEVTELVRSLGLPCTNTLMGLGAYPGSDPQFLGMLGMHGTYEANMAMQNCDVLIAVGARFDDRVISVPSHFLSKPKKIVHIDVDPSSIAKRVKVDVPIVGDVKYVLRDMLDQLKESGKKPDPAALAAWWKQIEEWRAPNSLLYAPSNELIKPQYVVEKLYEITGGDAIITSDVGQHQMWAAQYYKFDRPKQWLNSGGLGTMGFGLPAAIGAQLANPDKAVACITGEGSIQMNIQELSTAKQYHTPVKVVSLNNRYLGMVRQWQEFFYGTRYSESYMDALPDFVKIAEAYGHVGFKIENPADVEPVLREAFSPALKERLVFLDFRTDQSENVFPMIGNGKGLDEMDLPPHMRKTDEPDAERDYGNLC

SEQ ID NO: 19609 - protein, 586 aa, Chromobacterium sp. 2002
MADSKEIGSLVLYKRLLRYLRSYWRVFVASLLAMVVAAATEPAFARLMKPLIDGGFVQKSSAAMIWTPLAIVGLFILRGVTSYINEYSTSYLSGHLVQRLREEMFGKLMQLPVRYFDDHPSGRLLSRIAFDVNQVTEAGFNIITVVVKDGITVLGLLGLLLYTDWQLTLICLAVLPLVTLIVRIVGKRLRGLSRQNQHNMAQLTQVLGETIDCQRVVKIYGGQTYEAERFQHAAESIRHNAVKQSSMSSLNTGVTQLVISMALALILYFATVRAQHGAFTAGDFMSFLTAMLMLFAPVKRITSISQSLQRGLAAAESVFGFLDEAPELDRGTKRLAETRGALSFRHVNFRYPHAERDAIVDLSLDVKPGETVALVGSSGSGKTTLVSLIPRFYDVDAGSISLDGVPLADIELASLRSHIALVSQDVVLFNDSVAANIAYGRIGQVSREEIVAAARAANALDFIEAMPEGFDTLIGENGVRLSGGQRQRLAIARALLKNAPILILDEATSALDTQSERLVQAALERLMENRTTIVIAHRLSTIESADRIVVMHQGRVAEVGSHGELIAHDGLYANLHRMQFKEPQHG

SEQ ID NO: 19610 - protein, 103 aa, Chromobacterium sp. 2002
MYAVVKTGGKQYKVAVGEKLKVEQIPADVDSQIVLEEVLMIADGEQVVVGTPRVAGATVKATVVAHGRGEKIRIFKMRRRKHYQKHQGHRQNYTEIRIDEISK

SEQ ID NO: 19611 - protein, 388 aa, Chromobacterium sp. 2002
MKFIDEARIEVIAGKGGNGAASFRREKFVPFGGPDGGDGGKGGSVYAVADENVNTLVEYRFVKKYLAQHGEKGHGADCYGKGGDDIELKMPVGTVIIDSDTDEVVADLARHGERVMLARGGKGGLGNIHFKSSTNRAPRQCTPGEEGERRSLRLELKVLADVGLLGMPNAGKSTFIRAVSAAKPKVADYPFTTLHPNLGVVRMKDTRSFVIADIPGLIEGAAEGAGLGHRFLKHLSRTGLLLHVVDIAPFDPEVDPVREAHAIVEELKKYDEELYNKPRWLVLNKVDMLPEDEREERIAAFLEAFGWPKQQPNDEFEFDMGAPRVFTVSALTGEGTQAVTYAMMEYIERVRQAERAAAELAEQREAEAKAAAKAARQNVITRTAGVDE

SEQ ID NO: 19612 - protein, 547 aa, Chromobacterium sp. 2002
MNHQHSRHIGPIALMLTGLGSIIGSGWLFGAAHAAQIAGPAAIVAWLVGMVIILSIALSYAELGAMFPESGGMVRYARYSHGSLLGFIAAWANWIAIVAVIPIEAEASVQYMSSWPWPWAQALYQHGELNPTGLGIAAVLVVVYFLLNYWGVKLFAKANSAITVFKLVVPALTALALIDSGFHSGNLGSATPGGFAPFGWASVMTAVATSGIVFSFNGFQSPINLAGEARNPGKSIPFGVIGSILLAAVIYVLLQVAFLGALTPADLAHGWQGIDFSSPFAQLALAFGLNWLVMTLYFDAFVSPSGTGATYMATTSRMIYGMQKNGTMPALFGHIHPLYRIPRAAMWFNLAVSFMFLFFFRGWGTLAAVISVATVISYLTGPISAASLRRAAPDLPRPLRLAGLNLIAPFAFVCASLVLYWARWPLTGQIIFLIVAALPVYFWYQAKAGWPDFGREVKGALWMVLYLPALALLSYVGSTDFGGIGLLPYGVDMAVVALMALGFYAWGVNSGWRTRYLEQEHDAAAVAAMHEASQESKRAGRLAGQNA

SEQ ID NO: 19613 - protein, 327 aa, Chromobacterium sp. 2002
MAAYDSLMVFTGTANPELAQNVVKHLDISLGRADVGKFSDGEVAVELLENVRGRDVFILQSTCNPTNDNLMEILTMADALKRASAGRITAAIPYFGYARQDRRPRSARVPISAKLVANMLTSAGIDRVLTVDLHADQIQGFFDIPVDNVYATPVLLKDVRSQRIEDLIVVSPDVGGVVRARAMAKALNTDLAIIDKRRPKANVAEVMNIIGDVQGRTCLIVDDMIDTANTLCKAASALKERGAQRVLAYATHAIFSGQAIDRIANSDIDMVVVTDTIPLSAQAKACPNIRVASIGGLLAETLRRINNEESVSYLFNEDLVSTGACLP

SEQ ID NO: 19614 - protein, 1482 aa, Chromobacterium sp. 2002
MERQQWLQGTLYRPDFEQDSCGFGLIAQLEDKPSHWLVQTAISSLAKLTHRGAVAADGKSGDGCGLLFRKPDGFLREVAHEAGIALKASYAAGLVFHHPEQEQGQRSLRRLKEFLEAQELEVAGFRTVPVDVSACGEYAIKTLPSMVQVFVNCPFGMDDASFQRRLYMARRQAEKANKAEDGYFYLPTLSPHTLSYKGLVTPENLPKFFLDLQDERFEASLAVFHQRFSTNTWPQWKLAQPFRFLAHNGEINTVQGNRYWSKARERIMSTPHLDMDAIRPIVQTDGSDSMSLDNMLEGLLMGGIPLFRALRLLVPPAWQNVDSTDKDLRAFYEFNSMHMEPWDGPAGIVLTDGRYAACLLDRNGLRPARWVLTRDNILTIASEVGVWDYKPEEVVRKGRVKPGQLFAADLTTGELLMPEDIDAQLKSAKPYRQWIKDSGKYLELSIEDDSSLEAMPKDELLKYQKLFNVSFEERDQVLRVLADDGQEAIGSMGDDTPMAVLSQKVRSPFDFLRQQFAQVTNPPIDPIREAVVMSLNTVFGPERNMFEESAEHAKRLEVRSPVLSHEKFVRVTTRPESYLKSTSFDLCYDPSEGGLKAAIERLCQHVVDAVREGTVVVVLSDRTLGDGRLPIHALFATGAVHHALIDAGLRCKSNIVVETGTARDAHQIACLLGYGATAVYPYLAYQIIAELVQSGEVELKTNEALQHYRKGINKGLLKVLSKMGISTVASYRGAQLFEAVGIHEEVVELCLKGTVSRVSGANFEDFEDDQQKLVRLAFNPMRSITQGGLLKYVHGEEYHAYNPDVVMQLQKAVQNDDYNAYLKYAELVNERPVAMIRDLMQLKLADNPIPLDEVESVESIVKRFDSAGMSLGALSPEAHEALATAMNRLGGRSNSGEGGEDQARYGTEKMSKIKQVASGRFGVTPHYLVNAEVLQIKVAQGAKPGEGGQLPGDKVSPLIAKLRHSKPGISLISPPPHHDIYSIEDLAQLIFDLKQVNPDALVSVKLVAEPGVGTIAAGVAKAYADLITISGYDGGTGASPLTSVKYAGTPWELGLSEAQQVLRANGLRGRVRVQTDGGLKTGLDVVKAAILGAESFGFGTGPMVALGCKYLRICHLNNCATGVATQEMKLRSKYFIGLPEMVMNYFLFIARETREWMAKLGVRTMEELIGRMDLMGLLQGQSERQQRLDLSPLLNQGSIPDSEPRFCVDDRNPSFDKGELAEAIVKDALPAIQAKQMLRLEYPIENIHRSIGARLSGEIAKAHGAAGLPEGCLTVKFTGSAGQSFGVWNAPGLHLEVEGDANDYVGKGMAGGRVVVYPPKGAAYKSHESIIIGNTCLYGATGGQLYASGVAGERFGVRNSGALAVIEGAGDHCCEYMTGGCVISLGETGYNFGAGMTGGFAFVYDPNERFAYRYNNELVDIHLINGEAMGMYRAFLLDKLAKHVEFTGSDIGRNMLENFDDFVDYFWLVKPKAAKLDSLLKD

SEQ ID NO: 19615 - protein, 316 aa, Chromobacterium sp. 2002
MTHSIVFLDRDSLPVPVPVFAFPHHYREFPATAREQIVRHVEGAEIVITNKVPFNRATLEALPALKLLAVAATGVNHIDLEACRERGVAVANIQHYGDDTVAEHAFMMMLALFRNLPAYQRDVAAGVWQNAPQFCHFGAPIRDLQGATLGIIGSGGIGQALASRARAFGMTVLFGERKGAASVREGYVDFDTLLTSSDVLSLHCLLTEQTRNMIGAEELQRMKPGAVLINTARGGLVDEEALVAALKYGQLGGAGFDVLTVEPPSEGNPLLKARLPHLIVTPHVGWASHEAMSRLAGQLVENIEAFIEGRRLRRIV

SEQ ID NO: 19616 - protein, 405 aa, Chromobacterium sp. 2002
MSQLKLPIYLDYSATTPVDPRVAEQMVVYLTEKFGNPASRSHSFGWEAEAAVEQARADVAALVNCDPKEIIWTSGATESDNLAIKGAAQFYKSKGKHIITVKTEHKAVLDTCRELERQGFEVTYLGVKDNGLIDLDDFKAALRPDTILVSVMYVNNEVGVIQDIPQIGEICREKGIVFHVDAAQATGKVDIDLSQLKVDLMSFSAHKTYGPKGIGALYVRRKPRVRLEAQMHGGGHERGFRSGTLAPHQIVGMGQAFRIAREEMATENERIRMLRDRLWNGIKDMEEVYINGDIDARVPHNLNVSFNFVEGESLIMAVRDLAVSSGSACTSASLEPSYVLRALGRNDELAHSSIRFTIGRFTTEEEIDYTIKLMREKIGKLRELSPLWEMFKDGVDLNSIEWAAH

SEQ ID NO: 19617 - protein, 255 aa, Chromobacterium sp. 2002
MLEIRNLHVSINDKPILRGLDLTVRAGEVHAIMGPNGSGKSTLAHVLAGREGYTVTAGEVRYLGRNLLELSPELRAREGIFLAFQYPVEIPGVANIYLLKAAVNALRLHRGEPELDAVDFLALVKDKLRLMGMDTGLLYRSVNEGFSGGEKKRNEILQMAVLEPRLALLDETDSGLDIDALKIVAGGVNAMRSPERAMVLVTHYQRLLNYIVPDQVHVLAQGRIALSGGRELALELENRGYGWVEAAAGQAGGGA

SEQ ID NO: 19618 - protein, 324 aa, Chromobacterium sp. 2002
MQNNGYETGRLNLPFVGHCTFAKSAVCLDWERIDADVAILGAPNDMGTQWRSGARFGPRGIREASTLFSFGHAGAYDHEDDVMYLTREDVRMVDVGDADIVHTDMASSNANIEFAVRKILESGAMPVVLGGDHSIHAPVIKAYEGRGPIHIIHFDAHLDFVDERHGVRYGHGNPLRRASEMDHIAGMTQLGIRNVSSSNRADYDAARDAGSNILSVRDVRRLGTEGVLAQIPEAAHYYITIDIDGFDPSIAPGTGTPSHGGFQYYEVLEIIQALAKRSHGGIVGMDLVEVAPAYDPAGLTSILAAQLLLNSIGFIFHERAQAKR

SEQ ID NO: 19619 - protein, 402 aa, Chromobacterium sp. 2002
MNEQRLNIHLASAKSSATYRVMDRVAARRAAGAKIISLCAGEPDFDTPTHIRAAAISAINNGHTRYTQVAGIRALREAIADKFRRENGLDFDWQDTIVCSGGKQVIFNALAATLNQGDEVIVPAPYWVSYPEIVQLCGAQSVIVPCGSETSFKLTPQALVAAITPRTRWLILNSPSNPTGAVYSHEELAALAEVLLANPHVLVLSDDIYEHLIFDDARFYTIAQVEPRLEERTLTMNGVSKAYAMTGWRIGFATGPRWLLEAMEKLQGQQTSGACSISQHAALAALTGPQDFIHETRAVFEGRRNMMVQMLNDTPGLSCTVPGGAFYAFASCEGMLGRTTPAGTLLATDEDVANALLDEANVAVVPGSAFGLAPYLRIAYALDNDSLKQACEAIGRFSHSLR

SEQ ID NO: 19620 - protein, 374 aa, Chromobacterium sp. 2002
MLIGVPKEIKNHEYRVGLTPSGVRELVAHGHKVLVQSRAGLGVGYTDEQYIQSGASIASNAEGVFETADMIVKVKEPQPVECRLLRSGQVLFTYLHLAPDPEQTKLLLESDVVAIAYETVTDERGGLPLLAPMSEVAGRMAIQAGAHALEKAQGGRGMLLGGVPGVAPAKVVVLGGGVVGLNAARMAMGLGADVTLLDKSLNRLKEIDMVFGGKIKTLMSDTATIEEMIKEADLVVGAVLVPGAAAPKLVTRRMLKIMKAGAVLVDVAIDQGGCFETSRPTTHQSPTYEVDGIVHYCVANMPGGVARTSTQALTNATLPFMLELANKGWVQALLDNPHLRNGLNVCRGKVTHRAVAAGLGYEYVDPFEAIKAAS

SEQ ID NO: 19621 - protein, 67 aa, Chromobacterium sp. 2002
MATGTVKWFNDSKGFGFITPDEGGDDIFAHFSQIKANGFKTLAENQRVSFDVTMGPKGKQASNIQPL

SEQ ID NO: 19622 - protein, 624 aa, Chromobacterium sp. 2002
MCGIAGFVGKGASEDLSRMLRLLSHRGPDGAGAWCDRDRGVYLGHTRLAIVDLADGHQPMWTEDGRLGVVFNGEIYNHQALRAELERAGHVFTTGHSDTEVLLHGYREWGEALTHKLNGMWVFALYDQARQRLFCSRDRFGKKPFYYTFQQDTLIFASELTALLTHPHVTATVSTRAIQKYIGYGYIPAPHTPYEGIFKLPAGCSLSFALQERVVEVERYWSFVLEPTETRPAGFERQCQEELTALLDQAVARRLMADVPVGVFLSGGVDSSAVAALAARRLEPGQLQTFSIGFDEKGFDESGYARRMAEHIEAQHHEQILRCEAARALLPEVVRRLDEPTGDSSLLPTYLLCRFARERVTVALGGDGADELFGGYAPFRALKWAGYYQKAVPKPVHQVIQLLTSHLPVLDGYMSLDFKLKRAIRGVGYPSRLWNPVWMCPLDEQEFTELFQQPVDLDEVFSEAIDAWERCSQPDPVDRTLQFFTDIYLQDDILAKTDRASMMNSLELRSPFLDIDVVNLARTIPSEYKIRHGETKYILKKAMEPFLPRDTLRRPKQGFAAPVAQWLRGSSLFSEKSGLSCLNNDFIDAAFADHACHRKNHHSFLWSQWVLGMVVPPRADGALM

SEQ ID NO: 19623 - protein, 400 aa, Chromobacterium sp. 2002
MENAYICDAIRTPFGRYGGTLSSVRADDLGALPIKALIERNPNVDWGAIDDVIYGCANQAGEDNRNVARMASLLAGLPQDVPGSTVNRLCGSSLDAIGIAARAIKSGETSLMIAGGVESMSRAPYVMGKADTAFSRNMKIEDTTIGWRFVNPLMKAQYGVDSMPETAENVAVDFAVSRADQDAFALRSQQRYAAAHEAGRFADELIPVTIAQKKGDPIVFAKDEHPRATTPEALAKLKGVVRPDGSVTAGNASGVNDGACALLLANEAAAGRYGLTPRARIVAMATAGVAPRIMGFGPAPAIRKVLAKAGLTLDQIDLIELNEAFAAQALAVTRDHGLADDDARVNPNGGAIAIGHPLGASGARLVTTAAYQLARTGGRYALCTMCIGVGQGIALIIERV

SEQ ID NO: 19624 - protein, 338 aa, Chromobacterium sp. 2002
MSAGKFETVLPDEPVFWDVEQRPSRQSETEAILPVEHVRVLVCDPIPSVAVERMREGGLLVDEWIGLSPAMLEELIGDYDAVVVRSATRLGAQQLAAAQRLRLIVRAGVGTDNIDLAAAASQGIAVLNTPKASTGSVAELALGMLLALARRIPQADAAVKSGGWPKKEFSDGIELAGKTLGIIGVGRIGGALGRCAAALGMVVVGADKAAEPVGRFEGLALLSLEALLACADFVSIHTPPSKAGRAVIGKKEIARMKDGVLLVNCARGGLVDEEALLTALDSGKVRGAALDVFAGEPPSDLRLARHPHVICTPHLGASTREAQARIGVEIAQLMLEQL

SEQ ID NO: 19625 - protein, 229 aa, Chromobacterium sp. 2002
MSQIDIRSFLRHQPLFQELSDSQLSALVPCTHEVRGQKGQIIFQKGDPCEGMYLVVYGRIKLSISSAQGAEKVIEIIHPGQSFAEAVMFLGKPCPVMAQFLEDGLLLQVEARSIFAAIARDAAFAHRLLAGLSLRLHGLVRDVERYSVENALQRVIGYLLQGEDHPGQPNRVVTLPVNKNLIASRLNLTPETFSRVLHQLSDAGLVAVNGREITLIDMNRLADFGSVAG

SEQ ID NO: 19626 - protein, 367 aa, Chromobacterium sp. 2002
MNAPIHSAIFTEPAPYWQPGVDDTLECVAVHDETHDVRTFTFRAVPARRFAYLPGQFITLELEIDGQTVNRCYTLSSTPTRPDTVTITVKRVPGGQVSNWLHDNMKPGQLVSVLGPSGEFSYASAPVRSYLFLSAGSGITPLMSMSRALADLGPQLDIAFVHSARTPADLIFRHELVQIARMRPGFRQAAIVQSRHPEPEWHGLEGFLDLPALERLVPDFRQRAVYCCGPAPYMSAVRKLLTDAGYDMALYHEESFNFAELAASPVVEEAGCQAETAGCEGGFEVRFAKLGDVITTAPGQTVLAAAQQQGLRLPSSCSQGVCGTCKTKLLEGKVDMKHGGGIRQREIDQGWILPCCSIPLTPLVLDR

SEQ ID NO: 19627 - protein, 180 aa, Chromobacterium sp. 2002
MKLVILDRDGVINKDRDDFVKNSLEWEPLDHSLEAIANLTQAGWRIVVATNQSGIGRGLFDLHALHAMHTKMHRLVNQAGGRIDAVVVCPHTPDDNCECRKPLPGMVKEVSERFNVKPDGLPMVGDSLRDLEAIAAMGGQPILVKTGKGEKTFEKGGLPEGTLVFDDLYDAVEYLIQTHH

SEQ ID NO: 19628 - protein, 465 aa, Chromobacterium sp. 2002
MQNQQDHLHRGLEERHINLMALGAAIGVGLFLGSASAIKMAGPAIMISYALGGFAIFLIMRALGEMAIHNPVAGSFSRYAQNYLGPLAGYLTGWNYWFLWIVTCMAEITAVGVYMGVWFPDVPHWIWALSALVLMGSVNFIAVKTYGEFEFWFALIKIVTIVLMIISSLGMIVFGFGNGGIATGIANLWTHGGFMPNGVKGILMSMQMVMFAYLGVEMIGLTAGEAKNPKKTLARAVDSVFWRILIFYVGALFVVMSIYPWDQIGTSGSPFVMTFEKMGIPAAAGIINFVVLTAALSSCNSGIFSTGRMVYNLAQQGQALPMFAKVGKNGVPNAAVLISVVMLLGGVLLNYLAPKEVFTWLTAISTFGAIWTWAIILLSQLKFRRTLSPAQLSALEHRMPLFPYGSYIALAFLVLVVGLMAYFPDTRIALVIGPGWLVLLVVLYYALGYHRQGGEPALKAARQSA

SEQ ID NO: 19629 - protein, 638 aa, Chromobacterium sp. 2002
MGKIIGIDLGTTNSCVSVIENGHPKVIENAEGTRTTPSIIAYMEDGEILVGAPAKRQAVTNPKNTLYAIKRLIGRRFEEKEVQKDIDLMPFEITKAKNGDSWVKVRDQELAPPQISAEVLRKMKKTAEDYLGEEVTEAVITVPAYFNDSQRQATKDAGRIAGLDVKRIINEPTAAALAFGLAKQEGDRKIAVYDLGGGTFDISIIEIADVEGEHQFEVLSTNGDTFLGGEDFDQRLIDYIVTEFKREQGVDLKNDVMALQRLKDAAEKAKIELSSASQTEVNLPYITMDATGPKHLAMKITRAKFESLVEDLIARSIEPCRVALKDAGVSINDIADVILVGGQTRMPKVQEAVKEFFGKEPRKDVNPDEAVAVGAAIQGSVLSGDRKDVLLLDVTPLSLGIETLGGIMTKLIQKNTTIPTKAQQTFSTADDNQTAVTIHVLQGEREKASANKSLGQFNLSDIPAAPRGMPQIEVTFDIDANGILHVSAKDKGTGKEAKITIQASSGLSEEEIQRMVKDAEVNAEEDKKLHELVQARNQGEGMIHSVKKSLAEHGDKISAEEKSAIEAALKEAEEVVKGDDKDAIDAKVQALMTASHKLAEQMYSQAQGEAGAEQPAGAGNKDEGDVVDAEFEEVKDKK

SEQ ID NO: 19630 - protein, 465 aa, Chromobacterium sp. 2002
MSLMRKKSVRGMLSAAHTSQGLRKELSAFDLTMLGIGAIIGTGIFVLTGTGATVAGPGLVLSFVIGAIACGFAALCYAEFASMLPVSGSTYTYAYATLGELIAWIIGWDLMLEYLLASSAVSVGWSGYFQSLIAGFGLHLPDALTAAAGARPGVETVFNLPAFVIAMLITALLAFGIKESKKVNNVVVMIKVAVVVLFIAIAVWHVKPANWNPALPYGMTGVFHGAAIVFFSFLGFDAVTCAAEEVKNPEKDIPKGVIWSLAICSVLYVIVSAIMTGIVPFMQFKGIDHPVSLALQVAKLDWFAGFVDLGAILGMLTVILVMTYGQTRILFAMSRDGLLPKVFSEVHPKYGTPYKATWLIGTLIALIAGFVPLGTLAELVNIGTLAAFSLIAAAIILLRKREPDLPRKFHCPGVPYVPALAIVFCVFLMTQLAALTWLCFVIWLVLGLMVYFGYSRRRSLLHVRT

SEQ ID NO: 19631 - protein, 552 aa, Chromobacterium sp. 2002
MYRYDEVDYRIVRERVEQFRDQTRRFLAGELSEDEFRPLRLMNGLYIQRHAPMFRIAIPYGHLASRQLRRLAHIARTYDKGYGHFTTRQNMQFNWPALERVPDILSELADVEMHSIQTSGNCVRNTTTDAFAGVAADELIDPRPYCEIIRQWSTLHPEFAFLPRKFKIAVSGSVDDRAATLVHDVGLHVVRAADGEIGFKVIVGGGLGRTPIVGEVIREFLPTRHILTYLDAILRVYNRYGRRDNKFKARIKILVKALTPQGFAAKVEDEWLHLKDGAATLRDEDVAHYASFFGAPAYETLSPNPEAFTAKLAEDRAFARWVEQNTRTHRQPGYRSVVLSLKKTGVPPGDITAEQMEAVADWSERFGFGEVRVAHEQNVILPDIKESDLYEVWQLARSQGFATPNIGLLTDIICCPGGDFCSLANARSIPVAEAIQRKFDDLDYLHDLGEIDCNFSGCMNACGHHHIGNIGILGVDKNGEEWYQITLGGSQGNHTAIGKVIGPSFAQADVPLAFEKIMNLYVEQRQDGERFIETVRRIGLEPFKERVYAKHH

SEQ ID NO: 19632 - protein, 106 aa, Chromobacterium sp. 2002
MDIQETIKQTVTSSPVVLFMKGSAQFPQCGFSARAVQIVKACGVDDFMTVDVLQNPEIRQGIKDFSNWPTIPQLYVKGEFIGGSDIMYEMFQSGELQELLKDIAQA

SEQ ID NO: 19633 - protein, 384 aa, Chromobacterium sp. 2002
MKKVHLAINAGSATLKFRAYSADGHGLLVKGLVEHFGQDGGRLTLTDGKGLPLLQQELAGNGRDLAVAAVINALADRQMTVAAVVHRVVHGGNRFSEPVRLTPQVRAGLEEFVALAPLHQPVSLAVIDAFTALDERLLQIACFDTAFHTSQPEVATRFGIARHWHAEGVRRYGFHGLSYAAIARRLPELGLAEAKVVVCHLGSGASACAMVQGRSVASSMGFSAVDGLLMGTRPGALDPEVLLYWIEHEGMGVAEVRRELYKNSGLLGVSGLSADMRELLASHVPAAREAVELFCYRVVREIGALAAAMKGLDAVIFTAGIGERSPEIRARVVKQLAWLGFELDLSANLAQARRLTTSASPRSAWMIPTDEEGEMLRSAALLLG

SEQ ID NO: 19634 - protein, 405 aa, Chromobacterium sp. 2002
MLSSQHRELVKATVPVLREHGVALTSHFYRRMFSHNPELKHVFNQAKQEAGQQQQALALAVLGYAEHIDDPSVLAPVVMRIAHKHVGLGIRAEHYPIVGHHLLSSISEVLGEAASDELLEAWRLAYGQLADLLIAAEQQLYTDGALSRGGWSGVRSFTVTRKVAESSEITSFYLSPSDKGAVPGFRPGQYITLKRFVPELGLLQPRQYSLSDAPGQDYLRISVKREPGNGSTPAGRISNLLHDTVHEGDQLELAPPGGDFFLHEERSTPVVLISGGVGVTPMIAMLNHLVLTRSPRRVAFVHGCRNGAVHAMKRHVNQLAAECDNVSKVVFYEEVGAEDRLGEDYDQQGRVDLGAVREQVLLPDADYYLCGPLAFMLAQRDWLLAAGVDGGRIHYEVFGSHTIAG

SEQ ID NO: 19635 - protein, 67 aa, Chromobacterium sp. 2002
MATGIVKWFNDAKGFGFITPDEGGEDLFAHFSAINTQGFKSLKEGQRVSFDVVNGPKGKQASNIQPQ

SEQ ID NO: 19636 - protein, 652 aa, Chromobacterium sp. 2002
MTPVSRVLVVSDDAKWQGEVLAGLGAAAMQLENPFGLSFLGAARLGEAMERVAADGEIQIVLVDKQLGEEGLAQPAVQLANRIIAFRPELSLYILLVDDDQKLLVEEMASHAVDGYFYREELDFSGWFRILTAELAEKSATPFYDRLKQYVRMAKDSWHTPGHSGGDSLKGSPWVGDFYEFVGENMLRADLSVSVPMLDSLLHPTGVIAESQALAAKAFGARKTYFATNGTSTSNKVIFQTLLTPGATLLLDRNCHKSVHHGVILSGARPVYLDSSINPKYGIFGPVSKATLFAAIQAHPEARVLILTSCTYDGLRYDLEPIVEAAHARGIKVVVDEAWYGFARFHPELRPTALEAGADYVTQSTHKVLSAFSQAGMIHVNDPDFDEHLFRENFNMHASTSPQYNLIASLDVARKQAVMEGYRLLERTLRLAQELRQKIDSTGVFRVLELEDLLPEEVREDGIRLDPTKLTIDITGSGFSADELQQALFERYNIQVEKSTFSTVTLLLTIGTTRSKVSRLHDAMLRLAKEKRPRHTPRRLPEIPHFSRLACLPRDAFYEEGERLPLLDDEGRPNSELLGRVCCDQIVPYPPGIPVLVPGQVIDESILSYLARLQKAQKTIEMHGLAGNSGDYVVRVLSSVEFLQLPSRILFG

SEQ ID NO: 19637 - protein, 406 aa, Chromobacterium sp. 2002
MSDIKKVVLAYSGGLDTSVILKWLQDTYQCEVVTFTADIGQGEEVEPARKKAVALGIKQENIFIDDLREEFVRDFVFPMFRANAIYEGEYLLGTSIARPLIAKRQIEIANQTGADAVSHGATGKGNDQVRFELGYYALKPDVKVIAPWREWDLLSREKLLAYAEKNGIDITKKKSGGSPYSMDANLLHISYEGTVLENPAAEPEEDMWLWTVSPENAPDQAEYVELEYKNGDIVAINGVALSPAQVLTELNRLGGKHGIGRLDIVENRYVGMKSRGCYETPGGTIMMKAHRAIESITLDREVAHLKDELIAKYASLIYNGYWWAPERKMMQSMIDASQATVNGWVRLKLYKGNVIVVGRDSKTDSLFDPNIATFDEDFGAYNHADAAGFIRLNSLRMRIAAKLYNK

SEQ ID NO: 19638 - protein, 858 aa, Chromobacterium sp. 2002
MRFDKLTTKFQQALADAQSLALSNDHAYIEPQHLLAAMLDDADSGVGSLLARAGVNVTGLRGGLKSAIDRLPKVQGTGGEITVSRDLGNLLNLTDKAAMKRGDAFIASELFLLALLDDKGETGRLLKDNGGSANALNAAIDAVRGGANVESQDAESQREALKKYTLDLTERARQGKLDPVIGRDDEIRRAIQVLQRRTKNNPVLIGEPGVGKTAIVEGLAQRIVNGEVPESLKHKKLLVLDLAALLAGAKYRGDFEERLKSVLSDLAKDEGNTLIFIDEIHTLVGAGKAEGAMDAGNMLKPALARGELHCLGATTLDEYRKYIEKDAALERRFQKVLVDEPSVEDTIAILRGLQEKYEIHHGVDITDPAIVAAAELSHRYITDRFLPDKAIDLIDEAASRIKMELDSKPEEMDKLDRRLIQLKIEREAVKKESDEASQKRLGLIEDEIDRLSREYADLEEIWKAEKATAQGSQSIKEEIDRLKVEMEDLKRQGDWQKLAELQYGKLPQLEARLKEAEAAGAGTQKPNRLLRTQVGAEEIAEVVSRMTGIPVSKMLAGEREKLLRMEEVLHERLVGQDEAVRAVSDAIRRSRSGLSDPNRPYGSFLFLGPTGVGKTELCKTLAGFLFDSEDHLIRIDMSEYMEKHSVARLIGAPPGYVGYEEGGQLTEQVRRKPYSVILLDEVEKAHPEVFNILLQVLDDGRLTDGQGRTVDFKNTVVVMTSNIGSQHIQAMGSDDYQVIKLAVMAEVKGYFRPEFINRIDEVVVFHALGSAQIRSIARIQLKSLERRLAKLELSLQVTDAALDAIAEAGFDPVYGARPLKRAIQSDIENPLAKAILAGKYEPKATVLVDAQNGQIVFE

SEQ ID NO: 19639 - protein, 426 aa, Chromobacterium sp. 2002
MDNKRTSIDSSSPAVPDRRDFLKGALTVMGSTTLLAALPAGIATSAWAAGSDKPEKTEVRVGFIPLTDCASVIVASKMGFDKKYGITIVPSKEASWAAVRDKMVNGELDAAHVLYGLMYGVHLGIGGPKKDMAVLMTLNQNGQGITLSNQLKTKGVTSGPALAKLIKAEPREYTFAQTFPTGTHAMWLYYWLAAHGVNPMSDVKTIVVPPPQMVANMRVDNMDGYCVGEPWNARAIADNVGFTVATTQQIWAGHPEKVLGTTGDWVKQNPNTARALIAALLEASRYIDDVKNRASVAKLIADKAYVNAPEPVIEGRFLGTYEDGLGKKWQDPHLMKFFDEGKVNFPYLSDGMWFLTQHKRWGLLKADPDYLGVARQINQIALYKEAAALAKVALPRSDMRSAKLIDGVVWDGKDPKGYAASFKIRA

SEQ ID NO: 19640 - protein, 393 aa, Chromobacterium sp. 2002
MEEIVIVAAGRTAVGNFGGSLAKIPAPELGATVIKALLEKTGIAPEQVSEVIMGQVLTAGVGQNPARQALIKAGIPVHVPAMTINQVCGSGLKVTHLAAQAIACGDAEIVIAGGQESMSMSPHILPGSRDGFRMGPATLVDTMVYDGLTDVYNQYHMGVTAENIATKYGISREEQDAFSAASQNKAEAARAAGKFVDEIIPVMVPQRKGDPVAFATDEFIKAGATAEGLGKLRPAFKKDGTVTAGNASGVNDGAAAVIMMTAKKAAELGLKPLARIKAYASAGVEPSIMGMGPVPATQRVLERAGWSLGEVDLIEANEAFAAQALGVARELQWDADKVNVNGGAIAIGHPIGASGCRILVSLLHEMQRRDAKKGLATLCIGGGMGVALAVERD

SEQ ID NO: 19641 - protein, 409 aa, Chromobacterium sp. 2002
MQNLSLAKDKIKILLLEGIHQTAVDSFRQDGYSQIDYHKKALAPEELLERIADAHIIGIRSRSQLTDEVFAAANKLMAVGCFCIGTNQVDLKAAARHGIPVFNAPFSNTRSVAELVIAEAIMLMRGIPEKSTLAHRGGWLKSANNSYEVRGKTLGIVGYGHIGTQVGILAESLGMKVAFYDTENKLPLGNAHQVATLKELLGQADVVTLHVPETPDTQDMIGAAELSAMKPGAHLLNASRGTVVDIAALAEALRRKHLHGAAIDVFPVEPEGNGEAFSSPLCEFDNVILTPHIGGSTLEAQANIGGEVAAKLIKYSNNGSTLTAVNFPEVSLPEHRGKCRLLHIHKNQPGVLARINDEFSRAGINIAGQYLQTNEEIGYVVIEIDSAASQTALETLQRIEGTLRCRVLY

SEQ ID NO: 19642 - protein, 296 aa, Chromobacterium sp. 2002
MTDTPFHCGFVAIVGRPNVGKSTLMNHLIGQKVSITSKKAQTTRHRVNGIHTEDTAQFVFVDTPGFQTFHKGALNEVLNRSVKETLSDVDCVLFVIEAMRWTGADKELLPLLPKHTPVMLVINKLDKAKDKQALMEFIETVKADFAFADVEVVSAKHGQRLAELLDKVRPRLPESMPLYPEDMVTDKSERFLAAEIVREKLFRYLGEELPYSMNVEVEQFELDGALRRIHIAVLVDKEGQKGILIGKGGEKLKKISTEARLDMEKLFDGKVYLEVWVKVKSGWADDVRFLKEFGLH

SEQ ID NO: 19643 - protein, 695 aa, Chromobacterium sp. 2002
MQTFFLAPLGFDAGLTSVALGMIRALEQAGLRVGFVKPIAQGAGHHEPERSTHFARAICHLASPEPLTMERVEHFLSQGQVDQLMEEVVSLYQQAARNVDVVIVEGLVPDQKHPYSTFLNTRIARNLQAQTILVGAADKLASHEIAEQLEISIQAFGGDHGSTAGYILNRVSKQHDTAQMALEILESSQALQHNRLPLLGAIPLEPELLAPRTLDVANYLKARLVHAGQMTRRRVRSTVITARTVPNIVHLLKPGALIVTPGDREDIVLATAMASMNGVPLAGLLLTCDAMPDPRIQQLCHQAFTSGLPVLASESNTLETTSLLTNMSLQVPADDLERMEQVIDFVAEHLDAKALRNRVGAPREHRLPPPAFRFQLMEKARQANKRIVLPEGNEPRTIKAAAICHEKRIAQCVLIGSRAEIEQVAEAQGVALPADIEIMDPNEVRGRYIEPMIELRKNKGLNAPMAEQQLEDNVVLGTMMLALDEVDGLVSGAVHTTANTIRPALQLIKTAPEAKLVSSVFFMLMPEQVLVYGDCAVNPDPSADELADIAIQSADSAAAFGIPPRVAMISYSTGSSGSGDDVEKVREATRLAREKRPDLIIDGPMQYDAASVESVGRQKAPDSPVAGRATVFVFPELNTGNTTYKAVQRSANVVSVGPMLQGLRKPVNDLSRGALVDDIVYTIALTAIQADQQAG

SEQ ID NO: 19644 - protein, 400 aa, Chromobacterium sp. 2002
MSSSILVINCGSSSLKFALIDTTTQHASLTGLAEKLGLDDAQITFKHQGEKTVQTLAEGNHAAAMRAILAQLQGRGLFDSVQAIGHRVVHGGERFKASTLIDDEVIAAIEDCARLAPLHNPAHVLGIRTAIACFPGLPQVAVFDTAFHQSMPQRAYLYPVPMALYREHGVRRYGFHGTSYRFVSAEAARMLGKPLEETALVCAHLGNGASAAAILGGKSVDTTMGLTPLEGLVMGTRSGDVDPGLFGYLASELKLDVNAITELLNKQSGLLGLSELSSDCRELEDAALAGDGAAQLALEVFSYRLAKQIAALTVALGRLDAVLFTGGIGENSSYLRERVVKLLGFLGLRLDTDANDRCVRGQAGCITAPGSVPALVINTNEELMIALDTAALATPAALTR

SEQ ID NO: 19645 - protein, 339 aa, Chromobacterium sp. 2002
MRALTRIIEQARHAPARIALSEGEDPRVLDAAVRATREGIARIVLVGDRAAIAALAQQRGLDLSGIDFHDPADAPLQAELAQTLFELRQHKGMTREQADSAARDPLVCANLLVKTGRADGTVSGAVRTTADVVRTAIQVIGVQPSFKLVSSFFLMMLCEPFHSLKGGLIFSDCGLVVDPSASELADIALAAADSARQLLMEEPRVAMLSFSTNGSAKHAAVDKVAQAAAQVKAQRPELAIDGDVQLDAAIVAEIANRKLPDSQVKGKANVLIFPNLEAGNIGYKLAERVGGAVAIGPLLQGLAKPANDLSRGCSADDVFHVIAVTVVQAHAARETATAG

SEQ ID NO: 19646 - protein, 339 aa, Chromobacterium sp. 2002
MSYNIALQFEDGVTRFISCNENEKLSDAAYRQKVNLPLDCRDGACGTCRCLCESGEYDLPESSYIEDALAPEDAEQGYILTCQTRPKSDCVIKIPASSVACKTGVSSFAGIIAAVLPLSDSTIGFSIKLDDPASLSFLPGQYVNVGIPGTELTRAYSFSSAPGASEAAFVVRNVPNGRMSHFLSHDAKVGERMTFAGPYGSFYLREVARPVLFLAGGTGIAPFLSMLDVLAESGSTQPIRMVFGVTNDVDLVALEQLDAIKARLPQFDYRTCVVAAESAHPRKGYVTQHIEPEWLNAGDVDVYLCGPVAMVEAVRGWLQQSGVTPASFLYEKFSASSEA

SEQ ID NO: 19647 - protein, 397 aa, Chromobacterium sp. 2002
MTQTLPVIVAGGGIGGLAAALALVRQGFSVKVLEQAPQIGEIGAGIQLGPNAFHAFDALGVGDKARGRAVYTDEMVMHDALDETLVGRIPTGEAFRKRFGNPYAVIHRVDVHLSLLEGAKETGRVEFLTGTHVERVEQDADSVTVYDQHGNAYRGIALIGADGVKSVVRKQFVNDPPRVSGHVVYRAVIDKKDFPENLQWNAASIWVGPNCHLVHYPLRGGEQYNVVVTFHSRDKEEWGVTEGSPEEVQSYFQGICPKARQLIELPKSWKRWATADREPIDTWSFGRVTLLGDAAHPTLQYLAQGACMALEDAVTLGEALRVNGNDFIKAFELYQRSRVARTARIVLSAREMGRIFHAKGVERLVRNELWKGRSAERFYDAMEWLYGWNADNCLARG

SEQ ID NO: 19648 - protein, 205 aa, Chromobacterium sp. 2002
MFPSDVEDARQWIRSRLEGDWETVVGGDLPQRPATGAERPAAVLVPLVWHAEAPAVLLTRRNDALSTHAGQVSFPGGKIDPHDPSAVHAALREAREEVGLAEAGVDVLGTLPDYITITRFRVTPVVGLLVPPLALAPEPSEVAEVFEVPLKLVLDPRQYERHSYVRDGMAGVYLSLTYGPHRVWGATAAMLRQLSAILNPGEAAL

SEQ ID NO: 19649 - protein, 126 aa, Chromobacterium sp. 2002
MQRSMLKSKLHRVTTTHAELHYIGSCAIDENLLEAADIREYEEVQIWNVTNGERFATYAIKAERGSGVISVNGSAARRAAPGDLLIIASFAVYEDAELKDHAPKLVFVDGSNHITELAGSTPVQPA

SEQ ID NO: 19650 - protein, 555 aa, Chromobacterium sp. 2002
MLNLSFRPRLIDALKGYHREVFRHDVLAGLTVGIVALPLAMAFAMASGVTPQAGIFTAVIAGFLASLLGGTRFSVTGPTGAFIVVIYGIVAKYGVANLLICTFMAGMMLVLMGLMRLGQVIKFFPMPLITGFTNGIAVLIFLTQLKDFFGLPVAQMPAGFFAIVATLRARLAEFDGMTLAVSGASLALILLWPKRLNKLLPSPFVALLLATITVALFHLPVATIGSKFGGIPQGLPAFSGLALDWATLSELMTPAFTIALLGAIESLLCAVVADSLTGDKHDANQELIAQGIANMVVPFFGGIPATGALARTATNISNGGRTPVAGMVHAALLLLVILVAAPLASYIPLAVLAAILVAVALKMGDWDIRKAAQFPRHDTAVLVVTFLLTVAFDLTIAVEIGLLMSAVFFIQSMARNTSVQRLRPEHAQLFERHSIAGKTVPPGCAAFRVEGALFFGAADTVEQVLHDAPDARVIILQLHRLVLLDTTGLLALSALRQRLAEERRTLILCGAGAEVMGLLVGARLAAEMGERNIQPDLATALMRAEELLTSGVVWA

SEQ ID NO: 19651 - protein, 561 aa, Chromobacterium sp. 2002
MSTENNAPVVSNFIRNIIDEDLASGKHASIVTRFPPEPNGYLHVGHAKSICLNFGLADDYQGKCNLRMDDTNPEKESDEYVQSIKDSVSWLGFKWDGEVRYASDYFQPLYDYAVELIKAGKAFVCDLNAEEMRAYRGSLTEPGKNSPYRDRSIEENLDLFTRMKNGEFPDGSKTLRLKIDMSSGNVNMRDPVIYRIRRAHHHRTGDTWCIYPMYDYTHCISDAIEGITHSLCTLEFEDHRPLYDWVLDNISIGCHPRQYEFSRLELLYALTSKRKLQALVNDGLVTGWDDPRMPTIAGMRRRGFSPAGIRLFAQRIGVSRGENIIDMSVLEGAVRETLEAEAPRVMAVLDPIKVTLTNFEEGVTASRAAPFHPHHPEFGEREVPISREIYIERDDFAEVPPPKWQRLTAGGEVRLRYSYVIKCDEVIKDATGRVVELKCSIDHDTLGQNPVGRKVKGVIHWLSCEHAIEAQVRLYDRLFTEPRPDAVRGEDGEYVDFRQFLNPHSLATVTACVEDVVLKAEPETRYQFERLGYFVTDRYEHQPGVKAVFNRTVGLKDSWAK

SEQ ID NO: 19652 - protein, 196 aa, Chromobacterium sp. 2002
MSTPISNTALDQLFNNARTHTHWQPRPVGDDTLHQLFDLLKMAPTSANCSPARFVFVKSADAKQRLKPCLSEGNVDKTMAAPATVIVAMDTRFYEHLPQLFPHTDARSWFEGNEALIQTTAFRNSTLQGAYLIMAARSLGLDCGPMSGFDNAKVDAEFFPDGRFKSNFLINLGYGEANKLHARAPRFRFEEACLIA

SEQ ID NO: 19653 - protein, 361 aa, Chromobacterium sp. 2002
MTMALEMNKLDTNKKVGLFLVSAIVLAVLPFVVGGLLGNSWLRIIDFALLYVMLALGLNIVVGFAGLLDLGFIAFYAVGAYTFALLGSPHFDIHLPFYITIPLGALVAAFFGILLGTPVLRLKGDYLAIVTLGFGEIVRIFMNNLNAPINITNGPQGINLIDPVKIGGLSFGKPLEIAGHSFNSVYLYYYFFLALTVLVVIMAWRLQHSRIGRAWVAMREDSIAAAAMGLNIRNIKLLAFSLGALSGGVAGGLFASFQGFISPESFGLLESVMILAMIVLGGMGHIPGVILGAVVLTVAPEVLRDVIGPLQMHTFGRMLIDPENARMLIFGLALVIMMLLRPEGMWPSKRRKAEFDDAKKG

SEQ ID NO: 19654 - protein, 394 aa, Chromobacterium sp. 2002
MQNQSIVIVGMARTPMGGLQGSLSPLTASELGAVAMAAAVERAGIDAASVDEVIMGCVLPAGQGQAPARQASLKAGLPLATGCTTINKMCGSGMKAVMLAHDLLLAGSAKVMVAGGMESMSNAPYLIPKARGGLRLGHGELKDHMFLDGLEDAYDKGKLMGVFAELCAERFGFSRVAQDEFALSSLARAVAAIESGAFAGEIAAVKLPGKSGETVVDTDEQPLKARPDKIPSLKPAFKPDGTVTAANASSISDGAAALVLMSEDEARARGLTPLARIVGHSTFAQEPSWFTTAPVGAMRQLFAKTGWQADEVDLFEINEAFAVVTMAAMQELGLPHDKVNVNGGACALGHPIGASGARILVTLIAALQRRGGKKGVASLCIGGGEATALALELV

SEQ ID NO: 19655 - protein, 294 aa, Chromobacterium sp. 2002
MANIGFIGLGIMGAPMAGHLITGGHTVFTYTRSHTPGAILEAGARVCASGAEVARQADIVITMVPDTPHVEDVLFGANGVAAGLSAGKIVVDMSSISPVATKEFARRINELGCEYLDAPVSGGEVGAKAATLTIMVGGSEAAFATVQPLFELMGKNITLVGGNGDGQITKVANQIIVALTIEAVGEALLLAAKAGADPAKVRQALMGGFANSRILEVHGERMVKRTFDPGFRIELHQKDLNLALTTGRQLGVSLPNTATAQELFNACAAHGGAGWDHSAMVRALEKMANFEIGQ

SEQ ID NO: 19656 - protein, 409 aa, Chromobacterium sp. 2002
MQPVHKSQKLANVCYDIRGPVLEHAKKMEDEGHRIIKLNIGNPAPFGFFAPDEIIEDVIANLPDASGYSDSKGLFAARKAIMHYAQQKQLPNVAMEDIYIGNGASELIVMVMQALLDTGDEVLVPAPDYPLWTAAVSLAGGKAVHYVCDEQAGWFPDIEDIRAKINANTRAIVVINPNNPTGAVYPPELLAEIVELARQHQLIIYADEIYDKVLYDEVQHTSIASLAPDVLCVTLNGLSKNYRACGYRAGWMVLSGEKKHARDYIEGLNMLASMRLCANVPAQFAIQTALGGYQSINDLVAPGGRLARQRDLAHELLTAIPGVSCVKPQGALYLFPRLDPKIYPISDDQQFILELLQEEKVLLVQGSGFNWIAPDHFRVVFLPNSDDLIEAIGRIARFLENYRKRHGTD

SEQ ID NO: 19657 - protein, 410 aa, Chromobacterium sp. 2002
MALIVQKYGGTSVGTTERIKNVARRIAKWKAQGHDLVIVVSAMSGETNRLIGLAKDIQEYPDARELDVLVSTGEQVTIGLLAMALKEIGVPAKSYCGWQVPVVTDSSHSKARIQSIDDAAMRADLDAGQVVIVAGFQGVDELGSITTLGRGGSDTSAVALAAALKADECQIYTDVDGVYTTDPRVVPEARRLKTITFEEMIEMASLGSKVLQIRSVEFAGKYKVRLRVLSSFEEEGEGTLITFEEDQNMEKAVVAGIAFDRNEARINVKGVPDKPGIAYQILGPIADANIEVDMIIQNVGENGTTDFSFTVPRGEFQRTLGILRDVQTHIGAAKIDADDKVAKISIVGVGMRSHCGIASTMFRTLAEEGINIQLISTSEIKVSVLVDEKYLELGVRVLHKAFGLDQTVEA

SEQ ID NO: 19658 - protein, 326 aa, Chromobacterium sp. 2002
MNKTVQHERLEQAQRVLEIEADAILALRARLDGAFLAAIDAILACAGRLVVTGIGKSGHIGRKIAATLASTGTPAFFVHPAEAAHGDLGMITDGDVLLALSNSGESDEVIALLPALKRKDITLIAMTGRPDSTLAREADIHLDAAVEMEACPLGLAPTSSTTAALALGDALAVTLLEARSFREEDFALSHPGGSLGRRLLVHVRDLMHAGDTLPVVQSGTTLKDALLEMTRKGLGMTAVVDASANLVGIFTDGDLRRTLDKTLDLSGLAIDDVMFRQPRTISAERLASEAVKLMETHKVNGLLVVDDAGHLVGALNMHDLLQARIV

SEQ ID NO: 19659 - protein, 284 aa, Chromobacterium sp. 2002
MALYGFDAFSPAEIAERVETIGVVKAQLPLRQMALLGVLAGAFIGLGALYFVLVTSDPSLGFAASRVLGGLVFSLGLLLVVVAGAELFTGNNLLAMAWADGRIGTGLLLRNWLVVCLANFVGAAGLALMVWLSGHPALNHGLVAEQVVRLAAAKCSAPLATLFWRGALCNVLVCLAVWMAMAGRSVTDKMVAVVFPISAFVAAGFEHSIANMYLIPLAMLLKDGVAGPIPFADTIGWGGLLRNLLPVIAGNLLGGSVLVALVYYLIYRRGAAVAAPVAAENGSE

SEQ ID NO: 19660 - protein, 67 aa, Chromobacterium sp. 2002
METGTVKWFNDAKGFGFISPDAGGEDLFAHFSEIRADGFKSLQEGQKVSYQSGKGQKGPQATNIQPL

SEQ ID NO: 19661 - protein, 399 aa, Chromobacterium sp. 2002
MTHSSTSDVLFLLLGAVMILAMHAGFAFLELGTVRKKNQVNALVKILTDFAVSAIAYFFIGYGVAYGVHFFQPASALNAESGYGLVKFFFLLTFAAAIPAIVSGGIAERAKFHPQSAATFLLVGFVYPFFEGIAWNNHYGVQDWLTHAFGQPFHDFAGSVVVHAVGGWIGLAAVLNLGARRGRYSKEGRIAAHPPSSIPFLALGAWILIVGWFGFNVMSAQKLEGISGLVAINSLMAMVGGTLTAMWLGKNDPGFIHNGPLAGLVAVCAGSDLMHPAGALVVGAIAGALFVQLFTLTQNRWKIDDVLGVWPLHGLCGAWGGIAAGLFGQPWLGGAGHVSLVSQLIGTLGGIAVGFGGGYLVYGLLKRSVGIRLSEEEEFNGADLSIHQITATPERESNW

SEQ ID NO: 19662 - protein, 875 aa, Chromobacterium sp. 2002
MSVSLKSLIERLTPLARQSVEQAASRALSRTHYEIEIEHVLLTLLDQDMNAARAALQAAGIDLADLQRGLEAVLDGFRTGNTRNPVLSVWLPKWLEKAWLLASAEFGQESVSTLDLLLALLRDESLRPAVQSGCPALLRVEAGRLQPAYAALRQHGGEGGGPVAATEPDQPAEMPAGRVRSGVALDKYTIDLTAQARAGKIDPVLGRDGEIRQMIDILMRRRQNNPILTGEPGVGKTAVVEGLARKIVHGEVPPVLAGVCLRTLDLGLLQAGASVKGEFENRLRQVIDEVKASPVPIILFIDEAHTLIGAGGAAGQNDAANLLKPALARGELRTIAATTWAEYKKYFEKDAALARRFQVVKVEEPAPEVAVQMVRGLTHAMATHHQVEILNEAVAAAVHLSSRYITGRQLPDKAISVLDTACARVALSRAGKPGPIEDVAVLIANAEREIAALQREEGHAERIAELEARRGELQADLERLHTVWEAQQQLVAEIDELKQQQGEVKPAKGKKVSPLQAKRQALRELHKQQPLAFECVDESVIADVIAGWTGIPLGRMVSNELAQVQQLARLLGERVIGQDHALEQIAERVQIAKAGLEDPGKPKGVFLLVGPSGVGKTETALTLAEALYGGERNLITINMSEYQEAHSVSGLKGSPPGYVGYGEGGVLTEAVRRKPYSVVLLDEVEKAHPDVLELFFQVFDKGVLEDSEGREVDFKNTIILLTSNAGSELVMRACEHGVTVEGETREPTPDNLVEILRPTLQQVFKPAFLGRLAIVPYFPIGDEVLHAIVGLKLDKIRQRIADNHGAKVEFPDELAGIMAARCLDVDSGARNADAILTRTLLAQISSDLLARMASGKPVKKIAVALKGEQLKVRVS

SEQ ID NO: 19663 - protein, 335 aa, Chromobacterium sp. 2002
MLAMKKRVVAYKKLPPALLARLAEQFEVIGFDGVNDTNRAAFAEAVAGAHGLIGSSVRIDATLLDPARELELISTISVGYDTFDVDYLTRRGILLANTPDVLTETTADTLFALILATARRVVELAEFVKAGHWQRSIGPAHFGVDVHHKTLGLIGLGRIGQAVARRANLGFGMNVVYYSRHAVPEAEAAYGARRVGLNELYASADFVCVVLPLTAETDKLIDADAFARMRPETIFINGSRGPIVDEAALIQALKSGAIHGAGLDVFEREPLPADSPLLQLPNVVALPHIGSATHETRFAMAEMAVDNLIAGLNGQRPRAVVNPSSRPFATLGEAS

SEQ ID NO: 19664 - protein, 288 aa, Chromobacterium sp. 2002
MKVGYIGLGIMGRPCVLNLLKAGHQVSVWARRRESAEPLLAAGACWCDSPAELAAGVELVVTNVSDTADVEAVLLGDNGVALGATPGLVCADMSTISPIGARKIAASLAEKGIDFLDCPVSGGEVGAINGTLTIMVGGKAEALEKARPALQAMGKTITHIGESGAGQVAKACNQIAVGVGVAAVAEVMKLAKACGVDPAPVREALLGGFAQSRVLDVHGQRMIDDNYAPGFKAKLHLKDMGIVLDTARELGIKLPEAERVAGLIGELVEKGEGELDSSAIARLIWEKN

SEQ ID NO: 19665 - protein, 343 aa, Chromobacterium sp. 2002
MSHKVAFSFADGKTLFFDVRPNEVLLDAALRNGVNIPLDCREGVCGTCQGRCEAGRYSQDYVDEETLSAADLAARKVLTCQTRVQSDASFYFDFDSSLCHVGGTRLLSANVSGVRQVSETTAILHLDASAYPQQLDFLPGQYARLQVPGSAAWRSYSFANRPNPRNQLQFLIRLLPNGAMSDYLRERCQPGQAIEFEAPLGAFYLRQVERPLVMVAGGTGLSAFLGMLDELAEQGGCGQPVRLYYGVSNARDLCELERLAGYAERIADFSYQIVVMNPSPEWAGKAGLIPEHLDRRWLAARPFDMYLCGPPPMVEAIKQWLDAQGLADARLYYEKFSDSNTSR

SEQ ID NO: 19666 - protein, 387 aa, Chromobacterium sp. 2002
MQIAIPAERLAGEARVAATPETVKKLVAMGHTVVVESGAGRLSAVPDAAYADAGASLAANRASALANADIVLQVRPPEADQIAEFKTGATVVSLMNPYANPHLAAMAAKKLSAFAMELLPRTTRAQSMDVLSSQNNIAGYRAVLLATHYYPRFMPMLMTAAGTVKPARVLIMGVGVAGLQAIATAKRLGAVVEATDVRPSTKEQVESLGAKFIEVPMTDEEKAASDGVYAKEMSDDYKRRQAELVTKHAMAADIIITTALIPGKKAPQLISAEVVRAMKPGSVIIDIAAEAGGNCALTVPGEVSVTDNGVTVVGTTNLPALVAADASSLYARNLLTFLSLMLSKDGFTLNLEDDLLAATLITHDGAVRFGQPSSPSAAAAQPAATRA

SEQ ID NO: 19667 - protein, 550 aa, Chromobacterium sp. 2002
MDSKRLIIFIVLSMSILLLWQEYFAPKPTPQQLAKSQTTAGAPGAPAAPSAAAQPADAAKLTSGQRITVSTDLYKAEIDTVGGDLRRLDLLKHNAAEDASKPFELFTDKGGRVYVAQTGLVAASNPALPTHKTVFTAEKTSYQMNGDKLEVKLTAPEANGVKVSKVYTFKKGAYDIDVRYDISNSGSAPVAPTAYFRLLRDGQKPEGEGRFASTFTGPAVYTTDGKFQKVSFDDLTKGKGDYVKSADNGWVSMLQHYFMSAWIIKPLGGQSVCAAGQPCRFELKSSNGLFSAATLVDLPAIAPGASRSITVPLYAGPEEFDIITKVADGMEYAKDYGWVHIFASPLFWLLTKLHALVNNWGWAIILLTLTVKALFYPLTAASYRSMGKMKALAPRLERLKEQYGDDRMKMQQAVMEMYKSEKVNPLGGCLPMVIQIPVFIGLYWSLLASVELRQAPWTLWINDLARPDPFYVLPAIMAITMFLQTFLNPPPADPMQAKMMKIMPLAFSAMFFFFPAGLVLYWVVNNVLSIAQQWYINKQIEKAKKLALQS

SEQ ID NO: 19668 - protein, 760 aa, Chromobacterium sp. 2002
MDEQLRQNALDFHQFPQPGKIQVSPTKPLATQRDLALAYSPGVAAPCDAIVEDPLNAYKYTARGNLVAVITNGTAVLGLGNIGPLAGKPVMEGKGVLFKKFAGVDVFDIELNENDPDKLVDIICSMEPTFGGINLEDIKAPECFYIEKKCRERMGIPVFHDDQHGTAIVAAAAVLNSLRLVNKDISKVRVVASGAGAAAIACLELQVALGVKRENITVCDSKGVIYEGRDEKMDESKKRFAIKDNGQRKLADAMVGADIFMGLSGPKLVTQEMVKSMAAHPVILAMANPEPEILPPLVKEVRPDAIIGTGRSDYPNQVNNVLCFPFIFRGALDVGATTINEEMKLATVRAIADLAMAEQSDVVASAYGDQELSFGPEYVIPKPFDPRLIVKIAPAVAKAAMDSGVATRPIADFDAYVEQLAQFVYKTNLFMKPVFSQAKTDKKRVVLAEGEDERVLHATQEIVSQGLAFPILIGRPSVIEKRIERLGLKMTPGKDFELVNNESDPRFNEYWKEYYQLMKRKGVSQEQARRRVIGNTTLIGALMVRRGEADALICGTYGAYRQHFEIVENVLGYANEKKVAGAMNALMLPTGNIFITDTYVNPNPSAEQLAEITAMAAESVKRFGIAPKVALLSNSSFGTSGIESAGKMREALALIQEAQPELEVDGEMQGDAALVEAIRNQAMPDSTLKGAANLLVMPNVEAANISYNLLRVSASDGVTIGPILMGMSKPVHILTQISSVRRIVNMVALAAVDAQVACKN

SEQ ID NO: 19669 - protein, 475 aa, Chromobacterium sp. 2002
MIGNQQHSNGLQHSLKQRHMTMIALGGVIGAGLFVGSGVVIKATGPAAILSFLITGLLVVLVMRMLGEMAVALPTGGSFYEYAREAWHDRPAVGELAGFLTGWMYWYFWVIVVALEAVAGANLVRYWLPDMPTWIISLTLLVTLTLTNLISVKSFGEFEFWFSSIKVGAIVVFLFLASLYVLGMWPGASLNVSNLTAHGGFAPHGWVPVLTGAVAATGFYFGAEIVTIAAAETAEPQKAIAKATNSVITRVLVFYVGSVLLVVCLVPWSSPGIATPYVSALNAMGIPAAAQIMNAVVLTAVLSALNSGLYASSRMLFALTKRGDAPKSLAKLTRNGVPVRAILFATLFGYAAVVMSYISPDKVFAFLVDSYGTVAIFVYILIAISQLRLRARLEREAPERLRVKMWAYPYLTYLAIAGMIGIVVAMAFIPDQRSPLLLGVASLGILLLGYVVRQIFRKGAPAAALAEPSTDYTKL

SEQ ID NO: 19670 - protein, 231 aa, Ochrobactrum anthropi
MSLIDRGLVRKLSLFAKMSDGELDKLVSYATTKRVPPGEAIFEQGDDAVLFYLLLHGRLKVNQITPDGQQIIVRMVHPGDLFGFARALQRSDYPGTAIAVAESIVLAWPTELWDYFVEQNPGLAMNAIQTIGKRLEEAHTRIREMSTEEVERRVAHTVLRLARQAGRKEDDGIRIDFPITKQDIAEMTGTTLHTVSRILTGWEAQGFVRGGRQKLTVLNMSGVRRLADGER

SEQ ID NO: 19671 - protein, 285 aa, Lactobacillus mucosae
MKKQSFKKLIQTLVLALGAFLLAFAPLAGTVTAHAADNQSSVSAIKKRGYIKIAVFGDLPPYGWVNKDGKRVGYDLYLARRIAKDLGVKAKFVQVNANNRVDTLNSNKADLVLANFTVTSERKQTVDFAKPYMKVSVGVVSKKSDPITKVSQLKGQKLIVNKGTTAEQYFTQHQTGASLLKFDSKTQQFNALKNGRAKALADDNSYLYAWVKNNPKYTVGIKQLGKSSYIAPAVKKGNKSLLNWTNKEITKLNGENFFEKDYNQELKPYFGSEVKASDIILTNQK

SEQ ID NO: 19672 - protein, 552 aa, Klebsiella pneumoniae
MRFTGAQLVVHLLERQGITMVSGIPGGSILPIYDALSQSTQIRHILARHEQGAGFIAQGMARTEGKPAVCMACSGPGATNLVTAIADARLDSIPLVCITGQVPASMIGTDAFQEVDTYGISIPITKHNYLVRDIAELPQVISDAFRIAQSGRPGPVWIDIPKDVQAATIELETLPEPGERAPAPAFTPESVREAAAMINAAKRPVLYLGGGVINAPQPIRDLAEKANLPTTMTLMALGMLPKAHPLSLGMLGMHGARSTNFILQEADLLIVLGARFDDRAIGKTEQFCPNAKIIHVDIDRSELGKIKQPHVAIQGDVAEVLAQLIPQIEAQPREEWRQLVADLQREFPCAIPQESDPLSHYGLINAVAACVDDEAIITTDVGQHQMWTAQAYPLNRPRQWLTSGGLGTMGFGLPAAIGAALANPQRKVICFSGDGSLMMNIQEMATAAENQLDVKIILLNNEALGLVHQQQSLFYQQGVFAATYPGMINFMQIAAGFGLQTCDLNNEADPQAALQAIIDRPGPALIHVRIDAQQKVYPMVPPGAANTEMVGE

SEQ ID NO: 19673 - protein, 267 aa, Escherichia coli K12
MGSSHHHHHSSGLVPRGSHMLSIKDLHVSVEDKAILRGLSLDVHPGEVHAIMGPNGSGKSTLSATLAGREDYEVTGGTVEFKGKDLLALSPEDRAGEGIFMAFQYPVEIPGVSNQFFLQTALNAVRSYRGQETLDRFDFQDLMEEKIALLKMPEDLLTRSVNVGFSGGEKKRNDILQMAVLEPELCILDESDSGLDIDALKVVADGVNSLRDGKRSFIIVTHYQRILDYIKPDYVHVLYQGRIVKSGDFTLVKQLEEQGYGWLTEQQ

SEQ ID NO: 19674 - protein, 178 aa, Listeria innocua
MSFQTAPNAPDARKWIDSWTIFYWAWWLSWSPFVGIFIARISRGRTIRQFLLGVIVLPALVSIFWFAVFGGSAIFVDQYKDTALSTLATEQVLFGVFDQFPFGIVLSIVAMILIAVFFITSADSATFVLGMQTTGGSLNPPNSVKVTWGLLQSGIASVLLYAGGLTALQNASIIAAFP

SEQ ID NO: 19675 - protein, 178 aa, Listeria innocua
MSFQTAPNAPDARKWIDSWTIFYWAWWLSWSPFVGIFIARISRGRTIRQFLLGVIVLPALVSIFWFAVFGGSAIFVDQYKDTALSTLATEQVLFGVFDQFPFGIVLSIVAMILIAVFFITSADSATFVLGMQTTGGSLNPPNSVKVTWGLLQSGIASVRRYAGGLTALPNASIIAAFP

SEQ ID NO: 19676 - protein, 178 aa, Listeria innocua
MSFQTAPNAPDARKWIDSWTIFYWAWWLSWSPFVGIFIARISRGRTIRQFLLGVIVLPALVSIFWFAVFGGSAIFVDQYKDTALSTLATEQVLFGVFDQFPFGIVLSIVAMILIAVFFITSADSATFVLGMQTTGGSLNPPNSVKVTWGLLQSGIASVLLDAGGLTALQNASIIAAFP

SEQ ID NO: 19677 - protein, 178 aa, Listeria innocua
MSFQTAPNAPDARKWIDSWTIFYWAWWLSWSPFVGIFIARISRGRTIRQFLLGVIVLPALVSIFWYAVFGGSAIFVDQYKDTALSTLATEQVLFGVFDQFPLGIVLSIVAMILIAVFFITSADSATFVLGMQTTGGSLNPPNSVKVTWGLLQSGIASVLLYAGGLTALQNASIIAAFP

SEQ ID NO: 19678 - protein, 178 aa, Listeria innocua
MSFQTAPDAPDARKWIDSWTIFYWTWWLSWSPFVGIFIARISRGRTIRQFLLGVIVLPALVSVFWFAVFGGSAIFVEQHGNSGLSSLATEQVLFGVFNEFPAGMVLSIVAMILIAVFFITSADSATFVLGMQTTGGSLNPPNSVKVTWGLLQAGIASVLLYAGGLTALQNASIIAAFP

SEQ ID NO: 19679 - protein, 178 aa, Listeria innocua
MSFQTAPNAPDARKWIDSWTIFYWAWWLSWSPFVGIFIARISRGRTIRQFLLGVIVLPALVSIFWFAVFVRCAIFVDQYKDTALSTLATEQVLFGVFDQFPFGIVLCIVAMILMAVFFITSADSATCVFGMQTTGGSLNPPNSVKVTWGLLQSGIASVLLYAGGLTALQNASIIAAFP

SEQ ID NO: 19680 - protein, 178 aa, Listeria monocytogenes
MSFQTAPDAPDARKWIDSWTIFYWAWWLSWSPFVGIFIARISRGRTIRQFLLGVIVLPALVSVFWFAVFGGSAIFVEQHGNSGLSSLATEQVLFGVFNEFPAGMVLSIVAMILIAVFFITSADSATFVLGMQTTGGSLNPPNSVKVTWGLLQAGIASVLLYAGGLTALQNASIIAAFP

SEQ ID NO: 19681 - protein, 178 aa, Listeria monocytogenes
MSFQTAPDAPDARKWIDSWTIFYWAWWLSWSPFVGIFIARISRGRTIRQFLLGVIVLPALVSVFWFTVFGGSGIFVEQHGNSGLSSLATEQVLFGVFNEFPAGMVLSIVAMILIAVFFITSADSPTFVLGMQTTGGSLNPPNSVKVTWGLLQAGIASVLLYAGGLTALQNASIIAAFP

SEQ ID NO: 19682 - protein, 178 aa, Listeria monocytogenes
MSFQTAPDAPDARKWIDSWTIFYWAWWLSWSPFVGIFIARISRGRTIRQFLLGVIVLPALVSVFWFTVFGGSAIFVEQHGNSGLSSLATEQVLFGVFNEFPAGMVLSIVAMILIAVFFITSADSATFVLGMQTTGGSLNPPNSVKVTWGLLQAGIASVLLYAGGLTALQNASIIAAFP

SEQ ID NO: 19683 - protein, 178 aa, Listeria monocytogenes
MSFQTAPDAPDARKWIDSWTIFYWAWWLSWSPFVGIFIARISRGRTIRQFLLGVIVLPALVSVFWFAVFGGSAIFVEQHGNSGLSSLATEQVLFGVFNEFPGGMMLSIVAMILIAVFFITSADSATFVLGMQTTGGSLNPPNSVKVTWGLLQAGIASVLLYAGGLTALQNASIIAAFP

SEQ ID NO: 19684 - protein, 178 aa, Listeria monocytogenes
MSFQTAPDAPDARKWIDSWTIFYWAWWLSWSPFVGIFIARISRGRTIRQFLLGVIVLPALVSVFWFAVFGGSAIFVEQHGNSGLSSLATEQVLFGVFNEFPAGMVLSIVAMILIAVFFITSADSPTFVLGMQTTGGSLNPPNSVKVTWGLLQAGIASVLLYAGGLTALQNASIIAAFP

SEQ ID NO: 19685 - protein, 444 aa, Populus euphratica
MMKKVTRKVGKYEVGRTIGEGTFAKVKFAQNRETGESVAMKILSKSAILKHRMVDQIKREISIMKLVRHPYIVRLHEVLASRTKIYIILEFVTGGELFDKIVHQGRLGENESRRYFQQLIDAVAHCHCKGVYHRDLKPENLLLDAFGNLKVSDFGLSALPQKGVGLLHTTCGTPNYVAPEVLGNQGYDGAAADVWSCGVILFVLMAGYLPFEEADLPTLYRKINAAEYSCPFWFSPGAKALIDKILNPNPRTRIGIEGIKKHPWFQKNYEPVGHREDEEVNLDDVHAVFDDIEDQYVAEQLENSVGGPLVMNAFEMITLSQGLNLSALFDRRQDYIKRQTRFVSRKPAEDIISTIEAVAGSMNLKVHTRNYKTRLEGVSENKAGQFAVVLEVYEVAPSLFMVDARKASGETLEYHKFYKNFCTKLENIIWKPPEGAKLPACFEQ

SEQ ID NO: 19686 - protein, 434 aa, Populus euphratica
MMKKVTRMVGNYEVGRTIGEGNFAKVKFAQNRETGESVDMNIFAKSTILKHKLVDQIKREISIMKIVRHPNIVRLHEVLSSRTKIYIILEFVTGGDLFDKIVHQGRLSENESRRYFQQLIDAVAHCHRKGVYHRDLKPENLLLDAFGNLKVSDFGLSALRQKGFGLLHTTCGTPNYVAPEVLGHQGYDGAAADVWSCGVILFVLMAGYLPFEEIDLPTLCRKINAEKYSCPFWFSPVAKALIDKILDPNPKTRIGIEGIKKHPWFRKSYEPVGHSEEEEVNLDDVHADDIEDHYVAEQLENSEGGPVVMNAFEMIALSQGLNLSALFDRHQDYVKQQTRFVSRKPAEVIISAFEAVAESMNLKFHTRNYKTRLERISENKAGHLAVVLEVYEVAPSLFMVDARKASGETLEYHKFYKNFCAQLENIILKPPEGC

SEQ ID NO: 19687 - protein, 254 aa, Medicago truncatula
MEMTRGVRKGAWTYEEDKLLKACIQKYGEGKWHLVPQRAGLNRCRKSCRLRWLNYLTPNIKRESFAEDEVDMMLRLHKLLGNRWSLIAARLPGRTANDVKNYWHTHLRKKMVSRTLEEKKEKPKETMKVHEIIKPKPRTFSTHPPSLNWKHNINVTPIVAVSTQHGEVSPNRDNKEITDSNQIGRDIVGVSQPSLGSAPIPCAMLWDSLLNLEEHKSSEKIGSGSLLQEENFISEFPNVDDSFWDFNLCDFDSL

SEQ ID NO: 19688 - protein, 264 aa, Medicago truncatula
MEKCKTRGVRKGAWTYEEDKLLKACMQKYGEGKWHLVPQRAGLNRCRKSCRLRWLNYLNPTINRESFSEDEVDMILRLHKLLGNRWSLIAARLPGRTANDVKNYWHTHLRKKMVSRKEEKKENEKPKESMQTHEVIKPQPRTFSSHSPWLNGKYNNFVTPIVTVSTNDGNVAKDSEVDTILPINGDGDSAAQPYLENPTLSSMWWESLLNVSNDKIGSCSLLLPEEYSKLNVENFLAEGPSTVGDFSWDSTICEFDSLLDDILN

SEQ ID NO: 19689 - protein, 244 aa, Medicago truncatula
MENTGGVRKGAWTYKEDELLKACINTYGEGKWNLVPQRSGLNRCRKSCRLRWLNYLSPNINRGRFSEDEEDLILRLHKLLGNRWSLIAGRLPGRTANDVKNYWHTNLAKKVVSEKEEEKENDKPKETMKAHEVIKPRPITLSSHSNWLKGKNSIPRDLDYSENMASNQIGRECASTSKPDLGNAPIPCEMWCDSLWNLGEHVDSEKIGSCSSLQEENLMEFPNVDDDSFWDFNLCDLNSLWDLP

SEQ ID NO: 19690 - protein, 257 aa, Medicago truncatula
MDNTIGVKKGAWTYEEDNLLKAYINKYGEGKWHLIPQRAGSGLNRCRKSCRLRWINYLKPNINRKSFSEDEVDMILRLHKLLGNRWSLIAGRLPGRTANSVKNYWNTHLLKKVVSKQEEEKEKPMETMKAHQVIKPRPITFSTQSSWLNVKHNNFVTQPLLASNNDGCFPRDRDDKMTMVVPNQIGKDCASSSQPILGNVPIPCTMWSESLWNLGEQVDSEIIGSSSSLQVENYEEFSIVDDFWDFNICDYDSLWDL

SEQ ID NO: 19691 - protein, 619 aa, Streptomyces sioyaensis
MCGIAGWVAFERDPGAERSAVQAMTDTMACRGPDAEGVWYGSHVALGHRRLAVIDLAGGTQPMTAEEDGEVAAVISYSGEVYDFAALRNRLRGAGHSFRTDSDTEVVLRAYLEWGTDFTRHLTGMFAFALWDTRSRELLLVRDRLGIKPLYYYPTSDGVLFGSEPKAILAHPEARARLSPAGLRELMTWVNTPGHAIFDGMSQVRPGHLVRVSRGNLTETAYWQLPARPHDDDFDTTVGRVRALLQAAVAGQTVADVPLCSLLSGGLDSSSVAALAAEALRPSGQPPLQCFSVGFAPSGHAAMPVSDGSALTDDADYAAKLAGHIGAHHESIVLDAKLLSDPAARAAVLRARDLPQGLADMDTSLYLLFKAIRQRSTVALSGEGADELFGGYPWFHDEQATRARTFPWMYAAGAGAAQGPAFLDPALPERLSLDEYRADSYADAIAAVPVLPGEPEPDRRMRTVNHLFLTRFLPMLLERKDRMSMAVGLEVRVPFCDHSLVEYVFNVPWSMKSFDGREKSLLRAAMAPDLPESVLTRKKEPYPTIADPAYDQLLKGRLGDLMDDAGAPVRALMDEKSAAKAFDTVRKASPGELRFLRVGFESLIKINDWMRDYQVELAE

SEQ ID NO: 19692 - protein, 259 aa, Opitutaceae bacterium TAV2
MHTLEIRDLYVALTESPDKNIVKGVTLTIKTGEVHAIMGPNGTGKSTLSKAIAGHPDYAITSGDVLLDGKSILEMEPDERARAGIFLAFQYPSEIPGVSIANFLRAALQARLGEGEDIDATAYYKKLYGKMDLLKIDRKFTSRSVNEGFSGGEKKRCEILQMAMLEPAFGLMDETDSGLDIDALKIVAEGVNTLRTAATPPGVLLITHYQRLLNHIIPDHVHVMYDGRIVKSGDKDLALELEAKGYDWVKDLVLEPATA

SEQ ID NO: 19693 - protein, 288 aa, Opitutaceae bacterium TAV2
MTTTATKGTIAAAGKTVGVLGLGIIGSVWARHYHAAGVLAGAWNRTPSMEPFPQGLPTPEAVTSVADVVQIVVADPPAVQGVIERIVPALGPGKVVVQSSTIDPESSSRFREAVLAAGARYLEAPFTGSKPAAEQRQTVFYLGGEADLIAELEPLLALISGTRLRIGDNRQATLLKLAMNLNLAIQMEGLGEALTLARRAGISDDTFFDAMSRNVGNSGLVKLKEPKLRGADFAPQFSVKHMHKDMRLAVGTREAAGFPLLAAVRARLGEAESAGWGNDDFASLIRLL

SEQ ID NO: 19694 - protein, 421 aa, Opitutaceae bacterium TAV2
MLDVGDSMLDVHGVPYFDHNATTPLSPAARDAWLRMSDEHWHNPSSPYRAAARARIRLDSARESLATLLGGEPAHYVFTSGATEGAHAVLAYWASILPTDTRIAVNPTEHPCVIESARKFFDGRIHWLPVTPDGVVRPEAVAAALGGAGVSPASEEVGAVVVMAANNETGVIQPWREIARVCSTARHANGGAGVPCLCDVTQWLGKLPGGGLGETHDADSPGLTLIASAHKFGGPKGVGFIKLPGESGASGFHALPGGAQENNHRGGTENLPAIAAMVAALADAEQHHVFLETSRLRLREQSERDLLSALPGARIIGAGADRLWNTISLLLPCPPDDPLAAPDNTRWVTLLDKRDVQVSTGSACATGKTAAGGGGGSHVLAALGLSADEARRVLRISSGWSTTEDDWRALVAAMKQIKNSA

SEQ ID NO: 19695 - protein, 661 aa, Opitutaceae bacterium TAV2
MSKILGIDLGTTNSCMAVMEGGEPVVIPNAEGARTTPSIVAFTKTGERLVGQAAKRQAVTNPQNTIFSAKRLIGRKFSEIAKEAKNLPFKVVEGKNGDAYIEAKVGDKVEQFAPQQISAFVLGKLKADAEAYLGEKITQAVITVPAYFNDAQRQATKDAGQIAGLEVKRIINEPTAASLAYGLDKKKDEKIAVFDLGGGTFDVSVLEIGDGVFEVKATNGDTQLGGDNWDEQLINWLVETFQKENGINLRNDPMALQRLKEEAEKAKIALSSTQSYDINLPFITADASGPKHLNISLSRAKMEQICDSLFERCFAPFKNCVRDAGLSTDKIDELVLVGGMTRMPKVVDIARQLAGKTPHQGVNPDEVVAIGAAVQGGVLKGDVRDVLLLDVTPLTLAIETMGGVATPMIARNTTIPHKKTERFSTAADNQPSVEIVITQGERPMSRDNKVLGTFKLDGIPPAPRGTPQIEVTFDIDANGILHVTAKDTGTGKEQKITIQGSSGLSKDEVERMTKEAESHAAEDKARAETVKNRNELDGAVFSLEKAVKEGGDKLPAEVKTKVEGGLADAKKALESNDDAQIKSALENLQKIGAEFYAQANAAAQAAGGAGAPGGFPGGFPGADGNASGNDAPPPPPGKTEKKADVVDADFEVVDDKKDGKK

SEQ ID NO: 19696 - protein, 335 aa, Opitutaceae bacterium TAV2
MALASKSVINHARECLQIEQDAIDATRASLDTQFVNVVRAVQSAIEAGRKLIFTGVGKSAHISIKLAGTFNSTGIPSCFLDATQALHGDLGLCAEGDVVILLSNSGQSDEVIKLVTLLKRFGVVIVAFTSNPDSELARHTPLRLLYRVPREACPLGIAPTASTTAALALGDALAMVLLKIRGLTRNDFARFHPAGNLGRILLLRVSDIMRTGDRLPVAPETVTLQDAILRMTKAKSGSIALVSTARKPGGGGGKLTGILTDGDFRRSALTGPDFLQKPVSEFMTRSPKTIRDDALGVDALRVFEQHKIDDLIVVDRSGRPVGLVDGQDLPKLKIV

SEQ ID NO: 19697 - protein, 601 aa, Opitutaceae bacterium TAV2
MKTTTTSSSPAKSQPPFAQPGKERVMNGADVVVEALAHEGVEVIFAYPGGASQELHQAFARSDKVRVILPRHEQGGSFAAEGYARASGKVGVCMATSGPGATNLVSAIADAFMDSTPLIAITGQVFSKFIGKSAFQETDFFGMTLPIVKHSYLVLNAHDLPRVFKEAFHLARTGRPGPVVIDIPKDVQQAKLTPVFPETVEFANPTLNALPHATDEELNEVLDLIAKAERPVIYAGGGVISAEAHGDLKKFAELTHIPVATTLMGVGAFPETHPLSMQWFGMHGSAYGNWAVDQADLVLCLGARFDDRITGDTSKFASHARIVHIDIDPSEHNKNKRVHHPIVSDLKHALSRLNELAAGAGGAKFTAPDTKSWHTQINAWKRDYPFAYDESRHIIPQEAVETLYQLTQGDAIIVTGVGQHQMWAAQFYRFNEPRRYISSLGLGAMGYGYPAALGAKIARPDKQVIDIDGDGSFLMNIQELATAAVEKIAAKVMILNNQHLGMVVQWEDRFYGSVRGNTILGHHDNIGGPDNPGGLYPDFVKIAEGFGVKGRRVIKKEELREAIQEMLAHDGPYLLDVVVPYTEHVLPMIPAGRTVKDMILK

SEQ ID NO: 19698 - protein, 271 aa, Opitutaceae bacterium TAV2
MVFHTLRPVIDGAIWCNQSSSMKIHTHSGGILLRPKPIISVIVTLIMAFSCLTQAAVSADVKFTSIAAGHGYSLFLRSDGSAWAVGRNNYGQLGDGTTVDRSKPVKVMSEVQAIAAGAYHSLFLKNDGSCWAVGSNESGQFGDGTTVDQSTTPVKVMSGVQAIAASMFHSLFLKSDGSVWATGYNGYGQLGDGTTIDRSTPVKVMSGVKAIAAGRVHSLFLKNDGSAWLVGDSGYGKRSDVTTTPVEVMSGVKAIAAGTSTCFFLKIDGSA

SEQ ID NO: 19699 - protein, 395 aa, Opitutaceae bacterium TAV2
MSSAPAPLSVWAKNISPSPTLAVDAKAKALLAAGEDVCGFAAGEPDFDTPEHIKEACIAALKAGKTKYAPTPGIEPLRQAIADDYAARLGLKVASSQVIVSPGGKFSCYLSILAVCSPGDEVIIPAPYWVSYPEMAKLAGAKPVFVLADDRTGFRLTPAQLEAAITPKSKLLILNSPSNPTGAVYTRAELEAIVAVALKHNLYIMSDEIYEHLLYDGAQHVSPATFSAEAAARTIIVSGFAKTYSMTGWRLGTTVAPAPIAKAVAELQSQTSSNATTFAQYGALAALKEKEKTQASLTQMLAAFDRRRKFLHAELNKIPGVKCLLAQGAFYLFPNISSFGLSSADFCSKLLEQQKVAAVFGSAFGAEGYLRLSYATSDEIIKKGVERLAAFCKTL

SEQ ID NO: 19700 - protein, 395 aa, Opitutaceae bacterium TAV2
MSSTDPKRWVAGHVASLPKSGIRDFFELVAKMKGQDVISLGVGEPDFVTPWHVREAAIYALERGKTYYTSNLGMIELRRAISTYVTEHFGIDYRPDDQVLVTVGVSEALDLAFRAFCNPGDKVMYHQPCYVSYHPSIALVHGQAIGVPTYAKDNFALTAEALRAAWQPGAKILMLNLPCNPTGGTCDRAQLEAIAAFAREKDLLVLSDEIYSELTFDGIHTSIASLPGMADRTIFLHGFSKAFAMTGWRIGYACGPAPLIDAMMKVHQYAMMCASIIAQEGALEALQRGWDNVCRMRDQYHRRRDLVVRRFNEIGLTCHSPRGSFYAFPHVSGTGLTEKEFAVGLLEKERVAVIPGTAFGQNGTGHVRACFATSYEQLIDACDRIERYVNGIKKT

SEQ ID NO: 19701 - protein, 635 aa, Opitutaceae bacterium TAV2
MSAPLISSQTRQAAASVARSSGQWLRDRFPLGAELRKYSWDKLRADGLAAATVSLVSIPQAIGFALIAGLPPLMVIMSVIVGGFVAALFTSSHHLVFGPSNSLSIVLAATIYSFTSTDLTPAQITIVLAALIGIFQLTAGLAQFGKITQFISRSVIIGYGTAIGILLAAGQVSHFFGIIDVGSRGSFIGTLWAALDRIVHLQFNGWALAIGVLTLVIFEVCEHYIRRIPAELIGLVIIALITKYGHLNELIGLRTIADEGVLSVTIPSFIGMPLGPETWGIVPSLLGAALAISILGMLEAVSIAKTMAAKSGQQIDVNQELISMGTANIVTSAYGAMPGSASFARSGANYQSGARTQMSALMSSSIVLAALFFVGPLINYIPVASLAAHLIRIGLRMINREQLRLAWRATRSDAFVLVTTFASAFFLKLDVAIYVGVGLSLVLFLRKAGAPSLVEYTFDDAGQLSQLDEDAARKNSAISIVHVEGELFFGAADLFQEQVRQLASDSKMRVVILRMKNARHLDATSVMSLLQLHDYMKGSGRHLLVSGINPDVERVLRRSGAWAAIGSDNIFPAEANLTMSTKRALLRASRLLQQDGEKARAASGIRIFYDKNKTQETAAPFGDSRERDRPGDFQI

SEQ ID NO: 19702 - protein, 709 aa, Opitutaceae bacterium TAV2
MSESNKEPKRRPLKSVPPDRFQPKVLIIWAAILAALFAVVYFNPGKASTQEELKIQQVVERAERGEILKGAIRGIDLVVITGELKPAASLASAPAAPAATDVAAAAAATAASPTAAAVAPAASASATVTDAKTAAVRRTFRAEGRLTDKNLERLQATKLFEELPANTVWMTILGNVLPFVLIIGLLYFLFVRQLRSASRGALTFGKSRAKLLNRDREKTTFAQVAGCDEAKEEISEVVEFLKDPKKFQKMGGKIPKGILLVGPPGTGKTLLAKAVAGEAEVPFFSVSGSDFVEMFVGVGASRVRDMFEQGRKNAPCIIFIDEIDAVGRQRGAGLGGGNDEREQTLNSMLVEMDGFDTSEGVIIIAATNRPDVLDQALLRPGRFDRQVFVDLPDLQGREQILKVHARKINLSEDVQLSEIARGTSGFSGADLANLLNEGALLAARRNKKKVERIDLDDAREKVLFGREHRRAMDDEEKKMTAYHEAGHALVQALLDDGIMPVHKVTIIPRGRSLGSTMFIPKKDILTQHKKRLLNQIAMGLGGRIAEELVMNDISNGASGDIKHITKIARSMVCDWGMSDLGPLALGDNQDTVFLGRDITRTSHVSEATAQKIDAEIRRIIDEQLERARKLIAEHRVSLDKIAEALLEYETIEGKHVQEILDHGELRSPVIRTVPPAVPPPGDDGKSGHKKQAEEPDTGALSGAPAPMPT

SEQ ID NO: 19703 - protein, 392 aa, Opitutaceae bacterium TAV2
MTIGVLKEIKAEENRVAMTPVGVDALVHRGHRVLVEENAGAGSGFSNESYAEAGAEIVTSGTGGAGGGGGGVSKAAGAGVSSAAAAKIFAQAELVLHVKEIMPSEYALLREGQVVFTYLHLAADEPQTRALMKSGCTAIAYETIQLADGRLPLLQPMSEVAGRMSVQEGARYLEMIHGGRGVLLGGVPGVEPGKVLVLGGGVVGTNAAKMACGLGADVTLLDMNIDRLRYLSDVMPANCKLRMSSPLLIRELLRDADLVIGAVLLPGAKTPRLVTREMLSVMQRGAVMVDVAIDQGGCFETSRPTTHSDPVFTVDGVIHYCVGNMPGAVARTSTMALTNATLPYVIKLADKGWGRAAIEDPALSKGLNVSGGEVVYAPVAEALGIACGKVIA

SEQ ID NO: 19704 - protein, 123 aa, Opitutaceae bacterium TAV2
MHRTFLKTKLHRATLTAADPDYEGSISIDRALCRAAGMLEYEQVDVLDINNGARFTTYVIYGEPGQVQVNGAAARLVRPGDLVIVLAYCRLDEKEVPAHKPRVVLMGPGNTIVSTEDKPLAQP

SEQ ID NO: 19705 - protein, 242 aa, Opitutaceae bacterium TAV2
MPLIPRLTEKLQRHPKRIVFTEGADPRVLQAARQWVTRRMGAPILLGDRAAIKDAATKLDINLQGMRIIEPERSEDFDTFAAQLEQLRRIKGVKLAEARTALKNTGYYGTMMVATGQGDALVSGGTASASSALRPIFQILPRLPHVVHASSLMVLDFDEKKIGSNGSLFLADCGVIPDPTAEQLADIAVSTALIAAHLTKETPPRGHAQLLLQEQLHPTLSPQSASGHRTRPPQGPQRHDAP

SEQ ID NO: 19706 - protein, 495 aa, Opitutaceae bacterium TAV2
MNTLMNTPLTVASELSRPAGKSYVDSMILSELADAVGPDYVSSHAADQLAHSIDYYWIPEMWHDRGRENPKPDFIVHPGSAEEVAKVLRIANNYRIPVTPWGGGSGSQGGALPMFGGIILDTKRMNKVLRIDTEALTVTVETGMNAQHLEWEVEKRGFSTMHFPASIACATIGGFLAHRGTGVLSTKYGKIEDMVMSLEVVTPEGGIINTLPVPRHASGPDLTQLYLGSEGTLGVITKVTLKIHPIPECRKFHAFLFKDMHRAMTAGANIMRSRLRPCVIRLYDEPETARLIKRVLGIDKQGAYLVFGFDGFEPVVDLEMAEAIRICKQEDPEDLGAEMGQAWWDHRYKFFYPPYMFHMPQAFGTLDTVATFTDIENVYWAMKKVVNENFPEAAFIGHYSHWYEWGCMLYARFIVDKPPEDPAEATAYYNRIWDMAIRAAIANGGVINEHHGVGLKLGRLMKELYGPAFNVLTDIKKVMDPNNIMNPGKMGFRGV

SEQ ID NO: 19707 - protein, 616 aa, Opitutaceae bacterium TAV2
MNADASASSASTAPVPPVSPDTGAPAAAVAPTDFIRDVVAADVSAGRYPQIVTRFPPEPNGYLHLGHAKSICLNFGIALENGGRCNLRMDDTNPTKEEVEYVESITTDVRWLIDGWAGHTLGLTPLGQRPAPATIDGKPDYYAAPAPVADNDKPNATEPFFASDYFDALYAFAEQLILNGKAYICDLTPEETDAYRGAPDQPGKDSPWRNRSIEESLDLFRRMKAGEFPDGARTLRARIDMASPNVWLRDPLLYRIRHAAHHHAGDGWCIYPLYDFAHCLSDYIEGITHSICTLEFVVHRPLYDWLLEALDLPRPLPHQYEFAKLNLAYTLFSKRRLMRLVKENVVNGWDDPRMPTISGIRRRGVPAAALRNFAYNIGITKFDSLTELAVYENAVRDELNRLAHRRLAVLHPIKIVLTNIAEGEAIECDATNHPGNPALGTRKVALTREVFIDADDFAEVPPPKYFRLKPGGEVRLKYACIIKLDEIVKDAAGNLAELRCTADLTTRTGQPNATRKVKGTIHWVSATRAIDAEVRLYDRLFTVPEPGADDNYLDHLNPKSVEIITAKLEPTLADATLEDRFQFERLGYFAPDPKDNAPGKPLVFNRTITLKDSWAK

SEQ ID NO: 19708 - protein, 616 aa, Opitutaceae bacterium TAV2
MDKKNLILGVTFLVAAFAALLYSSRQQSQQRPPAPPSPAPTVSAPATAGDPLASAATAAPANTTFAPIASNKTEATITTLSNDYVEVRFTNFGGAIRDVALKKYPAAIGAAKPFVFNEEHADPILGFTDIAGLDKEARFELVSATADEVVFRAVFEKRLEVTRRYVLAPATGDKSSRDPYRILHETTVKNLADHTTPVTSLNLSLGTAALMGANDTGFYLNVASYNGDKAQFTDRNELKGGGFFASMGMGDPNPKAYIIQPGPVQWASVKNQFFASIYTPDDKLIEGVTVRRVSFAAPLPGTTTENIGLTASAKVELPAIAPQGTATFTGKLYVGPKEYTRLKNFTRGEDKVMQFDRYFFNRIFLSGVIAPFMNMMMNGIHAFVGNWGLAIVLMTLILKTVTLPFTLAASRSAKRMQKLQPMMKEINEKYKDNPTKKNQAVMALFKEHKVNPMGGCLPVLITIPLFVAFFAMLQGTAELRFQSFLWARDLSAPDTIARIPLGFMTLPINILPLLMGATMVFQMRLTPSPSVDNAQAKIFKMMPWIFTIICYNFSCALALYSTINGLYTIVQQLAVNRFTKDDDPASPAAAAKGNGPGSRPIGGKTIKNVTPSKKRF

SEQ ID NO: 19709 - protein, 408 aa, Opitutaceae bacterium TAV2
MKIVLAYSGGLDTSVIVKWLKETYDAEIVTFAADVGQEEELKGLDKKAKKTGASKHYTLDLVEEFARDFIYPMIRANAVYEGQYYLGTSIARPLIAKAQVEIARKEKADTVAHGATGKGNDQCRFELTYMALAPDLTIIAPWKIEEYRKLFPGRAEMIAYCEKYKIPVEASLKKPYSMDRNLLHISYEAGILEDPWFDPTTPENKAMFKLSVSPEDAPDKAEYVELDFEQGNCVAVNGKKLTPGKVLKTLNKLGGKHGIGRVDLVENRFVGMKSRGVYETPGGTILMQAHKQIESLTLDREVEHLRDSLIPKYAELVYNGFWFAPEREALQALVDESQKFVTGTVRLKLYKGNIITCGRKSKYSLYDEKIASMEGVKSWYNQSDATGFIRLNGLRLRARSLSQGGPKV

SEQ ID NO: 19710 - protein, 596 aa, Opitutaceae bacterium TAV2
MVKPHLPKLSLGVLLILLATALTLPAPWIFKLIIDEALPSHDMHRLLVLLIVFTAIFVARGVVTFMRTRILQFTAMRIVCDIRIALFAHMQTLSLRYFDAHQTAKITSRISQDTNEFYQLTNGFLINLIADTVTVLCVLGFLYWVEWRLALCVTLVLPFFAINYLYNRRKMRAESRTHRDNWDTVIGFLQERVAAARVVKSFTREAAETTTFASGINRDYFNFSRIVMRNTRLSIVADLLGSVGALIVLGYGGWLVLKGEMQVGTLVAFNGYIAFVFPPIVRFVDLATVLQRASTSIENIFALLDTKPEVKDEPGAAELPPARGEVEFRNVCFDYEPPTVSVPAPLPGTPTRAAAAARPGNPVLGVRRPRTLTDVSFKVPPGRMVAIVGPSGSGKSTIINLLARFYDVASGEVLVDGCDVRRVTVESLRRQIGIVLQENVLFSGTIEDNIKYGRPDATREQIVAAATAANAHEFILAMPDGYSTVIGERGAKLSGGQRQRLAIARAILKDPRILIFDEATSALDTVSERLIQQAMERLMDNRTSFVIAHRLSTIQRADMILVLESGHLVECGRHEDLVNAGGLYSRLHALQFREPV

SEQ ID NO: 19711 - protein, 338 aa, Opitutaceae bacterium TAV2
MAKLKLEYIWLDGYTPVANLRSKTKIIEGDAAKLTLADVPVWGFDGSSTKQAEGRSSDCLLKPVALYPDITRENGFLVMSEVLLPNGTPHPTNSRATIIDDPDTWFGFEQEYFLYKDGRPLGFPAEGFPAPQGTYYTGVGFKNVGDVAREIVEEHLDICIGAGINHEGINAEVAKGQWEFQIFGKGAQTAADEIWVARYILSRVCEQYGVDVEWSCKPIRGDWNGSGMHSNFSTKFMRETGGKDYFEKLMDAFRKHHDEHIAVYGPDNHLRLTGLHETQSIDKFSYGLADRGSSIRIPHSFVNSGYKGYLEDRRPNSAADPYLIAARILKTISTVPTV

SEQ ID NO: 19712 - protein, 315 aa, Opitutaceae bacterium TAV2
MSAPKFKVFSGNSNRPLAEEICQHIGQPLGEAVVTSFPDGESFVKINENIRGQDVYIVQSTCTPTNHHLMELLIMMDAARRASAKRITVVMPFYGYARQDRKDQPRVPITAKLVANLLVAAGADRILTMDLHAQQIQGFFDIPVDHLFASPVFFKYLESFKGENLVVCSPDVGGMKMAAAYAGILGAGLGMVWKKRTSSTTVESVNIVGEVADKDVLIVDDITETAGTLVNAAKLLRANGALTVRAAVSHALLSPMAYDRLRTGGLDELITTNSIPIDTRDLPIKVLSIAPLLADAIMRINNNESVTSLFKVKGF

SEQ ID NO: 19713 - protein, 399 aa, Opitutaceae bacterium TAV2
MECIFSGAGGGGGEGASGGFFTICRVALGKGGGLCTILPMFIDECVIKAKAGDGGDGAISFRREKYEPWGGPNGGDGGKGGDVVLIGDDDTNNLIDFKYKPHWNAERGEYGRGADCNGHEGKSAILKVPLGTVVINEETGEAVTEVIEDGQRIVLCKGGNGGWGNTHFKSATNRAPKRSNPGQPGEGGTYRLILKSIADVGLVGFPNAGKSSLTNLITKARSKTAPYPFTTLQPQIGVIEYPETYDRLLLADVPGLIEGASENRGLGHRFLRHIERCTLLMFLIDMAGTDERDPRDDYATLLAELKAYDPALLKKPRLVVANKMDETASTANYARFVRRHKIKPLPISCLTEEGIPALLRALRKGVIAHGGAPRKMARLRGATSATTTTASPSSAPASS

SEQ ID NO: 19714 - protein, 296 aa, Opitutaceae bacterium TAV2
MSQKIAFVGVGRMGANMARRLKDCGCTVASVYDAHAPSAAALAAEIGAIHATTLAAVTASADVIFTVVTDDAAQLAVFAVDGDSLLSGAAGKIFVNCATITPATHVEVERRARNVGAATLEGCMASSIPQARNGTLYLMCGGDRATFDVLQPLLSHLSAAPRYIGHTGQAAQVKALVNMVMNINTVGLAEGLGLGHALGLDLDMLREVFAQTGAGSQVLKTDGEDMQARSHDCFFSAAHAAKDSGIALGLARDAGLTLPLATATKAQYDRLVALGLGGLDKSGVAELTFKGRLGAS

SEQ ID NO: 19715 - protein, 529 aa, Opitutaceae bacterium TAV2
MKILVADKISPKGVAYLRQQEGFEVVEAYGSSPEKVLELVKDVHAIAVRSETKITREVIAAAPQLKVVGRAGVGVDNVDVEAATERGVVVMNTPAGNTIATAELTFTHILCGSRPVSQAAASMREGKWDRKSFSGVELFKKTLGVIGMGRIGGEVARRAVAFGMKVLAYDPYLAPSRAKAMQVEVATLDEILAQADYITVHMPLTDDTKYMIDEAALAKCKKGVRLFNCARGGIIKESALIAALKSGHVAAAGLDVYEDEPLAKDSELRALPNVVLTPHLGASTAEAQESVGIEIAEQIADVLKTGAIRNAVNMPSVDATTAQVLGPYINLGTKLGTLVQQIAPQQIAKVRVMYHGKMVELDANAVTRAIQHGFLRRISGDEVNTVNAPIFFQRLGIDFEVIKTSDTTDYTELMQVEAITPAGEIFSARGTLIGKNNEPRVVGINGREVEVAAEGQLLVLENTDKPGMVGMVGTLLGNDGVNIADMSLTRLILGGTAYMVVRVDHEPSPTARKALKDNPAVKFAKFVQL

SEQ ID NO: 19716 - protein, 318 aa, Opitutaceae bacterium TAV2
MTRVLLTTTSFQDTPGVHHDMLAQLDVEVVRERGPLSEARMLELAGQFDAFLCGDDAITAAVIDKSLPRLKVISKYGIGLDKIDVAHATSKKIPVLFTPGVNHTTVAEHTFLLLLALEKNILFHTDSTRSGGWKRKTGHELLAKTIGIVGLGRIGKEVAIRARAFGMEVIAYDIYWDEAFAKQHNVKRVATKEEIFTSADYISLHTNLTPETRDMINAKTIATMKKGVLILNCARGEIVHTADMVAALKSGQVGGYGADVLDAEPPPADHPLLNAPNCIITPHIGSRTYESVVRQASCCVSNYKAFLEGNTVNQANKF

SEQ ID NO: 19717 - protein, 412 aa, Opitutaceae bacterium TAV2
MNILVANIGSTSFKYRLFRFASTNASGSNRGVEEATLLAKGGFERVTDYGQAIDSCLDELKTAGHLKTATDLAGVGFKTVLGKNLTGCVPADEKAEAALLAATGLGPAHNPPYAAGIHRFREKFPALPLVALFETAFYQWIPEPATRYAVPQAWHDAGVRRYGFHGASHKYVAERSAELLDRADIADNARNLYVRGPSPLSDATVPLRVISCHLGGSSSITGILNGVAIGTSMGLSPQSGLPQNNRVGDLDSAAIPYVHKQLGLSIADIEKQLTKESGLLALSGVSNDVRDIRAAAQKGDARARLAIDVFVHSIRHWIGAFWLQLGGCDALVFTAGIGENNAWLREQVCAGLSSLGLTLDPARNASAPVEHNLATPDSRTQVLVIPANEELVVARETHRLLSTKARPSSSTS

SEQ ID NO: 19718 - protein, 104 aa, Opitutaceae bacterium TAV2
MKATIKTQGQQFAVSEGDILIVNRFPNTEAGATVEITDVLSAGEGEGFKVGTPTLAGAKLTANVLENKRGDKVVVFKKKKRKGYTRKRGHRQELSVIKIETISA

SEQ ID NO: 19719 - protein, 318 aa, Opitutaceae bacterium TAV2
MSHQTHYTGATLLTRLLERQGIAHLPGIPGGAILPFYDALHDSPAIRHILARHEQGAGFIAQGMARVTGRAAACVATSGPGATNLLTAIADAHLDSIPLVALTGQVPQTLIGTDAFQEVDTYGLTVPITKHNFLVRTPAELLEIVPLAFEIAESGRPGPVLIDLPKDVQTASLPFALSDADLPTPGMRAPSPPCPDADLVALARLLANARRPVIYLGGGIIAANASHHALALAQHLAAPIVSTLNALGAIPDHDPHFMGMLGMHGTRATHTLLDEADVLLAIGARFDDRATGKAAEFCPHATIAHIDIDRAEIGKIKN

SEQ ID NO: 19720 - protein, 576 aa, Opitutaceae bacterium TAV2
MSRWLPGLPDLLYYERAFWKKDLAAGLSVAAVALPVGVAYAQLAGFPPVVGLYSTILPMVVYAFFGTSRQLILGPDAATCAMISATLLPLAAAGSDRYASLAVSLTLLTGVFCMLASRFRLGFLASFLSRPILTGLLNGVAISIMAGQLTKVCGMPDGGRGFIGQVVWFARHAGDINWSTLGVAGVTLGVYVASKVFWKNGPAALVAMVGATGVVAGATAAGFYWVHGVAVIGPVNAGLPRLHWPALPLDALGILVPAAAGLALVSFCSSMLTGRSFAAKNGYDVDANREFLALGVADVASAVSQGFAISGADSRTAVNDAAGGQTRMVSLVGAGVMVLVLLCLTRPLAWLPVSALGMILLCASWGLLDLPSLWRLRGLDRGEFYIGTTTLVGVLVIGVMPGILLAVSLALLRFLSRVARPTDQRLGRIAGRDGFYEIAHHGEARSVPGLLFYRFESPLIFFNADYFRERVMRLVEGEETPVKWVVIDAVSLSEVDLTGAFAIRTLVKELEVRGMVLAIAGRTAQARAWLQRNHVELASNMRLYPTRHMALAAYFLEYPEAKAAMEGTGNGTDVSG

SEQ ID NO: 19721 - protein, 401 aa, Oryza nivara
MAAEGEDAAAARRRAAATDYRKKLLTCRELEARARTARDNLKNAKKDFGKTEDDLKSLQSVGQIIGEVLRPLDSERFIVKASSGPRYVVGCRSKVDKEKLIAGTRVVLDMTTLTIMRTLPREVDPVVYNMLHEDPGNVSYSAVGGLSDQIRELRESIELPLMNPELFLRVGIKPPKGVLLYGPPGTGKTLLARAIASNIDANFLKIVSSAIIDKYIGESARLIREMFSYAREHQPCIIFMDEIDAIGGRRFSEGTSADREIQRTLMELLNQLDGFDELGKVKMIMATNRPDVLDPALLRPGRLDRKIEIPLPNEQSRMEVLKIHAAGIAKHGEIDYEAVVKLAEGFNGADLRNVCTEAGMAAIRAERDYVIHEDFMKAVRKLNDAKKLESSAHYSADFGKE

SEQ ID NO: 19722 - protein, 329 aa, Oryza nivara
MYEPKPFSSIVLAHNDPVSHNQQIERINNNVVSNSGGNSSNSNFAARQRLRWTDDLHDRFVDAVTQLGGPDRATPKGILRIMGVQGLTIYHVKSHLQKYRLAKYIPDPTADGAKSDKKDLGDLLADIESSSGMEIGEALKLQMEVQKRLHEQLEVQRQLQLRIEAQGRYLQKIIEEQQRLSGVLGESGKLGALGPAPGEPYQDSNKTDPSTPVPTSESPIRDKAESGLFKTISSHDDCREPLTPDSSCRAGSPLESPPRASKRIRVSSDIDHRGNNEFPPPLKVPEPSSGSDFRQESSVLLSSSAVHFDSLESLDADENVFTNGSGSDD

SEQ ID NO: 19723 - protein, 332 aa, Oryza punctata
MYEPKPFSSIVPAHNDPVSHNQQIERISNNVVSNSGGNSSNSNFATRQRLRWTDDLHDRFVDAVTQLGGPDRATPKGILRIMGVQGLTIYHVKSHLQKYRLAKYIPDPTADGAKSDKKDLGDLLADIESSSGMEIGEALQLQMEVQKRLHEQLEVQRQLQLRIEAQGRYLQKIIEEQQRLSGVLGESGKLTALGPAPGEQYQDSNKTDPSTPVPTSESPIRDKAGSGLFKTISSHDDCLSSGREPLTPDSSCRAGSPLESPRASKRIRVSGGIDHHGNDEFALPHKVLEPSSGSNFRQESSVLLSSSAAHFDSLESLDVDENVFTNGSGSDV

SEQ ID NO: 19724 - protein, 316 aa, Oryza officinalis
MYEPKPFSSIVPAHNDPVCHNQQVGRISNNVVSNSGGNSSNSNFATRQRLRWTDDLHDHFVDAVTQLGGPDRATPKGILRIMGVQGLTIYHVKSHLQKYRLAKYIPDPTADGTKSDKKDLGDLLADIESSSGMEIGEALKLQMEVQKRLHEQLEVQRQLQLRIEAQGRYLQKIIEEQQRLSGVLGESGKLSALGPAPGEHYQDSNKTDPSTPVLTSESPIRDKAGSGLFKTISSHDDCLSTGREPLTPDSPLESPRASKRIRVSSGIDHHGNDEFPPSLKVLEPKSSGSDFRQESSVLSSSTAHFDSLEFGEPGCR

SEQ ID NO: 19725 - protein, 271 aa, Oryza alta
MYEPKPFSSIVPAHNDPVCHNQQIERISNNVVSNSGGNSSNSNFATRQRLRWTDDLHDRFVDAVTQLGGPDRATPKGILRIMGVQGLTIYHVKSHLQKYRLAKYIPDPTADGTKSDKKDLGDLLADIESSSGMEIGEALKLQMEVQKRLHEQLEVQRQLQLRIEAQGRQVKRPRTSSGEHYQDSNKTNPSTPVPTSESPIHDKAGSGLFKTISSHDDCLSTGREPLTPNSPLESPRASKRIRVSSGIDHHGNDEFPPSLKVLEPKSSGSDF

SEQ ID NO: 19726 - protein, 323 aa, Oryza alta
MYEPKPLSSIVPAHNDPVSHNQQIERISNNVNSGGNSSNSNFATRQRLRWTDDLHDRFVDAVTQLGGPDRATPKGILRIMGVQGLTIYHVKSHLQKYRLAKYIPDPTADGAKSDKKELGDLLADIESSSGMEIGEALKLQMEVQKRLHEQLEVQRQLQLRIEAQGRYLQKIIEEQQRLSGVLGESGKLSALGPAPGEHYQDSDKTDPSTPVPTSESPIRDKAGSGLFKTISSHAGREPLTPDSSCRAGSPLESPRYSKRIRVSSGIDHYGNDELALPHKVLEPSSGSDFRQESSVLSSSAAHFDSLESLDADENVFTDGSVRQ

SEQ ID NO: 19727 - protein, 332 aa, Oryza brachyantha
MYEPKPFSSTVPAHNDKVSHNQQIERISNNVASNSGGNSSNSNFATRQRLRWTDGLHDRFVDAVTQLGGPDRATPKGILRIMGVQGLTIYHVKSHLQKYRLAKYIPDPTADGTKSDKKDLGDLLADIESSSGMEIGEALKLQMEVQKRLHEQLEVQRQLQLRIEAQGRYLQKIIEEQQRLSSVLGESGKLSAPGPVTGEHYQDSNRTEPSTPVPTSESPIRDKAASGLFKTLSSHDDCLSSGREPLTPDSSCHASSPLESPRGASKRIRVSGGLDHRGNDEFALPRKVLESGSGSDFRQASSVLSSSTARFHSLESLNANENGFTNVSGSDV

SEQ ID NO: 19728 - protein, 287 aa, Oryza brachyantha
  misc_feature (4)..(4): Xaa can be any naturally occurring amino acid
  misc_feature (11)..(11): Xaa can be any naturally occurring amino acid
  unsure (1)..(287): unsure at all Xaa locations
MSGXAAAWSDXTTRGCSGGHCLYGVQYGDGSYTIGFFAMDTLTLSSHDAIKGFRFGCGERNEGLFGEAAGLLGLGRGKTSLPVQTYDKYGGVFAHCFPARSSGTGYLEFGPGSSPAVSAKLSTTPMLIDTGPTFYYVGMTGIRVGGKLLPIPQSVFAAAGTIVDSGTVITRLPPAAYSSLRSAFAASMAARGYKRAPALSLLDTCYDLTGASEVAIPTVSLLFQGGVSLDVDASGIIYAASVSQACLGFAGNEAADDVAIVGNTQLKTFGVVYDIASKVVGFCPGAC

SEQ ID NO: 19729 - protein, 670 aa, Arabidopsis halleri subsp. halleri
DNHEDDGEDLPPEINQIKEQIEEERFLHIKKTFELRCIPSVAAHASHHQSFDLNQPLAEDDNEGDNKTLLSRMQNPLHHFSALSDSDTYEDQGCVFNKEAPLFPSVNLPVVEQLPRSLTWVFIKSSQLMAESDSVIGKRQIYYLNGEALELSSEEDEEDEEEDEEETKKEKCEFSKDVDRFIWTVGQDYGLDDLVVQRALAKFLEVEVSDILERYNELKLKNDETVGEASDLTSKTITTAFQDFADRRHCRRCLIFDCRMHEKFEPEFRPTEDKSGLFENEDRQPCSEHCYLKVRSVTEADHAVDNDNSISNKNVVSDPNTTMWTPVEKDLYLKGVQIFGRNSCAITLNIHRGLKTCLEVYNYMLEQDQCTMSLDLNKTRKTKNQVNKKVSRKGTRSVRKKSRLRKYARCPPALKKTTNGEAKFYKHYTPCTCKSKCGDQCPCLTNENCCEKYCGCPKDCNNRFGGCNCAIGQCTNRQCPCFAANRECDPDLCRSCPLSCGDGSLGEASEQIQCKNMQFLLKKNKKILIGKSNVHGWGAFTPDSLKKNEFLGEYTGELITHDEANERGRVEDRINSSYLFTLNDQLEIDARRYGNKFKFLNHSARPNCYAKLMIVRGDQRIGLFAERAIEQNEELFFDYCYGPEHAVWSRGRQPRKTGASKRSKQSRPSR

SEQ ID NO: 19730 - protein, 241 aa, Chimonanthus praecox
MGRGRVELKRIENKINRQVTFSKRRNGLLKKAYELSVLCDAEVALIIFSSRGKLYEFGSVGTIKTLERYQRCCYNPQDANTSDRETQAWYQEVSKLKVKYESLQRSQRHLLGEDLGPLSVRELQNLEKQLEVALSQARQRKTQIMMEQMEELRRKERQLGDINKQLRNKLEAGQGALRSIQGQWESGAIVGNNTFSLHPSHSSHIECEPTLQIGYPQFVPPEATIPRSAPGENNFMRGWVL

SEQ ID NO: 19731 - protein, 912 aa, Oryza sativa Japonica Group
MNPDNFTHKTNEALVAAHEIASEAGHAQLTPLHLVAALAADKGGILRQAISQASGGDAGAPDSFERVVSGALKKLPSQSPPPDSVPASTALIKVIRRAQSAQKKRGDSHLAVDQLLLGLLEDSLISDCLKEAGVSAARVRAELEKLRGGEGRKVESASGDTNFQALKTYGRDLVEQAGKLDPVIGRDEEIRRVVRILSRRTKNNPVLIGEPGVGKTAVVEGLAQRIVRGDVPSNLLDVRLIALDMGALVAGAKYRGEFEERLKAVLKEVEEAEGKVILFIDEIHLVLGAGRTEGSMDAANLFKPMLARGQLRCIGATTLEEYRKYVEKDAAFERRFQQVFVAEPSVPDTISILRGLKEKYEGHHGVRIQDRALVVAAQLSARYIMGRHLPDKAIDLVGEARANVRVQLDSQPEEIDNLERKRIQLEVEHHALEKEKDKASKARLVEVKKELDDLRDKLQPLTMKYRKEKERIDEIRKLKQRREELQFTLQEAERRMDLARVADLKYGALQEIDVAIAKLESETGENLMLTETVGPEQIAEVVSRWTGIPVTRLGQNDEERLVGLADRLHQRVVGQAEAVSAVAEAVLRSRAGLGRPQQPTGSFLFLGPTGVGKTELAKALAEQLFDDENLLVRIDMSEYMEQHSVARLIGAPPGYVGHEEGGQLTEQVRRRPYSVILYDEVEKAHVAVFNTLLQVLDDGRLTDGQGRTVDFRNTVIIMTSNLGAEHLLAGMVGKNSMKVARDLVMQEVRRHFRPELLNRLDEIVIFDPLSHEQLRKVARLQMKDVAVRLAGRGVALAVTDAALDVILSLSYDPVYGARPIRRWIEKRVVTQLSKMLIQEEIDENCTVYIDAAPHKDELAYRVDNRGGLVNAETGQKSDILIQVPNGAATGSDAAQAVKKMRIMEDEDGMDEE

SEQ ID NO: 19732 - protein, 322 aa, Streptococcus agalactiae 2603V/R
MSYSNLKLFALSSNKELAKKVSQTIGIPLGQSTVRQFSDGEIQVNIEESIRGHHVFILQSTSSPVNDNLMEILIMVDALKRASAESVSVVMPYYGYARQDRKARSREPITSKLVANMLEVAGVDRLLTVDLHAAQIQGFFDIPVDHLMGAPLIADYFDRQGLVGDDVVVVSPDHGGVTRARKLAQCLKTPIAIIDKRRSVTKMNTSEVMNIIGNIKGKKCILIDDMIDTAGTICHAADALAEAGATAVYASCTHPVLSGPALDNIQNSAIEKLIVLDTIYLPEERLIDKIEQISIAELIGEAIIRIHEKRPLSPLFEMNKLK

SEQ ID NO: 19733 - protein, 391 aa, Streptococcus agalactiae 2603V/R
MTLEKRFNKYLDRIEVSLIRQFDQSISDIPGMVKLTLGEPDFTTPDHVKEAAKSAIDANQSYYTGMSGLLALRQAAADFAKDKYNLTYNPDCEILVTIGATEALSASLIAILEAGDVVLLPAPAYPGYEPIVNLVGADIVEIDTRENDFRLTPEMLETAIIQQGEKLKAVLLNYPTNPTGITYSRQEIAALAEVLKKYDIFVISDEVYSELTYTGQQHVSIAEYLPNQTILINGLSKSHAMTGWRVGLVYAPEAFIAQIIKSHQYMVTAASTISQFAGVEALSVGKNDTLPMRQGYIKRRDYIIDKMSKLGFKIIKPSGAFYIFAKIPDSYPQDSFKFCQDFAYQQAVAIIPGVAFGKYGEGYIRLSYAASMEVIETAMARLKVFMESYEG

SEQ ID NO: 19734 - protein, 396 aa, Streptococcus agalactiae 2603V/R
MGKEKLILAYSGGLDTSVAIAWLKKDYDVIAVCMDVGEGKDLDFIHDKALTIGAIESYILDVKDEFAEHFVLPALQAHAMYEQKYPLVSALSRPIIAQKLVEMAHQTGATTIAHGCTGKGNDQVRFEVAIAALDPELKVIAPVREWKWHREEEITFAKANGVPIPADLDNPYSIDQNLWGRANECGVLENPWNQAPEEAFGITKSPEEAPDCAEYIDITFQNGKPIAINNQEMTLADLILSLNEIAGKHGIGRIDHVENRLVGIKSREIYECPAAMVLLAAHKEIEDLTLVREVSHFKPILENELSNLIYNALWFSPATKAIIAYVKETQKVVNGTTKVKLYKGSAQVVARHSSNSLYDENLATYTAADSFDQDAAVGFIKLWGLPTQVNAQVNKG

SEQ ID NO: 19735 - protein, 256 aa, Streptococcus agalactiae 2603V/R
MSVLEIKNLHVSIEDKEILKGLNLTLKTGEIAAIMGPNGTGKSTLSAAIMGNPNYEVTAGEILFDGEDILELEVDERARLGLFLAMQYPSEVPGITNAEFIRAAMNAGKADDDKISIRQFITKLDEKMELLGMKEEMAERYLNEGFSGGEKKRNEILQLLMLEPKFALLDEIDSGLDIDALKVVSKGVNEMRGEGFGAMIITHYQRLLNYITPDKVHVMMDGKVVLSGGPELAVRLEKEGYAQIAEELGLEYKEEV

SEQ ID NO: 19736 - protein, 397 aa, Streptococcus agalactiae 2603V/R
MSKTIAINAGSSSLKWQLYEMPEEKVVAKGIIERIGLKDSISTVKFDDKKDEQILDIVDHTQAVKILLEDLTKHGIIKDFNEITGVGHRVVAGGEYFKESALVDDKVVEQVEELSALAPLHNPAAAAGIRAFREILPDITSVCVFDTAFHTTMQPHTYLYPIPQKYYTDYKVRKYGAHGTSHQYVAQEAAKQLGRPLEELKLITAHVGNGVSITANYHGQSIDTSMGFTPLAGPMMGTRSGDIDPAIIPYLVANDPELEDAAAVVNMLNKQSGLLGVSGTSSDMRDIEAGLQSKDPNAVLAYNVFIDRIKKFIGQYLAVLNGADAIIFTAGMGENAPLMRQDVIAGLSWFGIELDPEKNVFGYFGDITKPDSKVKVLVIPTDEELMIARDVERLKAK

SEQ ID NO: 19737 - protein, 222 aa, Streptococcus agalactiae 2603V/R
MEFLLDTLNLEAIKKWHHILPLAGVTSNPTIAKKEGDIHFFQRIRDVREIIGREASLHVQVVAKDYQGILDDAAKIRQETDDDIYIKVPVTPDGLAAIKTLKAEGYNITATAIYTSMQGLLAISAGADYLAPYFNRMENLDIDATQVIKELAQAIERTGSSSKILAASFKNASQVTKALSQGAQSITAGPDIFESVFAMPSIAKAVNDFADDWKASQHSEHI

SEQ ID NO: 19738 - protein, 362 aa, Streptococcus agalactiae 2603V/R
MKVFASPSRYIQGKDALFQSIEHIKSLGQTPLILCDDVVYNIVGERFLSYLQDDLLPHRVSFNGEASDNEINRVVAVAKEKNSDLIIGLGGGKTIDSAKAIADKVNLPVVIAPTVASTDAPTSALSVIYTDEGAFEKYIFYSKNPDLVLVDTQVIAQAPKRLLASGIADGLATWVEARAVLQKNGIAMAGGRQTLAGVAIAQACERTLFNDSLQALAACDAKVVTKALENVIEANTLLSGLGFESAGLAAAHAIHNGFTALSGDIHHLTHGEKVAYGTLTQLFLENRPKEEIDRYINLYQAIGMPTTLAELHLGDATYEELLKVGQQATIEGETIHEMPFKISAEDVAAALLTVDRYVSNHQ

SEQ ID NO: 19739 - protein, 450 aa, Streptococcus agalactiae 2603V/R
MKVVKFGGSSLASSQQLYKVLNIIKSDYTRRFVVVSAPGKRYEEDLKMTDALIQYYQNYINGKDIVKDQTWIINRYQEIISDLSLGSTIAEEITRSIEQLASLPIENNQFLYDCFLAAGEDNNAKLVATFFNQNDIPARYVHPNEAGIIVTKEPCNARIIPGSYDKIENLCLYNEVLVIPGFFGVTEDNQICTFSRGGSDITGSLIAAGIKADLYENFTDVDGIFAAHPGVVKNPHAIPELTYKEMRELAYAGFSVLHDEALLPAYRGRIPLVIKNTNNPQQPGTKIVLKHTRSNIAVTGIASDSRFASINVSKYLMNREVGFGRKVLQILEDLNISFEHMPTGIDDLSIVLREKELTPIKEQEILNYLTRKLEVDYVDIQHNLSTIVIVGENMKSQIGVTATATQALSREKINITMISQGSSEVSIMFVINSKDEKRAIKALYETFFQK

SEQ ID NO: 19740 - protein, 330 aa, Streptococcus agalactiae 2603V/R
MKKSFIHQQQEISFVKNTFTQYLIDKLEIVEVQGPILSQVGDGMQDNLSGIEHPVSVKVLNIPEAEFEVVHSLAKWKRHTLARFGFNEGEGLFVHMKALRPDEDSLDPTHSVYVDQWDWEKVIPDGRRNLDYLKETVEKIYKAIRLTELAVEARFDIESILPKRITFIHTEELVEKYPDLSPKERENAIAKEYGAVFLIGIGGELADGKPHDGRAPDYDDWTTPSENGFKGLNGDILVWNEQLGTAFELSSMGIRVDEDALKRQVVLTGDEDRLEFEWHKTLLRGFFPLTIGGGIGQSRLAMFLLRKKHIGEVQSSVWPKEVRDTFENIL

SEQ ID NO: 19741 - protein, 397 aa, Streptococcus agalactiae 2603V/R
MTYLSERVLNMEESVTLAAGAKARELRVQGRDILSLTLGEPDFATPKNIQQAAIEAITDGRASFYTPSSGLPELKSAINAYFERFYGYSLKPNQVVVGTGAKFILYTFFMTVLNPGDEVIIPTPYWVSYADQIKMAEGKPVFVTAKEVNHFKVTVEQLEAVRTDKTKVILLNSPSNPTGMIYKAEELEAIGNWAVEHDILILADDIYGRLVYNGNIFTPISSLSESIRNQTIVINGVSKTYAMTGWRVGFAVGNHDIIAAMSKVVSQTTSNLTAVSQYATIEALNGSQESFEKMRLAFEERLNIIYPLLCQVPGFEVVKPQGAFYLFPNVTKAMEMKGYTDVTAFTDAILEEVGLALVTGAGFGAPENVRLSYATDLETLKEAVRRLHVFMGSNEIN

SEQ ID NO: 19742 - protein, 266 aa, Streptococcus agalactiae 2603V/R
MLRRKRLTFYLLSCIFIFLLFYPNSTSANQLSEIKKSGVLKVGVKQDVPNFGYYNAETNQYEGMEIDIAKKIAKSLGVKPVFVPTTAQTREPLMDNGQIDILIATYTITPERKANYNISKAYYHDEIGFLVRKNSHIKTIKELDGKHIGVAQGATTKVNLEKYAKEHKLKFSYAQLGSFPELAISLYANRIDAFSVDKSILSGYLSPHTTILKEGFNTQEYGIATSKQDKVLIPYVNKLLVSWEKDGSLKHIYQKFKLKPAKVKKE

SEQ ID NO: 19743 - protein, 330 aa, Streptococcus agalactiae 2603V/R
MRSLFGGLREKVASDYVKIVFPEGSDERVLRAAARLKFEGLVDPVILGKADEVHDSLARLGFVDQDYSIIDPEQYEKFEEMKEAFVEIRKGKATMEDADRLLKDVNYFGVMLVKLGLADGMVSGAIHSTADTVRPALQIIKTKPGISRTSGVFLMNRENTQERYIFADCAINIDPNAQELAEIAVNTADTAKIFDIDPKIAMLSFSTKGSAKAPQAEKVQEAAKIAKDLSPELAVDGELQFDAAFVPETAEIKAPNSDVAGKANVFIFPDLQSGNIGYKIAQRLGMFEAIGPILQGLNAPVNDLSRGSSAEDIYKLAIITAAQAIDEKSK

SEQ ID NO: 19744 - protein, 324 aa, Streptococcus agalactiae 2603V/R
MAEQYADKQIKLFSLTANREIAEKISQASGIPLGKMSSRQFSDGEIMINIEETVRGDDIYIIQSTSFPVNDNLWELLIMIDACKRASANTVNIVVPYFGYSRQDRIAASREPITAKLVANMLVKAGVDRVLTLDLHAVQVQGFFDIPVDNLFTVPLFAEHYNQLGLSGEDVVVVSPKNSGIKRARSLAEYLDSPIAIIDYAQDDSEREEGYIIGEVEGKKAIIIDDILNTGKTFAEAAKILERGGATEIYAVASHGLFAGGAADILESAPIREIIVTDSVLSKERIPSNIKYLTASHLIADAIIRIHERKPLSPLFSYRSDKKD

SEQ ID NO: 19745 - protein, 371 aa, Streptococcus agalactiae 2603V/R
MIYLDNAATTALTPSVIEKMTNVMTSNYGNPSSIHTFGRQANQLLRECRQIIAEYLNVNSREIIFTSGGTESNNTAIKGYALANQLKGKHIITSEIEHHSVLHTMTYLSERFGFDITYLKPNHGQITAKDVQEALRDDTIMVSLMFVNNETGDFLPIQEIGQLLRNHQAVFHVDAVQVFSKMELDPHSLGIDFLAASAHKFHGPKGVGILYCAPHHFDSLLHGGDQEEKRRASTENIIGIAGMSQALTDATTNTLKNWTHISQLRTTFLDAISDLDFYLNNGQDCLPHVLNIGFPGQNNGLLLTQLDLAGFAVSTGSACTAGTVEPSHVLTSLYGANSPRLNESIRISFSELNTQEEILELAKTLRKIIGD

SEQ ID NO: 19746 - protein, 515 aa, Streptococcus agalactiae 2603V/R
MSKKHITPVFTGSLIVSLILVLLGIIVPRGFQSWTQILREQVSTNFGWLYLLLVTSILALCVFFIMSPLGQIRLGQPHSRPEYSTVSWIAMMFSAGMGIGLVFYGAAEPLSHFAISTPGAPKESQTALADAFRFTFFHWGIHAWAVYALVALALAYFGFRKQEKYLLSVTLKPLFGDKTDGWLGKIVDITTVVATVIGVATTLGFGAAQINGGLSFLLGVPNNAFVQIVIILITTALFVMSALSGLGKGVKILSNLNLILAVALLALVIVLGPTVRIFDTLTESLGSYLQNFFGMSFRAAAFDNTKRSWIDNWTIFYWAWWISWSPFVGVFIARISKGRSIREFLTVVLLIPTLLSFVWFAAFGTLSTQVQQLGTNLTKFATEEVLFATFNHYTLGWLLSIIAIILIFSFFITSADSATYVLAMLTEDGNLNPKNRTKVIWGLVLAVIAIVLLLSGGLLALQNVLIIVALPFSFVMILMMLALLVELFHEKKEMGLSISPDRYPRKNEPFKSYEE

SEQ ID NO: 19747 - protein, 381 aa, Streptococcus agalactiae 2603V/R
MIYFDNSATTIPYPEVLRTYQEVASKIYGNPSSLHELGTTSSRILEASRKQIASLLELKANEIFFTSGGTEADNWVIKGLAFEKQHFGNHIIVSDIEHPAVKESAKWLGEYGFEIDYAPVDDKGFVDVEALVKLIKPETILISIMAINNEIGSIQPIKAISDLLSDKPTISFHVDAVQAIGKIPTKDYLTERVDFASFSSHKFHGVRGVGFLYIKEGKRISPLLTGGGQETDLRSTTENVAGIAATAKALRMVMDKEVVAIPKISKMKTIIHDELAKYEDITLFSGKEDFSPNIITFGIKGVRGEVLVHAFEGHDIFISTTSACSSKAGKPAGTLIAMGISTKLAQTAVRISLDDDNDMGQVEQFLTIFKQVYEKTKKVRG

SEQ ID NO: 19748 - protein, 347 aa, Streptococcus agalactiae 2603V/R
MFVKKGLFVFLLLCILSMWLMIFGVAFYYFGSLHQSLTSRIIYQFVLTVLLTTTAWFMGAYFLAFEGHFKTVFQFQEADGKQIVNCLFQLCFALYAVVMLIGSIIDRVQTKRLLLAVVSWLFLVYTPLAYLIWNSEGVFAKMGVLDFSGGMIVHLSAGLSSYILAHVIGKSEHQHNKVKNDSLFLGMILITFGWFGFNMGPVGEWNSQAIMILLNTIFAIIGGGLAWTLAAKWNGEEEKTGSLLNGIIVGLVTSTAGVGYLLTWQLLAVTFFASLFTYFVTDYVAKAFAIDDVVSSFGMNGIGGLLGSLGVGLFKLSHMPVQLLALATTILLSIIMTYIISKAIFRK

SEQ ID NO: 19749 - protein, 299 aa, Streptococcus agalactiae 2603V/R
MTFKSGFVAILGRPNVGKSTFLNHVMGQKIAIMSDKAQTTRNKIMGIYTTETEQIVFIDTPGIHKPKTALGDFMVESAYSTLREVETVLFMVPADEKRGKGDDMIIERLKAAKIPVILVINKIDKVHPDQLLEQIDDFRSQMDFKEVVPISALQGNNVPTLIKLLTDNLEEGFQYFPEDQITDHPERFLVSEMVREKVLHLTQQEVPHSVAVVVESMKRDEETDKVHIRATIMVERDSQKGIIIGKQGAMLKKIGKMARRDIELMLGDKVYLETWVKVKKNWRDKKLDLADFGYNEKEY

SEQ ID NO: 19750 - protein, 372 aa, Streptococcus agalactiae 2603V/R
MEELFCIGCGARIQTENKDAAGYTPRAALEKGLETGELYCQRCFRLRHYNEITDVHITDDEFLKLLHEVGDSDALVVNVIDIFDFNGSIIPGLSRFVAGNDVLLVGNKKDILPKSVKDGKVTQWLTERAHEEGLRPVDVILTSAQNHHAIKDLIDTIEKYRHGQDVYVVGVTNVGKSTLINAIIREITGSRDVITTSRFPGTTLDKIEIPLDDGSYIFDTPGIIHRHQMAHYLTAKNLKYVSPKKEIKPKTYQLNSEQTLFLAGLARFDFISGQKQGFTAYFDNNLNLHRTKLVGADEFYTKHVGKLLTPPTGKEVSDFPKLVRHEFTIKDKMDIVYSGLGWIRVKSEAENPVVVAAWAPEGVAVVLRKALI

SEQ ID NO: 19751 - protein, 403 aa, Streptococcus agalactiae 2603V/R
MKIFDKSMKLEHVAYDIRGPVLEEADRMRANGEKILRLNTGNPAAFGFEAPDEVIRDLITNARESEGYSDSKGIFSARKAVMQYYQLQNIHVDMDDIYIVNGVSEGISMSMQALLDNDDEVLVPMPDYPLWTACVSLAGGNAVHYICDEEANWYPDIDDIKSKITSKTKAIVLINPNNPTGAVYPREILQEIVDIARQNDLIIFSDEVYDRLVMDGMEHIPIASIAEDIFTVTLSGLSKSHRICGFRVGWMVLSGPRQHVKGYIEGLNMLANMRLCSNVLAQQVIQTSLGGQQSIDSMLLPGGRIYEQRNYIHKAINEIPGLSAVKPNAGLYLFPKIDTDMYRIDNDEEFVLNFLKQEKVLLTHGRGFNMNTADHFRIVYLPRVDELTELQEKMARFLSQYKR

SEQ ID NO: 19752 - protein, 318 aa, Streptococcus agalactiae 2603V/R
MDKKKILVTGIVPKEGLRKLMDRFDVTYSEDRPFSRDYVLEHLSEYDGWLLMGQKGDKEMIDAGENLQIISLNAVGFDHVDTAYAKEKGIIVSNSPQAVRVPTAEMTFALILAASKRLAFYDSIVRSGEWIDPSEQRYQGLTLQGSTLGIYGMGRIGLTVANFAKAFGMTVVYNDVYRLPEDKEKELGVTYLEFDQLIKTADVITIHAPALPSTIHKFNKDVFAKMKNRSYLINAARGPIVSEEALIEALKEGEIAGAGLDVFENEPQVSEGLRSLDNVIMSPHAGTGTIEGRRTLAEEAADNIIAFFDGKPQNIVNK

SEQ ID NO: 19753 - protein, 215 aa, Streptococcus agalactiae 2603V/R
MKYFLDTADVSEIRRLNRLGIVDGVTTNPTIISREGRDFKEVINEICQIVDGPVSAEVTGLTCDEMVTEAREIAKWSPNVVVKIPMTEEGLAAVSQLSKEGIKTNVTLIFTVAQGLSAMKAGATFISPFVGRLEDIGTDAYALIRDLRHIIDFYGFQSEIIAASIRGLAHVEGVAKCGAHIATIPDKTFASLFTHPLTDKGIETFLKDWDSFKKK

SEQ ID NO: 19754 - protein, 599 aa, Malus x domestica
MQRALTLRRSVESLHHHNHLRAITPTTVPQNPLTQVSSTRALSTLSSPSSPAPSSSSSELRKYLGYTALVLFSAAATYYSFPFPENAKHKKAQIFRYAPLPEDLHTVSNWSGTHEVQTRVFHQPETLEELEKVVKDAHEKKSRIRPVGSGLSPNGIGLSRAGMVNLALMDKVLEVDKEKKRVRVQAGIRVQQLVDGIKEHGITLQNFASIREQQIGGILQVGAHGTGARLPPMDEQVISMKLVTPAKGTIEVSKEKDPELFYLARCGLGGLGVVAEVTIQCVDRQELVEHTTVSTMAEIKKNHKKLLSENRHVKYLYIPYTDTVVVVKCNPVSKWKGPPKFTPKYSSDEAIQHVRDLYRECLQKYRVVPDKSEVDMNELSFTELRDKLLALDPLDKDHVAKVNQAEAEFWKKSEGYRVGWSDEILGFDCGGQQWVSETCFPAGTLAKPSMKDLEYIEGVKQLIEKNEIPAPAPIEQRWAACTRRPMSPASSTREDDILSWVGIIMYLPTTDPRQRKEITEEFFHYRRLTQTQLWDKYSAYEHWAKIEVPKDKDELAALQDRLRKRFPVDAYNKARRELDPNRVLSNSKLEKLFPLSDTI

SEQ ID NO: 19755 - protein, 361 aa, Streptococcus agalactiae 2603V/R
MTTNVMANYSYGEDCFKEIPSVLATYRIQSIAFVGGKRALDSSEAEVRSILEEANIKVTGSFVYGTDSTQSNIDKLVANPQVQAADAILGFGGGKALDTAKMVAKELGKNSFTIPTICSNCSAGTAIAVVYNDDHSFLRYGYPESPLHIFINTRIIAQAPSKYFWAGIGDGISKAPEVERATLEAKTNKLPHTAVLGQAVALSSKEAFYQFGEQGLKDVEANLASRAVEEIALDILISTGYASNLVNQPDFYYNSCHAHAFYYGTTAIQRQGEFLHGVVVAFGVLVLHAYFNELEELEKVARFNKSLGLPTTLADVSLSEKDIPKIVEIAMTTNEYKNTPFDPKMFAQAILAADAFGQTLA

SEQ ID NO: 19756 - protein, 894 aa, Vibrio alginolyticus
MAMININLSSLIQRLHPIAKVALEDAAALAVSEKANEVQIEHYLLSLLERPNSDFDVLLSHFDCSENLLRQSVRSTLDTSAKGNGSKPVFSALLIEWLQESWLVSSLDLSETQIRSGALLLTLVSNPLRYGQHGYASILEAVNPDSLKRNFAELTSQSIEAQVATSEKTQAREDGSALSKFTTDFTGKARKGEIDPVFCRDQEIRQIVDILARRRKNNPIAVGEPGVGKTAVVEGLALKIVQGDVPDNLKGVELYGLDMGLLQAGASVKGEFEKRLNAVLDEVKNSPTPIILFIDEAHTLVGGGNQAGGSDAANLLKPALARGEVKTIAATTWSEYKKYFEKDPALARRFQLVKLDEPSPEQAALIIRGLRPAYEKSHNVYVRDDAITAAAALSARYISGRQLPDKAIDVLDTACARVNISLNAIPASVETLQQELAAQQRELEALERDALQQTGDKHSLANIPDLKLAMETTKEELAEQEAQWHKEKEQIQEMIALRSRLHELVFGETNEEELVAEEDSEQEQNVSPYAEMDEETVRIAISACQEQLDVIRNGNPLVHFEVGPDEVSHVISDWTGIPMGKMLQDEAETTLKLKESLTQSIKGQEYAIDALSEGIQTAKAGLSNPDAPTGVFLLVGPSGVGKTETARAIADQMFGGERFMTTINMSEFQEKHTVSRLIGSPPGYVGYGEGGMLTEAVRQRPYSVVLLDEVEKADPEVLNLFYQVFDKGTLNDGEGRTIDFKNTLIIMTSNLATHEIESLVHQSKDIDANIIAEAIRPTLNQHFKPALLARMSVLPFVPLSDEAMTEIIHHKLNKVSQRLQSHHKLSLSYEESLVEFVLGNCRLAETGARNIDAVINRQLLPQLSTQLLVHDKDDSHTQITVSVDEQGTLTYAFS

SEQ ID NO: 19757 - protein, 855 aa, Vibrio alginolyticus
MASLSLSALVERLSPQAKETLEQAAAMASSRTHHSIEMSHWLMMIIRHPDDIYSEVFDEFDVDKIKIETDIQKALEKYKTGCQSVPGLSAHTVTVMQNALLSATIEFNQEQLGCIHLLFAYLSDDTLVNMAGSISPELNKIEPSRLLNFKESNAPQSRSNDLAQSNANSALNQFTTDLTEQAREGKIDPVIGRDNEIRLMIDILLRRRQNNPILTGEAGVGKTAVVEGLAQKIIDGDVPPALQNVAIKSLDLALLQAGAGMKGEFENRLKNLVKEVNDAPQPIILFIDEAHGLIGGGGQAGQGDAANILKPALARGELRTIAATTWAEYKKYFEKDAALTRRFQVVKVDEPAPELAIEMLRGLLDVMAQHHDVHITNQALNAAVQLSARYINGRQLPDKAVSVLDTACSRVTLSQSSTPGGLDAKRNKLKAKQAEYEHLSQENRLGASLDVQLQGVRKEIDALSNDIIELEVLWEKEKEWVSEAKSLRTQIIQEGSETARDKLQELENNLSANSQPLVFSHVNEALIAEVISDWTGIPLGKLQDDEIQAVLGLKESLCKRVVGQDHALELMSEVIKTASAQLTDETRPNGVFLLTGPSGVGKTESALAIAEKVYGSEENVTTINMSEFKEEHKVSLLLGSPPGYVGYGEGGVLTEAVRRKPYSVILLDEMEKAHPGVQDIFYQVFDKGSIKDGEGRDIDFKNTIIIMTANTGTETTMSLYSDPDLAPEPSALKDALRDDLLVDFKPAFLGRVNVLPYLPLSRKVLIEITKLKLDKITTRIRKHYNADLFFDEELINDIVDNSNESGSGARVVQTTIENTLLPKISHEILHAILNDKTFDEIIVKGTTSGLDVSMV

SEQ ID NO: 19758 - protein, 67 aa, Streptococcus agalactiae 2603V/R
MTQGTVKWFNSEKGFGFISSETGTDVFAHFSEIKVDGFKTLEEGQKVTFDIQDGQRGPQATNINLVK

SEQ ID NO: 19759 - protein, 371 aa, Aeromonas hydrophila
MIIGVPKEIKNHEYRVGMVPASVRELTARNHTVFVQSGAGNGIGFSDADYLAAGAEILASAADVFAKAEMIVKVKEPQAVERAMLRPGQTLFTYLHLAPDLAQTRELVDSGAICIAYETVTDGRGGLPLLAPMSEVAGRMSIQAGAQALEKSRGGSGVLLGGVPGVEPAKVVIIGGGVVGSNAARMAIGLRADVTILDNNIDTLRRLDSEFQGAAKVVYSNRETLERHLLAADLVIGGVLVPGATAPKLVSRDHIARMKPGSAIVDVAIDQGGCVETSHATTHEDPTFIVDDVVHYCVANMPGAVARTSTVALNNATLPFIIKLAEQGYRNALLSDPHLRHGLNVMAGKITCKEVAVAHNLAYTDPLTLLN

SEQ ID NO: 19760 - protein, 244 aa, Vitis vinifera
MGRGKVELKRIENKINRQVTFAKRRNGLLKKAYELSVLCDAEVALIIFSNRGKLYEFCSGSSMPETLERYQRCSYSALEASQPAKETQQNSYQEYLKLKSKVEVLQRTQRNFLGEDLGHLGTKELEQLEHQLDKSLKQIRSTKTQFMLDQLSDLQRKEQILMEANNALRRKLGESSAESGLGSTWEAAAHNLPYNREPVQSEDFFEPLQCDSTLQIGYNPVLRVEMNGASTTQNVNGFIPGWMV

SEQ ID NO: 19761 - protein, 507 aa, Vitis vinifera
MDLTTDAVGRSRKLLTGWDMRTPFNFENDGLVLDRDAVESMEFMELDSPDLVRKLLPSNPSVGFLSGEIGRNSSKRIVSPTNMVTSNPIFGGEESSSRLSSSFMESNSQDSSIIDLKLGRLADCIDAKNNRCSKEGSVLSSLASSMPAKRARTTSVCSQTPLCQVHGCNMDLSSSKDYHKRHKVCDVHSKTPKVIVNGIEQRFCQQCSRFHLLAEFDDGKRSCRKRLAGHNERRRKPQLDTHSGKPQKLLQSYPGTRILGTSLAKRPPFVFQDILPGSVYCPDGYGQANPSRSIKLEKEPIYSSQLVIPISGQLPPKSFLHLYGTERQCPPGFLSSGTEDCTGFYPASTVQELPGVSKSNCALSLLSAQSQDLSNHLMGIPMANPPTVQGCHAHYSAVHNSDKPIGMSSLEKFASNGSYSSRMNSVEVAQMGPVMLPDGGNAVSFEVRTNRNFQGSDFLNAKYSHSSEREPTVDLLQLSSHLKRVEWQRNYMHVKQENDDFHCFPTT

SEQ ID NO: 19762 - protein, 365 aa, Vitis vinifera
MWLQSGMDYTSLPCCVYLLPHGRLCLGVVLVKKLEYPNFEGSILDGHHLEPQDLGMVKMDSVPHSKWQSCWCLSARVLEGSDERNDALSRTGRSADSTEIDPSPPLVVHHLEGQCMHEESIRQLYQASKATQYTPVSVCATESSMKRREREDHHHSNTALRKGTWSEEEDRLLREYVDKYGQGNWKHITSKTGLRRCRKSCRLRWLNYLRPDIKRGSFGVDEDDLIIRLHRLLGNRWTLIAGRIPGRTSNDIKNYWNTYLSKKIQSEADKSAGLVKHNTCTSAVHSETLGSEFETCSEQKQGDEEEEDTVSFWRRLLLEGEYRELDLRVKNKEILQVEHEEEDDDDLFQGLDDLLHDVDILDCFA

SEQ ID NO: 19763 - protein, 356 aa, Vitis vinifera
MSLLADLQNINLSDSTEKIIAEYIWIGGSGNDLRSKARTLSGPVTGPAQLPKWNYDGSSTGQAPGEDSEVILYPQAIFKDPFRGGDNILVMCDAYTPGGEPIPTNKRFNAAKIFSHPEVTAEEPWYGIEQEYTLLQKDVNWPLGWPVGGFPGPQGPYYCGIGADKAFGRDIVDAHYKACLYAGINISGINGEVMPGQWEFQVGPAVGISAGDELWVARYILERITEIAGVVVSFDPKPIKGDWNGAGAHTNYSTKSMRNTGGYDVIKKAIEKLGLRHKEHISAYGEGNERRLTGRHETADINTFCWGVANRGASIRVGRDTEKEGKGYFEDRRPASNMDPYVVTSMIAETTILWKP

SEQ ID NO: 19764 - protein, 288 aa, Vitis vinifera
MATVAKRINNSSEEIELRRGPWTLEEDTLLIHYIACHGEGRWNLLAKCAGLKRTGKSCRLRWLNYLKPDIKRGNLTPQEQLLILELHSKWGNRWSRIAQHLPGRTDNEIKNYWRTRVQKQARQLKIESDSKRFIDAVRRFWMPRLLQKMEQASTSSTAADTVTTNTTNTTTVNSQSSTIPALLPNQITVSSSPPQSSVTSPSISTSDSMKIPLLPEISEHPTSPSQAIGNTVHNNPVINDCSYVDSSVYDMEPLAPSSAIGTYDFSLFSDYQMAENDWIDLWNVDKLW

SEQ ID NO: 19765 - protein, 791 aa, Vitis vinifera
MVVEDDNSEKPLDLFLKIGLDERTARNTIANNKVTANLTAVIHEAALTNGCNRTVGNLLYTVATKFPANALVHRPTLLQYIVSSKIKTPAQLEAAFSFYSSIGSENFELKEFEESCGVGIDVPIEDIERTVNEIFEENKNVILGQRYQTNVGDLFGHVRKSHPWADPKIVKQLIDVKLYGLLGEKTAADDEKPSRKKKEKQAKSESIAVDTHPPPTSEEELNPFLIFPQPEENFKVHTEIFFSDRPVLRVCNTREMLEKHLKATGGRVFTRFPPEPNGYLHIGHAKAMFVSFGLAKERDGCCYLRYDDTNPEAEKKEYIDHIDEIVRWMGWEPFKVTYTSDYFQDLYDLAVELIRRNHAYVDHQTPEEIKEYREKKMNSPWRDRPIAESLELFDQMRRGMIEEGKATLRMKQDMQSDNYNMYDLIAYRIKFTPHPHSGDKWCIYPSYDYSHCIVDSLENITHSLCTLEFETRRASYYWLIDALGLYQPYVWEYSRLNVTNTVMSKRKLNRLVTERWVDGWDDPRLMTLAGLRRRGVTSTSINAFVRGIGITRSDSSMIRLDRLEFHIREELNKTAPRMMVVLHPLKVVITNLEVGSTMDLDAKKWPDAQIEDSSSFYKVPFSNIVYIEHTDFRMKDSKDYYGLAPGKSVLLRYAFPIKCTEVILSDDKETVVEVWAEFDPSKKTKPKGVLHWVAEPSPGIDPLKVEVRLFDKLFLSENPAELDNWLADLNPESKVVIPGAYAVPSLRTAAVGDRFQFERLGYFVVDKDSTSEKLVFNRTVTLRDSYSKGGK

SEQ ID NO: 19766 - protein, 211 aa, Vitis vinifera
MDVIPMRSSSLELTISVPGFTSSPSLPSSAGNHHGVRDLDINQVPLGAEEEWTTGSMEDEEESGNGGPPRKKLRLSKDQSRLLEESFRQNHTLNPKQKEALAMQLKLRPRQVEVWFQNRRARSKLKQTEMECEYLKRWFGSLTEQNRRLQREVEELRAMKPLPASTLTMCPRCERVTTTSLGKDPTNRTTSPTLSSKLPTALHSRHSSAAC

SEQ ID NO: 19767 - protein, 617 aa, Vitis vinifera
MSSTSTLSLPLQRNARKKGFPSSPVTKPFTANLTFSFSLRLTKAIHVKSSSTAKFNEVVVDEEIDKIRRLQNGSDVRGVAVEGEKGRTVDLTPPAVEAIAESFGEWVMNRLESEGGVPVEGVRVSLGRDPRISGASLSAAVFSGLARAGCLAFDMGLATTPACFMSTLLPPFAYDASIMMTASHLPYTRNGLKFFTRKGGLTSPEVEAICDKAARKYANRLTKVSTTLSIPPTKVDFMSTYAKHLRDIIKERVNHPLHYDTPLKGFQIIVNSGNGSGGFFTWDVLDKLGADTFGSLNLSPDGMFPNHIPNPEDKTAMALTKAAVLENNADLGIVFDTDVDRSGVVDSSGNPINGDKLIALMAAIVLREHPGSTIVTDARTSMALTQFIANRGGHHCLYRVGYRNVIDKGVQLNKDGIEAHLMMETSGHGALKENHFLDDGAYMVVKIIIEMVRMKLAGSYEGIGSLIEDLQEPFESVELRMNVISEPKHAKAKGAEAIEAFRNYIEEGKLEGWELDSCGDCWVSEGCLVDLNDTPAAIDAYMYRAKVSDKEHGQHGWIHLRQSIHNPNIAVNIQSSVPSGCQSMARVLREKFLIASGMEKSLDITQIDKYAKSGQVG

SEQ ID NO: 19768 - protein, 207 aa, Vitis vinifera
MKTHTLLFNVALLSAALLFAAAAATPTTYPDNSKAVDFIRTSCNATLYPKLCYTSLSAYANTIQQSPAHLARVAVAISLSRARHMASYVANLSRQADYGSAPRTAAALHDCFSTFGDAIDQIRGSLKQMRQLKAGESFRFQMGNVQTWMSAALTNEDTCTDGFEDAPDGAVKSEVCDRVENVKKFTSNALALVNSYVNKETNAMETP

SEQ ID NO: 19769 - protein, 177 aa, Vitis vinifera
MYQNDYQKFSASPPPSAPPYTSIQPEVATGIPIISTGNLQPGTEVPWSTCLCGCCSDVSNCCITCWCPCITFGRIAEIVDKGAVSCCASCAVYAALACCACLFSCSYRTKLRKQFMLKGCSCGDCLVHCCCETCSLCQEYRELTHRGFDMSLGWEGNMARQNIGVAMAPVVEGGMRR

SEQ ID NO: 19770 - protein, 154 aa, Vitis vinifera
MATGIPISSTGSLQPGTEVPWSTGLCDCFSDVTNCCITCWCPCITFGQIAEIVDKGTVSCFASGAIYAALAYFTTCACLFSCSYRTKLRKQLMLKESPCEDCLVHFCCEPCSLCQEYRELTRRGFDMSLGWEGNMERQNRGVAMAPVVERGMQR

SEQ ID NO: 19771 - protein, 180 aa, Vitis vinifera
MYQNDYQKFSASPPPSAPPYTSSQPAMATGIPISSTGGLQPGTEVPWSTGLCDCFSDVTNCCITCWCPCITFGQIAEIVDKGTVSCFASGAIYAALTYFTTCACLFSCSYRTKLRKQLMLKESPCGDCLVHFCCETCSLCQEYRELTHRGFDMSLGWEGNMERQNRGVAMAPVVERGMQR

SEQ ID NO: 19772 - protein, 165 aa, Vitis vinifera
MAIDTPANPTHVSHVRNSPRQVQPGAKVPWSTGLCDCFSDVPNCCMTFWCPCVTFGRIAEIVDSGSSSCALNGLLYTLVAFTTGCACLCSCFNRSKMRKQYKLEGNDCKDCLAHYFCEACALCQEYRELKNRGFDMTLGWHGNMQKQGSTPAATTVPAVEGGMYR

SEQ ID NO: 19773 - protein, 201 aa, Vitis vinifera
MYSSDDYRRFMTTPPPEPAPPSFNGAGTATGIPVSSPEPSFSEKPSQAPLQPKVKAPRVPWSSGLCDCFSDPRNCCITCWCPCITFGQIAEIVDKGSSACGVNGALYTLIACVTGCACCYSCFYRAKMRQQYLLKPSPCGDCLVHCCCEYCSLCQEYRELKNRGFDMTIGWHGNVERQNRGVEMSSMSSQTAPTMEEGMSR

SEQ ID NO: 19774 - protein, 186 aa, Vitis vinifera
MPQSSGSKALTITSLVVRLLTLIFLLASLIVIATDSATMKIDFTEVKIRLKNVYSYRYMVSVAVIGLAYTFLQIPFAVHYACTGKRLGAHDGLLKFEFFGDKVISYLLATGVGAAFGATFDLKKNLDDLERLVRRMNIYGSALLFSEIRSKLDDFFNLAYVSAGLLLLGFLCSGVSSIISSLALSK

SEQ ID NO: 19775 - protein, 182 aa, Vitis vinifera
MSRVYVGNLDPRVSERELEDEFRVYGVIRSVWVARRPPGYAFVEFADRRDAVDAIRGLDGKSGWRVELSHNSKGGGGGGGGGGGRDRGRGGGEDLKCYECGEPGHFARECRLRIGSRGMGSGRRRSISPRPRRSPSYGRRSYSPHARKSPRRRSVSPRRGRSYSRSPPYRRARNDSPFANGD

SEQ ID NO: 19776 - protein, 860 aa, Vitis vinifera
MASRSCANFLDLASGSLLDIPHTPRPLPRVMTVPGIISDLDGYGSNDGDSDVCHERKIIVANMLPLHAQRDKVTAKWCFSLDEDALLLHLKDGFSPETEVIYVGSLKVEIDASEQEEVAQKLLEDFNCVPTFLPHDLHKKFYHGFCKQQLWPLFHYMLPMCPDHGDRFDRVLWQAYVSANKIFADKVREVINPDDDYVWVQDYHLMVLPTFLRKRFHRVKLGFFLHSPFPSSEIYRTLPVRDEILRGLLNCDLIGFQTFDYARHFLSCCSRMLGLDYESKRGHIGLDYSGRTVYIKILPVGVHMGRLESVLNLHSTSAKIKEIQKQFEGKKLILGVDDMDIFKGISLKFLAVEQLLQQHPELQGKLVLVQIVNPARSTGKDVQEAKRETYLTAERINETYGSPNYEPVILIDRPVARYEKSAYYAVAECCIVNAVRDGMNLVPYKYIVCRQGTPHMDKETGMNLVSPPTSMLVVSEFIGCSPSLSGAIRVNPWDTDAVAEALNLAITMPNSEKQLRHEKHYRYVSSHDVAYWARSFMHDLDRACKDHYSKRCWGIGLGLGFRVVSLSPSFRKLSIDHIVSTYKRTTRRAIFLDYDGTVVPQSSIIKSPSPEVISVLSTLCSDPKNTVFIVSGRGRSSLSEWLAPCERLGIAAEHGYFMRWNESTKWESCNLAADLDWKKVVEPVMRLYTETTDGSNIEIKESALVWHHQDADPDFGSCQAKELMDHLENVLANEPAVVKRGQHIVEVKPQGVSKGLVAEKVLSTMVNDGKPPDFVMCIGDDRSDEDMFEGIFRTISSPSLSMSPEIFACTVGQKPSKAKYYLDDTTDVVRLLQGLATASNPKPRKTFGSLILTSGSLLRI

SEQ ID NO: 19777 - protein, 403 aa, Vitis vinifera
MVFSAYPFQKMTLIQSQIKQKDGLLIHSPLSPLLYSSSSPSALSSYDSNYQKESTPSPSSGSRISPAVLFIIVILAVIFFISGLLHLLVRFLVKHRSSSSISQSNRYQETSSSHAFQRQLQQLFHLHDSGLDQAFIDALPVFLYKDIVGLKEPFDCAVCLCEFSQEDKLRLLPMCSHAFHIECIDTWLLSNSTCPLCRGTLFNPGLAMENSVFDFEDSREEGGLSSNGDGVSSAQKPPEDDIASEKRVFSVRLGKFRGLNGGGGGGGGGGGGGGGGEGEGEGERGGGETSCSNLDARRCFSMGSFQYVVANSDLQVALCPNRADAGSDAVVKLMKGRGGHTGNSSTDGDVEGKKISIGSKDESFSVSKIWLWPKKGKFPSSSDTHIGPSVNVGFPWTERTQAS

SEQ ID NO: 19778 - protein, 594 aa, Vitis vinifera
MEAAALEIPVSGDPVKGEETTLMKFNGGDKGGVCDSMKVHLVAATERSSMENNSIDPSTQKNQEDRIKSAKEEVGEVREENERLKQILAKIKKDYQSLQMQFSEIAQHEEARKSTDTILTHQEEEEEETDLISLSLGRVSSAESKKDDKKTSFLSGKGKGDEKMDEGLALGLECKFEPAPTEHMMNASPENSFEGPKEEEPSTETWPPSKILKMGRSRDEEVLEQTHLKKARVSVRARCDTPTMNDGCQWRKYGQKIAKGNPCPRAYYRCTVSPSCPVRKQVQRCAEDTSILITTYEGTHNHPLPVSATAMASTTSAAASMLRSGSSTSQPGMEAFATSSTANLHGLNFSIPQNSRSQQFYFPNSSFSTSNSHPTITLDLTAPTASHFNRLSSSFPSAPRYPATCLNFSSSSSSSPLDPNNLPTSWGTLPSYGALSSYNKNQIGPFNFGMQPPSQENIYQPYMQKINNQAPSQQSLTETIATATKAIAADPTFRSALAAVITSFVGNAGGAGGGENHVKGENPSHNLKWGEFLSVNSALASSHNGVGCASSYLNRSSSANSQQQGNLISYPPSFPFSVPKSASASPSDHKDNIQ

SEQ ID NO: 19779 - protein, 156 aa, Vitis vinifera
MPPTHPHYKPTFSHHHSLHASRAVQMYYHHSESWGYYTAAAAAAAAARVMADPLERVARLASENAVVIFSLSSCCMCHAVKRLFCGMGVNPTVYELDQDPRGKEIERALMRLLGNSPAVPVVFIGGKLVGSMDSVMASHINGTLVPLLKEAGALWL

SEQ ID NO: 19780 - protein, 462 aa, Vitis vinifera
MDSPVFGSQWNLPSRTRRYPATRQVPVHRQMPVPSPKVVSIPVHFVGSERTRSASAVKIQKVFRGFLVRKNMKRIVAVKREIDEVERRISREEIVDMIRRDSKERLKVNETLMSLLLRLDSVRGVDSGVRDCRKAVIRRAIALQEKVDAIAASDQTVDSETHTETSDPSSELIDGSRSEAVDGIQELSVDCDSAADETLEIKDSICEYSANGALETAPDPAVVSDDCNVDGALQLQNPVEHVIDSGDSKVMSESTLDCCVDSADESKEEMDVTEIGVDSEINANKDVSTPKETVEDPDDSKALPRSSPDSCDDSVHEIKEDVDVAEVIDEIKEDMDVTEVGVDSEINANEEAYAPKEIVEDPSSNPRVNECAGVEGNQEHGKEDQSNGELLEKIMEENAKLMCLMTKLFEKNEAQTRLLSSLSQRVEHLERSIMCEKLRKKKRQAAAGQEASPDAKKCGKKL

SEQ ID NO: 19781 - protein, 573 aa, Vitis vinifera
MAGSVHFSGVRTPLLIKKACFSRFPSLSKSSNRIEFSASAISSSGLFAAFGDGCRRRVLRVGCKKGVEAVLREEASENESSDDNVEKLACVMKFGGSSLASAERMREVADLVLQFRDERPVIVLSAMGKTTNNLLLAGEKAVSCGVSNASEIDELSLVKELHLRTVQELGLDSSVISGHLEELEQLLKGIAMMKELTFRTTDYLVSFGECMSTRIFAAYLNKIGAKARQYDAFDIGFITTDDFTNADILEATYPAVAKRLYNDWINDPAIPIVTGFLGKGWKSGAVTTLGRGGSDLTATAIGRALGLQEIQVWKDVDGVLTCDPSIYPRALPVPYLTFDEAAELAYFGAQVLHPQAMRPARESDIPVRVKNSYNPEAPGTLINKTRDMSKAVLTSIVLKRNVTMLDIVSTRMLGQFGFLAKVFSIFEDLGISVDVVATSEVSISLTLDPSKLWSRELIQQELDHVVEELEKIAVVNLLQHRSIISLIGNIQRSSLILEKAFNVLRTIGVNVQMISQGASKVNISLIVNDSEAEQCVKALHHAFFEIGDLFELMILDGGVENGSALPLTVENQL

SEQ ID NO: 19782 - protein, 216 aa, Vitis vinifera
MGFGLVFLLVLSLGVFDVCEGKGKGYEEAVNCKRLECAPYEVVHSQKDYEIRSYTTSMWISTPPLNSSSYKDAVGRGFNILFAYIQGNNDQRAKIDMTAPVLVDIFPSTGPFCNSSFIMYFYVPTKYQNNPPLSAQAHQVKLPKHKYAAVRRFGGFMDDSNIPTQALALRRSLKGTPWETSISTKNRVLTYSVAGYNSPFEYENRVNEVIFWFDRP

SEQ ID NO: 19783 - protein, 389 aa, Vitis vinifera
MGYNLKTPSWDLAELQKEGIPSVAPFLGSSSSLGGGQETKGDCLVDLKLGRLSDLGDGSVNSFKSSMMESSSSGSAKRARTPGHGTQVVSCLVDGCKSDLSKCRDYHRRHKVCELHSKTAKVTIGGHEQRFCQQCSRFHSLGEFDEGKRSCRKRLDGHNRRRRKPQPEPLSITSGRFLSSHQGTRLLAFSNPQVFPASAGVTSAWAGNIKTENDAVLYNSHQQLNFMDRQNSFPESFSRSYRGKQFPFLQGPNPTLPGTSVCQPLLDPSSASGNGSGGQKMFSDGLNRVISSDRALSLLSSPPPETQEIGLSRMVQQNPIPPAQSLIPSLHYTGLSQYASSQGMGGSVGSVLVSDGSSNANLHCPAIFQLGPDGSSTNSPHQTLSFSWE

SEQ ID NO: 19784 - protein, 930 aa, Vitis vinifera
MGLFSHFLVSFLCLITTTLCQVTEFISIDCGGTSNYTDSRTGLQWISDTGAISYGKSVQVENPYGGWLQYQQRRDFPTESKYCYTLKTEERRRYLVRATFQYGSLESEGTYPKFQLYLDATKWATVTVLESARVYVKEMIIRAPSSSIDVCLCCATTGSPFISTLELRPLNLSMYATDFEDGFFLKVSARVNFGAPSEDPIRYPDDPYDRIWESDLVKRQNYLVGVAPGTERVNTSKQIDVRTREYPPVKVMQTAVVGTRGRLSYRLNLEDFPANARAYAFFAEIEELGVNETRKFRMERPYLPDYSNAVVNIAENANGSYSLYEPSYMNVTMDFVLSFSFVKTRDSTRGPLLSAIEISKYVQIAPKTDKGDVTVLNALCAMSTESAWSNEGRDPCVPAHWSWVACSPTTTPRITKITLSGKNLNGVIPSELKNMEGLTELWLDGNYLTGPIPDMSNLISLKIVHLENNRLTGPLPSYLGSLPSLQELHVQNNLLSGEIPPALLTGKVIFNYEGNSKLHKEAHKTHFKLILGASVGLLALLLVLCIGSLFLLCNTRRKESQSKSNDKGSSLRTSTKASTSYSIARGGNLMDEGVACYISLSDLEEATKNFAKQIGRGSFGPVYYGKMPDGKEIAVKIMADSSSHGTQQFVTEVALLSRIHHRNLVPLIGYCEDEHQHLLVYEYMHNGTLRNHIHDSTNQKCLDWLGRLYVAEDAAKGLEYLHTGCNPSIIHRDVKTSNILLDINMRAKVSDFGLSRQAEEDLTHVSSVARGTVGYLDPEYYANQQLTEKSDVYSFGIVLLELISGRKPVSPEDYGAEWNIVHWARSLICNGDVISIVDPFLLGNVKIESIWRIAEIAILCVEQHGTSRPKMQEIILAIQDAIKIERGNEGDHKACSGSSKGQSSRKTLLTNFLDIESPDLSNDCLVPSAR

SEQ ID NO: 19785 - protein, 320 aa, Vitis vinifera
MASSNSLIGIMMVLAKKHAVRTAQLSSKFYDNTCPKALSTIRTAIRTAVSRERRMAASLIRLHFHDCFVQGCDASILLDDSATIQSEKNAPNNNNSVRGFEVIDNVKSQVESICPGVVSCADILAVAARDSSVAVGGPTWTVKLGRRDSTTSGLSQAAANLPSFRDGLDKLVSLFSSKGLNTREMVALSGSHTIGQARCVTFRDRIHDNGTNIDAGFASTRRRRCPVDNGNGDDNLAPLDLVTPNSFDNNYFKNLIQRKGLLQSDQVLFNGGSTDSIVTEYSKSRSTFSSDFAAAMVKMGDIDPLTGSNGEIRKLCNAIN

SEQ ID NO: 19786 - protein, 324 aa, Vitis vinifera
MGSIAGNYGACIFVAVLLILSIMPCEAQLSSSFYDNTCPKALSTIRTATRKAVSRERRMAASLIRLHFHDCFVQGCDASILLDDSSSIQSEKNAPNNLNSARGYEVIHDVKSQVESICPGIVSCADILAVAARDASVAVGGPTWTVKLGRRDSTTSGLSQVSSNLPSFRDSLDRLISLFGSKGLSTRDMVALSGSHTIGQARCVTFRDRIYDNGTDIDAGFASTRRRRCPADNGDGDDNLAALDLVTPNSFDNNYFKNLIQKKGLLQSDQVLFSGGSTDSIVSEYSKNRKTFSSDFALAMVKMGDIEPLTGAAGEIREFCNAIN

SEQ ID NO: 19787 - protein, 667 aa, Vitis vinifera
MESSWRRRGSLIVAAIVCFGFLAAISIAKEEATKLGTVIGIDLGTTYSCVGVYKNGHVEIIANDQGNRITPSWVAFTDSERLIGEAAKNQAAVNAERTIFDVKRLIGRKFEDKEVQKDMKLVPYNIVNKDGKPYIQVKIKDGETKVFSPEEISAMILTKMKETAEAFLGKKIKDAVVTVPAYFNDAQRQATKDAGVIAGLNVARIINEPTAAAIAYGLDKKGGEKNILVFDLGGGTFDVSILTIDNGVFEVLATNGDTHLGGEDFDQRIMEYFIKLIKKKHGKDISKDNRALGKLRREAERAKRALSSQHQVRVEIESLYDGLDFSEPLTRARFEELNNDLFRKTMGPVKKAMEDAGLEKRQIDEIVLVGGSTRIPKVQQLLKDYFDGKEPNKGVNPDEAVAFGAAVQGSILSGEGGDETKDILLLDVAPLTLGIETVGGVMTKLIPRNTVIPTKKSQVFTTYQDQQTTVSIQVFEGERSLTKDCRQLGKFDLNGIPPAPRGTPQIEVTFEVDANGILNVKAEDKGTGKSEKITITNDKGRLSQEEIDRMVREAEEFAEEDKKVKEKIDARNSLETYVYNMKNQINDKDKLADKLESDEKEKIETAVKEALEWLDDNQSAEKEDYDEKLKEVEAVCNPIITAVYQRSGGAPGAGSDGGEDDDSHDEL

SEQ ID NO: 19788 - protein, 187 aa, Vitis vinifera
MLKAVLDAEEEYPVRVSPPQFSTPARCESSSHDCRWQPYANAKDFEANAAMILIILFCALISALILNAVIRCFLSSRRSSRPPPSLPEVQLDSSSMAAADKQVAPPTLVFSSGMKLAGAEAECAICLSEFVEGEGIRVMGQCKHGFHVQCIQEWLSSHSSCPTCRGSCLPTSAHLPTKATGNEPLEV

SEQ ID NO: 19789 - protein, 752 aa, Vitis vinifera
MEESSHEITSPLISKGGDSSLEPSSSSLKPDPDEENSPIKQVALTVPTTDDPSLPVLTFRMWVLGTVSCVLLSFLNQFFWYRTEPLTITAISAQIAVVPLGRLMAAKITDRVFFKGTPWEFTLNPGPFNVKEHVLITIFANSGAGTVYAIHVVTVVKVFYKKHISFFVSLIVVITTQVLGFGWAGIFRRYLVEPAAMWWPANLVQVSLFRALHEKEERPKGGVTRTQFFLIAFICSFAYYVFPGYMFEMLTSLSWICWIFPTSVLAQQLGSGLYGLGIAAVGLDWSTISAYLGSPLASPWFATANVAVGFVFVMYVLTPICYWLNVYKAKTFPIFSDDLFTSTGQEYNISSIITSNFHLNITAYEEEGPLYLSTFFAMTYGVGFAALSATAVHVLLFHGRYMVEIWEQSKSSFKDKGMDIHTRLMTRYKQVPEWWFWSILIANIAFTIFACQYYNDQLQLPWWGVLLACAIAIVFTLPIGIITAITNQTPGLNIITEYIIGYIYPGYPVANMCFKVYGYISMTQAVTFLQDFKLGHYMKIPPRTMFMAQVVGTLIAGFVYLGTAWWMMETIPDICETTASSSPWTCPSDRVFYDASVIWGLIGPRRIFGDEGVYEAVNWFFLAGAVAPVLVWLAHKAFPKQEWIGLINMPVLISSTGMMPPATAVNYTTWVIAGFLSGFVVYRYRPDWWQRHNYVLSGALDAGLAFMGVLLYLCLGLEDISVDWWGNDLDGCPYATCPTAKGVFVEGCPVFD

SEQ ID NO: 19790 - protein, 553 aa, Vitis vinifera
MDRRPTSPSSLETHFVDIHEVLPEEKEGTMADKGEKPPKRPNKFRDMKRSQRNFSRQVSLETGFSVLNRESKAKDERRVLRRSGRSFGGFGATNRVGGDGRKGDFSIFMTKSALTKQNSSLPLRRESELDFQKNDGSGVDDSVPAGRYFAALRGPELDQVKESEDILLPKDEQWPFLLRFPIGCFGICLGLSSQAVLWRALATSPATKFLHVTPFINLALWFLALAVLLSVSFIYILKCVFYFEAVKREYFHPVRVNFFFAPWVVCMFLALSLPSILAPKTLHPAIWCIFMAPYFFLELKIYGQWLSGGKRRLCKVANPSSHLSVVGNFVGAILASKVGWQEAAKFLWAVGFAHYLVVFVTLYQRLPTSEALPKELHPVYSMFIAAPSAASIAWETIYGDFDGLSRTCYFIALFLYISLVVRINFFRGFRFSVAWWSYTFPMTTVSVATIKYAEQVPSVLSKGLAVFLSFMSSTMVSVLFVSTLLHAFVWHTLFPNDLAIAITKRKHGRDKKPFKKAYDIRRWTKQSPLSFVSAMTKINSADKGLDEQKEAEH

SEQ ID NO: 19791 - protein, 314 aa, Vitis vinifera
MTAMDELPLVLVHVLPPFEIPFKGRLQSRFQLIDSSDSTFSPHASVLLCVGPAPVSSDTLRHLPSLQCIVGSSAGVDHIDLEECRRRGITVTNAGSSFCEDGADFAIGLLIDVLRRISAADRYVRAGLWPMKGDYPLGSKLGGKRVGIVGLGKIGSEIAKRLVAFGCRIAYNSRNKKSSVSFPYYANICNLAANSDILIICCALTKETHHLIDKDVMTALGKEGVIINVGRGGLINEKELVQCLVQGQIRGAGLDVFENEPDVPKELFELENVVLSPHKAIATLESLASLQELIVGNLEAFFSNKPLLSPINLD

SEQ ID NO: 19792 - protein, 334 aa, Vitis vinifera
MLNGETPLPQNGHRRNSMAAITGEAEAEAPGVVFVHGSPPFGLPFKDRLLSRFQLIHMSELPESSHVKVMLCMDHTPVTSQTLYKLPSLECIVASSAGVDHIDLTTCRLRGIAVANGSQAFSEDVADYAVALLMDVLRKISAGDRYLRSGLWSTKGDYPLGWKLGGKRVGIVGLGNIGSEVAKRLVAFGCAIAYNSRKKRSSVSFPYYADVCDLAANSDILVICGALTSETHHIINKDVMTALGKEGVIINVGRGSLINQKELVQFLVEGQIRGAGLDVFENEPIVPRELLELDNVVLSPHNAVVTPEAFEAMQELAISNLGAFFSNKPLLSPI

SEQ ID NO: 19793 - protein, 283 aa, Vitis vinifera
MVRGKTQMKRIENAASRQVTFSKRRSGLLKKAFELSVLCDAEVALIIFSPRGKVFEFSSSSINKTIERYQSKAKGLGISKRGAPENEQHHLEGETVDLAKKIELLEVSKRRLLGECLDSCSIEELQQIENELEQSLSNIRIQKNHLCKGHIERLKEQERILGEENAKLRGKDITITLYKYNILVSYRLARPLIRTNTTCRGQAKSHTGVGIKSDISLWVAATATIHQTSVSTICRNIGGRDRIVHRTTRKTNSPLSVRDLIADDEYSFKSNSSTSCLQDLQLL

SEQ ID NO: 19794 - protein, 199 aa, Vitis vinifera
MAKLGLSLLLVCSILHMVGTVDSAAARNSAATSFIKASCRVTRYPVLCFQCLSGYASTIRQSDRQLALTALSVSLSRARSATVFASKLTKVRGLKPREHEAVKDCIENMADTVDRLSHSVQELGRTGKAVSQDFMWHMSNVQTWVSAALTDENTCLDGFAGRVMEGNVKTAVRRKVIDVAQVTSNALALINRFAAKPRH

SEQ ID NO: 19795 - protein, 201 aa, Vitis vinifera
MEGSSLSPPLTAFFILFFQFSACMSSSSAAHTNTDYIKTSCLATTYPHLCYDSLSIYANKIQTSPKRLATTALSVASSSARSTLVSMKQLSKTHGLKPREASAMIDCVEEVADSVDELHKSIGEMGHAGGPDFEFRMGNIQTWVSAALTDEETCTDGFAGRAMNGNLKKTVQRHINKVARLTSNALALVNKYASTHTPASP

SEQ ID NO: 19796 - protein, 204 aa, Vitis vinifera
MEGSYFFNALAALFILLQLTTHMNTCSAARPSPNEAYAEFIKTSCRTTTYPQLCTSSLLSYASKIQTSPKILADTALSIALATAHSTSTAITKLSKTQSLKPGEAAAIRDCVEVLGDSEDELQMSIQEMEHPEGKSFGLQMSDIQTWVSAALTNDDTCMDSFAGNAMNGNVKTIVRGYILHVAQMTSVALALINNYALGQTTSP

SEQ ID NO: 19797 - protein, 809 aa, Vitis vinifera
MEGSYLFKAVAALSILLRLTTYMNSCSAAGATPGETNTEFIQKSCHVTPYPRLCISSLSSYASKIESSPKLLAVTALSMSLETALSTSTAITKLSKIHGLQPAEAAAISDCVEQIRDSVDELRNIGIMAHIDAGKTTTTERILYYTGRNYKIGEVHEGTATMDWMEQEQERGITITSAATTTFWNKHRINIIDTPGHVDFTLEVERALRVLDGAICLFDSVAGVEPQSETVWRQADKYGVPRICFVNKMDRLGANFFRTRDMIVTNLGAKPLVIQLPIGAEDNFRGVIDLVKMQAVLWSGEELGAKFAYDDIPSDLLELAQDYRSQMIETIVELDDEAMEGYLEGVEPDEETIKKLIRKGTISASFVPVLCGSAFKNKGVQPLLDAVVDYLPSPLDLPAMKGTDPENPEVTVERAASDEEPFAGLAFKIMSDPFVGSLTFVRVYAGKLAAGSYVLNANKGKKERIGRLLEMHANSREDVKVALAGDIVALAGLKDTITGETLCDPENPIVLERMDFPDPVIKVAIEPKTKADVDKMASGLVKLAQEDPSFHFSRDEEINQTVIEGMGELHLEIIVDRLKREFKVEANVGAPQVNYRESISKVSEVKYVHKKQSGGQGQFADITVRFEPIEAGSGYEFKSEIKGGAVPKEYIPGVMKGLEECMSNGVLAGFPVVDVRAVLVDGSYHDVDSSVLAFQLAARGAFREGMRKAAPKMLEPIMKVEVVTPEEHLGDVIGDLNSRRGQINSFGDKPGGLKVVDALVPLAEMFQYVSTLRGMTKGRASYTMQLAKFEVVPQHIQNELAAKEQAVAA

SEQ ID NO: 19798 - protein, 367 aa, Vitis vinifera
MEIPLISRTPHPPTTSFCSSSGGAGFCVLPATKKRNESKRCFGGFVRASAERSREGIDGGREGERGGGFTSPAMEVTTLNRSFNDTEFPVWEKIGAVVRLSYGIGIYGAMALAGRFICSMTGIDSMGGFNPSLDAILEGLGYAAPPIMALLFILDDEVVKLSPHARAIRDVEDEEIRSFFYGMSPWQFILMVAASSVGEELFYRAAIQGALADIFLRGTNFVTDARGMTSLTGVLPPFVPFAQAFAAVITAALTGSLYYVAASPKDPTYVVAPVLQSRSGRADLKKLFAAWYERRQMKKIYSPLLEGLLALYLGFEWIQTNNILAPIITHGIYSTVILGHGLWKIHDHRRRLRQRVQQLKTEVKNKS

SEQ ID NO: 19799 - protein, 591 aa, Vitis vinifera
MASLEVSKEVKFKAGEEACTLDGTVDCRGNPAIRSRSGKWFAGIIILLNQGLATLAFFGVGVNLVLFLTRVLQQNNADAANNVSKWTGTVYIFSLVGAFLSDSYWGRYKTCAIFQVIFVIGLVSLSLSSYIFLVKPEGCGNEDSPCPSHSSLEIGLFYLSIYLVALGNGGYQPNIATLGADQFDEEDPKEGHSKVAFFSYFYLALNLGSLFSNTILSYLEDEGMWALGFWVSAGSAFLALILFLGGTPRYRHFKPSGNPLSRFCQVMVAAMRKFRVEMPPSAEDLYEGDGKECSNNSIRRILHTDGFKFLDRAAFISSKDSDNQEQGFYNQWRLCPITQVEEVKCILRLIPIWLCTIIYSVVFTQMASLFVEQGAAMKTTVSNFRIPPASMSSFDILSVAAFIFLYRRVLDPLVGRIRKTDTKGLTELQRMGIGLIIAIIAMIAAGIVECYRLKYAQKDCTNCEGSSSLSIFWQVPQYAFIGASEVFMYVGQLEFFNAQTPDGLKSFGSALCMTSISLGNYVSSLLVTMVMKISTEDHMPGWIPGNLNKGHLDRFYFLLATLTALDLVVYVACAKWYKCIKMEDRANEYGV

SEQ ID NO: 19800 - protein, 397 aa, Vitis vinifera
MASLSLSAPSYHAESLVSRYSLRQSSFLPNESRYRFQVASVIKCDMNESLKFENGKPCVPVLNDRTFPSFLESRRMEKSVSRNSDRLKIFSGTANPTLSKEIAWYMGKELGKINIKRFADGEIYVQLEESVRGCDVYLVQPTCPPANENLMELLIMIDACRRASAKTVTAVVPYFGYARSDRKTQGRESIAAKLVANVITKAGADRVLACDLHSGQSMGYFDIPVDHIYCQPVILDYLASKTICCNDLVVVSPDVGGVARARAFAKKLSDAPLAIVDKRRQGHNVAEVMNLIGDVKGKVAVMVDDMIDTAGTITKGAALLHQEGAREVYACCTHAVFSPPAIERLTSGLFQEVIITNTIPTQEKNYFPQLTVLSVANLLGETIWRIHDDCSVSSIFL

SEQ ID NO: 19801 - protein, 344 aa, Vitis vinifera
  misc_feature (259)..(259): Xaa can be any naturally occurring amino acid
  unsure (1)..(344): unsure at all Xaa locations
MKSLGVRKGAWTQEEDVLLRKCIEKYGEGKWHLVPLRAGLNRCLKSCRLRWLNYLKPDIKRGEFALDEVDLMIRLHNLLGNRWSLIAGRLPGRTANDVKNYWHGHHLKKKVQFQEEGRKKPQTHSKTKAIKPHPHKFSKALPRFELKTTAVDTFDTQVSTSSKPSSTSPQPNDDIIWWESLLAEHAQMDQETDFSASGEMLIASLWTEETATQKKGTHSKTKAIKPHPHKFSKALPRFELKTTAVDTFDTQVSTSSKLXSTSPQPNDDIIWWESLLAEHAQMDQETDFSASGEMLIASLRTEETAAQKKGPMDGMIEQIQGGEGDFPFDVGFWDTPNTQVNHLI

SEQ ID NO: 19802 - protein, 224 aa, Vitis vinifera
MESLGVRKGKWTREEDFLLRKCVEKYGEEKWHLVPLRAGLSRCRKSCRLRWFNYLKPNIKRGKFASDEVDLMIRLHKLLGNRWSLIAGRLPGRTANDVKNYWHHHRFKKMVPIQEKGKDKAQTNSENTLIKPKPCKLFLGFTFKTTAVDASETQGSTCSELQPTLVQPNQDILWWESLFADHTIEDQELIASLLADETASAVDTNGGGNFDFPFEMGLIGEAMI

SEQ ID NO: 19803 - protein, 250 aa, Vitis vinifera
MESLGVRKGAWIQEEDVLLRKCIEKYGEGKWHLVPLRAGLNRCRKSCRLRWLNYLKPDIKRGEFALDEVDLMIRLHNLLGNRWSLIAGRLPGRTANDVKNYWHSHHFKKEVQFQEEGRDKPQTHSKTKAIKPHPHKFSKALPRFELKTTAVDTFDTQVSTSRKPSSTSPQPNDDIIWWESLLAEHAQMDQETDFSASGEMLIASLRTEETATQKKGPMDGMIEQIQGGEGDFPFDVGFWDTPNTQVNHLI

SEQ ID NO: 19804 - protein, 224 aa, Vitis vinifera
MESLGVTKGKWTREEDILLRKCVENYGEEKWHLVPLRAGLSRCRKSCRLRWFNYLKPNIKRGKFASDEVDLMIRLHKLLGNRWSLIAGRLPGRTANDVKNYWHHHRFKKMVPIQEKGKDKAQTNSENTLIKPKPCKLFLGFTFKTTAVDASETQGSTCSELQPTLVQPNQDILWWESLFADHTIEDQELIASLLADETASAVDTNGGGNFDFPFEMGLIDEVMR

SEQ ID NO: 19805 - protein, 158 aa, Vitis vinifera
MESLGVRKGAWTQEEDVLLRKCIEKYGEGKWHLVPLRAGLNRCRKSCRLRWLNYLKPDIKRGEFALDEVDLMIRLHNLLGNRWSLIAGRLPGRTANDVKNYWHGHHLKKKVQFQEEGRDKPQTHSKTKAIKSRKPLDRRNCNTDKGTHGWYGRTNPGR

SEQ ID NO: 19806 - protein, 229 aa, Vitis vinifera
MESLGVTKGKWTREEDILLRKCVENYGEEKWHLVPTPSRVAFSGLSRCRKSCRLRWFNYLKPNIKRGKFASDEVDLMIRLHKLLGNRWSLIAGRLPGRTANDVKNYWHHHRFRKMVPIQEKGKDKAQTNSENTLIKPKPCKLFLGFTFKTTAVDAYETQGSTCSELQPTLVQPNQDILWWESLFADHTIEDQELIASLLADETASAVDTNGGGNYDFPFEMGLIDEVMR

SEQ ID NO: 19807 - protein, 589 aa, Vitis vinifera
MGDTEEANIDMIQRLQSSFGTSSSSIQKQPMSMNQLDIPQLNASSQIRAPMMRHFSPNFSGDSSKRHGFPPSHPHQIPPISPYSQIPVPRPANQQLVSQNFSPGPSHSRSLSQPSFFSLDSLPPLSPSPYRDSSSTSISDAVSADISMEDRDASSHSVLPPSPSPFSRGNSMRVGENLPPRKAHRRSSSDIPFGFSSIMQSSPPLIPLRGSGALERSMSGRDNNMAAAKPVQLVKRESSWERGGDSNAEGMGERKSEGEVVDDLLSAYMNLDNIDALNSPGTEEKNGTENREDLDSRASGTKTNGGDSSDNEAESSVNESGNSMQKLGTSSSAEKREGVKRSAGGDIAPTTRHYRSVSMDSFMGKMNFGDESPKLLPSPGTRPGQLSPSNSMDGNSATFSLEFGNGEFSGAELKKIMANEKLAEIALTDPKRAKRILANRQSAARSKERKMRYISELEHKVQTLQTEATTLSAQLTLLQRDSAGLTSQNNELKFRLQAMEQQAQLRDALNEALTAEVQRLKLATAELGGESQASKCLVPQLSVNPQMFHLHHQQPTQLNIHQLQQQQQQQHNQQQQQNGSTTTKHESNQ

SEQ ID NO: 19808 - protein, 214 aa, Vitis vinifera
MSRVTGTVKWFNDQKGFGFITPDDGGDDLFVHQSSIRSEGFRSLGEGEAVEFVVESSDDGRTKAVDVTGPDGNPVQGSRGGGGGRGGRGGGGYGGGGGYGGGGGGYGYNGGGGRGGGRGGRGGGGGGRSSGGYGGGGYGGGGGYGGGGGGGACYNCGEEGHLARDCSQSSGGGGGGGRYSGGGGGGGGGGGGGGGCYRCGEAGHFARECPNNAR

SEQ ID NO: 19809 - protein, 386 aa, Vitis vinifera
MAKPVSIEVWNPCGKYRVVSTKPMPGTRWIDLLVQQDCRVEICTQKKTILSVEDIIALIGDKCDGVIGQLTEDWGETLFSALSRAGGRAFSNMAVGYNNVDVNAANKYGVAVGNTPGVLTETTAELAASLSMAAARRIVEADEFMRAGLYDGWLPHLFVGNLLRGQTVGVIGAGRIGSAYARMMVEGFKMNLIYYDLYQATRLEKFVTAYGQFLKASGEQPVTWKRAASMDEVLREADLISLHPVLDKTTYHLVNKERLSMMKKEAILINCSRGPVIDEVALVAHLKENPMFRVGLDVFEDEPYMKPGLAEMKNAIVVPHIASASKWTREGMATLAALNVLGKIKGYPIWHDPNKVEPFLNENSLPPAASPSIVNAKALGLPVSKL

SEQ ID NO: 19810 - protein, 947 aa, Vitis vinifera
MEDGSFTPNSVFGAPSDSAMDLNFMDELLFEGCWLETTDGFSFLQPGASTSSALNDSSHHSLTFENPNTPEKSYGDDGQRSSLPENPPPFYPQAEGLVGTQSDNWKTFEAATASGQSESFLVERTELNRRLWIGPSANPGPVSSVKNRLILAIRNLREFTKERDVLIQIWVPIERGGKNVLTTNDQPFSLDPDCQSLANYRNVSENYHFPAEEDSKEQVGLPGRVFLGKVPEWTPDVRFFKSEEYPRINYAQRYNVRGSLALPVFERGSGVCLGVIEIVTTTQKINYRPELENVCKALEAVDLRSSEVLIPPVKACNELYQAALPEILKVLARVCRTHRLPLAQTWAPCIQQGKGGCRHSDKNYALFLSTVDHAYYVTDPKFKGFNEACFDHHLFRGQGVVGRALTTNQPCFESDITAFSKTEYPLSHHARMFGLRAAVAIRLKSIYNGSADFILEFFLPTDCQETEEQKQVLNSLSIVIQQTCQIFRVVTEKDLEKESILPVGEILFASDERVKQEGSVKLLSPPIKEPSREESSWIAHMMEAQKKGKGVSVSLEYQKEEPEEEFKVTTNWDNTEVELHHGQVFSEFGQPQQNSGAKGSVEGGGDSSFGGQHSSGSRKAREKRRTKTEKTISLQVLSQYFAGSLKDAAKSIGVCPTTLKRICRQHGITRWPSRKIKKVGHSLRKLQLVIDSVQGTQGAIQIGSFYTNFPELSSPNVPGTVPFSSSKMTDDSKQLNPQSEVLFSPGVTTSKSPSSSCSQSSSSSFCCSTGAKQQSTTVNASVSGDVLMAEDPVLLKRTRSDAELHVSNPDEPKLLVRSQSHKSFGEHPCVETLPPLPKSNSRALRDGGGFRIKATFGEENVRFSLQLNWSFKDLQQEIARRFGIDNMNSIDLKYLDDDCEWVLLTCDADLEECIDVYRSCQSRKIKLSLHHSSRLKLKSSAFSSGPS

SEQ ID NO: 19811 - protein, 426 aa, Vitis vinifera
MVFSKEASSSSHGLNPMSPEEAPLLPKLKLLSSQPKTFANVFIAVVGAGVLGLPYCFKRTGWVVSLLMLFSVAALTHHCMMLLVRTRRRLESVMGFTNIASFGDLGFIVCGSVGRFAVDLMLVLSQAGFCVGYLIFIANTLANLFNSPTPTNLHPRILGLMPKTVYIWGCIPFQLGLNSISTLTHMAPLSIFADIVDVGAMGVVMIEDVFIFFKNRPSVEAVGSLSMFFYGLGVAVYAFEGVGMVLPIESETQEREKFGKVLALAMASISLMYGGFGALGYFAFGEDTKDIITANLGTGLVSFLVQLGLCVNLFFTFPLMMNPVYEVVERRLYNGRYCLWLRWLLVLTVILVALLVPNFTDFLSLVGSSVCCGLGFVLPALFHLMVFKEEMGWGGVSLDVGIVVVGVVLGVSGTWYSLVEIFSVKV

SEQ ID NO: 19812 - protein, 382 aa, Vitis vinifera
MDNIVDALNNAYQEFVSAAASVLEAKESSGAQKTAATDAALENFKQRWELFRVACDQAEEFVESVKQRIGSECLVDEATGSVAGKPGQAVTAGLPPISAVRLEQMSKAVRWLVIELQHGSGTAGGPSHSHVSAPFDARFSEDAIGSLGLKVLWHFLHFIVSVWFLARQAAYVLESCFISSGLLKRYEALNLGNLRYLAIVIESEEAHQIPKVIELLNWLATIGVKHVCLYDNEGVLKKSKEAILEKLTDATLFEGVDENNLLLDQEHITLEFASISDGKGAVTKAANILFMKYLKSADSGGSSAESIFTEPHMAEALKAVGCRGPDPDLLLIYGPARCHLGFPAWRIRYTEIIHMGPLKSMKYGSLLKAIYKFSMVHQNYGT

SEQ ID NO: 19813 - protein, 229 aa, Vitis vinifera
MESEFGESTSGPSRGPSYTTNNSNDTGDFECNICFELAQDPIVTLCGHLFCWPCLYRWLHIHSHSHECPVCKALVQEEKLVPLYGRGKTPSDPRSRSVPGINIPNRPAGQRPEVAPRPDVNHFPPPQGYGFMGGFMPMASARFGNLTLSAAFGGLIPSLLNLHVHGFHDATVYGTTSGFPYGFSNSFHGGHAHGFHHHHASHAHQSDFSFMKRCLLFIGLLVIISLIWM

SEQ ID NO: 19814 - protein, 233 aa, Vitis vinifera
MLNTKTPATTATMLISNATQDAKNISKICATHGSGSTSLYRQSLELSWVRRDGSVQGLFCRTPRLITSVEKCRRLEVRAFTEEQEALVVKSWSSMKKNAGELSLKFFLRIFEIAPSAKKLFSFLRDSDVPPEQNPKLKPHALSVFVMTCESAIQLRKAGRVTVRESNLIDLGATHFKYGVVDEHFEVTKYALLETIKEAVPDMWSPEMKSAWAEAYDQLVAAIKKEMKPPQTS

SEQ ID NO: 19815 - protein, 168 aa, Vitis vinifera
MSLISDQSPASDATICFTEEQEALVVKSWNSMKKNSGELGLKFFLKIFEIAPSAQKLFSFLKDSKVPLEKNPKLKSHAMAVFVMTCESAVQLRKAGKVTVRDSTLKKLGSVHYKSGVLDEHYEVTKFALLETIKEAVPEMWSPEMKNAWAQAYDQLVVAIKSEMKPSS

SEQ ID NO: 19816 - protein, 595 aa, Vitis vinifera
MASISVPFLSQAPTHLSNSTSLRLKTRISATPTPTPTPTTVAPSSTAAVDASRMEPRVEERGGYWVLKEKFREGINPQEKVKIEKDPMKLFIEDGFNELASMSFEEIEKSKHTKDDIDVRLKWLGLFHRRKHQYGRFMMRLKLPNGVTSSAQTRYLASAIRQYGKEGCADVTTRQNWQIRGVVLPDVPEILKGLSEVGLTSLQSGMDNVRNPVGNPLAGIDPHEIVDTRPYTNLLSQFITANARGNTAFTNLPRKWNVCVVGSHDLYEHPHINDLAYMPATKKGRFGFNLLVGGFFSPKRCADAIPLDAWIPADDVLPVCQAVLEAYRDLGTRGNRQKTRMMWLIDELGIEQFRAEVVKRMPQQELERSSSEDLVQKQWERRDYLGVHPQKQEGFSFVGIHIPVGRVQADDMDELARLADEYGSGELRLTVEQNIIIPNVENSRLEALLKEPLLRDRFSPEPPILMKGLVACTGNQFCGQAIIETKARALKVTEDVGRLVSVTQPVRMHWTGCPNSCGQVQVADIGFMGCMTRDENGNVCEGADVFLGGRIGSDCHLGEVYKKRVPCKDLVPLVAEILVNHFGGVPREREEEAED

SEQ ID NO: 19817 - protein, 305 aa, Vitis vinifera
MAEGGGHEGFLWENQSWGFSNSDNSGGSDKKSGEKQPGSASNSQTAATGMDLVPPDKKRGRGGAIKNGKNGKGSGEGNEGKSGGGGGGESDHEIHIWTERERRKKMRNMFSSLHALLPQLPPKADKSTIVDEAVNYIKTLQHTLQKLQKQKLERLQGATTVNYEPSIITSQKLAFDSREAFLADQGSSSNLAITPSNSSNSLSVARVPAVFQSWTSPNVTLNVCGNEAQISVCSPKKPGLLTTICYVLEKHKLEVISAHVSSDYNRSMYMIQTNANGALDQFPVGFPMEEVYKQAAGEIMFWASS

SEQ ID NO: 19818 - protein, 595 aa, Vitis vinifera
MAAASSSTLFPSNKLSSNSLSRKLSLAPAFSVAVVVPRRRRSLVVVATALDAKPTVLVAEKLGAAGLDLLKDFANVDCAYNLSPEELCTKISLCDALIVRSGTKVSREVFEASSGRLKVVGRAGVGIDNVDLAAATEHGCLVVNAPTANTVAAAEHGIALLTAMARNVAQADASVKSGKWQRNKYVGVSLVGKTLAVMGFGKVGSEVTRRAKGLGMHVIAHDPYAAADRARAIGVELVGFDEAISTADFISLHMPLTPATSKMLNDETFAKMKKGVRIINVARGGVIDEEALVRALDAGIVAQAALDVFTEEPPPKDSKLILHENVTVTPHLGASTMEAQEGVAIEIAEAVVGALKGELAATAVNAPMVPAEVLSELKPFVELAEKLGRLAVQLVSGGSGVKSVKVTYASARAPDDLDTRLLRAMITKGLIEPISSVFVNLVNADFSAKQRGLRITEERSILDGSPESPLEFIQVQIANVESKFASAISESGEITVEGRVKDGIPHLTKVGSFEVDVSLEGSIILCRQVDQPGMIGKVGSILGEENVNVSFMSVGRVAPRKHAVMAIGVDEQPSKVTLKKIGEIPAVEEFVFLKL

SEQ ID NO: 19819 - protein, 194 aa, Vitis vinifera
MAFAGTTQKCMACEKTVYLVDRLTADNRIYHKACFRCHHCRGTLKLGNYNSFEGVLYCRPHFDQLFKRTGSLDKSFEGTPKIVKPEKTTDHSENAATNKVSNMFVGTKDKCVGCNKTAYPLEKVTVNGTPYHKSCFKCTYGGCTISPSNYIAHEGKLYCKHHHIQLFKEKGNYSQLESDNEKDSVSGIQVAAES

SEQ ID NO: 19820 - protein, 379 aa, Vitis vinifera
MMIGEPTRSNPTVQVPPWDPYDDPTAGMGSPFPVSGVNFNGNAASPTGGDYNPFIISEAFSSLQRYLPSNEFGTESGDESETVVDAFSCDQFRMFEFKVRRCARGRSHDWTECPYAHPGEKARRRDPRKFHYSGTACPEFRKGNCKKGDSCEFAHGVFECWLHPARYRTQPCKDGSGCRRRVCFFAHTPEQLRVLPQQSPRNHGSAESYDGSPLRLAFDPYLSKGSFISSPTSTLISPPVSPPSDSPPMSPNSPSFTGSFNSMSELVASMRNLQVGKAKMSPQSWGVQMGSGFGSPRGSTLRPGFCSLPSTPTRTPARSGLGGLDVWDKTCEEEPAMERVESGRDLRARIYAKISKENSLDRDSSPSAPDFGWVSELVK

SEQ ID NO: 19821 - protein, 344 aa, Vitis vinifera
MADSSDSVSIDMETISLGGKEHLVKTSKGSVSVSVFGDPDKPALVTYPDLALNHLSCFQGLFFCPEAFSLLLHNFCIYHISPPGHELGADAVSLDEPALSADDLADQIAEVLNFFGLGAVMCMGVTAGAYILTLFAIKYRHHVVGLILISPLCKAPSWTEWLYNKVMLNVLYYYGMCGVVKELLLKRYFSKEVRGSAQVPESDIVQACRRLLDERQSSNVLKFLEAINGRPDITEGLRKLQCRSLLFVGDNSPFHSEALHMTSKLDRRYSALVEVQSCGSMVTEEQPHAMLIPMEYFLMGYGLYRPSTVSLSPRSPLSPSCIAPELLSPESMGLKLKPIKTRIS

SEQ ID NO: 19822 - protein, 589 aa, Vitis vinifera
MENDMFNVPMDIAGRNHVVMDGVSSHMSTNSLIQSDLFHLNSQNQFMIGLPVLPMLQGETINGLHADFQMTSRPAIVDSDELVSRNSSLGQACPIGSTNGQEQFNEVTTISASSLATLLATKSGLHENLDNLAISATSVFPSEDLRTFVSSDCSNTSNSSLATSVDCPYDGVLSDMTRKWGFDKFLPSPELTGKTTLRTGFQPFHIIGDMDPNGWISSSADTRTVPPYGSSNELSLSLATSQPSVMCGATAPNQCSERSCSGVTHPCLNEVGLGSEQGSCNSKELSLSFGSYRPAQFSQVISGSRYLHVIQEILAEILNYSLENLDHSIYSTTRTGGQANVQLSSGYAAQRGLSVMGSDEFPDEDGRYAVPMDPVLQKREVEAKKTQLLALLQVVDDQYNQCLDEIHTVISAFHAATELDPQIHARFALHTISLLYKNLRERISNQILAMGTRFTNGCTSEKERPPFESSFIQKQWDLQQLRRKDHQLWRPQRGLPERSVSVLRAWMFQNFLHPYPKDAEKHLLAVKSGLTRSQVSNWFINARVRLWKPMIEEMYSEMNRRKGRRNDEESNNSNRRSTISMDNQRYKII

SEQ ID NO: 19823 - protein, 156 aa, Vitis vinifera
MDLRMIGLDSPLFSALQHMLDAADDSDKSVSAPTRTYVRDAKAMAATPADVKEYPNSYAFIIDMPGLKSGDIKVQVEDDNVLVISGERKREEEKEGAKYVKMERRVGKFMRKFVLPENANTDKISAICQDGVLTVTVEKLPPPEPKKPKTIEVKIA

SEQ ID NO: 19824 - protein, 156 aa, Vitis vinifera
MDLRMMGLDSPLFSALQHMLDAADGSDKSVSSPTRTYVHDAKAMAATLADVKEYPNSYAFIIDMPGLKSGDIKVHVGGDNVLVISGERKREEEREGAKYVRMERRVGKFMRKFALPENANTDKISAVCQDGVLTVTVEKLPPPEPKQPKTIEVKIA

SEQ ID NO: 19825 - protein, 156 aa, Vitis vinifera
MDLRVMDFDSPLFSTLQHMLDAVEDSDKSLNAPTRTYVRDAKAMAATPADVKEYPNAYSFIIDMPGLKSGDIKVQVEDDNVLMISGERKREEEKEGAKYVRMERRVGKFMRKFVLPENANTDKISAVCQDGVLTVTVEKLPPPEPKKPKTIEVKIA

SEQ ID NO: 19826 - protein, 156 aa, Vitis vinifera
MDLRVMGFDSPLFSTLQHMLDAGDDSDKSLNAPTRTYVRDAKAMAATPADVKEYPNSYTFIVDMPGLRSGDIKVQVEDGNVLVISGERKREEEKEGAKYVRMERRVGKFMRKFVLPENANTDKISAVCQDGVLTVTVEKLPPPEPKKPKTVEVKIA

SEQ ID NO: 19827 - protein, 156 aa, Vitis vinifera
MDSRMMGFDSPLFSALQHMLDATDDSDKSVSAPTRTYVRDAKAMAATPADVKEYPNSYTFIVDMPGLKSGDIKVQVEDDNVLVISGERKREEEKEGVKYVRMERRVGKFMRKFALPENANTDKISAVCQDGVLTVTVEKVPPPEPKKPKTIEVKIA

SEQ ID NO: 19828 - protein, 144 aa, Vitis vinifera
MRDQNKEVSDIMGQRCVSAPTTCTYVRDAKAMAATLADVKEYPNSYTFIVDMPGLRSGDIKVQVEDGNVLVISGERKREEEKEGAKYVRMERRVGKFMRKFVLPENANTDKISAVCQDGVLTVTVEKLPPPEPKKPKTIEVKIA

SEQ ID NO: 19829 - protein, 156 aa, Vitis vinifera
MDSRMMGFDSPLFSALQHMLDATDDSDKSVSAPTRTYVRDAKAMAATPADVKEYPNSYTFIVDMPGLKSGDIKVQVEDDNVLVISGERKREEEKEGVKYVRMERRVGKFMRKFALPENANTDKISAVCQDGVLTVTVEKLPPPEPKKPKTIEVKIA

SEQ ID NO: 19830 - protein, 156 aa, Vitis vinifera
MDLRVMGFDSPLFSTLQHMLDAGDDSDKSLNAPTRTYVRDAKAMAATPADVKEYPNSYTFIVDMPGLRSGDIKVQVEDGNVLVISGERKREEEKEGAKYVRMERRVGKFMRKFVLPENANTDKISAVCQDGVLTVTVEKLPPPEPKKPKTIEVKIA

SEQ ID NO: 19831 - protein, 155 aa, Vitis vinifera
MDLRIMGFDSPLSTLQHMLDGVDDADKPVSAPTRTYVRDAKAMAATPADVKEYPNSYVFIIDMPGLKSGDIKVQVEDDNVLVISGERKREEEKEGAKYVRMERRVGKFMRKFVLPENANTDKISAVCQDGVLTVTVEKLPPPEPKKPKTIEVKVA

SEQ ID NO: 19832 - protein, 325 aa, Vitis vinifera
MEEERKEETLPPGFRFHPTDEELITCYLINKISDATFTGRAIADVDLNKCEPWELPGKAKMGEKEWYFFSLRDRKYPTGVRTNRATNTGYWKTTGKDKEIFNSVTSELVGMKKTLVFYRGRAPRGEKTNWVMHEYRIHSKSAFRTSKDEWVVCRVFQKSAAGKKYPSNQSRGMNPYSLDIGPSVMPPPMLQADSSQFPMGRNYVSNAELAELTRVLRGGSTGGLNLPIQSQLNYPLGGGCFTISGLNLNLGGTSTQPVLRPNSLPQPMQMNQQDHMMTSPMLTSGSIPTDQTGYGAEVNNGNGHNSRFMNMVDHCVDLDNYWPPY

SEQ ID NO: 19833 - protein, 160 aa, Vitis vinifera
MSDEEHHFESKADAGASKTYPQQAGAIRKNGYIVIKARPCKVVEVSTSKTGKHGHAKCHFVGIDIFNGKKLEDIVPSSHNCDVPHVTRTDYQLIDISEDGFVSLLTDSGGTKDDLRLPTDDNLLTQIKDGFAEGKDLVVTVMTAMGEEQICALKDIGPKN

SEQ ID NO: 19834 - protein, 435 aa, Vitis vinifera
MALPQMEVVGLHTSISLYRETWRSHYLHRFQFTTLGKKSFLHGCSFQFRAWSRSRELVSPRTNLSIIRRVNATERVEEEFDVIDNPAAASTMSSSEDEESSASTFLSLSEKPDRNMALLDDYELEELDFASNPNHRSGYVAVLGKPNVGKSTLANQMIGQKLSIVTDKPQTTRHRILGICSGPEYQMILYDTPGVIEKKMHKLDSMMMKNVRSATINADCVVVLVDACKEPQKIDEVLEEGVGNLKDKLPTLLVLNKKDLIKPGEIAKKLEWYEKFIDVDEVIPVSAKYGQGVDDVKDWILSKLPLGPAYYPKDIVSEHPERFFVGEIVREKIFMQYRNEVPYACQVNVVSYKTRPTAKDFIQVEIVVEKNSQKIILIGKEGKALKLLATAARLDIEDFLQKKVFLEVEVKVKENWRQDEGLLKYYGYGGQIQAL

SEQ ID NO: 19835 - protein, 226 aa, Vitis vinifera
MASGFGESESMSPASGACGGSGSNDVGDFECNICFELAQDPIVTLCGHLYCWPCLYEWLHHHSHSQECPVCKALIQEEKLVPLYGRGKTPSDPRSKSIPNDSIPSRPAGQRPETAPPVANPVSHLGVGLMRGFAPVRTARFGNFALSAAFGHLSPSLFNIHVHGFPDPRVYGATPGYPLWFSNAMHGGLGHMHRFPHPISQRQRTNYYLKNLLLFTGVLVILALIW

SEQ ID NO: 19836 - protein, 479 aa, Vitis vinifera
MDWIKILEGSGHKISEVQYHGTDGDGIIWGEPSISEGAPTDFDDQDIAVAIVRSIEDYEAEEDKKLKKLVDNESQLKEDEQLAKALQESLNMESPPRRDARNIFQPLTFSSLGFRICARCNLEIGHERHLRRMGAVWHPECFRCHACGLRIFDLEFSVSGNRPYHESCYKDQNHPRCNVCKNFIPSNAAGETEYRAHPFWMQEYCPSHEHDGTPRCCSCERTEVRDIRYLSLDDGRKLCLECLDSAIMDTLECQPLYLQIQEFYEGLNMKVEQQIPLLLVERQALNEAMEGEKSGHHLLPETRGLCLSEEQTVSTISRRPRISTGYRIINMMTEPCRLVRRCEVTAILILYGLPRLLTGTILAHEMMHAWLKLKGYRNLRQDVEEGICQVLAYMWLESEIHSSSGNNVSSASTPSSSSTSEKGARSQFEKKLGEFFKDQIETDSSPAYGDGFRAGNQAVQQYGLKSTLDHIRLTGSFPY

SEQ ID NO: 19837 - protein, 491 aa, Vitis vinifera
MDWLTKILKGSGHKISEGQYHGRYGDDRIWEEPSHTKVLFDVSTDFDHDDLAVAMARSLEDYPEEDQKGKKVVDTESQLEEDEQLARALQESLNVESPPRHDAGNIFQPFPSFFSPGYRICAGCNCEIGHGRYLSCMGAVWHPECFRCRACGLPIFEHEFSMSGSHPYHKSCYKEQNHPKCDVCRNFIPTNAAGLIEYRAHPFWMQKYCPSHEHDGTPRCCSCERMEARDTRYLSLDDGRKLCLECLDSAIMETVECQPLYLEIQEFYEGLNMKVEQQVPLLLVERQALNEAMEGEKNGHHHLPETRGLCLSEEQTVSTISGRPRIGTGYRIIDMMTEPYRLIRRCEVTAILILYGLPRLLTGSILAHEMMHAWLRLKGYPNLSQDVEEGICQVLAYMWLDSEIYSSAGSDVASASSSSSSSSSSSSSSTTSKKGARSQFEKKLGEFFKHQIETDSSPAYGDGFRAGNQAVQKYGLKSTLDHIRLTGSFPY

SEQ ID NO: 19838 - protein, 496 aa, Vitis vinifera
MAMASFYLFSSSLCMLFSFVVFTEAAPKGSLITHLPGFNGIFPSKHYSGYVDIGGEPAKNLFYYFVVSERNPAKDPLVLWLNGGPGCSSFDGFVYEHGPFNFEAGKTPISLPTLHLNPYSWSKVSSMIYLDSPTGVGFSFSKNTWQYKTGDVQTASDTHEFLLRWFKEFPEFITNPFYVSGESYAGVYVPTLSAAIVKGIKSGAKPTINFKGYLVGNGVTDMEFDANALVPFTHGMGLISSEMFEKARDNCGGNYYSNESKSCIEELNKIYNAISGLNQYDILEPCYHRPTKKGEETGNTTLPLSFKQLGATNRPLPVRTRMFGRAWPFRAPVKDGILPLWTELIKQNPIPCTDDQVASAWLNDKGVRTAIHAQQKDVIGEWEICTGRLHYSSDSGSMLQYHKNLTAKGYRALIYSGDHDMCVPFTGSEAWTRSLGYKIMDEWRAWISNDQVAGYTQGYEHGLTFLTIKGAGHTVPEYKPREALDFFGRWLEGKAI

SEQ ID NO: 19839 - protein, 496 aa, Vitis vinifera
MAMASFYLFTSSLCILFSFVVFTEAAPKGSLITHLPGFNGTFPSKHYSGYVDIGGEPAKNLFYYFVVSERNPGKDPLVLWLNGGPGCSSFDGFVYEHGPFNFEAGKTPNSLPTLHLNPYSWSKVSSMIYLDSPAGVGFSFSKNTWQYNTGDLQTASDTHEFLLRWFKEFPEFITNPFYVSGESYAGVYVPTLSAAIVKGIKSGAKPTINFKGYLVGNGVTDMEFDANALVPFTHGMGLISSEMFEKARDNCGGNYYSNESKSCIEELNKIYNAISGLNKYNILEPCYHRPAKKGEETGNTTLPLSFKQLGATNRPLPVRTRMFGRAWPFHAPVKDGILPLWPELMKKKTIPCTDDQVASVWLNDKGVRTAIHAQQKDVIGEWEICTGRLYYSSDSGSMLQYHKSLTAEGYQALIYSGDHDMCVPFTGSEAWTRSLGYKIVDEWRAWISNDQVAGYTQGYEHGLTFLTIKGAGHTVPEYKPKEALDFFSRWLDGKAI

SEQ ID NO: 19840 - protein, 378 aa, Vitis vinifera
MKIIRRDLVANGPGSVKMVPVDSDDLWYAYNLIAPGDTVLAVTVRKVLREVASGGRDAERVKLKLEIKVEVADYDKVGSVLRIRGKNILENEYVKIGQFHTLEIEQHRPFVLRKVVWDSLALDTLNQASDPAASADLAVVLMQEGLAHVILIGRSLTITRSRIEASIPRKHGPAIAGYEAALNKFFENVLQAFLKYVDFNVVRCAVIASPGFTKDQFHRHLLLEAERRQLRSIIENKSRIILVHTSSGYKHSLKEVLDAPNVMNMIKDTKAAQEVQALKDFFNMLSNDPARACYGPKHVEVAHERMAVQTLLITDDLFRSADIPTRQKYVNFVNSVKDSGGTAHIFSSMHVSGEQLAQLTGIAAILRFPLPDLEDIEM

SEQ ID NO: 19841 - protein, 759 aa, Vitis vinifera
MSLLGGAASVCHDRYDNILQARNKPVPRNQSHRSHASDELSGAENSPIEQVALTVPITDDRTLPVVTFRMWTLGTLACALLSFLNQFFWYRREPLSITSISAQIAVVPLGHLMATVITNRVFFKGKRWEFTLNPGPFNIKEHVLITIFANSGAGNVYAIHIVSAVKIFYKQNLTFFVSLLVVITTQVLGFGWAGIFRRYLVEPAAMWWPQNLVQVSLFRALHEREKRIKGGLTRNQFFLIAFICSFAYYIFPGYLFPMLTSLSWICWIFPTSVLAQQLGSGLHGLGIGAIGFDWSSISSYLGSPLASPWFATANIALGFALIMYVITPVAYWFNIYKAKAFPIFSDDLFIATGQRYNISAIIDSKFHVDIQAYERQGPLYLSTFFAMSYGVGFACLTATVVHVFLFHGKEIWQLSKSAFQENKMDVHTKLMRKYKQVPEWWFMCILFVNIGATIFTCEYYNNQLQLPWWGILLACGLAIFFTLPVGIITATTNQTPALNVITEYIIGYIYPGFPVANICFKVYGYISMKQGIAFLQDFKLGHYMKIPPRTMFMAQIVGTIIAALVHLGTAWWLMETVPDICDRALLPAGSPWTCPGDHVFYDASVIWGLIGPRRIFGDLGHYSAINWFFLGGAIAPLLVWLAYKAFPNQHWIRLITMPVLLGATVNMPPATAVNYTSWIIIGFFSGFIAYRYYRNWWSRHNYVLSGALDAGLAFMGVLLYLCIGMEHDSLSWWGSDPDGCPLASCPTAQGVFVKGCPVF

SEQ ID NO: 19842 - protein, 241 aa, Vitis vinifera
MAQERSTGVVRWFSDQKGFGFITPNEGGEDLFVHQSSIKSDGFRSLGEGETVEFQIVLGEDGRTKAVDVTGPDGSSVQGSKRDNYGGGGGGGGRGGRSGGGYGSGWRTGDRGGNGGGGAACYNCGGTGHLARDCVRRNNGGGGGGSGGGGGGGGCYTCGQPGHLARDCSRPSGGGGGGGGCYNCGDYGHLARDCTLESGSAGRFGGGGGGGGGRFGGGGGGCYNCGQEGHFARECPNPNPS

SEQ ID NO: 19843 - protein, 362 aa, Vitis vinifera
MATAVTAAVSLPSSKTTSLSARTSIISPERISLKKVPLFYRDISAGGRVVSIRAQVTTEAPAKVEKISKKNEEGVIVNKFKPKNPYIGRCLLNTKITGDDAPGETWHMVFSTEGEVPYREGQSIGVIADGVDKNGKPHKLRLYSIASSALGDFGDSKTVSLCVKRLVYTNENGELVKGVCSNFLCDLKPGAEVKITGPVGKEMLMPKDPNATIIMLATGTGIAPFRSFLWKMFFEKHEDYKFNGLAWLFLGVPTSSSLLYKEEFEKMKEKKPENFRLDFAVSREQSNAKGEKMYIQTRMAEYAEELWELLKKDNTYVYMCGLKGMEKGIDDIMVSLAARDGIDWIEYKRQLKRAEQWNVEVY

SEQ ID NO: 19844 - protein, 343 aa, Vitis vinifera
MATAVTAAVSLPSSKTTSLSARTSIISPERISLKKVPLFYRDISAGGRVVSIRAQVTTEAPAKVEKISKKNEEGVIVNKFKPKNPYIGRCLLNTKITGDDAPGETWHMVFSTEGEVPYREGQSIGVIADGVDKNGKPHKVSLCVKRLVYTNENGELVKGVCSNFLCDLKPGAEVKITGPVGKEMLMPKDPNATIIMLATGTGIAPFRSFLWKMFFEKHEDYKFNGLAWLFLGVPTSSSLLYKEEFEKMKEKKPENFRLDFAVSREQSNAKGEKMYIQTRMAEYAEELWELLKKDNTYVYMCGLKGMEKGIDDIMVSLAARDGIDWIEYKRQLKRAEQWNVEVY

SEQ ID NO: 19845 - protein, 128 aa, Vitis vinifera
MKARHHSVVLVILLGVLVANAPGQTLASNSVPAFVQNTIYANKIAIFSKSYCPYCLRAKRIFSELHEEPFVVELDHRDDGTQIQNVLLDLVGRSTVPQIFVNGKHIGGSDDLRNAVLSGQLQKQLGTS

SEQ ID NO: 19846 - protein, 154 aa, Vitis vinifera
MKGGKSKAAEVKRADSKLSVKKKGAAAVGKKTAKKEKAVKDPNKPKRPASAFFVFMEEFRKQYKEKHPANKSVSVVGKAGGDKWKSLSEAEKAPYVAKAEKRKTEYNKSMQAYNKRMAEGPTAAEEEESDKSRSEVNDDEEDEDESGEEEDDEE

SEQ ID NO: 19847 - protein, 1129 aa, Vitis vinifera
MSSGNRGTQSHHQAQSSGTSNLRVYHTDSMSKAIAQYTMDARLHAVYEQSGESGKSFDYSQSVRTTTQSVPEQQITAYLSKIQRGGHIQPFGCMLAVDEATFRVIAFSENAREMLGLTPQSVPSLEKPEILLVGTDVRTLFTPSSAVLLEKAFGAREITLLNPVWIHSKNSGKPFYAILHRIDVGIVIDLEPARTEDPALSIAGAVQSQKLAVRAISHLQSLPGGDINLLCETVVENVRELTGYDRVMVYKFHEDEHGEVVAESKRSDLEPYIGLHYPATDIPQASRFLFRQNRVRMIVDCHATPVLVIQDEGLMQPLCLVGSTLRAPHGCHAQYMANMGSTASLAMAVIINGNDEEAIGGRNLMRLWGLVVCHHTSARCIPFPLRYACEFLMQAFGLQLNMELQLASQLSEKHVLRTQTLLCDMLLRDSPTGIVTQSPSIMDLVKCDGAALYCQGKYYPTGVTPTEAQIKDIAEWLLANHADSTGLSTDSLADAGYPGAASLGDAVCGMAVAYITSRDFLFWFRSHTAKEIKWGGAKHHPEDKDDGQRMHPRSSFKAFLEVVKSRSLPWENAEMDAIHSLQLILRDSFKDATDGSNSKAVMHAQLGELELQGMDELSSVAREMVRLIETATAPIFAVDVDGCINGWNAKVAELTGLSVEEAMGKSLVHDLVYKESEETVDKLLHHALQGEEDKNVEIKLRTFDSQQHKKAVFVVVNACSSRDYTNNIVGVCFVGQDVTGQKVVMDKFIHIQGDYKAIVHSPNPLIPPIFASDENTVCSEWNTAMEKLTGWSRGDIIGKMLVGEIFGSSCRLKGPDALTKFMIVLHNAIGGQDTDKFPFSFFDQNGKYVQALLTANKRVNIEGQIIGAFCFLQIASPELQQALKVQRQQEKKCFARMKELAYICQEIKNPLSGIRFTNSLLEATDLTEDQKQFLETSAACEKQMSKIIRDVDLDSIEDGSLELERAEFLLGSVINAVVSQVMILLRERDLQLIRDIPEEVKTLAVYGDQVRIQQVLADFLLNMVRYAPSPDGWIEIQVHPRLKQISEEVKLMHIEFRMVCPGEGLPPNLIQDMFHSSRWMTQEGLGLSMCRKILKLINGEVQYIRESERCYFLISIELPVPRRGSKSVD

SEQ ID NO: 19848 - protein, 370 aa, Vitis vinifera
MLGALMNLLSLCLKPFGRDSGNVELGSEGREGLLWFRDIGHYASGDFSMAVVQANQVLEDQSQIESGPFGTFVGVYDGHGGPEAARYVCDHLFRNFQAISAESEGVVTTETIRRAFLQTEEGFTALVSQLWISQPNLASVGSCCLVGVIYEQTLFIANLGDSRVVLGKKVGNTGVVAAIQLSTEHNANVEAVRQELKDLHPNDPQIVVLKHGVWRVKGIIQVSRSIGDVYMKHAQFNREPLNAKFRLPEPMNMPILTANPSIISHTLHPNDSFLIFASDGLWEHLSNEKAVDIVHSHPRAGSAKRLVKAALQEAARKREMRYSDLRRIDKKVRRHFHDDITVIVLFLNHDLISRGMVQDPPLSVRSALEH

SEQ ID NO: 19849 - protein, 306 aa, Vitis vinifera
MDVNGRGGSSTVLSEEEMDLRRGPWTVEEDLTLVNYIATQGEGRWNSLARCAGLKRTGKSCRLRWLNYLRPDVRRGNITLEEQLLILELHSRWGNRWSKIAQHLPGRTDNEIKNYWRTRVQKHAKQLKCDVNSKQFKDTMRYLWMPRLVERIQAAAAATSGSSPAAVAAHQFSGSCDIVAGSAAVPQMAAGGADFYGGQVSTGYTPENSSTAASSDSFGAQVSPVSDLTEIYNFPVSDNQNPDFFQTGQVGYTDSLISPSGYFNQGLDFQSMEPNTQWYEGGDTATADNLWNVEDIWSVQTQFTNI

SEQ ID NO: 19850 - protein, 570 aa, Vitis vinifera
MQGGKVAVGGISIILVVGVAIGLIAGLHGRGGHKSTDGDDEKVLSTTTKAVAAICSPTDYKQQCISSFQTLANNHSATPKDFLMAAIDITMKEVKEAIGKSESIGLAGNSSGRQKMATEDCQDLLQLAIGELQASFSMVGDAAMHTINDRAQDLKNWLSAVISYQQSCMDGFDETPEVKSAIQNGLLNATQLTSNALAIVSEISAILTSFNIPLNFTSSFRRLQEATEESDQYPSWFSAADRKLLGRVDNGKVTPNAVVALDGSGQYKSIGAALAAYPKNLNGRYVIYVKAGIYDEYITIEKNLVNIFMYGDGPRKTMVTGKKSFLDGITTYKTSTFSVIGNGFICKSMGFRNTAGPEGHQAVALRVQSDYSAFFNCRMDGYQDTLYVQAHRQFYRNCVISGTVDFIFGDSTTLIQNSLIIVRKPLDNQQNTITAHGRAEKRETTGLVIQNCRIVPEEKLFPTRFKTPSYLGRPWKAYSRTVVMESTMGDFIHPAGWLPWMGNFALDTLYYAEYANKGPGANTAQRVKWKGYKVITNRNEALQFTAGPFIQGNEWLRLTGAPYFLGFRTM

SEQ ID NO: 19851 - protein, 186 aa, Vitis vinifera
MSLPNPTPSASRSYEQEGSSSSSPWRRHTADSFPPLNIHSDNKHKVEDSDEDLFRVPDVEAQPPSDSTRTTTTTTTTNTSNNPEVQQQTSSGKRRRGRNPVDREYRRLKRLLRNRVSAQQARERKKVYVNDLESRAQELQDRNSKLEEKISTLVNENTMLRKVLMNTRPKMDDSSTESKHDQLGKS

SEQ ID NO: 19852 - protein, 636 aa, Vitis vinifera
MSSSLSICFSPVSLARPTTRKANPKKLPRNPNPNPNPNPKIRKRTGTRTTSPNEVLPYGDQATTYTSLPPREDFFTTSLNSSFQSSTEIKLSDLSPPTIESEIDKSSHEEDVFDEQLGFDYGKFELYEVNSDPEEEDEDEDEDGEGQVFVGHGEMVSVFNGEEEEKEKGLPAVMRCFDRAKIYVKAGDGGNGVVAFRREKYVPFGGPSGGDGGRGGNVYVEVDGSMNSLLPFRNGVHFRAGRGSHGQGRNQNGAKGEDVVVKVAPGTVIREAGSDGVEGEVLLELLHPGQRAMLLPGGRGGRGNASFKSGTNKVPKIAENGEEGPEMWLELELKLVADVGIVGAPNAGKSTLLSVISAAQPTIANYPFTTLLPNLGVVSFGYDATMVVADLPGLLEGAHKGFGLGHEFLRHTERCSSLVHVVDGSSQQPEYEFDAVRLELELFSPELAEKPYVVAYNKMDLPEAYERWPSFKERLQARGIGTFCMSAVKGEGTHEVVCAAYELLRNRTESNKEIEGWTDPVNLNHVADMLHKQRSASINEFEIFHEKGSNTWHVVGSGLQRFVQMTNWRYIESDRRFQHVLEACGVNKSLIKLGVKEGDTVIVGEMEMVWHDSADSSGPSNVRKESTDSVKWPQWK

SEQ ID NO: 19853 - protein, 102 aa, Vitis vinifera
MDRVGKLASQKAVVIFSKSSCCMSHAIKRLFYEQGVSPAIHELDEDSRGKEMEWALMRLGCNPSVPAVFIGGKFVGSANTVMTLHLNGSLKKMLKEAGAIWL

SEQ ID NO: 19854 - protein, 432 aa, Vitis vinifera
MAQILAPSTQWQMRMTKNPANASPFTTKMWGSLFLKQKTKGTAKFSTKFRVCASKSESSTVNRLDDLLNMDIRPYTDKIIAEYVWIGGTGIDLRSKSRTISKPVEHPSELPKWNYDGSSTGQAPGEDSEVILYPQAIFKDPFRGGNNILVICDSYTPAGEPIPTNKRHRAAEIFGNKKVIDEVPWFGIEQEYTLLQPNVKWPLGWPVGAYPGPQGPYYCAAGADKSFGRDISDAHYKACLYAGINISGTNGEVMPGQWEYQVGPSVGIEAGDHIWCSRYILERITEQAGVVLTLDPKPIEGDWNGAGCHTNYSTKSMREDGGYELIKKAILNLSLRHKEHISAYGEGNERRLTGKHETANINTFSWGVANRGCSVRVGRDTEKQGKGYLEDRRPASNMDPYIVTSLLAETTILWEPTLEAEALAAQKLALKV

SEQ ID NO: 19855 - protein, 1151 aa, Vitis vinifera
MFRIVLDSDNISGLPIEEIIQPKMNADNDNKEQLFDLGLALGYSSQCIGKALNNDSGAGANAGSRVDMTLVATDPLSELVWSPHKGLSLKCAENSTDEKRPSLLWGVGPSNMIHSPPQGISARKTISDEPMGEGNLVTSQATLHVKNEMGETDILTCSPRSNAGIMTVHGSSHEPNAGTRDNNDKMMVAVKVSALDVNQERDQGDNEEKGIYVPVHIPMDVTSEARGKKVSGFSGMELGCMADSLSFKMNETEPDMAQIEPLPMQLKKMISSNPNGGIGDDGSGNQTLGMEVVLTTEVPLVKRCKTPDTPVLNSTSPFRRDEGLALAIEEESNNEMKTPGSTSTPLEKLESAAENDLRTQTGENACGAVSKIMASSSDHDVKIISQQDEGLRPKAKALPVNNSPNKSGMYRHRTKGKGKALSDGDRSGRKSNKEDDSDESVESCNSAALFSTGKKRWGYEQQLITGSKRIRKQINGSPGSTSFVRQDSSFMSWISNMMKGLSKSNQDETPSLALTLARPNHDNYDQKLVTCNKNQDPGCRNIGFQSIFQSLYCPTTKVQESRTLNADNQTGEGSKEFCLANKLCDVNITPIACHGENKSFKNALLSNEKFNQSTFGNRAGPSTQPKVLSAKFAVSQENYKTSSVENRSASNPVCSTKKDGVSSSSSSLGKRKANSAENNDSDPPSEGKTIHNFGYKSDLLGSLWVTRFSPKTSSPTCKVDHCNQNTGGATELSTDCMGLIPYSQNRFDSCKGLKILGTREYCTEEPLTIVGAELQNCSGGTEVSFGFKKNNAHNNQNSIYKLNPISPSQRFKSSEAMASLFARRLDALKNIITLNQTDTEARATPTCFFCGIRGHSIHDCSEIKETELEDLLRNNNLYPGAEEPPCFCIRCFQLNHWAVACPSVLKRQNQSECGASLVNRCSSGMMLHDTGDKRNGKLLGSKENPPQVAAAFGVCSGRKPTMQIGCSLNKKGNGNMTAVKLFSNSNLVQKYTASSSGEIESKESQIIPLCNFVNPQISDVPKGIFDAIKRLRLSRGDILKWMNSVFPFSHLNGFFLRLRLGKWEEGLGGTGYYVACISGAQKERPSQSSKNPIAVNIGGVKCLVQSQYISNHDFLEDELMAWWGATTRAGGKIPSEEDLKVKLEERKKFGF

SEQ ID NO: 19856 - protein, 230 aa, Vitis vinifera
MVDADVVGGTRGFLGRSGLFKPVRHSRNSEVGSAGFRSFYTYIASPVLHLRERGRRQRRDSKAFHQLSCVRTSMAFVSFVGRVLFASVFILSAWQEFNEFGVDGGPAVESLAPKLDVFSKHVSANVGVQVPEVEIKNLVAASIALKGLGGLLFIFGSSLGAHLLLLHQAIVIPILYDFYNYDVDKKEFVVLFLKFTQNLALFGALLFFIGMKNSMPRRQLKKKAPKTKTV

SEQ ID NO: 19857 - protein, 208 aa, Vitis vinifera
MTSFSLINSLNSDSDFNLLSDSFSWENSLPFNENDSQEMLLLGMLASSTQETSETVSLNRVKEEEVTSQENPEKEKSYRGVRRRPWGKFAAEIRDSTRHGIRVWLGTFDSAEAAALAYDQAAFAMRGPAAVLNFPVERVKESMQEIKCILEEGGSPVVALKKRHSMRRKSPCKKHKSEEVRLENVVVLEDLGTEYLEQLLTFSETSSP

SEQ ID NO: 19858 - protein, 261 aa, Vitis vinifera
MSWGMMAGHLGWGIIEEGWRKGPWTAEEDRLLTEYVKLHGEGRWNSVARLAGLRRNGKSCRLRWVNYLRPDLKRGQITPHEENIILELHARWGNRWSTIARSLPGRTDNEIKNYWRTHFKKKGKLPSDKSEKAKTRLLRKQQFYQQQQQQQQQQQQQQQQQLNQLDLKRIMALLDQPDIGDTPMAQARQDLGSCIYSTHHAAEEHGYVHLPIPNADVSTQESSSEDMLWDGLWNLDDFHGNLSAACAASKASLHHLVAPFY

SEQ ID NO: 19859 - protein, 502 aa, Vitis vinifera
MASLDCSAEQLAQLLGPNGTAAASFICDRFSAVSDSFTDTNYAVDNTYLLFSAYLVFAMQLGFAMLCAGSVRAKNTMNIMLTNVLDAATGGLFYYLFGFAFAFGSPSNGFIGKHFFALKSIPTSTFDYSNFLYQWAFAIAAAGITSGSIAERTQFVAYLIYSSFLTGFVYPVVSHWFWSSDGWASASNSGNLLFGSGVIDFAGSGVVHMVGGIAGLWGAFIEGPRIGRFGHSGRSLVLRGHSSTLVVLGTFLLWFGWYGFNPGSFLKISVAYSGGGNYYGQWSAVGRTAVTTTLAGCTAALTTLFGKRILSGHWNVTDVCNGLLGGFAAITSGCSVVEPWAAIICGFVAAVVLISCNKLAEKVKFDDPLEATQLHGGCGAWGIIFTALFATKDYVSQVYNSGQPGRPYGLFMGGGGRLLAAHIIQILVITGWVSATMGTLFFILHKLKLLRISAEDEMAGMDLTRHGGFAYMYHEDDDSNKHAFELRKIEPAAPTTIVTTTN

SEQ ID NO: 19860 - protein, 564 aa, Vitis vinifera
MEKQQSFRGLMEKQKSFRGFMEKQKSFRIAMERQLSFGGSSERKKVKESPGKRGDSHLHLAARAGNLTRVKEIIEKCESSELQALLSKQNQEGETPLYVASENGHALVVSELLEHVDLQTASIKANNGYDPFHVATKQGHLEVLKELLRFFPNLVMTTDSSNSTALHTAAAQGHIDVVHLLLETDPNLAKIARNNGKTVLHSAARMGHLEVLKALVSKDPSIVFRTDKKGQTALHMAVKGQNVEIVHALLKPDPSVMSLEDNKGNTALHIATRKGRSQFVQCLLSVEGIKMNATNKAGETPLDIAEKFGTQEIASILREAGATNSADHGKPPNAAKQLKQTVSDIKHDVQSQLQQTRQTGVRVQHIAKRLKKLHISGLNNAINSATVVAVLIATVAFAAIFTVPGQYVEVPTKGASLGQAHIARTAAFLIFFVFDSLALFISLAVVVVQTSVVVIEQKAKKQLVFVINKLMWMACLFISIAFISLTYVVVGSHARWLAVCATVIGSVIMLTTIGAMCYCVIVNRIAEAKKRNIRKAESRSRSFSVSMASESELLNSEYRRMYAL

SEQ ID NO: 19861 - protein, 321 aa, Vitis vinifera
MASSSFSIVVVALGVLALFAGSSSAQLSTNFYSKTCPKVFDTVKSGVQSAVSKERRMGASLLRLFFHDCFVNGCDASVLLDDTSSFTGEQTAVPNKNSIRGLNVIDNIKSQVESVCPGVVSCADIIAIAARDSVVILGGPDWDVKLGRRDSKTASLSGANNNIPPPTSSLSNLISKFQAQGLSTRDMVALSGAHTIGQARCTSFRARIYNETNIDSSFAKTRQASCPSASGSGDNNLAPLDLQTPTTFDNYYYKNLINQKGLLHSDQVLYNGGSTDSTVKTYVNNPKTFTSDFVAGMIKMGDITPLTGSEGEIRKSCGKVN

SEQ ID NO: 19862 - protein, 1225 aa, Vitis vinifera
MNPSLLTAPPPSQHSSPFLNPTPFRFSTTSLTRRRRYRISLIRSSSTPPDPLTSSPPSVTSDVFGGRRELSGIQPLVDSLSPPLRLVSSALIVAGAIAAGYGLGFRFGKSRNTALGGAVAIGAAGGAAAYALNACVPEVAAANLHNYVAGCDDPGAVKKEDIEEIANKYGVSKQDEAFNAELCDLYCRFVTSVVPPGSEDLKGDEVDTIIKFKSSLGIDDPDAAAMHMEIGRRIFRQRLETGDRDGDIEQRRAFQKLVYVSTLVFGEASKFLLPWKRVFRVTDSQVEVAVRDNAQRLYAFKLKSVGRDVDVNQLVSLREAQLSCLLSDELAEDMFKEHTRKLVEENISTALSILKSRTRAVRGATQVVEELNKALAFNNLLISLKNHPDAGRFACGVGPISLMGGEYDGDRKMDDLKLLYRAYVADSLSSGRMVENKLAALNQLKNIFGLGKRETEGIMLDVTSKAYRKRLAQSVSGGDLEAADSKAAFLQNICDELHFDPKKASEIHEEIYRQKLQQCVADGELNEEDVAILLRLRVMLCVPQQTVEAAHADICGSLFEKVVKDAIASGIDGYDDDVKKSVRKAAHGLRLTREAAMSIASTAVRKIFMNYVKRSRAAGNRIEAAKELKKMIAFNSLVVTELVADIKGESSDAASEEPIKEEEVQIEEDDDWDSLETLRKIKPREKLTAKLGRRGGQTEITLKDDLPERDRTDLYKTYLLFCLTGEVTKIPFGAQITTKKDDSEYLLLNQLGGILGLTDKEIVEVHRSLAEQAFRQQAEVILADGQLTKARIEQLNEVQKQVGLPPQYAQKVIKNITTTKMGAAIETAVSQGRLNIKQIRELKEASVDLDSMLSESLRENVFKKTVDEMFSSGTGEFDGEEVYEKIPLDLNINAEKAKGVVHELARTRLSNSLIQAVSLLRQRNSSGVVSSGLSSTFYSAKCPKALSTIRTAVNTAVANENRMGASLLRLHFHDCFVNGCDGSILLDDTANFTGEKTAGPNADSVRGFEVIDDIKSRVESVCPGVVTCADILAVAARDSVVALGGPTWTVQLGRRDSTTASISDAETDIPSPALDLDDLISAFSDKGFSAKEMVALSGSHTIGQSRCLVFRDRIYNDDNIDSSFAESLKSNCPDTDGDDNLSALDDTSPVIFDNGYFKNLVDNKGLLHSDQELFNNGSTDSQVSSYASSATSFYKDFTAAMVKMGNISPLTGTKGQIRVNCRKIN

SEQ ID NO: 19863 - protein, 603 aa, Vitis vinifera
MGSSSGSLETSANSHPLFSFSSFMSTSYSDLLTSADEDPVTTTTGDKGAVGRGLSDRIAERTGSGVPKFKSIPPPSLPISPPPISPSSYFSIPAGLSPAELLDSPVLLSTSNILPSPTTGTFPSQGFNWRSNSNSNQQDVKREDKNYLDFSFQPQARPSTTSASMFQPSTTTITTEQALRGQQPAWSFQEPTKQDSFSSEKTTVKSEFGSYQSFSPEIATIQTNTQSNGNGNNGFQSDYGSYHASSQSIREQRRSEDGYNWRKYGQKQVKGSENPRSYYKCTYPNCPTKKKVERSLEGQVTEIVYKGTHNHPKPQSTRRSSLSSSQTIQASNPPNNEVPDQPFVAHGTGQMDSVATPENSSISMGDDDFEQSSQKSKSGGDDFDEDEPEAKRWKKESENEGISAPGSRTVREPRVVVQTTSDIDILDDGYRWRKYGQKVVKGNPNPRSYYKCTNPGCPVRKHVERASHDLRAVITTYEGKHNHDVPAARGSGSHSVNRPLPLPDTTAAATTNNNMPMAIRPSIMTHLPNNSTTNPLRHVRHPTSEAQAAPFTLEMLQSPDGFGFSSFGNSMATYMNQPQHQDNVFSRTKEEPRDDMLFESLLC

SEQ ID NO: 19864 - protein, 607 aa, Vitis vinifera
MDNKIGSQLDSCKPANNDVGSAPQNGTVSTIQDSPSPAHPTGSRATLGSHIAHRLVQIGVNDVFSVPGDFNLTLLDCIIAEPGLNNIGCCNELNAGYAADGYARARGVGACVVTFTVGGLSILNAIAGAYSENLPVICIVGGPNTNDYGTNRILHHTIGLPDFSQEVRCFQPVTCYQAIINHLDEAHELIDKAISTALKESKPVYISVSCNLPTIFHPTFSREPIPFALSPKMSNCKGLDAAVEAAAAFLNKAVKPVIVGGPKLRVAKATKAFVELADACGYALAVMPSAKGLVPEHHPHFIGTYWGAVGTAFCGEIVESADAYVFVGPIFNDYSSVGYSLLLKREKAIIVQPERVVIANGPAFGCVLMKDFLPALAKRLNNNTTAYENYRRIHIPDGVPLKCEPTEPLRVNILFQHIQKLLSHDTAVIAETGDSWFNCQKLKLPEGCGYEFQMQYGSIGWSVGAMLGYAQSVPDKRVIACIGDGSFQVTAQDVSTMIRCEQKSIIFLINNGGYTIEVEIHDGPYNVIKNWNYTGLVDAIHNGEGNCWTKKVNNEQELIEAIEIATGEKKDCLCFIEVVVHKDDTSKELLEWGSRVSSANSRAPNPQ

SEQ ID NO: 19865 - protein, 583 aa, Vitis vinifera
MCGILAVLGCSDDSQAKRVRVLELSRRLKHRGPDWSGLYQHGDCYLAHQRLAIIDPASGDQPLYNENQAIVVTVNGEIYNHEELRKSMPNHKFRTGSDCDVIAHLYEEHGENFVDMLDGMFSFVLLDTRDDSFIVARDAIGITSLYIGWGLDGSVWISSELKGLNDDCEHFESFPPGHMYSSKEGGFKRWYNPPWFSEAIPSAPYDPLVLRRAFENAVIKRLMTDVPFGVLLSGGLDSSLVASITARHLAGTKAAKQWGAQLHSFCVGLEGSPDLKAAKEVADYLGTVHHEFHFTVQDGIDAIEDVIYHIETYDVTTIRASTPMFLMSRKIKSLGVKMVISGEGSDEIFGGYLYFHKAPNKEEFHRETCRKIKALYQYDCLRANKSTSAWGLEARVPFLDKEFIKVAMDIDPEWKMIKPEQGRIEKWVLRRAFDDEEQPYLPKHILYRQKEQFSDGVGYSWIDGLKAHASQHVTDKMMLNASHIFPHNTPTTKEAYYYRMIFERFFPQNSARLTVPGGASVACSTAKAVEWDSAWSNNLDPSGRAALGVHLSAYDQKLTTVSAANVPTKIIDNMPRIMEVTAP

SEQ ID NO: 19866 - protein, 582 aa, Vitis vinifera
MAEEDNYTKDGTTMAEEDNYTKDGTINYQGNPANKKKTGTWTACPYILGNEFCERLAYYGMSSNLVLYFKYKLHQDSATASKNVLNWSGTCYLTPFIGAFLADAYLGRYWTIASFSIIYVIGMTLLTVTASVPGLKPNCSPSGVCDPTETQTAVCFLALYLVALGTGGIKPCVSSYGADQFDDTDEHEKTHKSSFFNWFYLSINVGALIAGSILVWIQENIGWGVGFGIPAAAMAIAVVSFFSGTRLYRNQKPGGSPLTRMSQVVVASLKKYRVQVPADKSLLYEIADGESGIQGSRKLDHTKDLSFFDKAAVEIQSDHIKDSPDPWKICTVTQVEELKAIIRLLPVWATGIIFSAVYSQMGSLFVVQGESMDPHMGRHFEIPSASLSIFDTISVIFWVPIYDRIIVPVARKFTGHSNGITQLQRMGIGLFISIFAMLSAGILEVVRLGIVKRHNYYDHDRIPLSIFYQVPQYFIIGCAEVFTFIGQLEFFYEQAPDAMRSFCSALSLATVALGNYLSSLLVTIVTDVSTRGGKLGWIPDNLNRGHLHYFFFLLAILSVLNLVAFLFVAKWYTYKRAVGTLR

SEQ ID NO: 19867 - protein, 636 aa, Vitis vinifera
MVLQKRLDYGFNGYQVPATPRATRSARRRGLFRKKVEDNQMFAFDLLATVAGKLLLEGEKSPDSVNTSNGKEQCVIAEDQVKNEGHAEDKPLKIEPCDQGNSGGSFIVSELSSQMPSQKYCLREFPRPQNDACSALASVITSDCSEKNETKRQIKVEPIKTGRAILNTGAGMFGSEDPVVWDGKPSVLVSSNSSAEVPPCRDNIPCGSFPLCRGDVKVVSRDDDDNSSGCTQPSTSTKSFRPLPRIGDRRIRKLLASKYWKVTPKLKEDGLSNVDGEVKPIYRNKRNCYKRQRSQRNYPFKKRKLLYCSSVSNSEGGNGSQRISDSPQMGINSDASGSGLKLHGVKLRIKSFRVPELFIEIPETATVGSLKRTVMEAVTAILGGGLRVGVLLRGKKVRDDSKTLQQTGISQDDQMDALGFTLEPNPSQAPQALCPGDNPFLLPYDTPQPLKRYPPTPTVAHQGTSDASPDPPVTNLCDFVESDHDSAPSPDTDMSIDKSVTDSKALVSVPAMSMEALAVVPVHRKSKRSEIVQRRIRRPFSVSEVEALVQAVEKLGTGRWRDVKLRAFDNAKHRTYVDLKDKWKTLVHTARISPQQRRGEPVPQELLDRVLTAHAYWSQQQAKQQLKHQSETCLLL

SEQ ID NO: 19868 - protein, 455 aa, Vitis vinifera
MARTLISSPPFIGKPLPSLSSRHGLLHSLPHRRLISTRVKFSLHDLPPIHSLDSSSIDFAGIVSRAESLLYTLADAAVSADPAAAGPASGTADAAVQKNGGWFGFISEGMEVVLKVLEDGLTAVHVPYAYGFAIILLTVIVKIATYPLTKKQVESTLAMQNLQPKIKAIQERYKGNQERIQLETSRLYKQAGVNPLAGCFPTLATIPVWIGLYQALSNVANEGLLTEGFFWIPSLGGPTTIAARQSGSGISWLIPFVDGHPPLGWQDTAAYLVLPVLLVISQYVSMELMKPPQTDDPSQKNTLLVFKFLPLMIGYFSLSVPSGLSIYWFTNNVLSTAQQVWLRKLGGAKPVVNEDASGIITAGRAKRSASQPARAGDRFRQLKEEEKKKKISKALPAEEIQALASESDSDEGSDEETKDKGDDVLEEAYVSSGSKQVPQYAGPRRSKRSKRKRAG

SEQ ID NO: 19869 - protein, 252 aa, Vitis vinifera
MARHKRSGGRKKCRLPRTPLPLKILRPEEEDDPQPQSRNKMAMQIESSTFKLPRDWVVRKVRRASGKSCGLIDKYYYEPETGRQFRSLKSIQKYLTEKMENTPKILGPDKEEEEEQPHQKMAMQIMDPNLELPDNWVFQKRSSSSGQIHKYYYEPGTGRQFRSLKSVQRHLIEANDCTHKPSQNSDASKKNNSSTKVKTSTSHFIKPPKKVNWVLTGPGGDVWSPYINASAVPESIKQTWAKIFMLHVNEKF

SEQ ID NO: 19870 - protein, 433 aa, Vitis vinifera
MNDMEHRKTNDGEGRRLDGEEEEEEEDEDEGNGRGLDAWERAYADERSWESLQEDESGLLRPIDNKTIYHAQYRRRIRSLYSSTTTARIQKGLIRYLYIVVDLSRAASEMDFKPSRMAVVAKHIEAFIREFFDQNPLSQIGLVTIKDGLAQCLTDLGGSPDSHVKALMGKLECSGDSSLQNALDLVHGYLNQIPSYGHREVLILYSALSTCDPGDIMETIQECKKSKIRCSVIGLSAEIFICRHLCQETGGSYSVALDESHFKELLLEHAPPPPAIAEFAIANLIKMGFPQRAAEGVISICSCHKEAKVGGGYTCPRCKARVCELPTECRICGLTLVSSPHLARSYHHLFPIPPFDEVSLSLLNNPHQRSSRACFGCQESLLIPGNKPTLCVACPKCKQHFCLDCDIYIHESLHNCPGCESFRHSKIVSVTEE

SEQ ID NO: 19871 - protein, 252 aa, Vitis vinifera
MSWNPQMDAHYMNTSYPYSTVGSFMDYFEGLAYEHVNFIFATASHGQESPYASSMNTSLYKFGLSETGSTSYYDYDQAYVVNDHVPGISEYRRTPENSSAITTDQIPTVNTQCEGNTNTTTTHATPVECPRSHPNSQDYQVIWQDNIDPDNMTYEELLELGEAVGTQSRGLSQELISLLPISKYKCGFFTRKKSRCERCVICQMEYKRRDRLITLPCKHVYHAACGTRWLSINKACPICYTEVIGEVPKIDK

SEQ ID NO: 19872 - protein, 393 aa, Vitis vinifera
MAERHQHPNIMRKVAGQLHLSSSISQDVHTHYGSFQSPALYQRRSAFGNYSNVVLQYPMTQSCQATQDLSLIASTASPVFVQAPQEKGFASFAVDFLMGGVSAAVSKTAAAPIERVKLLIQNQDEMIKAGRLSEPYKGIGDCFSRTIKDEGFASLWRGNTANVIRYFPTQALNFAFKDYFKRLFNFKKDRDGYWKWFAGNLASGGAAGASSLLFVYSLDYARTRLANDAKAAKKGGGDRQFNGLVDVYRKTLKSDGIAGLYRGFNISCVGIIVYRGLYFGMYDSLKPVILTGKLQDSFFASFALGWVITNGAGLASYPIDTVRRRMMMTSGEAVKYKSSLDAFNQILKNEGAKSLFKGAGANILRAVAGAGVLAGYDKLQVLVLGKKYGSGGA

SEQ ID NO: 19873 - protein, 2159 aa, Vitis vinifera
MEGHERELLLACVVSGTLFSVLSVASLCILWAVNWRPWRIYSWIFARKWPDILQGPQLGLLCGMLSLSAWIFVISPIVMLIIWGCWLIMILGRDIIGLAVIMAGIALLLAFYSIMLWWRTQWQSSRAVAALLLVAVALLCAYELCAVYVTAGASAAERYSPSGFFFGVSAIALAINMLFICRMVFNGNGLDVDEYVRRAYKFAYSDCIEMGPLACLPEPPDPNELYPRQSSRASHLGLLYLGSLLVLLVYSILYGQTAMEAQWLGAITSAAVIILDWNMGACLYGFQLLKSRVVALFVAGLSRVFLICFGVHYWYLGHCISYAVVASVLLGAVVSRHLSATNPLAARRDALQSTVIRLREGFRRKEQNSSASSSEGCGSSVKRSSSAEAGHLGNVIETSSRSAAQCIGDASNWNNVMYGTASSHEGINSDKSIDSGRPSLALRSSSCRSVAQEPEAGGSTDKNFDHNSCLVVCSSSGLESQGYESSASTSANQQLLDLNLALVFQEKLNDPMVTSMLKKRARQGDRELTSLLQDKGLDPNFAMMLKEKSLDPTILALLQRSSLDADRDHRDNTDITIIDSNSVDNGLLNQISLSEELRLKGLEKWLQWSRFVLHHIAGTPERAWVLFSFIFILETVIMAIFRPKTVKLVNSKHEQFEFGFAVLLLSPVICSIMAFLRSLQAEEMAMTTKPRKYGFIAWLLSTCVGLLLSFLSKSSVLLGLSLTFPLMVACLSVSIPIWIHNGYQFWVPRVESAGHPGHHRTPGKKEGVVLVICILVFAGSIFALGAIVSVKPLEDLRYKGWTGDQRTFTSPYASSVYLGWAIGSVIALVVTGVLPIISWFATYRFSLSSAVCAGIFSVVLVAFCGASYLEVVKSRDDQVPTKGDFLAALLPLVCFPALLSLCTGLYKWKDDDWKLSRGVYVFVIIGLLLLLGAISAVVVIVEPWTIGVACLLVLLLIALAIGVIHYWASNNFYLTRTQMFFVCFIAFLLALAAFLVGWYEDKPFVGASVGYFSFLFLLAGRALTVLLSPPIVVYSPRVLPVYVYDAHADCGKNVSVAFLVLYGIALATEGWGVVASLKIYPPFAGAAVSAITLVVSFGFAVSRPCLTLKMMEDAVHFLSKETVVQAIARSATKTRNALSGTYSAPQRSASSAALLVGDPTVMRDRAGNFVLPRADVMKLRDRLRNEEVAAGSFFCRVRNGRTFWHESTSDIGYRREMCAHARILALEEAIDTEWVYMWDKFGGYLLLLLGLTAKAERVQDEVRLRLFLDSIGFSDLSAKKIKKWMPEDRRQFEIIQESYIREKEMEEEILMQRREEEGRGKERRKALLEKEERKWKEIEASLISSIPNAGSREAAAVAAAVRAVGGDSVLDDSFARERVSSIARRIRMAQLARRALQTGVTGAVCVLDDEPTTSGRNCGQIDPTICQSQKVSFSIAVTIQPESGPVCLLGTEFQKKVCWEILVAGSEQGIEAGQVGLRLITKGDRQTTVAKEWSISATSIADGRWHIVTMTIDADLGEATCYLDGGFDGYQTGLPLRVGNGIWEQGTEVWIGVRPPIDIDAFGRSDSEGAESKMHIMDVFMWGRCLTEDEIAAFYGAMGSAEYSMIDFPEDNWQWADSPSRVDEWDSDPAEVDLYDRDDVDWDGQYSSGRKRRSEREGMVVDVDSFARRLRKPRMETREEINQQMLSVELAVKEALSARGETHFTDQEFPPNDQSLFVDPENPPLRLKVVSEWMRPTDMVKESYLDAGPCLFSGAANPSDVCQGRLGDCWFLSAVAVLTEVSRISEVIITPEYNEEGIYTVRFCIQGEWVPVVVDDWIPCESPGKPAFATSRKGNELWVSLLEKAYAKLHGSYEALEGGLVQDALVDLTGGAGEEIDMRSAQAQIDLASGRLWSQLLRFKQEGFLLGAGSPSGSDVHVSSSGIVQGHAYSLLQVREVDGHKLVQVRNPWANEVEWNGPWADSSPEWTERMKHKLKHVPQSKDGIFWMSWQDFQIHFRSIYVCRIYPPEMRYSLRGQWRGYSAGGCQDYDTWHQNPQFHLRATGPDASFPIHVFITLTQGVSFSRTTAGFRNYQSSHDSMMFYIGMRILKTRGRRAAYNIYLHESVGGTDYVNSREISCEMVLEPDPKGYTIVPTTIHPGEEAPFVLSVFTKASVTLEAL

SEQ ID NO: 19874 - protein, 411 aa, Vitis vinifera
MAVWSSMDDIEIPQYFLCPISLQIMKDPVTAMTGITYDRESIEQWLLTAKDTTCPVTKQPLERDFVLTPNHTLRRLIQAWCADNATNGVDRIPTPKTPLDRTHVVKLIRDLGVAQLYLKTLQKMEALTRDNERNRNCMADAGAAKAIVLLIIKCFKENKTTGVEEGLRILHLIWSPTSEMKLLLKENYDFVDAVTWALGCETDNYVAVRSNAVLVLKNIVEVASPNLLERLKFEFLNRLIRTMREKISQAAMKAALYVLMEVCPWGRNKWQMIEAGAVFQLIEMELENPEKKITEIIFCLLGHLCSCADGRAQFLAHAGSMAMLSKRILRVSNTTDDRALHIIALISKFSGTNEVLMEMLRVGAVSKLCMVLQADCAKYLKEKAREILRLHSKVWNNSPCIAVYLLTRYAR

SEQ ID NO: 19875 - protein, 399 aa, Vitis vinifera
MDEIDVPSHFMCPISLQLMRDPVTVATGITYDRENIERWLFSCKNNTCPFTKQVLVDTDLTPNHTLRRLIQAWCIVNACHGVERIPTPKPPIDKAQIIKLLNDAIKFPQMQLKCLQRLRSIAFESDRNKKCLEAAGAVEFLASIIKKDESAVIEVALSILYQLETSEAALKSLVSSNYGFIESLVHVLKCGNYQSRAYAAMLLKSIFQVADPIQLINASPELFTEIVHVLRDGISQQASKAALKLLVELCPWGRNRIKAVVAGVSHVLIEHLLDTSEKRTCELILVVLDQLCSCAEGRAELLKHGAGLAIVSKKILRVSQVGTDRAVKILASVSKFSATSRVLQEMLQVGVVSKLCLVLQVDSSKKTKEKTREILNLHSRVWKNPSCIPARLFSSYPSS

SEQ ID NO: 19876 - protein, 433 aa, Vitis vinifera
MYSNFKEQAIEYVKQAVQEDNAGNYSKAFPLYMNALEYFKTHLKYEKNPKIKEAITQKFTEYLRRAEEIRAVLDDGGAGPASNGDAAVATRPKTKPKDGEGGDGEDPEQAKLRSGLNSAIIREKPNVKWSDVAGLESAKQSLQEAVILPVKFPQFFTGKRRPWRAFLLYGPPGTGKSYLAKAVATEADSTFFSVSSSDLVSKWMGESEKLVSNLFQMARESAPSIIFIDEIDSLCGQRGESNESEASRRIKTELLVQMQGVGHNDQKVLVLAATNTPYALDQAIRRRFDKRIYIPLPDLKARQHMFKVHLGDTPHNLTESDFESLAQKTEGFSGSDIAVCVKDVLFEPVRKTQDAMFFINTPNDMWVPCGPKQPGAVQISMQDLAGKGLASKILPPPITKNDFDKVLARQRPTVSKSDLEVHERFTQEFGEEG

SEQ ID NO: 19877 - protein, 102 aa, Vitis vinifera
MDKVTRLASEKGVVIFSKSSCCLCYAVNILFQELGVTPTVHEIDQDPDGREMEKALLRLGCNAPVPAVFIGGKLVGSTNEVMSRHLSGSLIPLLKPYQQTLS

SEQ ID NO: 19878 - protein, 433 aa, Vitis vinifera
MAHITAPSVQCQVRVVPTSSFTARPMTAKLWNSLLLNQRKKGTSRSSARFRVLALQSESSTVNRLKDLLNLDITPYTDKIIAEYIWIGGSGIDLRSKSRTISKPVKHPSELPKWNYDGSSTGQAPGEDSEVILYPQAIFKDPFRGGNNILVICDSYTPAGEPIPTNKRHGAAEIFSSQKVINEVPWYGIEQEYTLLQTNVKWPLGWPVGGYPGPQGPYYCGAGADKSFGRDISDAHYKACLYAGINISGTNGEVMPGQWEYQVGPSVGIEAGDHIWCSRYILERITEQAGVVLSLDPKPIEGDWNGAGCHTNYSTKSMREDGGFEVIKKAILNLSLRHEVHISAYGEGNERRLTGKHETASIDTFSWGVANRGCSIRVGRDTEKNGKGYLEDRRPASNMDPYVVTSLLAETTILWEPTLEAEALAAQKLSLKV

SEQ ID NO: 19879 - protein, 758 aa, Vitis vinifera
MKFQIEDVTVYFPYDNIYPEQYSYMVELKRALDAKGHALLEMPTGTGKTIALLSLITSYALSKPSNPIKLLYCTRTVHEMEKTLAELRLLHQYQLRHLGPAARILALGLSSRKNLCINPAVVSAENRDSVDAGCRKLTASWVRALAVENPNIPTCQFFENYEKAASEAVLPPGVYTLQDLRAFGRDKGWCPYFLARHMVQFANVVVYSYQYLLDPKVAGIISKEMQRESVVVFDEAHNIDNVCIEALSVSVRRQTLEGATRNLSKMAQEINRFKATDAGRLRAEYNRLVEGLAQRGNLPISDTWLANPALPDDILKEAVPGNIRRAEHFLSVLRRLVQYLHGRLETENVEKEGPVAFVASINSQAGIDQKMLKFCYDRLHSLMLTLEITDTDEFLHIQTICDFATLVGTYTRGFSIIIEPFDERMPHIPDPVLQLSCHDASLAIKPVFERFQSVVITSGTLSPIDLYPRLLNFNPVVSRSFTMSLTRNCICPMVLTRGSDQLPVSTKFDMRSDPGVVRNYGRLLLEMVSVVPDGIVCFFVSYSYMDGIVNTWNESGILKEIMQHKLVFIETQDVVETTLALDNYRRACDCGRGAVFFSVARGKVAEGIDFDRHYGRLVIMFGVPFQYTLSRILLARLEYLRETFQIKEGDFLTFDALRQAAQCVGRVIRSKADYGMMIFADKRYSRHDKRSKLPGWILSHLRDAHLNLSTDMALHIAREFLRKMAQPYDKAGVSGRKTLLSEEDLEKMGDGTTNEMLF

SEQ ID NO: 19880 - protein, 196 aa, Vitis vinifera
MAGLHVSLSFLVLAGLMNLGMLSASENGNNYLREACSVTRYRDLCIHSLASFSHTAKRSPSRWARAGVSVTIGEAKHVAQYLVKLRKRGTMRGRNGAALSDCIECFQDAIDNLLNSLGMLRKLSSKAFDRQMSDVSTWMSAVLTDEDTCLDGFDGSKGKRAKLIRNQVQNVTYITSNALALVNKLATAGAGSLNIP

SEQ ID NO: 19881 - protein, 285 aa, Vitis vinifera
MVVSERGCDSEEEMNMDLRKGPWTAEEDTLLNNYITIHGEGRWNSLARCAGLKRTGKSCRLRWLNYLRPNVKRGNITLQEQLLILELHSRYGNRWSKIAQHLPGRTDNEIKNYWRTRVQKQAKQLKCDVNSKQFRDTMRYVWMPRLVERIKAAGGDSTPTAPATYGHHMSSQILDMPRNGEFGLGYSDPGLRPEFSGGPSEGSETQVSPVSDMTDYYDFSGGHCSDSQQNGVISYPEQADTSSGCLEFEGLEQSNGWSLGGGDSLENLLNDEDIWFLKQQFFDDF

SEQ ID NO: 19882 - protein, 223 aa, Vitis vinifera
MDSSSFYHQYQSSEFSPESSSFGSSEYFSSWDEPLFHHNSLPFNINDSDEMILFDMLAEGARDSSETASSVGGAAKEEEVTSNAKEPTPNKKEKEKTYRGVRKRPWGKFAAEIRDSTRHGVRVWLGTFDSAEAAALAYDQAAFSMRGTMAVLNFPVERVVESLRDIKYACEDGGSPVVALKRRHSMRRKSTGRKNKSKEVKAQNVVVLEDLGADYLEQLLCSS

SEQ ID NO: 19883 - protein, 226 aa, Vitis vinifera
MDSSSFYHQYQSSEFSPESSSFGSSEYFSSWDEPLFHHNSLPFNINDSDEMILFDMLAEGARDSSETASSVGGAAKEEEVTSNAKEPTPNKKEKEKTYRGVRKRPWGKFAAEIRDSTRHGVRVWLGTFDSAEAAALAYDQAAFSMRGTMAVLNFPVERVVESLRDIKYACEDGGSPVVALKRRHSMRRKSTGRKNKSKEVKAQNVVVLENLGADYLEQLLCSSENH

SEQ ID NO: 19884 - protein, 222 aa, Vitis vinifera
MDSSFFHQYQTSGFSPEASPFDSLECFSTWDEPLFDHNSLPFNTIDSEEMILFDMLAEGARDSSETASSAGVVKEDEVSSNAKEATPKNEKLYRGVRRRPWGKFAAEIRDSTRHGRRVWLGTFDTAEAAALAYDQAAFSMRGPRAVLNFSEERVKESLRDIKCGWKDGGSPLVAMKRKHLMRRKLACREKKKEKEAREQHVVVLEDLGADYLDQLLCSSQSC

SEQ ID NO: 19885 - protein, 224 aa, Vitis vinifera
MDSFFFHEYRTSEFSPESSLFDPLEYFSPWDEPLFNHDSLPFGINASDHEMITPFCMPAEGATGSSERASSAVVKEDHGVSSNAQEATSKSEKSYRGVRRRPWGKFAAEIRDSNRQGRRVWLGTFDTAEAAALAYDQAAFSMRGSMAVLNFPVEYVEKSLRYMKHGHKDGGSPVMAPNNGLSVGQKSANGRKEDKDERPAQNVLVLEDLGADYLEQLLCSSESC

SEQ ID NO: 19886 - protein, 218 aa, Vitis vinifera
MDSSFFHHHQISGFSLEPSPFDSLECFSPWDEPLFSDNSLPFNINGSKEMLPEGATDSSQPVSSAGAKEDEESSNAKEAAISKDEKSYRGVRRRPWGKFAAEIRDSNRHGRRVWLGTFDTSEDAALAYDRAAYLMRGSMAILNFPVERVKESLRDMKHDHEDGGSPVPVPAPECGRSKGRKSANGKNEDKDVSPRDVLVLEDLGADYLEQLLCSSGSY

SEQ ID NO: 19887 - protein, 178 aa, Vitis vinifera
MAASISHFAPFSSSRGFSPSSSSSPLLLSYLLTRSVQFHSNHIPRSFGIGHAGNRRYGPVLVRAMASSFGSRLEETVKKTVDENPVVVYSKTWCSYSSEVKSLFKRLGVEPFVIELDEMGPQGPQLQKVLERLTGQHTVPNVFIGGKHIGGCTDTVKLYRKGELEPLLSEASTRKTES

SEQ ID NO: 19888 - protein, 340 aa, Vitis vinifera
MGSLPSFSDAHSHFKEINTTELMNLFKTQQKYLNFFFHNLDLNQTLIFTQTLLKIEGTIFFTGVGKSGFVAQKISQTLVSLGIRASFLSPVDALHGDIGILSGGTSNAVVFFSKSGNSEELLKLAPCAKAKGAYLISVTSTEDNLLRAVCDLNVHLPLERELCPFDLAPVTSTTIQMVFGDTVAVALMGARNLTRDEYAANHPAGRIGKSLIFKVKDVMKKQDELPVCKEGDLIMDQLVELTSKGCGCLLVIDDEYRLIGTFTDGDLRRTLKASGEGIFKLTVGQMCNRNPRTISSNVMAVDAMRRMEAPPSPVQFLPVLDDQNVLIGIVTLHGLVSAGL

SEQ ID NO: 19889 - protein, 485 aa, Vitis vinifera
MATTVPIAYQGNTSASVPDWLNKGDNAWQMISATLVGLQGIPGLMILYGGLVKKKWAVNSAFMTFYGFAAVILCWVSWAYRMSFGDQLLPFWGKAGAALGQKFLLKQAALPATTHHYKNGTVETAMITPFYPMASMVWFQGVFAAVAVILLAGAVLGRMNIRAWMVFVPLWLTFSYTVGAFSLWGGGFLFHWGVMDYSGGYVIHVSSGIAGFTAAYWVGPRSKRDRERFPPNNVLLMLAGAGLLWLGWAGFNGGDPYAANTDSSMAVLNTNICAATSLLVWTWLDVIFFKKPSVIGAVQGMITGLVCITPAAGLVQGWAAILMGILSGSVPWFTMMILHKRSTLLQHVDDTLGVLHTHAIAGYLGGILTGFFAEPELCSLFLPVTNSRGAVYGGSGGIQILKQIAGGAFIIAWNVVMTSIICIVVKLVVPLRMPEEELLIGDDAVHGEEAYALWGDGEKYDSSKHGFYSDDTQHQRPYSGATDAV

SEQ ID NO: 19890 - protein, 483 aa, Vitis vinifera
MASTVSVAYNLSASVPDWLNKGDNAWQMIAATLVGLQSVPGLVILYGSVVKKKWAVNSAFMALYAFAAVVLCWVIWAYKMSFGDKLLPFWGKGGPALGQKYLLKQSALPATTHYHKDGTVETAMVTPFYPMATMVWFQCVFAAITVILLAGSLLGRMNIRAWMMFVPLWLTFCYTVGAFSLWGGGFLFHWGVMDYSGGYVIHLSSGIAGFTTAYWVGPRSTKDRERFPPNNVLLMLAGAGLLWLGWAGFNGGDPYAANTDSSMAVLNTNICAATSLLVWTWLDVIFFKKPSVIGAVQGMITGLVCITPAAGLVQGWAAIVMGILSGSVPWFTMMILHKRWTLLHHIDDTLGVFHTHAVAGYLGGILTGIFAEPELCSLFLPVTNSRGAVYGGSGGIQVLKQLAGGAFIIGWNAVVTSIICLVVRVVLPLRMPEEELLIGDDAVHGEEAYALWGDGEKYDSAKHGLYSDDTQHQMPSSGTTQVV

SEQ ID NO: 19891 - protein, 485 aa, Vitis vinifera
MASTVPVAYQGNLSASVPVWLNKGDNAWQMIAATLVGLQSVPGLVILYGSVVKKKWAVNSAFMALYAFAAVVLCWVIWAYKMSFGDKLLPFWGKAGPALGQKYLLKQSALPATTHYHKDGTVETAMATPFYPMATMVWFQCVFAAITVILLAGSLLGRMNIRAWMMFVPLWLTFCYTVGVFSLWGGGFLFHWGVMDYSGGYVIHLSSGIGGFTTAYWVGPRSTRDRERFPPNNVLLMLAGAGLLWLGWAGFNGGDPYAANTDSSMAVLNTNICAATSLLVWTWLDVIFFKKPSVIGAVQGMITGLVCITPAAGLVQGWAAIVMGILSGSVPWFTMMILHKRWTLLHHIDDTLGVFHTHAVAGYLGGILTGVFAEPELCSLFLPVTNSRGAVYGGSGGIQVLKQLAGGAFIIGWNAVVTSIICLVVRVVLPLRMPEEELLIGDDAVHGEEAYALWGDGEKYDSAKHGLYSDDTQHQMPSSGTTQVV

SEQ ID NO: 19892 - protein, 422 aa, Vitis vinifera
MGFEKEASSSSYGLDSVPREDTPLLSKSRPLSSQTKTFANVFIAIVGAGVLGLPYTFKRTGWVLGSLMLFAVAILTYHCMMLLVHTRRKLDSLHGFSKIASFGDLGFAVCGSIGRVAVDAMIVLSQAGFCISYLIFIANTLAYVSNSSPSNPILGLTPKSFYIWGCFPFQLGLNSIPTLTHLAPLSIFADVVEIGAMGVVMVEDVLIFLKQRPALRAFGGFSVFFYGLGVAVYAFEGIGMVLPLESEAKDKDKFGKVLALSMAFISVMYGGFGALGYFAFGEETKDIITTNLGQGPLSIMVQLGLCVNLFFTFPLMMNPVYEVMERRFRDGAYCLWLRWVAVLGVILVALMVPNFADFLSLVGSSVCCVLAFVLPSLFHLIVFKDQLSRKGMALDVAILVLGLVFGVSGTWSSLLEIVSPSA

SEQ ID NO: 19893 - protein, 528 aa, Vitis vinifera
MANSKYEYVKSFEVEDEVMPPNLIVVRIDGRGFRRFSEVHEFEKPNDERALNLMNSCAAAMLEEYPDIVFSYGFSDEYSFVFKKTTKFYQRRASKIVSLVVSFFTSIYTTKWKEFFPHKELRYPPSFRAWVICCASMEVLQTYLAWRQNDCHINNQYNTCFWMLVKCGKTEEEAQEVLKGTHKQEKNELLFQQFGINYKNLPSMFRQGSCVCKTQVEAIVKYSENGTPVKRLRRKPIIVHSDNIAARSFWNEHPFLLKELGDFREDINNIKPEYVKSFQFENKLMPLTWIVVRIDGCHFHRFSEVHEFEKPNDEQALNLMNSCAVAVLEQFKDVIFSYGVSDEYSFVLKKDSQFYQRRGSEIVTALVSYFTSIYVMKWKEFFPQKELKYPPCFDGRAVLYPTSEILRDYLTWRQVDCHINNQYNTCFWMLVKSGKSKSEAQAYLKGTQAREKNEVLLQQFGIDYNTLPLMFRQGSSAFWNEEEKTGMYENGASAEKSGKKVVVEQCNIIEQSFWEAHPSILNEKPHMV

SEQ ID NO: 19894 - protein, 410 aa, Vitis vinifera
MEVDISLSPRVNSVKPSKTVAITDQATALVQAGVPVIRLAAGEPDFDTPAVIAEAGINAIREGYTRYTPNAGTLEVRSAICHKLKEENGLSYTPDEILVSNGAKQSILQAVLAVCSPGDEVIIPAPFWVSYPEMARLADATPVILPTLISENFLLDPKFLESKLTEKSRLLILCSPSNPTGSVYSRKLLEEIAQIVARHPRLLVLSDEIYEHIIYAPATHTSFAALPGMWERTLTVNGFSKAFAMTGWRLGYLAGPKHFVAACGKIQSQFTSGASSISQKAAVAALGMGYAGGEAVSTMVKAFRERRDFLVKSFGELEGVKISEPQGAFYLFLDFSSYYGAEAEGFGIIENSESLCRYLLDQAQVALVPGDAFGDDKCIRISYAASLSTLHAAVERIKKAVVPLWPPVPV

SEQ ID NO: 19895 - protein, 655 aa, Vitis vinifera
MAAASPVEACTAEEMLDPEQNGRAERVQWVLNAPEPPGLWQELMDSIRETAFPHGNNFPSLQKQPTTHAISVLQGIFPILQWCRNYKATKFKKDLMAGLTLASLSIPQSIGYATLAKLDPQFGLYTSAIPPLIYALMGTSREIAIGPVAVVSLLISSMVPKLEDPVDNPIAYRKLVFTATFLAGIFQAAFALLRLGFLVDFLSHAALVGFMAGAAVVIGLQQLKGLLGITHFTNKTDVISVLEAVWRSFHHTWSPYNFILGCSFLSFILITRFVGRRNKKLFWLPAIAPLVSVILSTLIVFLTRADKHGVKVVKHIKGGLNPSSVHQLQFTGPHTGEIAKIGLIVAIIALTEAIAVGRSFASIKGYHLDGNKEMVALGIMNIAGSLTSCYVATGSFSRSAVNFSAGCETAISNIVMAITVLISLQFFTKLLYFTPTAILASIILSAIPGLIDISEAYKIWKVDKLDFLACIGAFLGVLFGSVEIGLLVALTISFAKIILNAIRPGIETLGRLPGTNMFCDVDQYPMAITSPGVLIVRVKSALLCFANANFVRERIMMWVTEEAEDNKGSAKGRNQLVVLDMSNLMNIDTSGIASLEEVHKQLVSQGMELAIANPRWQVIHKLKLAKFVNKIGGRVFLSVAEAVDECSTIKIMTTI

SEQ ID NO: 19896 - protein, 658 aa, Vitis vinifera
MASAVFYSSVQPSIFSRTHIPIPISKDSFEEFGHSINYKHYFRSNPCGQKKRVAQVKATLAEATPAPPAPSLPSKKVRILVAGGGIGGLVLALAAKKKGFDVVVFEKDMSAIRGEGQYRGPIQIQSNALAALEAVDMEVAEEVMRAGCITGDRINGLVDGVSGDWYVKFDTFTPAAERGLPVTRVISRMTLQQILARAVGEDIIMNGSNVVDFEDDGNKVTVILENGQRYEGDLLIGADGIWSKVRKSLFGPKEATYSGYTCYTGIADFVPADIDSVGYRVFLGHKQYFVSSDVGAGKMQWYAFYNEPAGGVDGPEGKKERLLKIFGGWCDNVIDLILATDEEAILRRDIYDRTPTFTWGRGRVTLLGDSVHAMQPNMGQGGCMAIEDSYQLAMELDKAWEQSIKSGTPIDVVSCLKSYEKARRIRVAVIHGMARMAAIMASTYKAYLGVGLGPLSFLTKLRIPHPGRVGGRFFIDIAMPLMLSWVLGGNSSKLEGRPPSCRLSDKASDQLRRWFEDDDALERAIGGEWFLLPSGESGLQPICLSKDENKPCIIGSVSHTDFPGISTVIPSPKVSKMHARISCKDGAFFLTDLQSEHGTWITDNVGRRQRVSPNFPTRFHPSEVIDFGSEKASFRVKVVRTPPDNAAKNEESKLFQAV

SEQ ID NO: 19897 - protein, 569 aa, Vitis vinifera
MSSITSAELNYLVFRYLHESGFTHSAFSLGYEAGINKCPIDGNMVPPGALITFVQKGLQFVEMEANLSNSDTDVDDDFSFLQPLDLITKDVHQLRQMIREKKRNLQKEKDKESDKEQEKQERQERQEIQERQERQERQERQEKEKEREKEKEREKDKEREKQHDDQIDTEMTTDQEDVVTVKHDENGVSGGGPEPMDISTSSTFQACEIPSSDVTILEGHTSEVCACAWSPAGSLLASGSGDSTARIWTIADGTCRSSVQNGPSNVLVLKHVKGRTNEKSKDVTTLDWNGDGTLLATGSYDGQARIWSTNGELRSTLSKHKGPIFSLKWNRKGDYLLTGSCDKTAIVWDVKTEEWKQQFEFHAGPTLDVDWRNNVSFATSSTDNMIYVCKIGENRPIKTFSGHQGEVNCVKWDPTGQLLASCSDDITAKIWSIKQEKYLHDLREHAKEIYTIRWSPTGQGTNNPNQPLVLASASFDSTVKLWDVEQGKLLCSLNGHRDPVYSVAFSPNGEYLASGSLDRSMHIWSLKERKIVKTYTGNGGIFEVCWNKEGDKIAACFANNTVCVLDFRM

SEQ ID NO: 19898 - protein, 590 aa, Vitis vinifera
MSSITSAELNYLVFRYLHESGFTHSAFSLGYEAGINKCPIDGNMVPPGALITFVQKGLQFVEMEANLSNSDTDVDDDFSFLQPLDLITKDVHQLRQMIREKKRNLQKEKDKESDKEHELVRARVREKERLERQERQERQEKQERQERQEIQERQERQERQERQEKEKEREKEKEREKDKEREKQHDDQIDTEMTTDQEDVVTVKHDENGVSGGPEPMDISTSSTFQACEIPSSDVTILEGHTSEVCACAWSPAGSLLASGSGDSTARIWTIADGTCRSSVQNGPSNVLVLKHVKGRTNEKSKDVTTLDWNGDGTLLATGSYDGQARIWSTNGELRSTLSKHKGPIFSLKWNRKGDYLLTGSCDKTAIVWDVKTEEWKQQFEFHAGPTLDVDWRNNVSFATSSTDNMIYVCKIGENRPIKTFSGHQGEVNCVKWDPTGQLLASCSDDITAKIWSIKQEKYLHDLREHAKEIYTIRWSPTGQGTNNPNQPLVLASASFDSTVKLWDVEQGKLLCSLNGHRDPVYSVAFSPNGEYLASGSLDRSMHIWSLKERKIVKTYTGNGGIFEVCWNKEGDKIAACFANNTVCVLDFRM

SEQ ID NO: 19899 - protein, 600 aa, Vitis vinifera
MAVDSGLSSPLGPPACEKDAKALQFIEEMTRNPDQVQEKILAEILSQNGETEYLQRFKLAGATDRDTFKSKVPVVTYEDLQPDIQRIANGDRSPILSSHPISEFLTSSGTSAGERKLMPTIHEEWDRRQKLYSLLMPVMNLYVPGLDKGKGLYFLFVKSETKTPSGLVARPVLTGYYRSEHFKKRPYDPYNVYTSPDEAILCVDSFQSMYAQMLCGLLMHKEVLRVGAVFASGLLRAIRFLQVHWQQLAHDISTGILNPKITDPSVREGLAGILKPSQELADFIIQECSGGNWERIITRIWPNTKYLDVIVTGAMAQYIPTLDYFSGGIPLACTMYASSECYFGLNLKPMSKPSEVSYTIMPNMGYFEFLPHDPSAPPLSRDSPPRLVDLADVEVGKEYELVITTYAGLCRYRVGDILQVTGFHNSAPQFQFIRRKNVLLSIDSDKTDEAELQKAVENASLLLREFNTSVVEYTSFADTKTIPGHYVIYWELLVKDPSNSPTDTVLKQCCLAMEESLNTVYRQGRVADNSIGPLEIRVVKSGTFEELMDYAISRGASINQYKVPRCVNFTPIMELLDSRVLSTYFSPAAPHWTPERRRTD

SEQ ID NO: 19900 - protein, 406 aa, Vitis vinifera
MDDVEIPEYFICPISLQIMRDPVTAITGITYDRESIENWLFKGNNTCPVTKQPLPPDSDLTPNHTLRRLIQSWCTENASNGVVRIPTPKAPLTKSHVVKLVKELWVPQLQLKTLRKLELLAMENERNRRYMVEAGVIKSMSSFLVACFNKQQTVGLEEALSILYLIRVNPTSETRLLPIENDRIMETFTWILQCKMDGHSSIKAHALLVLKVMVKTASSTQLERLKPEFLSSVVGVLREGISHQGINAALHILLDTCPWGRNRMSMIESGAIHDVIEIELGMPERRTTELILGILFHLCSCADGRSQFLSHSGAIAVVSNRMLNVSIAADDRAILILSLISKYCGTCVVLEEMISVRAVSKLCVVLQADYAHYLKEKAREILRSHYDFWKNSPCFISSPLSKIQLI

SEQ ID NO: 19901 - protein, 411 aa, Vitis vinifera
MEEIDVPPFFLCPISLEIMKDPVTVSTGITYDRESIEKWLFSGKNNTCPATKQVLSADSDLTPNHTLRRLIQAWCTLNASNGVERIPTPKIPINKIQIVKLLNDAKSPQLQMKCIGKLRALATESDANKRCIESAGAVEFLASIVSKANFTTFEEESDKGLESRSASSEALSILHYLLLSEAGLKKLVGKNGEFVGCLVRVLQRGNYESRAYAVMLLSSMLQVADPIQLIALKPEFFVEAVQVLQDHISHQATKATLKLLIEVCPWGRNKVKAVEAGAVSILTELLLASSEKRACEMILTVLDQLCGCAEGRAELLKHAAGMAIVSKKILRVSHVASERAVRILYSISKFSATPSVLQEMSQLGVVAKLCLVLQVDCGSRTKEKTRDILRLHARAWKNSPCIPTNLLSSYP

SEQ ID NO: 19902 - protein, 391 aa, Vitis vinifera
  misc_feature (332)..(339): Xaa can be any naturally occurring amino acid
  unsure (1)..(391): unsure at all Xaa locations
MEEIDVPPFFLCPISLEIMKDPVTVSTGITYDRESIEKWLFSGKNNTCPATKQVLSADSDLTPNHTLRRLIQAWCTLHASNGVERIPTPKIPINKIQIVKLLNDAKSPQLQMKCIGKLRALAAESDANKRCIESAGAVEFLASIVSKANFTTFEEESDKGLESRSASSEALSILHYLLLSEAGLKKLVGKNGEFVGCLVRVLQRGNYESRAYAVMLLSSMLQVADPIQLIALKPEFFVEAVQVLQDHISHQATKATLKLLIEVCPWGRNKVKAVEAGAVSILTELLLASSEKRACEMILTVLDQLCGCAEGRAELLKHAAGMAIVSKKILRXXXXXXXXMSQLGVVAKLCLVLQVDCGSRTKEKTRDILRLHARAWKNSPCIPTNLLSSYP

SEQ ID NO: 19903 - protein, 605 aa, Vitis vinifera
MDTKISVTDASVPTNSNVGCPSNGIVSSILSSVPPSVISSSEATLGRHLARRLVQIGVSDVFSVPGDFNLTLLDHLIAEPGLKNIGCCNELNAGYAADGYARSRGVGACVVTFTVGGLSVLNAIAGAYSENLPVICIVGGPNSNDYGTNRILHHTIGLPDFSQEFRCFQTVTCYQAVVNNLEDAHEQIDTAISTALKESKPVYISISCNLPGIPHPTFSREPVPFCLAPKVTNQMGLEAAVEAAAAFLNKAVKPVMVGGPKLRVAKACEAFVELADACGYPVAVMPSAKGLVPECHPRFIGTYWGAVSTAFCAEIVESADSYIFAGPIFNDYSSVGYSLLLKKDKAILVQPERVVIGNGPAFGCILMKDFLKALSKRLKCNTTAYENYHRIYVPEGQPLRSDPKEPLRVNVLFQHIQKMLSSETAVIAETGDSWFNCQKLKLPKGCGYEFQMQYGSIGWSVGATLGYAQAVPNKRVISCIGDGSFQVTAQDVSTMIRCEQRTIIFLINNGGYTIEVEIHDGPYNVIKNWNYTGLVDAIHNGEGKCWTTKVVCEEDLINAIETATGSKKDCFCFIEVIAHKDDTSKELLEWGSRVSAANSRPPNPQ

SEQ ID NO: 19904 - protein, 203 aa, Vitis vinifera
MTTPHDPATTKHADSSPATPPPTAPPVPDVENQTAASTRFGAPAILRRWKREDFLKRGSIGLRGLALVCSLLSFVIMVSNKHGDWKNFDKYEEFRYTLGIAILSTLYTGGQVLRQVHELYTGNLMFSRWSTSLFDFIGDQIVAYLLISSASAAVPMTNRMREGADNIFTDSLAAAISMSFLAFFSLGLSALISGYKLSTQSYI

SEQ ID NO: 19905 - protein, 552 aa, Vitis vinifera
MASSAASFNTSSHNSQDDFSFSTQLMSSSFTDLLSSGGDMDHSAPFAWALSDPLSHTTEFPKFKSLPPPSLPISPPPVSPSSYFAFSSGFSSTDLLDSPLLLSSSNVLPSPITGNFAAPGFNWRSNSNEHQQAFNDTDRKFSDLLFQSQTRPSGGEALKTQAPWNSDKPEKQTHFPQEKTGVKSEFASLQSLSPEIASIQTNMQSNNIPQSGRSHHAQPSESYREQRRSDDGYNWRKYGQKQVKGSENPRSYYKCTFPNCPTKKKVERSLEGHITEIVYKGTHSHPKPQPKRSSSQSFPSASTNSEISGHSMPIGNPYMDSMTTSENSSVSIGEDDFDQNSPMSRSGGDDENEREAKRWKGEYENEAISASESRTVKEPRVVVQTTSDIDILDDGYRWRKYGQKVVKGNPNPRSYYKCTSIGCPVRKHVERSSKDIRAVLTTYEGKHNHDVPAARGSGSHFVTKPLPNNSTTTVPAPIRPSVMTNHSNYTTTNANPQTRPPTSASQAPFTLEMLQSPGSFGFSGFGRMSHPDGVFSRTKEEPKDDLFQSFFC

SEQ ID NO: 19906 - protein, 298 aa, Vitis vinifera
MASAQLTTNYYSSSCPNALSIIKSAVNTAVNNEARMGASLLRLHFHDCFVKGCDASILLDDTSNFTGEKTAVPNANSVRGFDVIDTIKSQVESSCPGVVSCADILAVVARDSVVALGGPSWTVRLGRRDSTTASLSTANSDIPAPTLNLSGLISSFSNKGFSANEMVALSGSHTIGQARCTNFRDRLYNETNIDASFQSSLQANCPSSGGDNNLSPLDTKSPTTFDNAYFTNLVNNKGLLHSDQQLFNGGSTDSQVTTYSTKSTTFFTDFANAIVKMGNLSPLTGTSGQIRTNCRKTN

SEQ ID NO: 19907 - protein, 328 aa, Vitis vinifera
MGGPWTNSCNSQPHSHTVPKLLLPILSFIGMASAQLTTNFYAKTCPNALSIIKSAVNSAVKSEARMGASLLRLHFHDCFVNGCDASILLDDTSNFTGEKTAGPNANSVRGYEVVDTIKSQLEASCPGVVSCADILAVAARDSVVALRGPSWMVRLGRRDSTTASLSAANSNIPAPTLNLSGLISAFTNKGFNAREMVALSGSHTIGQARCTTFRTRIYNEANIDASFKTSLQANCPSSGGDNTLSPLDTQTPTTFDNAYYTNLVNKKGLLHSDQQLFNGGSTDAVVNTYSTRSTTFFTDFANAMVKMGNLSPLTGTSGQIRTNCRKTN

SEQ ID NO: 19908 - protein, 318 aa, Vitis vinifera
MASRSLLCLYAFVLFSLATADFSAALSPYFYNKVCPKALPTIKRVVEAAVQKEKRMGASLLRLHFHDCFVNGCDASILLDATSTIDSEKNAGANANSARGFNVVDDIKSQVDKVCGRPVVSCADILAVAARDSVVALGGPSWTVQLGRRDSTTASRTDANNNIPSPFMDLPALITRFSNQGLDTKDLVALSGGHVIGFAQCNFFKNRIYNESNIDPAFARARQSTCPPNGGDTKLAPLDPTAARFDTGYFTNLVKRRGLLHSDQALFNGGSTDTLVKTYSTNFGAFSADFAKSMVKMGNIKPLTGKKGQIRVNCRKVN

SEQ ID NO: 19909 - protein, 927 aa, Vitis vinifera
MVRILLLLLFLSVTVLLMDAANAQMPGFVSFDCGGSENFTDDLGLWWTSDDQLMYGEIATISVANETRKQYTTLRHFPADNRKYCYTLDVISRTRYLVRATFLYGNFDNNKVYPKFDISLGATPWSTIVISDANTIESSELIFLASDPTISVCLSNATTGQPFISTLELRQFNGSIYYTEYEEDFFLSVSARVNFGADSEAPVRYPDDPFDRIWESDSLKKANYLVDVAPGTEKVSTQMPIDVNKDSRPPEKVMQTAVVGRNGTLSYRLNLDGFPGFGWAFTYLAEIEDLGPEETRKFRLILPNMPDLSKPAVNIQENAQGKYRLYEPGYPNISLPFVLSFKFGKTSDSSQGPLLNAMEINKYLEKRDGCLDGSAIASIVLQYSSEDWAKEGGDPCLPVPWSWVACNSDPQPRIVSIHLSGKNLTGNIPTDLTKLSGLVELWLDGNALAGPIPDFTGLINLKTIHLENNQLSGELPSSLVDLQSLKELYVQNNMLSGKVPSGLLNENLDFNYSGNDNLHKGSTGGRHIGIIIGSSVGAVVLLIATIASCLFMHKGKKRYYEQGMHQLGHGLPAQRIVSSLNDAATEAANCFSLSEIEDATRKFEKKIGSGGFGVVYYGKMKDGKEIAVKVLINNSYQGNREFSNEVTLLSRIHHRNLVQFLGYCQEEGRSMLVYEFMHNGTLKEHLYGPLTRERAISWIKRLEIAEDAAKGIEYLHTGCVPSIIHRDLKSSNILLDKYMKAKVSDFGLSKLAVDGSSHVSSVVRGTVGYLDPEYYISQQLTDKSDVYSFGVILLELISGQEAISNESFGVNCRNIVQWAKLHIESGDIQGIIDPSLRDEYDIQSMWKIAEKALMCVQPHGSMRPPISEVIKEIQEAISIERGAEAAREGNSDASRNSIHSSINMGIDVGPTENYLSFDESIARPTPR

SEQ ID NO: 19910 - protein, 707 aa, Vitis vinifera
MVLQKRLDYGFSGYQVPWVPRASRSPRGRGSSKKKLEDDRIYAFEVLASLAGKLLQERETSASISDASRKNQHTVVKCETHDKGHQIKLEPRDENTLAYVPHANDDLSLKISSTINSDLPENVCFSDKLDVDCRQKARGSSPSKVAGDFPCCGIFFEGNVDSVIEKNLEVEPQEIRGMVSKTHPKKGSSKDLGELDRATLAPVHLDNNAKASLFSDHMNCGPSPRCQENMEVVSGDDDENSSGCSQPGTIMKTYTPRRHIGNQRIRKLSASRCWGGTPNLKDGGFLNTDRKRKPVYWTWKTCYPRRRSQRISPFKRRKLLDQNPESTSDRGLRRKLLDQNPESTSDRGLRRKLHNQNLESAFDRGFSCAGMYNSHNKGKKSENSSAVKLSIKSFRVPELFVEIPATATVGSLKRTVMEAVTAVLGGGLHVGILLQGKKVGDDSKTLLQSGISQGDKLRTLGFMLEPRCTQIPPSLCAEDPAVFLHGCTPQHLTRYIPTSGPGTSKISPDPPVTNLSKCVQRNHDTAPSHTDISTDKTIPESRALLAVPSVSLKPLAMVPFHQKSRRPEFVQRRIRRPFSVSEVEALVQAVENLGTGRWRDVKLCAFDGAKHRTYVDLKDKWKTLVHTAKISPQQRRGEPVPQELLDRVLAAHAYWSQQQPGTFIPHEELGDPQPIDSKKSSILTESLNPVPNFNNLLSLLLTKKTNM

SEQ ID NO: 19911 - protein, 568 aa, Vitis vinifera
MAEDDMYTKDGTMNIHNKPANKKKTGQWKACRFILGNECCERLAYYGMSTNLVNYLQIRLNQGNVTASNNVTNWSGTCYITPLIGAFLADAYFGRFWIIAIFSIIYFCGMVLLTMTASIKGLRPSCDDNGCDPTKLQSAVCFIALYLIALGTGGIKPCVSSFGADQFDVNDEAEKKKKSSFFNWFYLSINVGALIASSVLVWIQMNVGWGWGFGIPAVAMAIAVVSFFSGSRMYRLQKPGGSPLTRICQVLVASTRKYHVKVPNNKSLLYETKDAESNIKGSCKLEHTEKLRFFDKAAVEVESDHVKSSNNPWKLCTVTQVEELKSILRLLPVWATGILFSTVYSQMSTMFVLQGNTMDQHMGPNFKIPSASLSLFDTLSVIFWAPVYDRIIVPFARKFTGHERGFTQLQRMGIGLVISIISMIVAGILEVIRLNYVRKHNYYDLEYIPMSIFWQVPQYFLIGCAEVFTFIGQLEFYYDQAPDATRSLCSALSLTTNALGNYLSTLLVTIVNKVTTRNGKMGWIPDNMNRGHLDYFYWLLAILSLLNFLVYLWIAKWYTYKKVTGRPG

SEQ ID NO: 19912 - protein, 561 aa, Vitis vinifera
MAEEDIYTKDGTIDFRSNPAVKKETGTWKACPYILGNECCERLAYYGINTNLVNYLKFQLNQRNVVAINNVTNWSGTCYVTPLLGAFLADAYLGRYWTIAGFSIIYVFGMTLLTLSASAHGLKPLCDGQNVCYPTGLQTAVFFVGLYLIALGTGGIKPCVSSFGADQFDDSDETERKSKSSFFNWFYFSINIGALLASSVLVWVQTNVGWGWGFGIPAVAMGIAVMSFFSGTRLYRNQKPGGSPLTRICQVIVASLRKFQVEVPADKCLLYETADSESAVTGSRNFFDKAAVETHIDAIKGSVDSWRLCTVTQVEELKSIIRLLPIWATGIVFSAVYSQMGTLFVLQGNTMDLHITGSFQIPSASLSLFDTISVIFWVPIYDRLIVPFARKFTGHKSGFTQLQRIAIGLVISIFAMLVAGTLELLRLRMVREHNYYELKHIPMSIFWQVPQYFIIGCAEVFTFIGQLEFFYEQAPDAMRSLCSALSLTTAALGNYLSTLLVNVVTDVSTRGGKPGWIPDNLNYGHLHYFFWLLAALSVFNLGVYLQVARWYTYKRTAVDSL

SEQ ID NO: 19913 - protein, 364 aa, Vitis vinifera
MKLVEEEKILPNSSGIINIVPEEPDDMWLLYNLISKGDVIVADTTRKTAFGRVRLTLEIKITAIDYDKVGSVIRVAGRNLVHNEHVDAGAFHTIEIERNKPFDLKKKVWDSDAIEELRSYGNAAKADLAVLLIQDVSAELYSIGKIATTLCANIEAPSKTNRAAKSKSQSKSNKFFENILTEFVKHVNFNFVSLVIIASPVGTEFRQYLLAESRRQKLQQIEENKERVVVVNTSGKATLKAVLQEPEVMKLIRGKNGAVEITAWKDLCDMLSNDSSRACYGSKSVEKANELMAIDTLFISDELYRSANHGSRHKYTDLVKSVKKAGGKALVYSHNHVMGEQLGQLTGIAAILRFPLPDLDDMEL

SEQ ID NO: 19914 - protein, 1629 aa, Vitis vinifera
MSLHSFSPTSQLLHSNVFPAAQSPPPTSVFATNKGIILADFVGLYCKSRRARPRIGVSGHRRFHKFSAGKFGTINAVLDLDRIKNAAEQSSSRSDSKPKVANLDDIISERGACGVGFIANLDNKASHEVVKDALAALSCMEHRGGCGADNDSGDGSGLMTSIPWDLFNNWAKEQRIGSFDRLHTGVGMVFLPKDDDLMKEAKTVIDNSFKQEGLEVLGWRPVPVDISIVGYYAKETMPNIQQVFVRVVKEENIDDIERELYICRKLIERAVKSETWGNELYFCSLSNQTIVYKGMLRSEVLGNFYLDLKSDIYKSPFAIYHRRYSTNTSPRWPLAQPMRLLGHNGEINTIQGNLNWMQSREASLKSPVWRGRENEIRPFGNPKASDSANLDSTAELLIRSGRSAEESLMILVPEAYKNHPTLMIKYPEVVDFYNYYKGQMEAWDGPALLLFSDGKTVGACLDRNGLRPARYWRTIDNVVYVASEVGVLPMDESKVVMKGRLGPGMMISVDLTSGQVYENTEVKKQVALSNPYGKWVNENMRSLRPVNFLSATVMDNEGILRHQQAYGYSSEDVQMVIETMAAQAKEPTFCMGDDIPLAVISQRSHMLYDYFKQRFAQVTNPAIDPLREGLVMSLEVNIGKRGNILEVGPENASQVNLSSPVLNEGELESLLKDPHLKPRVLPTFFDIRKGVEGSLQKRLNKLCEAADEAVRNGSQLLVLSDRSDELEPTRPGIPILLAVGAVHQHLIQNGLRMSASIVADTAQCFSTHHFACLIGYGASAVCPYLALETCRQWRLSNKTVNLMRNGKMPTVTIEQAQKNFCKAVQSGLLKILSKMGISLLSSYCGAQIFEIYGLGREVVDLAFCGSVSSIGGLTLDELARETLSFWVKAFSEDTAKRLENFGFIQFRPGGEYHGNNPEMSKLLHKAVRQKSESAFSVYQQHLANRPVNVLRDLLEFKSDRSPIPLGKVEPAASIVQRFCTGGMSLGAISRETHEAIAIAMNRLGGKSNSGEGGEDPIRWSPLTDVVDGYSPTLPHLKGLQNGDTATSAIKQVASGRFGVTPTFLANADQLEIKIAQGAKPGEGGQLPGKKVSAYIARLRNSKPGVPLISPPPHHDIYSIEDLAQLIFDLHQVNPKAKVSVKLVAEAGIGTVASGVAKGNADIIQISGHDGGTGASPISSIKHAGGPWELGLSESHQTLIENGLRERVILRVDGGFKSGVDVMMAATMGADEYGFGSVAMIATGCVMARICHTNNCPVGVASQREELRARFPGVPGDLVNFFLYVAEEVRGILAQLGFEKLDDVIGRTDLLRPRDISLVKTQHLDLSYILSNVGLPKWSSTEIRNQDVHSNGPVLDDIILADPETSDAIENEKVVNKSIKIYNVDRAVCGRIAGVVAKKYGDTGFAGQLNITFTGSAGQSFACFLTPGMNIRLIGEANDYVGKGMAGGELVVTPVEDTGFLPEDATIVGNTCLYGATGGQIFVRGKGGERFAVRNSLAEAVVEGTGDHCCEYMTGGCVVVLGKVGRNVAAGMTGGLAYILDEDDTLIPKVNKEIVKIQRVTAPVGQMQLKSLIEAHVEKTGSSKGSAILKEWDTYLPLFWQLVPPSEEDTPEASAEFERTDASQVTLQSA

SEQ ID NO: 19915 - protein, 325 aa, Vitis vinifera
MSSGAARRVSRQDIQLVQNLIERCLQLYMNQKEVVETLLDQAKIEPDFTELVWQKLVEENQDFFEAYHLRLMVKHQINVFNELLKQQVDLMHRICPARVDTVPIPNGSQLSALQQNSACYPSEHVGPSMKPSSMHRHISSGLSNAFTNGGSSLQTSMHTAVDMSANTCRIDAPQDMLSTRSPNLGLMQGMNGGMIKPEAGYSGSSPFMFGADNTALEKRVAIGDASVTPFSSVVSNSQTLGEPLLDSDTSTYGFLGQIPQSFSLSDLTAGFSQSSDILESYPRSPFLTTDTDNFMDSRGRGENQGDSKRLDTISEGLSYEDFPSD

SEQ ID NO: 19916 - protein, 629 aa, Vitis vinifera
MLYNRLQLYSDRVHLKAGTGKTIGLRISERKQLKELGRGASHASAVKHHAPTHNVESSESQAFPPSLPPLPPPPPPAPSSEAEFRKYLGYFALLLGCGIATYYSFPFSDSAKHKKAQLFRYAPLPDDLHTVSNWSGTHEVQTRVFHQPESLEELEQIVKEANEKKQKIRPVGSGLSPNGIGLTRAGMVNLALMDNVLDVDVEKKRVRVQAGIRVQQLVDAIKDYGITLQNFASIREQQIGGIVQVGAHGTGARLPPIDEQVISMKLVTPAKGTIEVSKERDPELFYLARCGLGGLGVVAEVTLQCVERQELVEHTVVSNMKEIKKNHKKLLSENKHVKYLYIPYTDTVVVVTCNPVSKWKGPPKFKPKYSRDEAIQHVRDLYQESLKKYSPEAITAKSSDNSEPDINELSFTELRDKLLALDPLNKDHVIQVNQAEAEFWRKSEGYRVGWSDEILGFDCGGQQWVSETCFPAGTLAKPSMKDLEYIEDLKKLIEKEEIPAPAPIEQRWTQSSKSPMSPASSSAEDDIFSWVGIIMYLPTMDARQRKEITEEFFHYRRLSQTQLWDLYSAYEHWAKIEVPKDKDELAALQARLRKRFPVDEYNKARKELDPNRILSNNMLGKLFPSSDTI

SEQ ID NO: 19917 - protein, 331 aa, Vitis vinifera
MELALSLGDASKPFTFLDKTQKMVNKDAGFCMGLGTGIIGKGQGHGGEEDERKVSSDPPVQLDLLPFSPVPRHHPSSQLRFPWLADNLMSEPGSSDGSGRALDVNRFPVAVAAAEDADDGGALSSPNSTVSSFQMDFSIYRSGNGGRSKRDLEATVNEVETSRASDDDENGSTRKKLRLSKEQSAFLEESFKEHNTLNPKQKLALAKQLNLRPRQVEVWFQNRRARTKLKQTEVDCEYLKRCCETLTEENRRLQKELQELRALKTSQPFYMQLPATTLTMCPSCERVATTSTSSSAAAAAPTSTSATLARTRLFPFSQAHVHQAPAHQAAS

SEQ ID NO: 19918 - protein, 271 aa, Vitis vinifera
MNALFFSSSPLLATPSRKAPPFIPLRHHCYSHYSSYHRGNYPSFPLLSSSIHRLTVGAATPSNEEAVSVIDFEDFMEKDWSFLDSDGTNSEEEHKQKTDWIISKGNIGENSRVLVSTGAEEFVDQLVDSSPCQLLLVVHDSLFVLAGIKEKYDKVKCWQGELIYVPEKWTPFDVVFLYFLPALPFELDRIFGELAKRCLPGARVVISHLQGREVLEQQRRQYPDVIISDLPDKMTLQKVAADHSFEMTEFVEEPSFYLAVLNFREVRNSKD

SEQ ID NO: 19919 - protein, 599 aa, Vitis vinifera
MATSVAWLLFLYIGAVSSLPGTLSSSVCPLQSDFLVAFLQSQCPLSLSSHALLDVDGNFLDRALTSKQGNGFTSVLFHASWCPFSCKMRPKFEVLSSMFPQIEHLAIKESSASPSMFSRYGIHSLPSILIVNQTSRMRYHGPKDLPSLVKFYRKTTGLEPVQYFAEDQTISFEKSEGQSILQPWNGSYVKEIFTREPYLAFSILFFCLRVVLALFPGLLSQLKAFWVLYVPHLNLEIFGETSQMLGRVLNMIDVQRVWAKLKLCKIRNFREGAKSARVWASSLASVSLGETSSSGSSSGTGSILQTPHEMDLEEWEYLPDDGFLDFSEDGGRKIFIRDSDPNSKGVFDMNYFICPTPKRETWVEPPPLSPRLPKQLLPLQIRLDPPPIVDEEVVKHITKIPLQIEALPPPVIRVPSLEALKEADQDTVSQVFFKKMKENEFVDMKMDSPKSGSRGILPQIEAGGFQFEEKDEKMENTHNPSKKNNLGPAPGPDIKEDEEGSWTESSGRFNVWKWSLTGIGALCSFGVAATTICIIIFASSQRNKHHQHNQRLRFQIITDDKRIKRVVHHATQLNEAFSAVRGVPLTRAHITFGGYYDGL

SEQ ID NO: 19920 - protein, 611 aa, Vitis vinifera
MKHRCPDSSVLFIPPFSPSIVYTIRHKIPQMPSVKQFFTGMSDSGKHTSISKRNKKLFLLVFSSVLLIAAVVGIVAGVHSRKSSTNDVGLTAGHAVLKSACSSTRYPDLCYSAIATVPGASKKVTSQKDVIAVSLNITVTAVEHNYFTIEKLLDFKNLTKREKAALHDCLETIDETLDELHVAMDDLDEYPDKKSLTQHADDLKTLMSAAMTNQETCLDGFSHDDADKHVREVLLKGQRHVEHMCSNALAMIKNMTDTDIAREREAMNRKLMEERDESGWPKWLSAGDRRLLQSSSVTPDVVVAADGSGDYKTVSAAVAAAPEKSSKRYIIGIKAGVYKENVEVGKKKTNIMFLGDGRSNTIITGSKNVVDGSTTFNSATVAVVGEKFIARDITFQNTAGPSKHQAVALRVGSDLSAFYKCDMLAYQDTLYVHSNRQFYINCLVAGTVDFIFGNAAAVFQDCDIHARRPNSGQKNMLTAQGRTDPNQNTGIVIQKCRIGATSDLQAVISSFKTYLGRPWKEYSRTVVMQTSITNVIDPAGWHEWSGSFALSTLYYGEYQNTGAGAGTSKRVTWKGFKVITSASEAQGFTPGTFIAGSSWLGSTGFPYSLGL

SEQ ID NO: 19921 - protein, 578 aa, Vitis vinifera
MDSIKSFKGYGKVDELEERAFKRKTRKRLIILIISSVVLVAVIIGAVAGTLIHKSKSESNSVPASPVSPATSIKAVCSVTQYPDSCVSSISSLDTSNTTDPEELFRLTLRVAIAELSKLSSLPRQLSAKSNDAQLKKALGVCETVFEDAIDRLNDSISSMEVREGEKLLSASKIDDIKTWLSATITDQETCLDALEELNSTLLNEVKTAMQNSTVFASNSLAIVAKLIGILHDLDIQVHRKLLSFSNSDQFPDWVGAGERRLLQETKPTPDVTVAKDGTGDYVTIKEAVAMVPKKSEKRFVIYVKEGNYSENIILDKSKWNVMIYGDGKDKSIVSGNLNFIDGTPTFATATFAAVGKGFIAKYMRFENTAGAAKHQAVAFRSGSDMSVFYQCSFDAFQDTLYAHSNRQFYRECDITGTIDFIFGNAAVVFQACKIQPRQPMSNQFNTITAQGKKDPNQNTGISIQKCSISALNTLTAPTYLGRPWKAYSTTIVMQSNIGSFLNPKGWTEWVTGVDPPSTIFYAEFQNTGPGATLDQRVKWAGFMTNITEDEAAKFTVGTFIQGASWLSESSVTFDASL

SEQ ID NO: 19922 - protein, 482 aa, Vitis vinifera
MPTPVTLETINPKVLECEYAVRGEIVTLAQRLQQELQEKPGSLPFDEILYCNIGNPQSLGQQPITFFREVIALCDHPPILDKSETQGLFSADAIERAWQILDQIPGRATGAYSHSQGIKGLRDTIAAGIEARDGFPSNPNDIFLTDGASPAVHMMMQLLIRTEKDGILCPIPQYPLYSASIVLHGGTLVPYYLDEATGWGLEISELQKQLEDAKSKGITVRALVVINPGNPTGQVLSEDNQRDIVEFCKKEGLVLLADEVYQENVYVPDKKFHSFKKISRSMGYGEEDISVVSFQSVSKGYYGECGKRGGYMEVTGFGADVREQIYKVASVNLCSNITGQILASLVMSPPKVGDESYESYFMEKDGILSSLARRAKTLEDALNSLEGVTCNKAEGAMYLFPRIHLPEKAIKAAEAAKTAPDAFYARRLLNATGIVVVPGSGFGQVPGTWHFRCTILPQEDKIPAVVSRLTEFHKGFMEEFRD

SEQ ID NO: 19923 - protein, 379 aa, Vitis vinifera
MCGGAIISDFIPASRCRRVDEDYFPALKKRTSGNHCSKSLWSEAVEDDDDDDFEADFLGFKDDSDDEEDDIKPSAFSAAKPHGYTGIKSVEFNGQAEKSAKRKRKNQYRGIRQRPWGKWAAEIRDPRKGVRVWLGTFNTAEEAARAYDAEARRIRGKKAKVNFPDETPLTAPKRTIKANAQKLIPKGSPNSSHSNLNQSFNFMNNSDQEYYSSLMDEKPSTNQYGYPDSFPANGEVGLKSLAPSENGRMYFNSDQGSNSFDCSDLGWGEQGAKTPEISSVLSATLEGDESQFIEDANPKKKLKSNSQNAVPVEENTPNGLSEDLSAFESQMKYFQIPYLDGNWEASMDALLSGDAAQDGGNPMDLWSFDDLPTVVGGVF

SEQ ID NO: 19924 - protein, 160 aa, Vitis vinifera
MSPVADLDVLNGDLAATVSQLLNFPEAIDKFAFPSRSHHTHEHKGLSTIPTDIMDTPKEYLFYMDVPGLCKSDIQVTVEDDNTLVIRSHGKRKREDGEEEGCKYVRLERKAPQKLMRKFRLPENANTSAISAKCENGVLTVVIEKHPPPPKSKTVEVNIA

SEQ ID NO: 19925 - protein, 511 aa, Vitis vinifera
MESGTWASYVAAWLATVALILLSTHLRRRRKLNLPPGPKPWPIIGNLNLIGALPHRSIHELSQKYGPIMQLRFGSFPVVVGSSVAMAKLFLKTHDVTFASRPKTAAGKYTTYNYSDITWSPYGPYWRQARKMCLMELFSARRLESYEYIRVEETKSLLSSLYKQSNSPVDLKDHLSTVSLNVISRMVLGKKYLDENVEGSIVTPEEFKKMLDELFLLSGVLNIGDSIPWIDFLDLQGYVKRMKVLSKKFDRFLEHVLDEHNARRKGVENYVAKDMVDVLLQFADDPTLEVKLERHGVKAFTQDLIAGGTESSAVTVEWAISELLRKPELFDKATEELDRVIGKERWVEEKDIPNLPYLDTIVKETMRMHPVAPMLVPRFSREDIKIADYDIPKDTRVLVNVWTIGRDPEIWDQPNEFIPERFIGKNIDVKGQDFELLPFGTGRRMCPGYSLGLKVIQSSLANLLHGFKWKLPGDMKPGDLSMEEIFGLSTPKKIPLVAMAEPRLPAHLYDM

SEQ ID NO: 19926 - protein, 365 aa, Vitis vinifera
MSLVKSHCCYNLLNPSNTASLAMAMCSSFCPPQVPNHFRGTTPIPSFLPKPPSFKAFSSQTATASTKDEFPARVGFLGLGIMGSPMAQNLIKSGCDVTVWNRTKSKCDPLISLGAKYKSSPEEVAASCDVTFAMLADPESAVDVACGKHGAASGIGPGKGYVDVSTVDGATSKLIGEHIKATGALFLEAPVSGSKKPAEDGQLIFLTGGDKSLYETVAPLLDIMGKSRFFLGSVGNGAAMKLVVNMVMGSMMASFSEGLLLGEKVGLDPDVIVEVISQGAISAPMFSMKGPSMVKSVYPTAFPLKHQQKDLRLALGLAESVSQPTPIAAAANELYKVAKSHGLSDHDFSAVIEALKVKMQDPPEY

SEQ ID NO: 19927 - protein, 871 aa, Vitis vinifera
MDMLKGSLFELLGTFALIFLVHAQDQSGFISIDCGISEDSSYTDQVTGIYYTSDATFIDTGISNSISPEFKTNSLPQQLWNVRSFPEGINNCYTLRPARGRGNKYLIRAQFMYGNYDAKNQLPEFDLILGVNMLESVQLDNASSVISKEIIHVLSSDYIYVCLVNTDSGIPFISALELRLLDNSMYETQSGSLVRYARWDFGSPYELIRFKDDNCDRFWFPYNSGEWKMLNTSRTIDTDDDNKLQLTSIVMSTAVKPLNTMEPLKFSWESTDPTSKFYIYLYFAEVEELQLNESREFNIFLNGNLWHGPLTPESFEATAMYRISSSISEKFEFSIYKTNSSTLPPIINALEVYLVKQLLQSQTDQKDVDAIMNIKSLYGVKKNWQGDPCAPENYSWEGLNCSYNDYNPPRIISLNLSSSRLTGNITPYISNLTLLQSLDLSQNGLNGPIPDFLSQLPLLRSLNLTGNKLTGSVPVELIERYKNGSLLLSVKSNPELCWPGSCKKKNKFVVPVVVSVTAAFIFLTTLATFWWIRRGRQEEEMDAEMDSNKRQFTYSEVLTITNNLEKVVGKGGFGTVYYGHLDGIQVAVKMLSQSSIQGYKQFQAEVNYLMRVHHRNVTSLIGYCNDGYHMGLIYEYMVNGDLKRHLSGNHTSKFSLVLSWEERLRIATDAAQGLDYLHDGCKPSIIHRDIKSTNILLNERFQAKLADFGLSRAFPIEGSSHVSTAVVGTPGYLDPEVYNAIRLTEKSDVFSFGVVLLEIITSQPAISKDREKTHIIEWVSCMLANGDIKNTVDPRLQGEFDINSAWKAVEVAMCCVSPTSTERPAMHYVVMELKQCLEMEASQKEGHEPESKDSIGITTEDQSTEIIPLAR

SEQ ID NO: 19928 - protein, 1786 aa, Vitis vinifera
MTKDAPSLGELDAADDGEGDEAIEEGHEIGGAEDEEGGGSGETRDNDLGEGEEGVRDGDDSDGLHGLDRHWDAEEKADGDVVESREDEGFISIDCGLAPGSEYTDIETQISYSSDAEYIDTGRNYNVSEEITSRYNLKKHFMNVRSFPEGARNCYTLRPEQEKDNKYLIRALFMYGNYDSKNQFPEFKLYLGTDEWDTVNIGDSSTALWKEIIHAPKTNDIDVCLVNIDSGTPFISVLELRPLNNSIYDKTEPGSLLFYNRWDFGAEQDMEIRDKDDVFDRIWNPFRLDSWEFITASYGSYTLSTSEYRLPRTVMATAATPANESESLRLSLNISGDPSQKLYMYMHFAEVEKLNEGELREFTISLNDDESWGGGALTPPYLSSDTLYSTNSVSGSTTNKLLFTIKKTGRSTRPPIINAMEVYKIKDFSQSSTLQGDVDAIKKIKSVYTMSRNWQGDPCLPESYRWTGLSCSKSGSPSIISLNLSSSSLTGKIDSSFSTLTSLQYLDLSYNNLTGEIPDFLAELTSLNSLNLSGNNFTGSVPLALLRKSDEESLSLSLDGNPYLCKTNSCAEEEEKQKKKGRNITVPVVASVASIASVLLLLAALATLWRFKIRRQHGTDGKPKEEKKLLDSKNQCFSYSEVVSITDNFQKVLGKGGFGAVYSGHLKDGTQVAVKMLSPSSAQGSKQFRTEAQLLARVHHRNLASLVGYCDEGSNMGLIYEYMANGNLEELLSGKNAPVLSWEQRLRIAIDAAQALEYLHNGCKPPIIHRDVKTANILLNEKLQAKVGDFGMSRIIPFESETHVSTAVVGTPGYLDPEYYITARLNEKSDVYSFGIVLLELISGKPAIIGSHGNKDHIVQWVSPIISRGEIRSIVDPRLEGDLINTNSAWKAVETAMACVPSISIQRPTMSEVVGELKECLNIEIRDERAYNVKEDNGIISSYSPEMVVLGIDEDAMGPQASLLRIFVCERGSRIFASNTRAATVTASRTSSPFCQFMLGFLLPPAPFVGCRSFFGVELRFGMGMLVTLGSVSALVSRMSANKEATSSSSSGQSDKVVSGDVHTEKFVDKLNVREFCERFCIPNGVSVQLVDGEVVSTEKSEDNAIFFTKEQFNAGLRFPLPSLFKEFLHFTQIPPAYIHPNMVMVLMRCSILSMLFNLDLSLLEVLFIYSIKKGKNDIFSFVACLPSLQLVTSLPDSNKGAARGHVLVKGLWAGLTVRPDRQFAPNQSLKSPGKDKRGNVVEWVEKASFDRLIKLFEIAADERSCETLFSAQNLRLISPFYTAVRKADARARKTLLNAREERRQEGTLRKALGDKRSAPTPPAGAPARKKKKVPSKGKAIKLPTPPKEVVIKSPAPIKGIIIRCSAPSGLPSVSNGSGHIAGLNGSGPSMPAAKRLALLAEEATLVNQPGSPHPDADVVRASFAETLPLTVPPTEETGTESQGLSPCEPSFLALVPVKGPAIRRSCPTHDLKSGLIGWLQDRLLETIEVSCSSAQEDHPEGSETEMTEENPIDPVLVPDEGLPEEIQLAVNDGGPDPGEESHPTALLGGSPVDDATCISASPCSYAKLGEMLKQIPLGIDVALPSAKMFEAVETLVSDIRGMVQQRDLFSDLLRTADYMKAVVSQRMNSEEELCLRLERAEASLSAARRAFEENAEALKKSQDDNEALRIELAEAKSREESIEAHLNEAVDEMAQLRVDVRQLRTEVSIEKKQREDLQSRLSAQKEELEAEFAAQREELETDYQKQVDEMYFFGYRCCMKKHGIKRDVPSIPLGEEDKLRDKASQ

SEQ ID NO: 19929 - protein, 969 aa, Vitis vinifera
MATIVYVWLVLACPQPWYPQHLAVPMANLTKNNEDDSGHPFDGARLLDFAILRPYLQHPAVSHDPSPSSSLRRELRRSMDMAFLFFGFLALLVLVHGLQDQSGFISIDCGIAEGSDYKDNTTGLLYTSDAKFIDTGINGKISSKFTSATLIPQLTNVRSFPEGAKNCYTLRPKNGKNNNYLIRAFFMYGNYDSKDQPPEFKLHLGVEEWDTVNITHSDKIVRREIIHVPKTDDIYVCLANTGSGTPFISALELRPLDNSTYTTESGSLELFTRVDVGSTTNETVRYKDDVFDRIWDPVSWDYWAPINSRYVSGTLSNNEYKPPSNVMSTAVIPGLDSLSLEFYWDTDDPSQQFYVYMYFAEVEQLEAGELREFKISLNGGSWRGPIVPEKMIPTTIWNTDSISAPGSLNFSISKTDNSTRPPILNALEIYSVKHFLQSPTGQNEVDAIKKIKSVYKVMKSSWQGDPCIPRDYLWDGLTCSDNGYDAPSIISLNLSSSNLTGRIDGSFSNLTSLQHLDLSYNNLTGEVTTFLANLPALKTLNLSWNNFIGSVPLALIKQADGGTLSLSLDGNPHLCKTSSCKWKNPIVPIVSCAVFVLVLLGVFAIFWIYKRKQRQGIVVAAKPNDLEEKIMRQNNRNVSYSEIVSITGNFQQVIGKGGFGKVYSGHLSDGTQVAVKMLSSPSIHGSKQCRTEAELLTRVHHRNLVSLLGYCDESPNMGLMYEYMANGNLQECLSGTVKDASVLTWEQRLRIAIDAAQALEYLHNGCKPPIIHRDVKTANILLDEKLQAKVADFGLSRCLTPENGNCLSGSNFSTAISGTPGYLDPEYYTSLRLDEKSDVYSFGIVLLELITGQPPIIKQGEESMLHIVQWVSPIIKRGEIRDIVDQRLQGDFDISSVGKAIDIAMACVTYSSTTRPTMSHVLLELKGCLNIEIAPERTRSMEEDNEKQANDSLEMIFVSTEIPKGPQER

SEQ ID NO: 19930 - protein, 901 aa, Vitis vinifera
MELLFRVFGFLALNVLFHVHAQTGFISIDCGVNEDYIDNTTKLFYSTDAKFIDSGVSKNIPHDFKSPIFEKQLTTVRSFPKGVKNCYTLPAEQGNKYLIRAVFMCGNVQEYNDQLPEFKLYLGVEEWDTVKFNSSYSIFRTEIIHVTRTDEIYMCLVNTDSGTPFISALELRPIDNSIYNKTQSGSLVLFNRLNSGSQTNETVRYGDDVLDRMWVPFNSIYWKAIKAPYSSSVLSENEFKLPATVMETAVKPVNGSLDFYLVGIDSSQEFYMYFHFAEIEEVQDQIREFTISLNNKTISDPIEPKYMVSDSYFTQSSLSGIQMNFSLAKTNRSTLPPIMNALEIYTIKEFLQSPTEQLDVDAMKKIKSVYQVMKSSWQGDPCLPRSYSWDGLICSDNGYDAPSITSLNLSSSNLVGKIDNSFKNLTSLQYLDLSNNSLSGDVPEFLSEMSSLKTLNLSGNKLTGSVPSALLAKSNDGTLTLSLDGNPDLCQNNSCNTKTKTKNSVAVPVVASIASFVVLLGAIFAIYWHFIRGRRHGTHAGVQPNDQESVSQFDLKKPDVPNEEENLELELEEIQKEMIKPNEKLEAKKQCLSYSEVKRITNNFREVIGHGGSGLVYSGHLSHGIKVAVKKLSPTSHQSFEQFRNEARLLSTIHHRNLVSLMGYCDEDSNMLLIYEYMANGNLKEHLSGKIGSVLSWEQRLHIAIEAAQALEYLHEGCDPSIIHRDVKAANILLNEKMQAKVADFGWSRSMPSENPSHVSTTFVVGTSGYLDPQYNRTGQLTKESDVYSFGIVLLELISGRPAIMEENRSILDWVRPIIERGEIEDIVDPRLQGIFNTNSAWRAIETAMCCVPFSSTERKTMSYIVRELKECLKLVEMSSTSNTGISITQPIGPATGPRAR

SEQ ID NO: 19931 - protein, 872 aa, Vitis vinifera
MFSLGFGFLALLILLHVQAQTGFISIDCGVDEGYLDNTTNIFYSSDANFIDSGENRNISLYFTSDIFERQLKNVRSFPEGVKNCYTLQPEQGKDNTYLIRVAFWYGNYDAMDQPPEFKLYLGVEEWDSVKLNKSHDQIIWKEIIHVPETDDIYVCLVNTGSGIPFISALELRALGNSIYNKTQSGSLVLFNRLNFGSASNETVRYGDDELDRIWNAYYFPDWKSIQAPYSSSSLSETEFKLPPKVMETAVKPLSGSYLNFTLGGIDSSEEFYMYFHFAEFEEVQDKIRQFTILLNDITIFDSIEPQYMVSETHSTKNSLSGRQLNFSLAKTNQSTLPPIMNALEIYMIKEFLQSPTEQQDVDAMKKIKSVYQVMKSSWQGDPCLPINYLWDGLICSDNGYNAPSIISLNLSSSNLTGKMDVSFSNLTSLQYLDLSYNNLTGEVPNFLAELPSLKTLNLSWNNFTGSVPLALIEKHNDRSLSLSLDGNPYLCNTTSCAGAKKKNKKTVVVPVVASITLFLVLLGGLAILWSFKRRREQNIDIVVKPTDQEDKALESKYLRLSYSEVERITDNFQNQIGKGGSGKVYRGRLSDDTEVAVKLLSSSSAEGFNLFQTEAKLLTRVHHRNLVSLFGYCDEGSSMVLIYEYMNKGNLKKNLADKEEAVLSWKQRVGIALDAAEGLEYLHNGCKPPIIHRDIKTDNILLNEKLEAKVADFGWSRSMPVEGQTHVSTRIVGTEGYFDPEYQETSRLTEKSDVYSFGIVLLELISGQPAIIKSSESSTIHILQWVCPLLEMGDIGGIVDPRLNEDFDTNSAWRAVETAIGCVVHSSSERPTMSDVVAKLKECRSYMETTTANMEEDSGSIITEAAMSPQAR

SEQ ID NO: 19932 - protein, 879 aa, Vitis vinifera
MEMLVVLAGFLALTATVDGQDQSGFISIDCGMAEGTDYNDATTSILYTSDAQFIDTGTNKSISPDLESENLPKYLSSVRAFPEGLKNCYTFKLVQGNKYLIRSVFMYGNYDSKNQAPEFGLYLNADEWDSVKLENSSDVVVKEIIHVQETNYSHVCLVNTGLGTPFISALELRLLNSTIYKTQSASLVLATRLDIGSTSNDTIRFKDDDYDRIWKPYTSSSWELVSLRYASDLLSANPFILPPRVMTTAVTPKNGSRSLELQYDPDDATKQFYVYMHFAEVEELGDGGYRNFTILLNGDFWYGPMSVQYLSPVTVYSQYTVSGTSLELSLVQANDSKFPPILNAVELYWVKEFLQSPTEQSDVEAIRNVKSVYGVKRNWQGDPCAPKKHLWDGLECSYNGYNSPRIISLDLSSSGLSGKIDSSLSNLESLQYLDLSNNSLTGEVPDFLSQLPLLKTLNLSGNEFTGSVPSLLIQRSKNGSLSLSVDGNPNLCVMASCNNKKSVVIPVIASIAVVLVLLIAFLILWGLKRRRQQRQVLESKANYEEDGRLESKNLQFTYSELVNITNNFQKVLGKGGFGSVYGGYLNDGTQVAVKMLSEQSAQGFKEFRSEAQLLTKVHHRNLAPLIGYCNEGRYKGIVYEYMANGNLREHLSGKDTPVLSWEQRLQIAVDAAQAFEYLHEGCKPPIIHRDVKTSNILLDGKLQAKVADFGLSRFMPSESRTIVSTQVAGTPGYLDPEYYISNNLNEKSDVYAFGIVLLELVTGHPAIIPGHENTHLVDWLSPRLAGGEIRSIVDSRLNGDFNPNSAWKLVETAMACVPRSSIQRPTMSQVVADLKECLQMEMHRNKSASQSRTYQDTASSANSIDLFAVELDVSMPHAR

SEQ ID NO: 19933 - protein, 895 aa, Vitis vinifera
MFVECRGTYAWSSKVCLIFLQVFALTISMEESVALASDGVFGNSESVINRKPARRKLDDIAGSINIDCGLPEDCKYIDAETGLQYTSDASFIRSGINKNISSKFSSTTLHKSLTNVRSFPQGKRNCYTLRPPEGHGTMYLIRASFMYGNYDELNQVPQFDLYIGVNMWDSVKLDNASHLVMKEILHAPSDDDIYVCLVNIGYGEPFISSLEVRHFHDSSYKTESGSLALYRRLDAGSTTNEIVRFKDDAYDRIWFPYNLPDCESLNTTVPIDSHAETEYKLPSKVMTTAIRPMNSSASLDFDFDIGDSTLEFYVYMHFAELEGLQENQTRNFSITLNGNPWGELKFSIYKTLNSSLPPILNAMEIYMVKGLLQAPTCQEDVNGISRIKSFYLVEKNWQGDPCAPVQPWDGLTCSNNGYESPRIISLKLSSSGLRGTISPSLLNLTALQFLDLSNNSLTGELPEFLSRLSFLTALNVTGNKLSGSVPPDLIARSEKGSLSLSVANNPDLCPSAQCKENKNSVGPIVAAVVSSLVIIFLALVIIWSLKRRKKATKSLVRSPEETWSLKMENQRFRYLEIVSITNDFQTVLGTGGFGTVYHGCMLNGTQVAIKMLSQSSKQGMKEFRNEARLLMRVHHRNLASLVGYCHEGTNMGLIYEYMAGGNLQNYLSGADISTSPLSWIERLQIAVDAAQGLEYMHCGCKPPIIHRDVKTANILLSEKLQAKIADFGFSRFFSIESETHATTAVVGTIGYIDPEYYISNRLTEKSDVYSFGIVLLELITGKPAIIKDEDNIHIVQWVRSFVERGDIGSIVDPRLQGNLNTNSVWRVLETAMACLPPISIQRVTMSHVVMQLKECLEEEKAHDQTRRMEEQATKSSNLIDLYSLDLELEMGPEAR

SEQ ID NO: 19934 - protein, 888 aa, Vitis vinifera
MDGGLILTWLIVLPMIISLHNSEWVSAKEGFISIDCGIAPGSDYIDGETEIYYTSDTRFIDTGINYDVSPEYIFEDTDQHLINVRSFPEGDRNCYTLQPAQGKNHKYLIRASFMYGNYDSKNQPPIFKLYLGVDEWATVRIEKAIEISMAEIIHIPITDDIDVCLVNTGLGTPFISVLELRQLNDSIYSPPEPGSLLLRGRFDFGTQQDLYAIRDKDDVYDRIWEPANSESISSPLVNSSFSTSDYKLPGIVMATAATPADENEPLGFSFLIAGHPSQKLYVYMHFAEVEDLKGQIREFTISVNDDESFGGPVAPRYLLSDTVYSKYSLNGSINRLSFSLKRTNRSTLPPIINAMEVYRLKEFSQSSTQQNDVDAIKRIKSGYAVSSNWQGDPCLPMKYQWDGLTCSQDTSPSIISLNLSSSNLSGNILTSFSSLRSLQNLDLSYNNLTGPVPEFFADLPSLKTLNLTGNNLTGSVPQAVIDKFKDGTLSLGENPNLCQSDSCQRKKKKENKFLVPVLISVLSVIILILIAALAIIRKLTKRRETRGIFFLSFSFSFWSLKSGNSEFTFSDVATITNYFSRTIGRGGFGQVYLGTLTDGTQVAVKMRSQSSIQSPKALQAEAKLLTRVHHKNLVRLIGYCKDGTHMALIYEYMSNGNLQNKLLGREAADVLNWKQRLQIAVDAAHGLEYLHNGCKPPIVHRDMKSSNILLTETLQAKVADFGMSRDLAIESGAFISTVPAGTPGYLDPEYQSTGILNKKSDVYSFGIVLLELITGQPAIKNPGNIHIVGWVSPMIKRGDMRSIVDPRLQGAFNANSAWKALELALACVALTGMQRPDMSHVLEDLKECLEMEVTSRRIQSVGSHSIGSGNSLDDLPLILGTQLGPRAR

SEQ ID NO: 19935 - protein, 866 aa, Vitis vinifera
FVGFISIDCGIAPGSYYIDSETEIYYTSDAGFTDTGINYNVSQEYVYQDTNQHLKNVRSFPEGDKNCYTLWPGQGKNHKYLIRARFLYGNYDSKNQLPIFKLYLGVDEWTTVNIRNATSIYRKEIIHIPITDYIDVCLVNAGWGTPFISVLELRQLNDSIYSPTEPGSLILYNRWDFGTQQEEWKLIREKDDVYDRIWKPLTRSSWLSINSSLVSSSFSTSDYKLPGIVMATAATPANESESWRISLGIDDDPSQKLYMYMHFAEVEDLKGQIREFTISVNDDESYAGPLTPGYLFSVTVYSKYSVSGSTTNKLSFSLERTNRSTLPPIINAMEVYMIKEFAQSSTQQNDVDAIKTVKSGYAVSRNWQGDPCLPMEYQWDGLTCSHNTSPAIISLNLSSSNLSGNILTSFLSLKSLQNLDLSYNNLTGPVPDFFADFPSLKTLNLTGNNLTGSVPQAVTDKFKDGTLSFGENPNLCPSVSCQGQKKKKKKKNKFFVPVLTSILSAIVILVLIAALAIIRKLTKRRETKATTIETVTERPKEGPLKSGNCEFTYSEVVGITNNFNRPIGRGGFGEVYLGTLADDTQVAVKVHSPSSNQGPKAFRAEAKLLTRVHHKNLVRLIGYCDDSTNMVLIYEYMSNGNLQQKLSAREAADVLNWKQRLQIAVDAAHGLEYLHNGCKPPIVHRDMKSSNILLTESLQAKIADFGMSRDLQSLSTDPVGTPGYFDPECQSTGNLNEKSDVYSFGIVLLELITGRRAIIPGGIHIAGWVSPMIERGDIRSIVDPRLQGDFNTNSAWKAVEIALACVASTGMQRPDMSHVVVDLKECLETEMASRRIQRVGGHSIGSGNFLENVPLVLSTEVAPHAR

SEQ ID NO: 19936 - protein, 906 aa, Vitis vinifera
MDGGLTLTWLIVLLVIISLHNSRWVSGTFHENQSSRRKLTAKEGFISIDCGIAPGSYYTDSETEIYYTSDAGFTDTGINYNVSEEYVYQNNDQHLKNVRSFPEGDRNCYTLWPGQGKNHKYLIRARFLYGNYDSKNQLPIFKLYLGVDEWTTVNIRNVTSTYRKEIIHIPITDYIDVCLVNIGSGTPFISVLELKRLNDSIYSPAEPGSLILYDRWDFGTQQEEWKLIREKDDVYDRIWKPNTWWSWLSINSSVVSSSFSTSDYKLPGIVMATAAKPANESESWGISLSIDDDPSQKLYMYMHFAEVEDHKGQIREFTVSVNDEPFSGPVAPRLLFSDTVSSKYSISGSTTKKLSFSLERTNRSTLPPIINAMEAYMIKEFPQSSTQQNDVDAIKRIKSDYAVGRNWQGDPCLPMEYQWDGLTCSHNTSPTVISLNLSSSNLSGNILTSFLSLKSLQTLLDLSYNNLTGPVPEFFADWPSLKTLNLTGNNLTGSVPQAVTDKFKDGTLSLGENPNLCPTVSCQGQKKKKKKNKFFVPVLTSILSAIVILVLIAALAIIRKLTKRRETKATTIETVTERPKEGPLKSGNCEFTYSEVVGITNNFNRPIGRGGFGEVYLGTLADDTQVAVKVHSPSSNQGPKAFRAEAKLLTRVHHKNLVRLIGYCDDSTNMVLIYEYMSNGNLQQKLSAREAADVLNWKQRLQIAVDAAHGLEYLHNGCKPPIVHRDMKSSNILLTESLQAKIADFGMSRDLQSLSTDPVGTPGYFDPECQSTGNLNEKSDVYSFGIVLLELITGRRAIIPGGIHIAGWVSPMIERGDIRSIVDPRLQGDFNTNSAWKAVEIALACVASTGMQRPDMSHVVVDLKECLEREVASRRIQRVGGHSIGSGNFLENVPLVLSTEVAPHAR

SEQ ID NO: 19937 - protein, 871 aa, Vitis vinifera
MLSLLSLAFIHLRLSQDPVGFISIDCGIAPGSYYTDDKTQIPYTSDADFTDTGINYNVSRSENPSKQLMNVRSFPEGARNCYTLEPEKGKGNKYLIRAFFMYGNYDSKNQLPVFKLHLGVDEWDTINFNNSSQTVRKEIIHVPKTDYIDVCLVNNGSGTPFISALELRPLGNSSYNKTESGSLLLFNRWDIGSEQEKLQVRYKDDALDRIWNSYMSTSWESITAGFESYSYSETRFKLPGIIMSTAATPKNESEPLRFFLDMDDPSQRFYLYMHFSEVLQLQGNQSRVFTIWLNGNLWSDAVAPERLTSTTIFSTNSVRGSRLSFSLQKTGESMLPPIINALEVYVIKEFSQSTTDQEDVEAIKKIKSVYMVRRNWQGDPCLPMDYQWDGLKCSDNGSPTLISLNLSYSNLTGKIHPSFSNLKSLQNLDLSYNNLTGSVPEFLAELSSLTFLNLEGNNLTGSVPQALMEKYQNGTLSLSLRENPNLCLSVSCKGKQNKNFIVPVLASIISVLVLFLLIAVGIIWNFKRKEDTAMEMVTKEGSLKSGNSEFTYSELVAITRNFTSTIGQGGFGNVHLGTLVDGTQVAVKLRSQSSMQGSKEFRAEAKLLMRVHHKNLVRLVGYCNDGTNMALIYEYMSNGNLRQRLSGKRDTDVLHWKERLQIAVDAAQGLEYLHNGCKPPIIHRDLKTSNILLNEKLQAKIADFGLSRDLATESGPPVSTVPAGTPGYLDPEYYSSGNLNKRSDVYSFGIVLLELITGQPAIITPGNIHIVQWISPMIERGDIQNVVDPRLQGDFNTNSAWKALETALACVPSTAIQRPDMSHVLADLKDCLEIEVGAMRTQRIDSYKMGSSNTLKSCAVDLENEMAPHVR

SEQ ID NO: 19938 - protein, 1006 aa, Vitis vinifera
MSLSHICKSVKRYLGKPGSWKLRMRLYCPQKVQINSSPSFVVSLSLSSDMAHIHRPTAYPRLSGSPMHHLGYGYVSYDPYPPADPPQLQPLDMMVSYMGPSTTSVQPLAFYHFHLATQATTQDWLPENPITLPQPSLTTILLPGDLLQTPKDIFQIHIKAGHKQGFISINCGIAPGSDYTDDETQIYYTLDAKFIDTGINYNVSKEYVDEDTDQLMDVRSFPEGDRNCYALPPGQGKNHKYLIRAWFMYGNYDSKNQPLVFKLYLGVDEWATVNITNASVIIRKEIIHIPTTDDIDVCLVNAGSGTPFISVLELQQLNDSIYSPTEPGSLLLHDRWDFGTQKEKWSLIRSKDDVYDRIWRPFTKSSWESINSSVVRSSFSVSDYKLPGIVMATAATPANESEPLRISLDIDDDPSQKLYIYMHFAEVKEGVFREFTTFVNDDEAWGGTVLTTYLFSYTAESDYSMSGSTTKKLSFSLKRTNRSTLPPIINAMEVYIIKEFSQASTQQNDVDAIKGIKSEYAVSRNWQGDPCLPIKYQWDGLTCSLDISPAIITLNLSSSNLAGNILTSFSGLKSLQNLDLSYNNLTGPVPEFFADLPSLTTLNLTGNNLTGSVPQAVMDKLKDGTLSLGENPSLCQSASCQGKEKKKSRFLVPVLIAIPNVIVILILITALAMIIRKFRRRETKGTTIEKSGNSEFTYSEVVSITNNFSQTIGRGGFGQVFLGTLADGTQVAVKVHSESSIQEAKALQAEVKLLTRVHHKNLVRLIGYCDDGTNMVLIYEYMSNGNLQQKLSGREAADVLNWEERLQIAVDAAHGLEYLHNGCKPPIVHRDMKSSNILLTETLEAKIADFGMSRDLESGALLSTDPVGTPGYLDPEYQSAGLNKKSDVYSFGIVLLELLTGRPAIIPGGIYIVVWVSHMIERGDIESIVDRRLQGEFNTNSAWKAVEIALACVASTGMQRPDMSHVVVDLKECLETGVASRRIKMVGSHLEDVPVVLSTESAPHAR

SEQ ID NO: 19939 - protein, 255 aa, Vitis vinifera
MGVLVQLLFLLASTVELSPGISLEIHLLRPQLGSSGHHVPGLSCLSWRLGVETHNIIEWSTVPQACESYVGHYMLGDQYRKDSGVVVYEAITHAQSLKLAGDGKDIWVFDIDETSLSNLPYFAKHGFGVEAYNSTQFNNWIYEGKAPPLPESLKLYKKLQSLGIKPVFITGRPEAQRNVTAANLQNAGYHTWEKLILKGSSVTGTAVAYKSNERKKLEQSGYRIVGNIGDQWSDILGTNVGNRTFKLPDPMYYIS

SEQ ID NO: 19940 - protein, 255 aa, Vitis vinifera
MGGVLVIWLLLFAGAVELSLGISHEIHLLRPQLGSSGHHVPGLSCLSWRLGVEAHNIIEWSTVPQACESYVGHYMLGHQYRKDSRAVVYEALTYAQSLKLAVDGKDIWVFDVDETSPSNLPYYAKHGFRVEAYNSTQFNNWVYEGKAPALPESLKLYKKLLSLGIKAVFITGRPEAQRNVTAANLRNVGYHTWEKLILKGSSAGTIVVYKSNERKKLKKSGYRIIDNIGDQWSDILGTNTENRTFKLSNPMYYIS

SEQ ID NO: 19941 - protein, 313 aa, Vitis vinifera
MENICVLLTYPVPEYLVQKLEKRFTVFKFREVASNPQLLREISNSIRAIVGTSVCGADAGLIDALPKLEIVASYSVGFDKIDLVKCKERGITVTNTPDVLTDDVADSAIGLALATLRRMCVCDRFVRSGKWKKGDFELTTKFSGKSIGIVGLGRIGSAIAKRAEAFGSSISYHSRSEKPESNYKYYSNIIDLATNCQILFVACALTKETHHIVDRKVIDALGPKGIIINIGRGAHIDEPELVSALLEGRLAGAGLDVFEHEPEVPEELLGLENVVLQPHAGSDTVETSVAMSDLVIDNLEACFQNKPVLTPVI

SEQ ID NO: 19942 - protein, 313 aa, Vitis vinifera
MESIGVLLTCPMNPYLEQELDKRFKLFRFWDFPSANDLFREHSNSIRAVVGNSFIGADAQMIEALPKMEIVSSFSVGLDKIDLVRCKEKGIRVTNTPDVLTEDVADLALALILATLRRICESDRYVRSGSWKKGDFKLTTKFTGKSVGIIGLGRIGSAIAKRAEGFSCPISYHSRTEKPGTNYKYYPSVVELASNCQILVVACALTPETRHIINREVINALGPKGVVINIGRGLHVDEPELVSALVEGRLGGAGLDVFENEPNVPEELLAMDNVVLLPHVGSGTVETRKDMADLVLGNLEAHFLNKPLLTPVV

SEQ ID NO: 19943 - protein, 170 aa, Vitis vinifera
MARSLSNAFLKGISSFPSARFSTMVSGSIFQNGMRYSTTVPNDPDTHDDFKSTNKLESSGLALQDIVEQDVKDNPVMIYMKGVPDVPRCGFSSLAVRVLKEYNVPLSARNILEDPELKIAVKKFSHWPTFPQIFIKGEFIGGSDIILNMHQTGELKEKLKDVSAPQEKSE

SEQ ID NO: 19944 - protein, 324 aa, Vitis vinifera
MASQDEVVSMELPAPPSWKKMFMPKKGTPRKNEIVFIAPTGEEINSRKQLEQYLKSHPGNPAISEFDWGTGETPRRSARISEKAKATPPAESEPPKKRGRKSSGSKKDGKETEAATEEQEGKKEISMQDADVTEKANAESEDVSKEIQVENGVKTVAEADQVKNLDVNMEEAGPVEAIDGKDEKIQSDTGDSKVAATETEVVNAEEAQGEKEVKKQEVAEAVAVDEPAKEAGAKVTQKEGDKLETSATVELNEAVNKDKPNGLGIAPEEEVKEKQEVPDNDGKCKFQVEENGKKLEGDVTENGKVNQMQRAETPQHPAPSPVSC

SEQ ID NO: 19945 - protein, 255 aa, Vitis vinifera
MGRVALLLFLFALTVELSLGISHEIHLLRPRLASGVHPASGLSCPSWRLAVETNNIINWETVPQACESYVGHYMLGHQYRQDSRVVVYEAIAYAESLKLGGDGKDVWVFDIDETTLSNLPYYAENGFGAEVFNETSFNEWVMKGEAPALPESLKLYNKLVSLGIKVVFLTGKGEDERNVTVANLKKVGYHTWEKLILRKSSDGSTALVYKSNQRKKVEESGYKIVGNMGDQWSDILGTNTGNRTFKLPDPMYYIA

SEQ ID NO: 19946 - protein, 624 aa, Vitis vinifera
MASVSAKIISSTAAAVATATGGNTTTTRSSCLPVFRRGPATPLPLKLSRRRRHHVRHITNVFKTVESPAAPPTLDPVRQVQKPTILVSEKLGEAGLEVLREFGEVECSYDLSQEDLCKKISLCDALIVRSGTKVTRAVFEAAKGRLKVVGRAGVGIDNVDLQAATEFGCLVVNAPTANTIAAAEHGIALLAAMARNVAQADASMKAGKWQRNKYVGVSLVGKTLAVMGFGKVGSEVARRAKGLGMHVIAHDPYAPADRARAAGVDLVSFDLAISTADFISLHMPLTPTTKKIFNDETFAKVKKGVRIINVARGGVIDEDALVRALDSGAVAQAALDVFTEEPPPKDSKLVQHENVTVTPHLGASTKEAQEGVAIEIAEAVVGALRGELSATAVNAPMVPPEVISELSPYVVLAEKLGRLAVQLVAGGSGIKSVKVVYKTARDPDDLDTRLLRAMVTKGIIEPISSSFINLVNADFTAKQKGLRISEERVSIDSSPENPVESIQVQISNVDSKFASAVSENEYISIEGKVKDGIPRLTCVGSFSVDVSLEGNLILCRQVDQPGMIGRVGNILGECNVNVSFMSVGRTVKRTRAIMAIGVDEEPDKDTLKKIGEVPAIEEFVFLKL

SEQ ID NO: 19947 - protein, 260 aa, Vitis vinifera
MKGRVCELCNEEASLYCGSDSAFLCWSCDARVHGANFLVARHVRHTLCSECNGLAGDTFFGVGFQPHRLICRSCSSEVESETSTDHDSKSSSSPCVSTTESAPRKGGVSRRKAERTGFTSSVSAVSGVDSRFPSKLRARSSVDAKAEDILVNWCRKLGLNGSCTSVASHALGVCLVKLTVLPLRVSLVAAISCAAKLSGDRSAYTPQNLKRLVEISGVPAKLILAAESKLARVLKMERRRPRHVRDREEGWAECSGEEFR

SEQ ID NO: 19948 - protein, 577 aa, Vitis vinifera
MEEADWSAVTGSCSGTLGGHLARRLVQIGVRDVFSVPGDFNLTLLDHLIAEPGLNLVGCCNELNAGYAADGYARARGVGACVVTFTVGGLSVLNAIAGAYSENLPVICIVGGPNSNDYGTNRILHHTIGLPDFTQELRSFQTVTCTQAVVNHLEDAHEQIDTAISTALKESKPVYLSISCNLPGIPHPTFSREPVPFFLAPKVSNQIGLEAAVEATADFLNRAVKPVIVGGPKLRVAKAQRALMELADASGYPIAVMPSGKGLVPEQHPHFIGTYWGAVSTTFCGEIVESADAYVFAGPIFNDYSSVGYSLLIKKEKAVIVEPNRVTVGNGPSFGWVFMADFLSALAKKLKKNETAVENYRRIYVPPGVPLRREEHEALRVNVLFKHIQDMLDGNSAVIAETGDSWFNCQKLRLPENCGYEFQMQYGSIGWSVGATLGYAQGAKDKRVIACIGDGSFQVTAQDVSTMIRCGQRTIIFLINNGGYTIEVEIHDGPYNVIKNWDYTALINAIHNGEGKCWTAKVRTEDELTEAIATATGAHKDSLCFIEVFVHKDDTSKELLEWGSRVSAANGRPPNPQ

SEQ ID NO: 19949 - protein, 129 aa, Vitis vinifera
MQMKESGMIEEQLGMDGEAHEKPETTYEAVRRLGSSNAVVVFSLSGCCMCHVMKQLLFGLGVGPTIVELDKEKYGSEMQSVLYQLAGGQHSVPAVFVGGKFLGGIETLMSCHINGTLVPLLKAAGALWL

SEQ ID NO: 19950 - protein, 606 aa, Vitis vinifera
MGVEPSEGVRRRGCSCSKDDFLPEESFKTWGNYGRALAEIPARLKDRLLTRSLDTTEMNEIKARSAHEMKKTLTWWDLMWFGIGAVIGAGIFVLTGIQARDVAGPAVVLSYVVSGISAMLSVFCYTEFAVEIPVAGGSFAYLRVELGDFMAFIAAGNILLEYVIGGAAVARSWTSYFATLCNHKPEDFRIIAHSLKEDYNQLDPIAVGVITIICLLAVFSTKGSSRFNYIASIFHVIVILFIIIAGLCKADTSNYTPFAPNGVRGIFKSSAVLFFAYIGFDAVSTMAEETKNPGRDIPIGLVGSMSITTLAYCLLAVTLCLMQKYTDIDKDAPFSVAFEAVGWNWAKYIVAAGALKGMTTVLLVSAVGQARYLTHIARTHMMPPWLAHVNSRTGTPVNATIVMLVATAIIAFFTDLGILSNLLSISTLFIFMLVAVGLLVRRYYVSNVTTPTNRNKLIVCLVLIIGSSIATATYWGLSETGWVGYVVTVPIWLLATVALWAFVPKAREPKLWGVPLVPWLPSASIAINIFLLGSIDKASFERFGIWTAVLMVYYFFFGLHASYDTAKESAKVTHETTQYKKVEEGAVTPSVDSSTGVNASNASTNP

SEQ ID NO: 19951 - protein, 589 aa, Vitis vinifera
MGNTSEGGGVARKRGCGWTKEDFLPEESFQSWGTYVKALGNTTARLKDRVLTRSLDEVELHAVRDRSKNEMKKTLNWWDLLWFGIGAVMGSGIFVLTGEAANEYAGPAVVLSYFISGVSAILSVLCYTEFAVELPVAGGSFAYLRVELGDFVAYVAAGNILFEYVVAGAGVARSWTSYFATLCNHDPNDFRFYASSLAEGYNRLDPIAVAVSIVVCVLASLSMKGSSRFNSIASIVHMVIIAFMLVAGLTKADSANFKDFAPFGLRGILKASSMLFFAYVGFDGTTTLGEEIKKPARDIPIGLIGSMSLVMIVYCLLAATLVLMQPYAQIDVDAPYSVAFSAVGMDWAKYIVAFGALKGMTTVLLANIIGQARYFTHIGRTHMAPPFLATINKKTGTPVNATVFMTIANSVIAFFTSLDVLANLLSISTLFIFSLVALALLVRRYYVSGETSDSDRNKFIGFLVLILGSSISMAVYWAVSQHGWIGYIVGGAVWFLATLGLHVTMKQGRKPKIWGAPIVPWLPSASIAINVFILGSMDGSSFARFAVWTGILLVYYLFVGLHASYDAAKVAQKEVQVSQATSMEAGIAS

SEQ ID NO: 19952 - protein, 621 aa, Vitis vinifera
MLVFRISRFELMLVFSVLIFLSIGVESKCSRGCDLALASYNIWNGTTLSFIATAFSTSISEIQSFNPQINDIDLIIVDTRLNIPFSCSCIDGEFLGHTFFYSVDSNDTYNIIARTFYANLTTVEWLERFNRYEATEIPVNAIINVTVNCSCGNSRVSKKYGLFVTYPLQPGESLSSIANESGLPSKLLQDYNPGVDFSLGSGLVFIPGKDQNGSYPPLKLSQNGISVGVIAGISVAGVAGSLLLAFVLYVGIYKRKMGKAPLLPAAFEDQHMQPGQGYGSTLEKTSDSVALVAAVSLELVGITADKSVEFTYEELAKATNNFSAASKIGQGGFALVYYAELQGQKAAIKKMDMQASKEFLAELKVLTHVHHFNLVRLIGYCVTGSLFIVYEYIENGNLSQHLRGSGNDPLPWSTRVQIALDAARGLEYIHEHTVPVYVHRDIKSANILIDKNLRAKVADFGLTKLTVAGSSSLPTRLVGTFGYMPPEYAQFGAVTPKIDVYAFGVVLYELISAKEAIIKTNGSTTTEARGLVALFENVLSWPDLREDFCELIDHRLGNDYPLDLIWKMAQLAKACTQEDPQLRPSMQSVVVALMTLSSSTEDWDVRSVYENKALVNLMSGR

SEQ ID NO: 19953 - protein, 492 aa, Vitis vinifera
MGGSVKDVESKEELDNVVRQGAPVILHFWASWCEASKHMDQVFSHLSTDFPQAVFFRVEAEEQPVISEAYSVSAVPYFVFFKDGKTVDTMEGADPSSLANKVAKVAGSINPGEAAAPASLGMAAGPTVLETVKEFAKENGASQVESQLPSGLSDTLKIHLQKVIETQPVMLFMKGSPEEPKCGFSRKVVEILREEKVKFGSFDILLDTEVREGLKKFSNWPTFPQLYCKGELLGGCDIAIAMHESGELKEVFRDHGIETSDLNEAKETKPGSGKGGISESTGLSVTLTSRLESLINSSPVILFMKGKPDEPRCGFSRKVVEILQQEKVDFGSFDILSDDEVRQGLKVHSNWSSYPQLYIKGELIGGSDIVLEMQKSGELERVLAEKGITQKETLEDRVRNLINSSPTMLFMKGTPDAPKCGFSSKVVDALRAENVSFGSFDILTDEEVRQGLKVFSNWPTFPQLYYKGELIGGCDIIMELRNNGELKSTLSE

SEQ ID NO: 19954 - protein, 385 aa, Vitis vinifera
MGGSVKDVESKEELDNVVRQGAPVILHFWASWCEASKHMDQVFSHLSTDFPQAVFFRVEAEEQPVISEAYSVSAVPYFVFFKDGKTVDTMEGADPSSLANKVAKVAGSINPGEAAAPASLGMAAGPTVLETVKEFAKENGASQVESQLPSGLSDTLKIHLQKVIETQPVMLFMKGSPEEPKCGFSRKVVEILREEKVKFGSFDILLDTEVREGLKKFSNWPTFPQLYCKGELLGGCDIAIAMHESGELKEVFRDHGIETSDLNEAKETKPGSGKGGISESTGLSVTLTSRLESLINSSPVILFMKGKPDEPRCGFSRKVVEILQQEKVDFGSFDILSDDEVRQGLKVHSNWSSYPQLYIKGELIGGCDIIMELRNNGELKSTLSE

SEQ ID NO: 19955 - protein, 136 aa, Vitis vinifera
MENPGNLIHKAAAIVFAVMRWVLSWTLRPSTNSFSSSPSDSMVQQTPSGDLRQRLSKSCDTCAVCLNQLRKRDQVRELGNCCHVFHRLCIDTWIDHGYNKTCPLCRAPLLTSTRLGSQPSWAVERLLYLFGDDLLI

SEQ ID NO: 19956 - protein, 578 aa, Vitis vinifera
MVKIGETFGESGKKKSRRVLLGVSASLVFLLVLVVTVARVSVSPHNSQHQNWAAHPIVKSSCSATLYPELCFSAVSSREGEEAKITKPKDVIEAVLNFTITTVQHNYFTLQHIIKTRLGLSPREKAALHDCLEMVDDTLDELHKSALDLQDYSLNKSISQQADDLITLLSAAMTNQETCIDGFSHDGADKKIRKGLMDGQMQAFRLCSNVLAMIKNLTDTDMAAAASAAGRQLREEEEEATATAIEWPEWLSAGDRRLLQASTVTADVTVAADGSGNYKTVGEAVASAPERSSKRYIIRIKAGVYKENVEVPKKKTNIMFVGDGRTNTIITASRNVVDGSTTFHSATVAVVGDGFLARDITFQNTAGPSKHQAVALRVGSDLSAFYRCDVLAYQDTLYVHSLRQFFVGCLVAGTVDFIFGNAAAVLQDCDIHARRPNSGQRNMVTAQGRDDPNQNTGIVIQKCRIGATSDLKPVQSSFPTYLGRPWKEYSRTVVMQTSISDVINPAGWYPWNGNFALDTLFYAEYQNTGAGADTSKRVNWKGFKVITSASEAQAFTAGSFIGGSSWLPSTGFPFSLGL

SEQ ID NO: 19957 - protein, 529 aa, Vitis vinifera
MTSSSLRWLLFLCPIFFFSGASALNYSNASYTSLKSVTSFCKSTPYPDVCFQSLKVHVSININPNIITFLLHSLQTAISEAGKVSTLLSTAGQHSDVIEKQRGTIQDCRELHQITVSSLQRSVSRVRSGDSQKLKDARAFLSASLTNKVTCLEGLDSAAGPSKPTLVNSIVAAYKHVSNCLSVLSKSTPQKGPINRRLMGAPAWASRRILQSSGDEYDPSEVLTVAADGTGNFTTVTDAINFAPNNSNDRIIIYVREGVYEENVDIPSHKTNIVFLGDGSDVTFITGSRSVVDGWTTFRSATVGNGFLARDITFENRAGPEKHQAVALRINADLAAVYKCTILGYQDTLYVHSFRQFYRECDIFGTIDFIFGNAAVVFQACNIVARMPMAGQFTVVTAQSRDTSDEDTGISIQNCSISATDDLYSNRGSVKSYLGRPWKVYARTVYLESYIDDFIDPSGWTEWNGNEGLDTLYYGEYDNNGPGSGTENRVTWQGYHVMEDNDAYNFTVSEFITGDEWLDSTYFPYDDGI

SEQ ID NO: 19958 - protein, 189 aa, Vitis vinifera
MMALPPLFAVVFVLATLSSTFAEDLVHSSCIHASYPNICLRTLSSYSGPAKTPRDLAQAAVKVSLSRAQRVSTYLNGVAGQGKASKREQVALSDCVEQISDTVEELSNTLKELKHLRPGTFRWQMSNAETWVSAALTNEDTCLDGFQGVDGKVKADVKRKITNVARVTSNALYLINRLDSTRGRAGLEP

SEQ ID NO: 19959 - protein, 508 aa, Vitis vinifera
MEAPCVVLALVWLAAAALLSKLFSFRPPHKQNLPPGPKPWPIIGNLNLIGHLPHLSLHKLSQKYGQIMQLQFGSFPVVVASSPEMAKQFLKTNDHLFASRPQTAAGKYTAYNYSNITWAPYGPYWRQGRKIYHTELFSWKRLESYEYIQVEERRAFISRLYALSGKPVMLKEHLSRVTLSVISRIVLGEKYFNESESGRSIVTVKEFQEMLDELFLLNGVLNIGDWIPWIAFLDLQGYVKRMKVLRDKFDRFHDHVLEKHRARREVGDFVVKDMVDMLLRLADDPDLQVKLTTDGIKGFTQDLIAGGTDTSATTLEWAMSEVLRQPNIANKATEELDRVIGRNRWVEEKDIPQLPYIDAIVKETMRLHPVAVLLAPHLALHDCNVAGYDIRKGTRVLINTWSIGRDPNLWDAPEEFRPERFLGKAIDVKGQNFELLPFGSGRRMCPGYSLGLKMIRSSLANMLHGFHWKLPGDMKAEELNMEEVFGLATPRKVPLVAVMEPRLPSHLY

SEQ ID NO: 19960 - protein, 509 aa, Vitis vinifera
MEAPSWVVLALAWLASVALLSKVFSFRPPHKQNLPPGPTPWPIIGNLNLIGHLPHRSLHKLSQKYGQIMELRFGSFPVVVASSSEMAKQFLKTNDHLFASRPHTAAGKYITYNYSNITWAPYGPYWRQGRKIFLTELFSSKRLASYEYIRVEERQAFISRLYALSGKPVMLKEHLSRVTLGVISRIVLGEKYFSEFESGRSMLTVEECQKMLGELFLLNGVLNIGDWIPWIAFLDLQGYVKRMKALRDKFDRFYDHVLEKHRARREAEDFVAKDMVDMLLRLADDPDVEVKLTTDGIKGFTQDLIAGGTDTSATTLEWAMSEVLRQPNIAKKATEELDRVIGRDRWVEEKDIAQLPYIDAIVKETMRLHPIVVLLAPHLALQDCNVAGYDIRRGTRVLVNTWSIGRDPNIWDAPEEFRPERFLGKAIDVKGQSFELLPFGSGRRMCPGYSLGLKMIQSSLANMLHGFHWKLPWDMKTEELNMEEVFGLTTPRKVPLVAVMEPRLQNHLY

SEQ ID NO: 19961 - protein, 466 aa, Vitis vinifera
MGNLNLIGHLPHRSLHKLSQKYGQIMELRFGSFPVVVASSSEMEKQFLKTNDHLFASRPHTAAGKYTNYNYSNITWAPYGPYWRQGRKIFLTEMFSSKRLESYEYIRVEERQAFISRLYALSGKPVMLKEHLSRVTLSVISRIVLGEKYFSEFESGRSMVTVEECQKMLVELLLLNGVLNIGDWIPWIAFLDLQGYVKRMKALRHKFDRFYDHVLEKHRARREAEDFVAKDMVDMLLRLADDPDIEVKLTTDGIKGFTQDLIAGGTDTSATTLEWAMSEVLRQPNIANKATEELDRVIGRNRWVEEKDIPQLPYIDAIVKETMRLHPVAVLLAPHLALQDCHVAGYDIRKGTRVLINTWSIGRDPNLWDAPEEFFPERFLGKAIDVKGQNFELLPFGSGRRMCPGYSLALKMIGSSLANMLHGFHWKLPGDMKPEELNIEEVFGLTTPRKVPLVAFMEPRLPSHLY

SEQ ID NO: 19962 - protein, 509 aa, Vitis vinifera
MEAPSCVVLALVWLAAAALLSKLFSFRPAHKQNLPPGPKPWRIIGNLNLIGHLPHLSLHKLSQKYGQIMQLQFGSFPVVVASSPEMARQFLKTNDHLFASRPQTAAGKYTAYNYSNITWAPYGPCWRQGRKIFHTELFSWKRLESCEYIRVEERRAFVSRLYALSGKPVMLKDHLSRVTLSVISRIVLGEKYFNESESGRSIVTVEEFQEMLDELFLLNGVLNIGDWIPWIAFLDLQGYVKRMKALRDKFDRLFDHVIEKHRARREAADFVAKDMVDMLLRLADDPDLEVKLGTDGVKGLTLDLLAGGTDTSATTMEWAMSEILRQPSIATKATEELDRVIGRDRWVEEKDIPQLPYIDAIVKETMRLHPVAVLLAPHLALQDCNVSGYDIRKGTRVLVNAWSIGRDPNIWDAPEEFRPERFLGKAIDVNGQNFELLPFGSGRRMCVGYRLGLKMIQSSLSNMLHGFHWKLPGDMKTEELNMEEVFGLTTPRKVPLVAVMEPRLPSHLY

SEQ ID NO: 19963 - protein, 353 aa, Vitis vinifera
MAIRIGNLPKRSFDQSSVHSMPHFTVNCQAWWNSNEQQLPESFSKNLSLKVESPPQLYQNMKQLGLQLQDQDSSSSQSTGQSHQEVSAIGRTNSQDQCISSESVHGESCEKRVEGQSQMKPVFFMANPDVVFNPSQVDYGHSVPLQTHVAYPYADPYHGGLVAAYGPHAVIQPQLVGIAPTRVPLPFDIAEDGPIFVNAKQYHGILRRRQSRAKMEAQNKLVKARKPYLHESRHLHALNRVRGSGGRFLSTKKLQEPDSTSNAGCHSVSGSGHFHQKGDTTEYEVHQSDTGKFVASTTSSSDVTSVSNSDVLFRQPEHRFSGMSPHMGGAMQGGGGGTYGQWSPAPGCPVRSR

SEQ ID NO: 19964 - protein, 309 aa, Vitis vinifera
MTPNYLNSPPPPPFPLQLNEDQHHQLLFSPKPQPSSSSSSSLTCPIFFSPTKEQGGCHYRDLHQAQPQQEAHDKFVFRGGSYDHPTLESESDNGLKLTIWKTEDRNENHSENGSVKWMSSKMRVMQKMMISDQTGAQKPSNTALNFGDHKQQSLPSETDYNSINSSNINSNNTIRVCADCNTTKTPLWRSGPRGPKSLCNACGIRQRKARRAMAAAAATANGTILPTNTAPTKTKAKHKDKKSSNGHVSHYKKRCKLAAAPSCETKKLCFEDFTISLSKNSAFHRVFLQDEIKEAAILLMALSCGLVHG

SEQ ID NO: 19965 - protein, 388 aa, Vitis vinifera
MMIGESRHPNPTVLVPPWPHFDDPTVDISFPYPVSGVSVNSNANANGLQGGEHSPFLLGEALTALQRYLPSNDVDVDSDSDISGREADIPVDAYSCDHFRMFEFKVRRCARGRSHDWTECPYAHPGEKARRRDPRKFHYSGTACPDFRKGNCKKGDSCEFAHGVFECWLHPARYRTQPCKDGPNCRRRVCFFAHTAEQLRVLPQQSPRTPGSVESYDGSPLRQALEASCAKTLPFMSSPGSVSPPGSPPPESPPMSPITSSLSRSLGSNSINEMVASLRQLQLSKVKSAPSSWCVHMGSPGGFGSPRASIIRPGFCSLPSTPTRAPKRHGLGFVDLFEEEPAMERVESGRDLRAKMFEKLSKENSLDRPDPSASGAGPDVGWVSELVK

SEQ ID NO: 19966 - protein, 446 aa, Vitis vinifera
MKKVTRKVGKYEVGRTIGEGTFAKVKFAHNTETGESVAMKVMAKSTILKHRMVDQIKQEISIMKIVRHPNIVRLHEVLASQTTIYIILEFVTGGELYDKIVHQGRLSENESRRYFQQLIDAVSHCHSKGVYHRDLKPENLLLDSNGNLKVSDFGLSALPKQGVGLLHTTCGTPNYVAPEVLSNQGYDGAAADVWSCGVILYVLMAGYLPFNEIDLPSLYKKINAAEFSCPFWFSSGSKSLLCRILDSNPKTRIRIEGIKNDPWFRKNYVSSKCREDEEVNLDDIHAVFDDIEENYVSEQSGNNDTGPLIMNAFEMITLSQGLNLSALFDRRQDYVKRQTRFVSREPAKVIISTIEAVAESMNFKVHTRHYKTRLEGISANKTAQFAVVLEVFEVAPSLFMVDVRKAAGDTLEYHKFYKNFCAKLEHIIWKPKEAMTNSSLLRTMTC

SEQ ID NO: 19967 - protein, 311 aa, Vitis vinifera
MASSVEKDEVVSLELPAPPGWKKKFMPKRGLTPKKNEIIFTSPTGEEINSKRQLEQYLKSHPGGPAIQEFDWGTGETPRRSARISEKAKATPPRELEPAKKRSRKSSASKKDNKETETIPDETETKEVHMQEAKKTEDNAEAEIQKDVVNENLIETKDKAEDVNTKTEEAPPEGTQVEQDVKIPDDAEEGKKNAEKEPGEKGGDSEVAQNEKESTEGTEVQENVDEALVKADKDDGPGEHDKPDAVIADEKKPEVEGVEKEKENRSALESEGEIKEKESANGNNVEQHSLKDSEISKKVEEGIENGSQAKP

SEQ ID NO: 19968 - protein, 411 aa, Vitis vinifera
MYDHFIEDDPFGGTMLSNCMDPDFKPTISEAHPETMDFLSRAWCNFAVQAIQPELQDQSVVILDNPIKKFGNDTKAPFPKMDNSVKMDDAGIKSPPPWKTNDVKSWIWMQQAMHPELNYNSYFRKKWISWKIMPLGSNISIKKWFKDIKLKRKEEDRLQRAEVYAAISVAGVAAALAAIAAENPKQDHSNATKESAVASAAALVAAQCAQVAEAMGAKREQLSTVMCSAMSGTSASDILTLTAAAATSLKGAATLKGRAGYKNRLNGSAPVLPIEESNELDSDLEKHRSMLAKGAQLTFHTSDGRCLLRSVSIILNSQAKVILKIRKLNLMNTFSRKKESIIQDLHAELYDDSEADERNTCYLIVLTTNCGTIKLDMGDDYHLYKIWATTVNHMLTFSTSFTRYELQFYKS

SEQ ID NO: 19969 - protein, 722 aa, Vitis vinifera
MNLSSSMLWHKRLGHISRQRLERLVKDGVLSNLDFSDFETCVVCLKGKTTAKTRKEKIDRCGSTLDLIHTDICGPLTPTTLRGYKYFITFIDDFSKFGYVELIHEKSDSLNVFKAFKAKVELQLGKPIKAVKSDRGGEYYGRYDETGRNPGPFAKFLLECSINARYTMSDTPQQNGVAERRNRTLLDMVRIIESDRAIYFEDEVNADPNFVPREIPFGEEHVVIPFPTSHVPNVDVPIVQQPATNQGEHGDQVEFGLPVDDTVVNEEHEYDGYDVFDPITYQEAIHCPQFTSWKEAMDDEMNSMYMNGVWDLVELPHGCKPVGCKWLSNCMEPDFKPTISEAHPETMDFLSPAWCNFAVQAIQPELQDQSLVILDNPIKKFGYDTKAPFPKMDQSVKVDDAGIKSPPAWKPNDVKSWIWMQQAMHPELNYNSYFRKKWLSWKIMPFGSSVSIKKWFKDIKLKRKEEGRLQRAEVHAAISVAGVAAALAAIAAESSKQDQSNATKESAVASAAALVAAQCAQVAEAMGAKREHLSTVMSSAMSGTSASDILTLTAAAATSLKGAATLKARAGYKNRLNGSAPVLPIEESNEPDSDLEKHRTMLAKGAQLTIHTSDGRCLLRSVSIILNSQAKVILKIRKLNLMNTFSSKKESIIQDLHAELYDDSEADETNTCYLIVLTTNHGTIKLDMGDDYHLYKIWATTVNHMLTLSTSFTRYELQFYKT

SEQ ID NO: 19970 - protein, 140 aa, Vitis vinifera
MAVKMKCGITLTLFVLTASLCLPSSAAADHSSSDAAADFVKKTISSHKIAIFSKSYCPYCKRAKAVFKELNQVPYVVELDQREDGWNIQDALSGMVGRRTVPQVFINGKHIGGSDDTVEAYQSGDLAKLLGIAEEDSDDL

SEQ ID NO: 19971 - protein, 856 aa, Vitis vinifera
MTNLSESAQDKSNSSRGLNAGVVSSQSSRLLIGNRTVFSGDTSDNLRCLFRKSESQQVRPSCADLNDNPLGFSGACEDEMEEGHTVRGVERGHVSLRRWLDKPNRSVDLLECLHIFRQIVEIVNLAHSQGVVVHNVRPSCFVMSSSNRVSFIESASCSSSGSDSYENDFNQHSLPSPQNLQKQQSRKIEAEERKKTFPLELILPMEISWYCSPEEDEGAPSSFCSDVYRLGVLLFELFCTFSLTEEKFSTMSNLKHRVLPPHLLLKWPKEASFCLWLLHPQPSTRPKLSEVLHSEFLNEPRDHLEEREALIKLTEDIEEQEVLLEFLLQVQQRKLVAADKLHGALSCLSSDIGEVMEQQMILNKKGGSFLKLKRDELSVFDKVDYPSQCLAGKGSASLGLRKRIRQGHDPHCVEDWSEHLDEVQKSETQSGNQEAILSKGSRLMKNFKKLESAYFSTRCKPSKPTEKMLTSSPISSTGWGSLVITEGSSVDNLVSKAGYNEGKGSRWINPFLEGLCKYLSFSNLKVRADLKQGDLLNSPNLVCSLSFDRDREFFATAGVNKKIKIFECDMILNENRDIHYPVTEMASQSKLSCICWNGYIKNQIVSSDFEGVVQVWDVSRSQRFMEMKEHEKRVWSVDFSLADPTKLASGGDDGAVKLWNINQAILFLHLGGSIGTIKTKANVCCVQFPPDSARSLAIGSADHKVYCYDLRNTRIPLATLNGHSKTVSYVKFINSTTLVSASTDSSLKLWDLSTCTSRVLDSPLQTFTGHMNVKNFVGLSISDGYIATGSETNEVFIYHKAFPMPVLSFKFSTMDPLSGQNVDDGQQFVSTVCWRGQSTTLLAANSAGHIKLLEMV

SEQ ID NO: 19972 - protein, 303 aa, Vitis vinifera
MPGVAARLPVTPWSSDDTLKFSGDSESLGDMVFGFLGEDSSGSSCNSGGGWVHGEDCGDGADGEEGFDNVEGSKAFWEEQDQLVQAILCRTSSIESKIRQVTKEALRELKLKETYCVCRRRVAGVCQNCAEKEVWGQLQTAGYNSAICKSKWKSSPDIPSGEHSYMEVVDRSSAKKGEVRVVIELNFRAEFEMARASAEYNLLVSRLPEVFVGKSERLKALIKILCHAAKKCMKEKKMHMGPWRKHKYMQAKWFGTCERTAPAPMSPVDFPGRLPRQRVSMLTFDLLENLPAAGLNFKAVEVV

SEQ ID NO: 19973 - protein, 211 aa, Vitis vinifera
MALKEKVKEGVKAKEPHFRGVRKRPWGRYAAEIRDPTKKSRVWLGTFDTAEEAAQAYDAAAREFRGSKAKTNFPLPNEVLPFPNTDNLTRSPSPSSTVESSSPHAPLELDLTRRLGSSDGGFPFHYQPHVVNSAAVAGVWPHARPVLFLDAFVGAEGFRVNPVTVAYDGGFGSPVQSESDSSSVVDSVQHESSGATRVLGLDLNFPPPLEA

SEQ ID NO: 19974 - protein, 317 aa, Vitis vinifera
MASFTNSFVVFSIISLLACSINGQLSPNFYASTCPNVQNIVRVAMRQAVIREPRMGASILRLFFHDCFVNGCDASILLDDTATFTGEKNALPNQNSVRGFEVIDTIKTRVEAACNATVSCADILALAARDGVVQLGGPSWTVPLGRRDARTASQSAANNEIPSPLASLSALISGFAAKGLNARDMTALSGSHTIGQAQCFTFRSRIYNDTNIDPNFAATRRSTCPVSGGNSNLAPLDIRTMNRFDNIYYQNLMTRRGLLHSDQELFNGGSQDALVRTYNANNALFFRDFAAAMVKMSNISPLTGTNGEIRSNCRVVN

SEQ ID NO: 19975 - protein, 317 aa, Vitis vinifera
MASFTNSFVVFSIISVLACSINAQLSPNFYASTCPNVQKIVRVEMVQAVIREPRMGASILRLFFHDCFVNGCDASILLDDTATFTGEKNALPNQNSVRGFEVIDTIKTRVEAACKATVSCADILALAARDGVVLLGGPSWTVPLGRRDARTANQSAANNDLPAPFANLSALISGFAAKGLNADDMTALSGSHTIGQAQCFTFRSRIYNDTNIDPNFAATRRSTCPVSGGNSNLAPLDIQTMNKFDNNYYQNLMTQRGLLHSDQELFNGGSQDALVRTYSANNALFFGDFAAAMVKMSNISPLTGTNGEIRSNCRVVN

SEQ ID NO: 19976 - protein, 531 aa, Vitis vinifera
MNHPLLPDWNIEGDVPVTNQKKPMGQEHELVELLWRNGQVVLHSQTQRKSGLAPNESKQVQKHDQTMLRNGGSCGNWSNLIQDEESISWIQYPLDDSLDKEFCSNLFMELPPNDPVQPEKPVRHSEQEKSVPSSQQPIFKHLGSPEFPGNPMPPPKFQVPGSVQQNCSSGGFGKIVNFPNFSFPGRSNLGSSKAQLGGKGSGNMAQGGDAKEGSVMTVGLSHCGSNQVVNEADLSRFSSSGVGTGCLSSGHVKENVMRIVSQGDRRQTETLEPTVTSSSGGGSGSSFGRTYKQSTDTNSHKRKGREAEESECQSEAAEHESAARNKASQRSGSTRRSRAAEVHNLSERRRRDRINEKMKALQELIPHSNKSDKASMLDEAIEYLKSLQLQLQLMWMGGGVAPMMFPGVQHYMARMGMGMCPPPLPSIHNPMHLPRVQLVDQSTSAVPPSNQPPICQTPVLNPVNYQNQMPNPNFPEQFAHYMGFHPMQTPSQPMNVFSFGSQSHPMASPATTGGTPTAAAAVDGAPGSKLG

SEQ ID NO: 19977 - protein, 624 aa, Vitis vinifera
MKQKVGLGFFVLLSVFCAVDSQCSRGCDLALGSYYVWQGSNLTFISQLFQTTISEILSYNSQIANQDSVEADTRIRVPYSSCDCINGEFLGKVFNYTVQSGDTYDLVAETYYSNLTTSAWLQNFNSYAANQIPDTDAYLNVTLNCSCGNSTVSKDYGLFLSYPLRPEDNLTSVAESEGLNASLLQSYNPDSNFSAGSGLVYIPTKDTSGSYRALKSSTGDFLFSAYWFGLAGGVIAGISIAAVVGVLLLTVCIYIGFYRKRKVKEAALLPTEEHSLQPGHGPGIASDKAVESTGPAFGSSAGLTGITVDKSVEFSYEELAKASDNFNLANKIGQGGFGSVYYAELRGEKAAIKKMDMQASREFLAELKVLTHVHHLNLVRLIGYCVEGSLFLVYEYIENGNLSQHLRGSGRDPLQWSSRVQIALDSARGLEYIHEHTVPVYIHRDIKSANILIDKNFHGKVADFGLTKLTEVGSSSLPTRLVGTFGYMPPEYAQYGDVSPKVDVYAFGVVLYELISAKEAVVKDNGSVAESKGLVALFEDVLNKPDPREDLRKLVDPRLEDNYPLDSVRKMAQLAKACTQENPQLRPSMRTIVVALMTLSSSTEDWDVGSFYDNQALVNLMSGR

SEQ ID NO: 19978 - protein, 101 aa, Vitis vinifera
MSGVANPSSQDEDKKPNDQSGHINLKVKGQDGNEVFFRIKRSTQLKKLMNAYCDRQSVDLNSIAFLFDGRRLRGEQTPDELEMEDGDEIDAMLHQTGGACV

SEQ ID NO: 19979 - protein, 787 aa, Vitis vinifera
MGGKRSAIDCLNLEIYAQTFVGFVLIFAAQVLLGYTSPGDVTAINNLYAALGSPLLPGWVSTGGDPCADAWQGVSCNGSEINSIILNGANLGGELGDSLGTFASIKVIDLSNNQIGGSIPSSLPLTLQNFFLSANQFTGSIPTSLSSLSLLTDMSLNNNLLTGEIPDAFQALVGLINLDLSSNHLSGQLPPSMENLSSLTTLRLQINQLSGTLDVLQDLPLKDLNVENNLFSGTIPDKLLSIPNFRKDGNPFGNVTAPLLAPTSPLTLPSPPPPLSGPPSSNQPPVKPADGPSATEESNSGGKGKGLSTKRIVWISITVVLVFIILVLALVLLVKWCCGERQESDWISKRNETGAYKGSRLNLRDNGSLEQQGNQIEKVPKEAVGTPKEEHQEVVRRIGVAPKPQNEQDRNVERMFTIPKQDSHEIDISGLDVMMPPPPPPPPPPPPPPPPPPLVETVIVNPIVPVEVNAEKPSMKTLNPPISARSFTIASLQQYTNSFSQENLIGSGMLGTVYRAQLPGGKLLAVKKLDKKICNQQKDDEFFDLVNSIDGIRHANVVELMGYCAEHGERLLIYEYCSDGTLHDALHSDDEFKKKLSWSARVRMALGAARALQYLHEVCRPPIVHRNFKSANVLLDDELTVRVSDCGLAPLISRCSVSQLSGRLSAYGCEAPEHESGIYTLKSDVYSFGAVMLELLTGRKSYDSKRNRGEKLLVRWAIHQLHDIDALSRMVDPSLNGEYPAKSLSRFADIISRCVQDEPEFRPQMSEVVDDLIDMIQKEASNRSNGD

SEQ ID NO: 19980 - protein, 317 aa, Vitis vinifera
MDLNPGCKDKKSIKQSMLLCCKLYISESRNHTALDSIERAARLDGETVIVNKFQDRAYNRIGYTLVSYIVHDSTGNIIYSPLQQTLLSMVEAAYEAINLELHHGAHPRLGVVDDIVFHPLARASLEEAAWFAKMAAADIGNKFQVPVFLYDAAHPMGKPLDIIRRELGYYRPNFMGNQWSGWDMPEVLSEKPDEGPTMVSRARGIVMIGARPWVSMYNIPIVSTDISAARRIARTVSARGGGLPTVQTLGLFHGEDSTEIACMLLEPNRIGADRVQNQVEMLAAQEGLDVEKGYFTDFSPEMIIEKYLKLISGAESH

SEQ ID NO: 19981 - protein, 455 aa, Vitis vinifera
MASQPPVTAGATGTAAASIQDIFDSSLNLEETHFNDGFTEGYNAGLISGKEEAKQVGLKFGFQVGEELGFYRGCVDVWNSAIEVDSTRFSSRVQKSIKQMEELLQKYPYFDPDDESAQEIMDNLRLKFRAICATLSVKLEYNGFLKSSSEEGERMLKLMLACCKVYISESRNRAALELIERAARLFPEAPIINKFEDETYNRVGYTLVSKLAPKPSSDTCALRGAVLAMVKAAFEAINLEMHCGNHPRLGVVDHICFHPLADASLKQTAGIAKSLAADIGSNLQVPTFLYGAAHEEERTLDSIRRELGYFKPNSSGNQWAGGMKSESSLLKPDVGPAQAAQAKGVVVIGSTRWVDNYNVPIFSSNIAAVRRIAKRVSGRGGGLPSVQAMALAYGENVTEVACNLLEPSRIGGDQVQLEVERHAEEEGMIAGKGYYTDFSQEKIIKRYLDFNPLCD

SEQ ID NO: 19982 - protein, 431 aa, Vitis vinifera
MEPICEFCGVVRAVVYCKSDAARLCLHCDNSVHSANALSRRHLRSLLCDKCNLQPGIYRCMDEKLCICQACDWIGNGCSAPGHRLQSLQFYMGCPSLSDFSRLWSSVLDLPSATGLKAGWGSMNSVAVDENCVSQCLEPKDNEGSLVLGCNKLNEQKPWVGASSSMPGAYSSMPPDRKFTSSYCKDQTPFLPDESNPSKGCSNFKDLGLNEGGDLCQGINMDDVAVNFENSDEMIGSSQGHSTCRYDNAGMDSRLMDKNLSVTESNGPVENALEASSLRQHNCNAFPSSCAAGSANVIEAMSGSVGCMLVNPSCSRKMGLGFPGGQVHASVSLSLSNVTGESSAADYQDCGLSPAFLAGESPWTSNLDAHCPQARDKAKMRYNEKKKTRTFGKQIRYASRKARADTRKRVRGRFVKAGEAYDYDPLTSTSN

SEQ ID NO: 19983 - protein, 365 aa, Vitis vinifera
MGYICDFCGEQRSIVYCRSDAASLCLSCDRHVHSANALSRRHSRTLLCERCNSQPAFVRCIEEKISLCQNCDWTGHGGSTTTSSHKKETINCYSGCPSSEGLSTMWPFVLDLPSTGNSTCEQGLSLMCLNETSEMNSWGPPGNSSRQDASLTVEVNDANNVDKSSILIDDLGFCEDDSLYEDFNMDEVDLNLENYEELFGVALSHSEQLFENGGIDSLFGKMDTSGADSHLQPTYSNAASADSIMSSKTEPILCFTGKQAHSSLSFSGLTGESSAGDYQDCGASPTFLMGEPPWCPPGPESSLPSTSRSSAVMRYREKKKNRKFDKRVRYASRKARADVRQRVKGRFVKAGEAYDYDPISETRSF

SEQ ID NO: 19984 - protein, 404 aa, Vitis vinifera
MAPAAAASIKPRDVCIVGVARTPMGGFLGTLSSLSATKLGSIAIEAALKRANVDASLVQEVFFGNVLSANLGQAPARQAALGAGIPNSVVCTTINKVCASGMKATMLAAQSIQLGVNDIVVSGGMESMSNVPKYLAEARKGSRFGHDSLVDGMLKDGLWDVYSDTGMGVCAELCADNHVISREEQDAYAIHSFERGIAAQDGGAFAWEIVPVEVSGGRGRPSTIVDKDEGLGKFDPVKLKKLRPSFKENGGSVTAGNASSISDGAAALVLVSGEKALQLGLSVIAKIAGYADAAQAPELFTTAPALAIPKAISNAGLEASQIDYYEINEAFAVVALANQKLLGLSPEKVNVHGGAVSLGHPLGCSGARILVTLLGVLRQKDGKYGVGGVCNGGGGASALVVELV

SEQ ID NO: 19985 - protein, 1118 aa, Vitis vinifera
MSSKSTNKTNCSRSSSARSKHGARVVAQTPIDAQLHVNFEESERHFDYSASVDFNISSSTSDVPSSTVSAYLQKMQRGNLIQPFGCMIAVDEQNLTVLAYSENAPEMLDLAPHAVPSIEQQEALAIGTDVRTLFRSSGAAALQKAANFGEVNLLNPILVHCRNSGKPFYAILHRIDVGLIIDLEPVNPADVPVTAAGALKSYKLAAKAISRLQSLPSGNISLLCDVLVKEASELTGYDRVMVYKFHEDEHGEVIAECRKPDLEPYLGLHYPATDIPQASRFLFMKNKVRMICDCLAPPVKVIQNKRLAQPLSLCGSTLRSPHGCHAQYMANMGSVASLVMSVTINEEDDDTESEQQKGRKLWGLVVCHNTSPRFVPFPLRYACEFLVQVFGVQISKEMELAAQMKEKHILQTQTVLCDMLLRDAPVGIVTQSPNVMDLVRCDGAALYYQKKFWLLGVTPTEAQIRDIVEWLLEYHSGSTGLSTDSLMEAGYPAASVLGDAVCGIAAVKINSNDFLFWFRSHTAKEIKWGGAKHDPDDKDDGRKMHPRSSFKAFLEVVKRRSLPWEDVEMDAIHSLQLILRGSLQDKSADDSKMIVNVPSVDASIKMADDLRIVTNEMVRLIETASVPILAVDAAGCINGWNNKAAELTGLIMQQAIGMPLINLVENDSADMVKKMLSMALQGIEEQNVEIKLKTFGPQENNGPVILVVNACCSRDIKDNVVGVCFVGQDITGQKMVMDKYTRIQGDYVGIVRNPSALIPPIFMMDEHGRCLEWNDAMQNLSGLKREEATDRMLLGEVFTVNNFGCQVKDHDTLTKLRILLNGAIAGQDAQKLLFGFFDQHGKYIEALLSANKRTDAEGKITGVLCFLHVASPELQHAMQVQRISEQAAADSLKKLAYIRQQIRKPLNGIMFIQNLMDSSELSQDQKKFLRTSMMCQEQLTKIVDDTDLESIEECYMELNSGEFNLGEVLEVVISQAMILSRERRVEIIYDSPAEVSSMLLYGDNLRLQQVLSDFLTNALLFTPAFEGSSVALRVIPRRECIGTKVHIVHLEFRIAHPAPGIPEDLIQQMFHHSQGVSREGLGLYINQKLVKIMNGTVQYLREAQGSSFIILIEFPLAH

SEQ ID NO: 19986 - protein, 334 aa, Vitis vinifera
MGRAPCCDKNGLKKGPWTPEEDDKLSHYIQLHGPGNWRTLPKNAGLQRCGKSCRLRWTNYLRPDIKRGRFSFEEEETIIQLHSILGNKWSAIAARLPGRTDNEIKNYWNTHIRKRLLRMGIDPVTHSPRLDLLDISSLLSSSVCSSSQLNFSNLLGIQTLVNPELLRLASTLLSLKHENPHFPQNPQIWNSQVQNQINTPPLQSNQFHATPTQEAAAMQANTEGLPSNLTNPSYQNFTPSNFDESLASLPNYGFINPSETSTFQSLENQNNDLYYNNNQGFGFDSVISTPISSPTQLNSSSTFINTGNEDERESYCSSMLKFEIPESFNISEFM

SEQ ID NO: 19987 - protein, 299 aa, Vitis vinifera
MKGCELCGCPARMYCESDQASLCWDCDAKVHGANFLVARHSRSLLCHVCRSPTPWRASGAKLGHTVSVCERCVDGCGGRKCGGAAEESEGGNDDEVGMEDDDLDEDDEYDDDDDVEDEEEEEEEDDDFGGDDEDGDNQVVPWSSTPPPPEASSSSSEESLNSFSSGNRDVPGSFTMLSLKRMRETASDLRSQDDFNRPSSQPNYASARAAAARSAADDGEAISEDALRPFKDRRIEQNRPVQPQAGSRTAEIVDSLNRLHNQDITSGSDASSIIAGICNLSKQSGAVDLDCSSSRSRRI

SEQ ID NO: 19988 - protein, 424 aa, Vitis vinifera
MSFRSIVRDVRDGFGSLSRRSFDVRLLGHSRGKSIGSFHEMHDQPLVIQNSRWANLPPELLYDIIKRLEESESTWPSRKHVVACAAVCRSWRTMCKEIVRSPEFCAKLTFPVSLKQPGPRDGTIQCFIKRDKSNLTYHLFLCLSPALLVENGKFLLSAKRNRRTTCTEYVISMDAENISRSSSTYIGKLRSNFLGTKFIIYDTQPPHTCAHIPPPGRTSKRFYSKKVSPKVPTGSYNIAHITYELNVLGTRGPRRMHCTMHSIPASSLDAGGSVPGQPELLPRALEDSFRSISFSNSLDHSVEFSSSRFSEVCGPCDDEEGKARPLVLKNKAPRWHEQLQCWCLNFRGRVTVASVKNFQLIAATQPAAGAPTPSQPAPPEHDKIILQFGKVGKDMFTMDYRYPLSAFQAFAICLSSFDTKLACE

SEQ ID NO: 19989 - protein, 321 aa, Vitis vinifera
MTLYDLLNQGTTFLGISTLQELEEQQVILISIHMSSPPFNNPHYEDNSCPSLHYADLWSLLQEIDISVPVDDHNSLDRMDPIMFEQENSAMVQYSSQEKGLVGDNPINPVAFDQENSTMVQSSKEKGQVGGKTNLKTGERNRRIKHSQAKKTLLKHIADQQGSSVLRKENHNAKERVRRMQLNASYLALRSLLPDARRSKKRWSSPRIIDRVLEYIPELENEIENLTLKKENMLSSLANEQTHQNQPSDLQVPTVSVTEVRKGEVIVQICMQREPGNVLSNLMQNVEGEGMRIMSASSLHVCDERVCYHLHIQVCILHNFM

SEQ ID NO: 19990 - protein, 321 aa, Vitis vinifera
MASPSSYMAIVTMALLILFLGSSTAQLSTDYYSQSCPKLFPTVKSAVKSAVAKEARMGASLLRLFFHDCFVNGCDGSVLLDDTSSFIGEKNAAPNANSVRGFDVVDDIKSKVETACPGVVSCADVLAIAARDSVVILGGPSWNVKLGRRDARTASQAAANNSIPPPTSNLNQLISRFQALGLSTRDLVALAGSHTIGQARCTSFRARIYNETNIDNSFAKTRQSNCPRASGSGDNNLAPLDLQTPTAFENNYYKNLIKKKGLLHSDQQLFNGGSTDSIVRKYSNSRSNFNAHFVAGMIKMGDISPLTGSNGEIRKNCRRVN

SEQ ID NO: 19991 - protein, 242 aa, Vitis vinifera
MGAIGNSCFHLAFKNPIENGVVLMKNKSSYYNTVMKGMMRNPYEYHHDLGMNYTLITDHLIVGSQPQKPEDVDHLKQEENVAYILNLQQDKDVEYWEVDLPSIIKRCKELEIRHMRRPARDFDPDSLRSGLPKAVSSLEWAISEGKGKVYVHCTAGLGRAPAVAIAYMFWFCGMDLNTAYDTLTSKRPCGPSKQAIRGATYDLAKNDPWKEPLESLPERAFEDVADWERNLIQDRVRSLRGT

SEQ ID NO: 19992 - protein, 674 aa, Vitis vinifera
MVLKKKQDYGFNGFHVSTIPRAPRSIRRRGSIKKPVEDSQICAIDLLATLAGKLLQESESSSASSNVAAGKDRLNISKDGIKQELQDDDKPLKGECLDQGSCEGIVFVSKLASQDLSPKYTVKQFPHAVHDAVLDCTSTVASPDYLDKVGCDVMVTCKSKNIFGKVPCKVERGSPDCGETCGDLENGAEIRQDAEGEESGGLTMANRCSSKDSVELCMKNPAQINSDSNVKLSLNRDSIPNASFPKHRNDVKIGIIDDDENSYRCNQHGTKIKAFRSSPCIGDQRIRKLLTSRYWKVAPKLKDCELSNTDGGIKPVFRKRKFCGTRKRYQRETTFKRRKLFERHMVVASDGGISSESVTNSPEKNMNTEMVKFSIKSFRVPELFIEVPETETIGALKRTVMEAVNSIFGGGLHVGMFLQGKKVRDDYKTLRQTGISHNDNLDTLGFALEPSPIHPSPPLHTEDPPFLLPSDTSQLLTRSPDPPTFDSGFSDATPDPSPLTNLGNQVEKIHDSVPSPTDILTDKTMPDSRALVAVPAMSLEALAVVPMNMKTNRADLVQRRTRRPFSVSEVEALVHAVEELGTGRWRDVKLRAFDNAKHRTYVDLKDKWKTLVHTARISPQQRRGEPVPQEVLDRVLSAHAYWSEHQAKQHGKHQVGTLRITGPLAERDGIGQDI

SEQ ID NO: 19993 - protein, 160 aa, Vitis vinifera
MKPPSPVAALVLRILTLISISISFIVLITNTTTLSSDYGKVKLHFKDVYSYRYMVFTLVVGFAYTLLQIAFTIYQVCMGKRLSSGDGLYQFDFYGDKVISYVLATGVGAAFGATIDLKEASSGANKFFNKGSAAASLLLLAFLFTAVSSVFSSLALPKKI

SEQ ID NO: 19994 - protein, 170 aa, Vitis vinifera
MTEPSSSTPSPVISLVLRLLTFISILISLTILTTNSATIVVNSTELKLRFKDVHAYRYMLFALVVGLPYILLQIVFGIYHVSMGKRISSSGESLLQFDFYADKVMSYILATGTGAAFGATLDLKEVFSELGSNYNKFFNKGSAAASFILFAFLFTAVSSVFSSLALPKKL

SEQ ID NO: 19995 - protein, 346 aa, Vitis vinifera
MPTKPKIEDRRIEPGGKSNPSSTVYSQPWWHGVGNNAISPAALGGSPSKSTSVEHLNSHITSNGFQLQANGRLDDGTTFNKGTQPTVALQSDGRNGQEHQHLNPTASSTLPIMSEHLEPNSQMELVGHSIVLTSYPYQDPHNVGIMTSYGPQAMVHPHLFGMHQPRMPLPLEMEEEPVYVNAKQYHGILRRRQSRAKAELEKKAIKVRKPYLHESRHQHAMRRARGCGGRFLNTKKLDNNDANTTAEKGSVSGAALSTQSASSSGSEHLPTNSSRNLDSSSVQQEEKGRTIQDMLEAHTYSNGNRNGHGLSSAYHSSNGSEGGDCFGQPRENMQLNTAPHRALPIK

SEQ ID NO: 19996 - protein, 244 aa, Vitis vinifera
MNGNRQMEVHYINTGFPYTITESFMDFFEGLGHVPVNYAQAEAMHNQENFYWTMNMNSYKFGFSGPGSTYYGPYDVNEHVPGIEVSRRPWEYPSSMIVEEPTTIETQPTGNEVMNVHAIPEECSPNHYSATSSQAIWQDNVDPDNMTYEELLDLGEAVGTQSRGLSQEHINLLPTCRYKSGRLFSRKRSAERCVICQMGYKRGDRQIKLPCKHVYHTDCGTKWLTINKVCPVCNIEVFGEESRH

SEQ ID NO: 19997 - protein, 385 aa, Vitis vinifera
MIDQPQYPTIMQKVAGHLHHSQNIQAFHGRFQQPTLQQRHSAYGNYTNAALQYPMCGATFDPLMVGSNVSPVFVPAPKEKGLAGFAIDFLMGGVSAAVSKTAAAPIERVKLLIQNQDEMIKTGRLSEPYKGIGECFSRTIKDEGFMSLWRGNTANVIRYFPTQALNFAFKDYFKRLFNFKKDRDGYWKWFAGNLASGGAAGASSLLFVYSLDYARTRLANDAKAAKKGGERQFNGLVDVYRKTLKSDGIAGLYRGFNISCVGIIVYRGLYFGMYDSLKPVVLTGGLQDSFFASFALGWLITNGAGLASYPIDTVRRRMMMTSGEAVKYKSSFDAFAQILKNEGAKSLFKGAGANILRAVAGAGVLAGYDKLQVIVFGKKYGSGGA

SEQ ID NO: 19998 - protein, 358 aa, Vitis vinifera
MELELSLGDASSKPFAFMEKAHRQVANKGLGFSMGLGLGSAGRDQEEQKIHEVADDDDDDDDGEDDDDGRDQRPSMGLPLQLDLLPLAPVPRNQASHQGLTWPSDNGSSEAGSSGNVGLPARGLDVNRLPSTAVTAAAGEEVEDGAAAEVESSPNSAASSFQMDFCIYRGGNGGTKRDFESGEAERTSSRASDEDDNGLTRKKLRLSKEQSAFLEESFKEHNTLNPKQKLALAKQLNLRPRQVEVWFQNRRARTKLKQTEVDCEYLKRCCETLTEENRRLHKELQELRALKTSNPFYMQLPATTLTMCPSCERVAATSTAPSAAASTATTATDPSTTTTTTANRPRFYPFSHQPPGAS

SEQ ID NO: 19999 - protein, 444 aa, Vitis vinifera
MKSYYIRCEGRDYVSLDGDGNGKKEKKRFRVLIAGGGIGGLVLALAAKHRGFEVKVFEKDLSAVRGEGRHRGPIQLLSSALAVLEAIDENVAKQIMEAGCVTGDRINGLADGLSGEWLSKFDLLTPAIRRGLPVTQVICRMSLQDILVNAVGLEILSNKSKVVDFMEDSNKVTVTLEDGRQYDGDVLIGADGIWSEVRSKLFGRQEAKYSNYTCYSGLTNFVPPYINTVGYRVFLGLNQYFVASDVGNGKMQWYAFNREPPMNNTDSPKGKKQRLLELFRSWCDEVITLILKTPDHMILQRDIYDRDMIYSWGTGRVTLVGDAAHPMQPNLGQGGCMAIEDCYQLILELDKIANSGSSILLSDQIVSALRRYEKKRMFRVGTVHTASRMASEVLAAYQPYMEFGFGPLPGLSTLRITHPGIQVARMFLQVFLQQFMTWMISGHG

SEQ ID NO: 20000 - protein, 1124 aa, Vitis vinifera
MSSSRPTQSSSTSGRSKHSARIIAQTTVDAKLHADFEESGSSFDYSSSVRFTPAGGDQQPRSDKVTTAYLHHIQKGKLIQPFGSLLALDEKTFKVIAYSENAPEMLTMVSHAVPSVGEHPVLGIGTDVRTIFSGPSASALHKALGFGEVSLLNPILVHCKTSGKPFYAIIHRVTGSLIIDFEPVKPYEVPMTAAGALQSYKLAAKAITRLQSLPSGSLERLCDTMVQEVFELTGYDRVMAYKFHDDDHGEVVSEITKPGLEPYLGLHYPATDIPQAARFLFMKNKVRMICDCRAKHIQVLQDEKLPFDLTLCGSTLRAPHSCHVQYMENMNSIASLVMAVVVNDGDEEGESSNSGQPQKRKRLWGLVVCHHTTPRFVPFPLRYACEFLAQVFAIHVNKELELESQILEKNILRTQTLLCDMLMRDAPLGIVSQSPNVMDLVKCDGAALLYKNKVWRLGITPSDFQLHDICSWLSEYHMDSTGLSTDSLYDAGYPGALALGDAVCGMAAVKITSKDTLFWFRSHTAAEVRWGGAKHEPGEKDDGRKMHPRSSFKAFLEVVKTRSLPWKDYEMDAIHSLQLILRNAFKDSEAMDVNTNAIHTKLNDLKIEGMQELEAVTSEMVRLIETASVPILAVDVDGLVNGWNTKISELTSLPVDKAIGMHLLTLVEDSSADTVKKMLHLALQGQEEQNVQFEIKTHGSKRDSGPISLVVNACASRDLHENVVGVCFVAQDITSQKTVMDKFTRIEGDYKAIVQNPNPLIPPIFGTDEFGWCSEWNPAMVKLSGWNREEVMDKMLLGEVFGTHMACCRLKNREAFVGLGIVLNSVMTGRESEKVSFGFFSKSGKYVECLLSVSKKLDREGAVTGVFCFLQLASQELQQALHIQRLSEQTALKRLKALAYIKRQIKNPLSGIIFSRKMMEDTDLGEEQQQILHTSAQCQRQLSKILDDHDLDSIIEGYLDLEMVEFTLREVLVASISQVMIKSNGKGIQIVNDAEEGIMTETLYGDGLRLQQVLADFLLISVNFTPGGGQLSVAASLIKDRLGESVHLVHLELRITHAGNGVPEQLLNQMFGNNGDASEEGISLLISRKLVKLMNGDVQYLREAGKSTFIISIELAAARKKPQA

SEQ ID NO: 20001 - protein, 589 aa, Vitis vinifera
MAQNYYNNDRGKKKKLAIIGFSSIFLVAMVIAVIASVSSSSSDSGNAQKQEISSSMKAIQAICQPTDYKDACVNSLTSKAGNTTDPKDLVQAAFASAMEHLSAAAKNSTLLQELNKDPRASQALQNCEDLVNYAIDDLKKSFNQVGDFDYSKMDNIIADIKIWLSAVITYQETCLDGFENTTGDAGEKMRQILKTSMELSSNGLAIVGEVSSILSNLQLANLNRRLLSDDPADPDNHIDDEFPYWSHSEGRKLLQANVSELKPNLTVAKDGSGDFKTINEAIRQLPKFSNQTFILYIKKGIYEEQVQINKTFTNLMMVGDGPTKTKITGSLNFVDGTPTFKTATVAVLGDGFIAKGIGFENSAGAAKHQAVALRVQSDRSIFYNCQMDGYQDTLYTHTKRQFYRDCTISGTIDFIFGDAAVIFQNCTFVVRKPLDNQQCIVTAQGRKERRQPSAIIIQNSTFTADPEYYPYRNELKSYLGRPWKEFSRTIIMESYIEDLIQPSGWLPWAGDFALRTCFYTEFRNRGPGAKTHDRVKWRGIKTIKPSHAIDFAPGRFLSGDRWIPSTGVPYNSGLFTLLSNVTTKSQGRI

SEQ ID NO: 20002 - protein, 571 aa, Vitis vinifera
MAFANSANFFLILILLPSLEALSHGTSFNAQNQTLEPLPHASSFNAQNQTLEPLPHASSSKDQNQTLQALIIQACAKVENYSSCVSSIHNELESMGPRSPSSILTAALKTTLNEARIAVQMVTRFNALSSSYREQIAIEDCKELLDFSVSELAWSLLEMKSIRAGSTNVQSEGNLKAWLSAALSNQDTCLEGFEGTDRRIESFIRGSLKQVTQLISNVLAMYVQLHSLPFKPPRNSTEKSPSQDFPKWMTDGDKDLLLAHPNQMGVDTIVSLDGSGHYRSIAQAIYEAPSYSNRRYIIYVKKGVYKENIDMKKKKTKIMIVGDGIGATVVTGNRNFMQGWTTFRTATVAVSGKGFIARDITFRNTAGPKNFQGVALRVDSDQSAFYRCSMEGYQDTLYAHSLRQFYRECDIHGTIDFIFGNGAAVLQNCKIFTRKPLPLQKVTITAQGRKSPDQSTGFSIQDSYVYATQPTYLGRPWKQYSRTVFLNTYMSSLVQPRGWLEWNGNFALGTLYYGEYRNYGPGALLSGRVQWPGYHKIQDTSVANFFTVGRFIDGLSWLPSTGVRFSAGLKN

SEQ ID NO: 20003 - protein, 986 aa, Vitis vinifera
MKHIFKKLHIGSSSHDPNRSNETLSSATTSSPACASDHRTSSAQSSVSPPSSYPSPTTVSSTAASTLPTATSPAASNRSDYFLSEEEFQVQLALAISASNSDFRDDSEKDQIRAATLLSLGRHRTDSVRDKDESAESMSRRYWDYNVLDYEEKVVDGFYDVYGLSTDPVIQGKMPSLTDLETNLGNSGFEVIVVNRRIDPALEELVQVAHCIALDCPAAEVGVLVQRLAEIVTDHMGGPVRDANIMLVKWMESRKDLRTSLHTSILPVGSLSIGLSRHRALLFKILADNVGVPCRLVKGSHYTGVEDDAVNIIKLDNEREFLVDLMGAPGTLIPADILSAKDSSLKSYNPKLSKIPTLQASKDPGGVYSRPKPLLGDYEGSSQTSTIENSLPQDRKASSEKIESLDSFSSSSGDTGVGTSRISKRVTPVNQSDLRPSLAIGASVYKGSRGANAVGDGSRMNVNIVPYNQNSTEDPKNLFADLNPFQMIGSSKASAQSKPMENKVDEFQREKNSAAPGRPPLPLMWKNRYANNEVPRKKENDFVEGLFPKINRETNDYNLPSLTSNNATTSEKVYSGVFKLSGNAYMNNKVNDDQNSSCNTTSMLAPSTSQFNRLSLDEDVNANYNEKYHKDGKVFQSDMVDAAKEHDKNETGLHDHRKFRHDSFMENNLREAESPCSSVDSDAGKVDQMFEDVGECEIPWEDLVLGERIGLGSYGEVYHGDWNGTEVAVKKFLDQDFSGAALAEFKREVRIMRRLRHPNVVLFMGAVTRPPNLSIITEFLPRGSLYRILHRPSCQIDEKRRIKMALDVAKGMNCLHTSLPTIVHRDLKSPNLLVDKNWNVKVCDFGLSRLKHNTFLSSKSTAGTPEWMAPEVLRNENSNEKCDVYSFGIILWELATLRLPWSGMNPMQVVGAVGFQNRRLDIPKEVDPLVARIIWECWQTDPNLRPSFAQLTVALKPLQRLVIPQHLDQQSLTLQQEISDEVRLCD

SEQ ID NO: 20004 - protein, 356 aa, Vitis vinifera
MALLSDLINLNLSDVTEKIIAEYIWIGGSGMDLRSKARTLSGPVSDPHKLPKWNYDGSSTGQAPGEDSEVILYPQAIFKDPFRRGNNILVMCDAYTPAGEPIPTNKRHNAAKIFSHPDVLAEETWYGIEQEYTLLQNSVKWPIGWPVGGYPGPQGPYYCGIGADKAFGRDIVDSHYKACLYAGINISGINGEVMPGQWEFQVGPSVGISAGDELWVARYILERITEIAGVVVSFDPKPIQGDWNGAGAHTNYSTKSMRNDGGYEIIKKAIEKLGLRHKEHIAAYGEGNERRLTGRHETADINTFLWGVANRGASIRVGRDTEKEGKGYFEDRRPASNMDPYVVTSMIAETTILWKP

SEQ ID NO: 20005 - protein, 378 aa, Vitis vinifera
MEWNLQPSTWDLIELNQEKDPYMPTTVGSGTLLGQKTKEKFSVDLKLGRLGDLGDGSTDKFKDSKSLRVSSPSGSSRRARALNGTQNVSCLVDGCTSDLRNCREYHRRHRVCERHSKTPVVIIGGQEKRFCQQCSRFHSLGEFDEVKRSCRKRLDGHNRRRRKTQPESFYLGSGNFLSNHQGTGFLQFGSSQMLTTSTASSPTWPRIARSEEEAMFYNHCQQLHVGPIPFPNSMYNRGGDKEFPFLQDNDPKISHLVVAPEVPNFHPVRVQSKNGRASHELTRPASSDCAFSLLSLPATQFSGISLAQLLHTNATPPVQTISSGPHWFNNLAQDSCSQVIESMPISPVLVPVDTTKANDHCNTMFHMGSSGLSENEPS

SEQ ID NO: 20006 - protein, 123 aa, Vitis vinifera
MHYQTESWGSYMPTRSVGDPLERIERLASENAVVIFSISSCCMCHAIKRLFCGMGVNPTVYELDEDPRGKEMEKALMRLLGSSSAVPVVFIGGKLVGAMDRVMASHINGTLVPLLKDAGALWL

SEQ ID NO: 20007 - protein, 567 aa, Vitis vinifera
MAGALHLCGVTTPNCAVSSRRSLHCQPLWSQRVDFTLSVAGGSRLCRSVKDSSRKNVLRVCCSGGSIDVLEKSKTENQTTDGVTEQLTIAMKFGGSSVASAERMREVADLILSFPNERPVIVLSAMGKTTNKLLLAGEKAVSCGVSNASCIDELTFIKELHLRTADELGVDSSVISAHLEELEQLLKGIAMMKELTLRTKDYLVSFGECMSTRLFAAYMNKIGAKARQYDAFDIGFITTDDFTNADILEATYPAVAKRLLGDWISDPAIPIVTGFLGKGWRSCAVTTLGRGGSDLTATTLGKALGLREIQVWKDVDGVLTCDPNIYSHAKPVEYLTFDEAAELAYFGAQVLHPQSMRPAREGDIPVRVKNSYNRNAPGTLITRTRDMSKAVLTSIVLKRNVTMLDIVSTRMLGQFGFLAKVFSIFEELGISVDVVATSEVSISLTLDPSKLWSRELIQQELDHVVEELEKIAVVNLLQHRSIISLIGNIQMSSLILEKAFHVLRTKGVNVQMISQGASKVNISLIVNDDQAEKCVRALHSAFFESLSEVDRECQSDNGSTSAFSNGH

SEQ ID NO: 20008 - protein, 175 aa, Vitis vinifera
MSFATTLHSPQPLLKDQTPLFALRVGSLAARPSLVAYRRGSFRTLTIGDGLVIGAKSGRIGSFRCFSALTPELKTTLDKVVTSNKVVLFMKGTKEFPQCGFSNTVVQILNSLNVPFETINILENEILRQGLKEYSNWPTFPQLYIEGEFFGGCDITVDAYNSGQLQEQLEKAMCS

SEQ ID NO: 20009 - protein, 631 aa, Vitis vinifera
MASGSESNAPLLNKEAEKKPNDDQAANDPLTDLERGDADQAAKVGFFRVFFLAKPYAGKLIIATIALLIESTSRVMIPKYCGIIIDIVSRDIRTPEQQSEALVAVKNAVLDIVMIVVLGSLCSALEEWLFASVSERIVARLRKDLFSHLINQEIAFFDVTKTGELLSRLSEDSQIIKNVATSNLSSALTSITTAAITLSFMFSSSWKLTLLALAVVPVISVAARKFGYHLRELSNTTQAAAAEASSMAQESFGAIRTVRSFAQEGYAISSYSEKVDHTLKLGLRQAKLVALFYGGLDAASTLSLITVMVYGAILTIARSITTGSLTSFILYCFTVRSSVSSLAGLYTAGMKAAGASRRVFQLLDRVSTMPISGNECPLGNPDGDVELDDIWFAYPSRPSHMILKGITLKLRPGSKVALVGPSGGGKTTIAGLIERFYDPLKGKILLNGVPLVEISHKYLHKKISIVSQEPVLFNCSVEENIAYGFDGKASSSEIEHAAKMANAHDFIENFPEKYRTVVGERGLRLSGGQKQRIAIARALLMDPRVLLLDEATSALDAESEYLVQDAMESLMRGRTVLVIAHRLSTVKSADTVAVISDGRIAESGNHEELLSKNGIYTGLVKRQLQGPSTPN

SEQ ID NO: 20010 - protein, 621 aa, Vitis vinifera
MASGNETAPPLNEVERQNANDDLEHGLAYQAAKVGFFRVFSLAKPEAGKLIVATIALLVASTSIVMLPKYGGMVIDIVSRDIRTPEQQSEALTAVKNAALAVVLMVVLGSLCVAVREWLFASVSERIVAHLRKDLFSHLINQDIAFFDVTPTGELLSRLSEDSQIIKNVATSNLSSALTSITIVFIGLGFMFSSSWKLTLLVLALVPVVSVAAHVFGRYLRELSHKTQAAAAVACSMAEESFGAIQTVRSFAQEGYAISSYSEKVHETLKLALRQSKLVALFYGGINAVFTLSIVIVVVYGASLTIARSMTAGSLASFILYSLTVGISMLSLFGLYTTAMKAAGASRRVFQLLDRVSPMPISGHKCPLGNPDGDVELDDIWFAYPSRPSHMILKGISLKLRPGSKVALVGPSGGGKTTIASLIERFYDPLKGKILLNGVPLVEISHKYLHKKISIVSQEPVLFNCSVEENIAYGFDGKASSSEIENAAKMANAHDFIANFPEKYRTVVGERGLRLSGGQKQRIAIARALLMDPRVLLLDEATSALDAESEYLVQDAMESLMRGRTVLVIAHRLSTVKTADIVAVICDGRIAQSGSHEELLSKNGIYTGLVKRQLQGPSTPH

SEQ ID NO: 20011 - protein, 113 aa, Vitis vinifera
MDKLLCNIIGFTEEQEALVVKSWNSMKKNAGGLGLKFFLKIFEIAPSTKKLFSFLKDSKVPLQKNPKTCESVVQHRKADKVTMRDSTLKKLGVVHYKSGVLDEHYEVCAGINL

SEQ ID NO: 20012 - protein, 247 aa, Vitis vinifera
MVGLMGWGSVPVQGWRKGPWTPEEDKLLSEYVSSHGEGRWSSVARCSGLNRSGKSCRLRWVNYLRPGLKRGHITTMEEGIIIELHALWGNKWSTIARYLPGRTDNEIKNYWRTHFKKNQKQQKPKAQQPLEPKLQQQQQQQQEDHEIKLENGKMGEAQGKQEAISMEDQCLPVMYQEIDDHQARQQVASMYPTILEDLCLPVTYQDHLQGEDQGLWGGLWNLDDTIDHTISGGGNSSQNYYNGGYIF

SEQ ID NO: 20013 - protein, 244 aa, Vitis vinifera
MGRGRVELKRIENKINRQVTFAKRRNGLLKKAYELSVLCDAEVALIIFSTRGKLYEFCSSSSMLKTLERYQKCSYGAVEVSRPSKELEQSSYREYLKLKSKFESLQRTQRNLLGEDLGPLNTKELEQLERQLETSLKQVRSTKTQFMLDQLSDLQNKEQVLVESNKALTRKLDEISVKNHLQLSWESGEQSMPYGHQQAQSQGFFQPLECNPTLQIGYNPAGSSQLSAPSNAQNVNGFIPGWML

SEQ ID NO: 20014 - protein, 395 aa, Vitis vinifera
MASKPKAIISWGSGEDGQLGIGNNEEKEWVCAVKALAAQNVCSVVAGSRNSLAICEDGKLFTWGWNQRGTLGHPPETKTENIPSQVKALANAKIVQAAIGGWHCLAVDDQGRAYAWGGNEYGQCGEEPERKDDTGRPLRRDITIPQRCASKLSVRQVAAGGTHSVVLTREGHVWTWGQPWPPGDIKQISTPVRVQGLEKVRLIAVGAFHNLALLEDGILWAWGNNEYGQLGTGDTQPRSQPIAVQGLSDLTLVDIAAGGWHSTALTDDGGVYGWGRGEHGRLGFGDDKSSKMVPQKVQLLVEENIVQISCGGTHSVALTRDGRMFSFGRGDHGRLGYGRKVTTGHPMEVPINLPPATNLSGSGAGGHWCSKLVACGGRHTLAIVEWLAHEPEQLI

SEQ ID NO: 20015 - protein, 114 aa, Vitis vinifera
MALQKAQEMVSSNPVVVFSKTYCPFCVSVKKLLSELGATFKVVELDTESDGADLQSALAGWTGQRTVPNVFIGGKHIGGCDTATALHSDGKLVPLLTEAGAITSSSNEGSSVTC

SEQ ID NO: 20016 - protein, 189 aa, Vitis vinifera
MDKKPCNSQDAEVRKGPWTLEEDLILINYIANHGEGVWNSLAKSAGLKRTGKSCRLRWLNYLRPDVRRGNITDEEQQLIMELHAKWGNRWSKIAKHLPGRTDNEIKNFWRTRIQKHIKNAETFTAQSSDQTHDQATTSQVMGAAHVADSYSPPSYPANLEAFPGPSSAESNDNFWTMEDIWSMQLLNGD

SEQ ID NO: 20017 - protein, 383 aa, Vitis vinifera
MAMMKRVAESAVRAFALGSTSGALTKHLHASAGSKKIVGVFYKANEYAAMNPNFVGCVEGALGIRDWLESQGHQYIVTDDKEGPDCELEKHIPDLHVLISTPFHPAYVTAERIKKAKNLQLLLTAGIGSDHIDLKAAAAAGLTVAEVTGSNVVSVAEDELMRILILVRNFLPGHHQVISGEWNVAGIAYRAYDLEGKTVGTVGAGRIGRLLLQRLKPFNCNLLYHDRIKMDPELENQIGAKFEEDVDVMLPKCDIIVINMPLTEKTKGMFNKERIAKLKKGVLIVNNARGAIMDTQAVADACSSGHIAGYSGDVWYPQPAPKDHPWRYMPNQAMTPHISGTTIDAQLRYAAGVKDMLDRYFKGEDFPAQHYIVKEGQLASQYQ

SEQ ID NO: 20018 - protein, 273 aa, Vitis vinifera
MDSCRLFFDPSSGHGNMLFLGNGDSLFRGPRSIMNIEETSKKRPFFTSPEDMFDEEYYDEQMPEKKRRLTPEQVHLLEKSFEAENKLEPERKTQLAKKLGLQPRQVAVWFQNRRARWKTKQLERDYDLLKSSYDSLVSEYDSILKEKEKLKSEVVSLTEKLQAKEVTGTPTLTVQKVEPLQADAADVPPVPCSVKVEDRLSSGSGASAVVDEDGPQLLDSGDSYFQNAEYPGCLGVQSEEDDGSDDGQSYFSDALVLPEHHHEEGEALLWVWP

SEQ ID NO: 20019 - protein, 1034 aa, Vitis vinifera
  misc_feature (928)..(929): Xaa can be any naturally occurring amino acid
  unsure (1)..(1034): unsure at all Xaa locations
MEKMGTADSEMDQLFEQKKRVKNPLVPIGALLTAGVLTAGLISFKKGNSHLGQKLMRARVVVQGATVALMLSTAYYYGEKYSIEPDVRQALINFLGSLSGSNGQAAQAAGWNLDTDPCLDGWNGVTCDKKNQSVQKISLDGLSLAGILDVGSLCTKQSLAASLNYLSVGNNSISGDVRKEIADCKQLARLNISGNRFSGKLPDSLPMLNNLKKLDISNNHLSGDLPDLSRISGLTTFLAQNNQLTGKVPKLDFSNLEQFDVSNNLFRGPIPDVEDRFNESSFLGNPGLCGDPLPNKCPKKVSKEEFLMYSGYALIVLVLIMFVVFRLCKRRTKEEKVDATNKIVAVDDSGYKTGLSRSDFSVISGDQSALVSSTSLVVLTSPVVNGLKFEDLLTAPAELLGRGKHGSLYKVIFDKRMTLVVKRIKDWAISSDEFKKRMQRIDQVKHPNVLPALAFYCSKLEKLLIYEYQQNGSLFQLLSGDQPLGWSSRLNLAATIAEALAFMHQELHSDGIAHGNLKSSNILLNRNMVPCISEYGLREADSKELPSLSATNSRRAIEQTGATSSNSTFNADIYAFGVILLELLTGKLVQNSEFDLARWVHSAVREEWTVEVFDKRLISHGASEARMVDLLQAAIKCVNRSPETRPTMRKVAYMINAIKEEEERSMVFEHQIKQKDGYLTYPPPLTPSSSSPYTAAFHKGSTAPSSSSSSGTRISPAVLFIIVIVAVLFFISGLLHLLVRFLIRHPSSSTSSQSNRYPEISESDALQRQLQQLFHLHDSGLDQAFIDALPVFLYKEIVGLKEPFDCAVCLCEFSEKDKLRLLPVCSHAFHINCIDTWLLSNSTCPLCRGTLFAPGFSMENPIFDFDDLREEDGFPGHGENGFASGPKTVEIEEVVGEKGVFPVRLGKFRKVADGSGETAGGETSSSNXXARRCYSMGSFQYVVGDSILRVALNHEQQHPDGKIVKGIENNANPSINEETEGTRNSFVTKGDSYSVSKIWLWSKKGKFPSSSDNTQTGMPSLNVDLPWMGRKQEM

SEQ ID NO: 20020 - protein, 502 aa, Vitis vinifera
MGEVREENERLKTMLEKIGKDYKSLQLQVFDILQQESSKRPVDSAPAIDEESKELELVSLCLGRSSPTDGKRDGKSSIASKAKEDDDELNAGLTLGLDSKFQVSKLDVTEFASNSSPTENSIEEVKEEEAGETWPPSKVLKTMRTGDEVSQQSHVKRARVSVRARCDTLTMNDGCQWRKYGQKIAKGNPCPRAYYRCTVAPSCPVRKQVQRCAEDMSILITTYEGTHNHPLPMSATAMASTTSAAASMLISGSSASQPGLGSSPAATELHGLNFSLPDNMRTRQLYAANSSPFPTITLDLTTTASSSSHFSRFSSSFNSSTPRFPSTSLSFSSSESNSVPTVWGNGCLNYGILPHNKAQIGSLNLGRQPPEHFHQPYMEKNGQAPIQQSLTETLTKVITSDPSFRTVIAAALSSMVSSSTGQPNPGAGESLGQNLKWGETTQAISTNPLSQNGKGCAPGYLNASSSSNSQTGNSILLQPPFPVSIPRSGTSGSAAENRDQNN

SEQ ID NO: 20021 - protein, 449 aa, Vitis vinifera
MSTSGQPQFRYTQTPSKVLHLRNLPWECTEEELVELCKPFGKIVNTKCNVGANRNQAFVEFLDLNQAISMVSYYASSSEPAQVRGKTVYIQYSNRHEIVNNKSPGDVPGNVLLVTIEGVEAGDVSIDVIHLVFSAFGFVHKIATFEKAAGFQALIQFTDAETASSARNALDGRSIPRYLLPEHVGSCHLRISYSAHTDLNIKFQSHRSRDYTNPYLPVNPTAIEGIAQPALGPDGKKKEPESNVLLASIENMQYAVTVDVLHTVFSAFGTVQKIAIFEKNGGMQALIQYPDVTTAAVAKEALEGHCIYDGGYCKLHLSYSRHTDLNVKAHSDRSRDYTIPDSGLLAVQQAPGHPGATTVWQNPQAAPLYTGHDAAAAAAVQVPSWDPNMQAGRSTFASAASAFPSQPFASSSISAYPAPPGSSPLTPAVPPNVRPGGASPPGRPPYFGQ

SEQ ID NO: 20022 - protein, 420 aa, Vitis vinifera
MSTSGQPQFRYTQTPSKVLHLRNLPWECTEEELVELCKPFGKIVNTKCNVGANRNQAFVEFLDLNQAISMVSYYASSSEPAQVRGKTVYIQYSNRHEIVNNKSPGDVPGNVLLVTIEGVEAGDALIQFTDAETASSARNALDGRSIPRYLLPEHVGSCHLRISYSAHTDLNIKFQSHRSRDYTNPYLPVNPTAIEGIAQPALGPDGKKKEPESNVLLASIENMQYAVTVDVLHTVFSAFGTVQKIAIFEKNGGMQALIQYPDVTTAAVAKEALEGHCIYDGGYCKLHLSYSRHTDLNVKAHSDRSRDYTIPDSGLLAVQQAPGHPGATTVWQNPQAAPLYTGHDAAAAAAVQVPSWDPNMQAGRSTFASAASAFPSQPFASSSISAYPAPPGSSPLTPAVPPNVRPGGASPPGRPPYFGQ

SEQ ID NO: 20023 - protein, 243 aa, Vitis vinifera
MDGPSGVRKGAWTREEDVLLRTCIEKYGEGKWHQVPFRSGLNRCRKSCRLRWLNYLRPDIKRGKFKTDEVDLIIRLHKLLGNRWALIAGRLPGRTSNDVKNYWNTHLSKKFFGKAVKDVADKTAKVTVIKPRPRTFNKNLSYLKGKAAKESDVQSADHTLSKPYSTPPLSEDGISWLDSLFSGKEGHKESTCFRNGSGKESISSFWDEEISAATKVGETFVEENESDWNHFSFDMDLWDLLNA

SEQ ID NO: 20024 - protein, 240 aa, Vitis vinifera
MEGSLGLRKGAWTSEEDHLLRKCVEKYGEGKWHQVPFRAGLNRCRKSCRLRWLNYLKPDIKRGKFTADEVDLMMRLHKLLGNRWALIAGRLPGRTSNDVKNYWNTHLRKKMVKDEVEETVKINAIRPRPRTFTKNLYWLERKELLENDQSELHIPRKPFSTTPPSEDGLNSWWESLFSDKEENKEITCSIERSANESISCLWDEQIAAMPEVGKTSITNGQIEWTDCSFDMDHLWDLINA

SEQ ID NO: 20025 - protein, 728 aa, Vitis vinifera
MASMACLNIFQKGRGKTRNEQEECTFDGSVDRHGHPAVRARTGNWVTAILILVNQGLATLAFFGVGVNLVLFLTRVLGQDNATAANNVSKWTGTVYIFSLLGAFLSDSYWGRYKTCAIFQVIFVIGLVLLSLSSYIFLLKPNGCGDKEFPCGSHSTFEISFFYLSIYLIALGNGGYQPNIATFGADQFDEDNPKESHSKVAFFSYFYLALNLGSLFSNTILGYFEDGGRWVLGFWASSASAILALILFLFGIPRYRHFKPSGNPLSRFCRVVVAATRKWKVEMPPEGEDLYEVDGDDCSGNCRRKMLHTQGFKFLDKAAVLTAKEREQEDKESRSPWRICTVTQVEEVKCILRLLPIWLCTILYSVVFTQMASLFVEQGAAMKTTLLGFHIPPASMSSFDIVSVAAFIFIYRRVLDPLVARLKGTKARGLTELQRMGIGLIIAIIAMVAAGIVEWFRLKYAKKDCRQCESESSLSIFWQIPQYVLIGASEVFMYVGQLEFFNDQAPDGLKSFGSALCMTSISLGNYVSSLLVTIVMKFSTRDQMPGWIPSNLNKGHLDRFYFLLAALTMADFGVYIICAKWYKSIKLEGNFSQSSSEEKPLEAHIDVAFYFFRKRRMEKKNMKTRWEKHAKKWNQFQMQAYDILVDYVNGFHPIPSMKWSEVDIVYVPINVQTFLDWIMSMEDYFDWYAMPENRKVRFVKAKLKGAARLWWHNIENQAHRTGQPPIDT

SEQ ID NO: 20026 - protein, 403 aa, Vitis vinifera
MALSLFHSTSSSIAFSSSSPYSPSSPFAIPFPTHRLSPRNTVRCNLVEPVKFNNGRPFIPVLREPTLPNFLSSKDMEETINKNDTRLRIFSGTANPALSQEIACYMGLELGKINIKRFADGEIYVQLQESVRGCDVYLVQPTCPPANENLMELLIMIDACRRASAKNITAVIPYFGYARADRKTQGRESIAAKLVANLITEAGANRVLACDLHSGQSMGYFDIPVDHVYGQPVILDYLASKTICSDDLIVVSPDVGGVARARAFAKKLSDAPLAIVDKRRHGHNVAEVMNLIGDVKGKVAVMVDDMIDTAGTIAKGAALLHQEGAREVYACSTHAVFSPPAIQRLSSGLFQEVIITNTIPVLEQNYFPQLTVLSVANLLGETIWRVHDDCSSGFEPYSSLGID

SEQ ID NO: 20027 - protein, 790 aa, Vitis vinifera
MVANDETPLDLFLKIGLDERTARNTIANNKVTSNLTAVIHEAAVTDGCSRTIGNLLYTVATKFPANALVHRPTLLQYIVSSKIKTPAQLEAAFSFFTSTGSENFQLNDFEEACGVGVDVSAEDVERTVNEIFEENKSTILEHRYRTNVGDLFGHVRKRQPWADPKIVKQLIDAKLYELLGARTAADDEKPSKKKKEKPVKVEDKTVALETSPAQPAEEELNPFLIFPQPEENFKVHTEIFFSDRPVLRPCNSKEMLERHLKATGERVFTRFPPEPNGYLHIGHAKAMFVSFGLAKERGGCCYLRFDDTNPEAEKKEYIDHIEEIVQWMGWEPFKITYTSDYFQDLYDLAVELIRRGQAYVDHQTPEEIKEYREKKMNSPWRDRPIEESLKLFDEMRRGMIEEGKATLRMKQDMQSDNFNMYDLIAYRIKFTPHPHAGDKWCVYPSYDYAHCIVDSLENITHSLCTLEFETRRASYYWLLHVLGLYHPYVWEYSRLNVTNTVMSKRKLNRLVTEKWVDGWDDPRLMTLAGLRRRGVTSTSINTFIRGIGITRSDCSIIRLDRLEYYIREELNKTAPRTMVVLHPLKVVITNLEDGSITDLDAKKWPDAQEDDASAFHKVPFSKIVYIEQSDFRMKDSKDYYGLAPGKSVLLRYAFPIKCTEVILSDDKETVVEVRAEYDSSKKTKPKGVLHWVAEASPGLDPLTVEVRLFDKLFLSENPAELDDWLGDLNPQSKVVVPSAYSVPSLKNAAVGDRFQFERLGYFVVDKDSTPEKLVFNRTVTLRDSYGKGGK

SEQ ID NO: 20028 - protein, 205 aa, Vitis vinifera
MYGHTTFDSDVAFLESVRSYLLEDSVLPHPFSANAPAYSATTPTFTENRENQPVLDAAAASGVVGEAKAEPQEAAGPEKLRRYRGVRRRPWGKYAAEIRDPAKNGARVWLGTYETAEDAALAYDRAAFRIRGSRAILNFPLRIGSGDPEPVRITTKRRSPQPSLSAAAAAALKRTKGDVESTAEMEAATENVEDVFQLHQLWVNS

SEQ ID NO: 20029 - protein, 207 aa, Vitis vinifera
MHGYTTFDSDFALLESVRRYLLEDSDLPYPFSANAPAYSTTTPTFTENWENPPVLDAAAASGVVGEAKAEPQEAAAPEEWRRYRGVRRRPWGKYAAEIRDPAKNGARVWLGTYETAEDAALAYDRAAFRIRGSRALLNFPLRVGSGEPEPVRITPRRRSLQPSLSAAAAAAAALKRRKCDVDWTAEVDASTENVVDVFQLHQLWVNS

SEQ ID NO: 20030 - protein, 214 aa, Vitis vinifera
MYEYTTLESDLAFLESISNHLLEDSELLAPISGNVPGYCSAPSFTGLFSSQIWGNSPVVDSAAASGVVEVKAEVEEEAPRGGVAKEEEGRRYRGVRRRPWGKYAAEIRDPAKNGSRVWLGTYETAEDAALAYDQAAYRMRGSRALLNFPLRIGSGEPEPVRITAKRRSSQRSLSEAVAAPSLKRGKGVDSTAKVEAAEASVVEMFQANQRWVKS

SEQ ID NO: 20031 - protein, 358 aa, Vitis vinifera
MEGGGGGGGGGLLFNWLRKDLGNSLPIWIIYAQSNTPLVPHVTVTPLLSPLSTTLLRLRSLPANQTLENPNPKMVDKDDDLGLSLALKCPEALPQRPLNLFVQKKALCSDAFHASETRAYLRGIDVNRAPTMADCEDVGVSSPNSTISSISGKRNDRETNEEENENENEIESSEEDAGGTGDTVRKKLRLSKEQSAILEETFKEHNTLNPKQKLALAKQLNLRPRQVEVWFQNRRARTKLKQTEVDCEYLKRCCENLTEENRRLQKEVQELRTLKLSPQLYMHMNPPTTLTMCPSCERVAVASASSSAPSPSPASNPLAAAPHFPLGPHQHRPMPIAGPWAGAASMRHRPFDAHGTRS

SEQ ID NO: 20032 - protein, 591 aa, Vitis vinifera
MGQCYGKPVVNGNGKGGVVEEYPQSPLPSVGNGAASVQSVKTPARSSSTSPWRSPFPHGSASSPLPAGVAPSPARSSTPRRFFRRPFPPPSPAKHIKASLAKRLGPAKPKEGPIPEEGTEPEQLLDKSFGYGKNFGAKYELGKEVGRGHFGHTCSARGKKGELRDQPLAVKIISKAKMTTAIAIEDVRREVKILKALSGHAHLVKFYDACEDANNVYIIMELCEGGELLDRILSRGGRYTEEDAKAIVVQILSVVAFCHLQGVVHRDLKPENFLFTSRSEDADMKLIDFGLSDFIRPDERLNDIVGSAYYVAPEVLHRSYYLEADIWSVGVITYILLCGSRPFWARTESGIFRAVLRADPNFDDLPWPTVSAEAKDFVKRLLNKDYRKRMTAVQALTHPWLRDGSHPIPLDILIYKLVKSYLLATPFKRAALKALSKALTEDELVYLRSQFKLLEPGRDGSVSLDSFKMALARNATDAMKESRVPDILNALEPLCYRRMDFEEFCAAAISTHQLEALEGWEQIASTAFEIFEQEGNRVISVEELARELNLGPSAYSVLKEWIRNSDGKLSLLGYTKFLHGVTHRSSNTRQH

SEQ ID NO: 20033 - protein, 252 aa, Vitis vinifera
MKPIFCGNLEYDARQSDVERLFRRYGKVDRVDLKSGFAFVYMDDERDAEDAIRRLDRTVFGRKGRQLRVEWTKQERGIRRPGGSRKSSANMKPSKTLFVINFDPIHTRTRDLERHFDLYGKILNIRIRRNFAFIQFESQEDATKALDATNMSKFMDRVISVEYAARDDDDDRRNGYSPERRGRDMSPDRRSHDRGRSPSPYHRDRASPDYGHGANANSRSEPRGSPNYDRDESPVNERYHSRSPPPRERSRS

SEQ ID NO: 20034 - protein, 281 aa, Vitis vinifera
MREEPSQKQQKQWSLDDFEIGKPLGRGKFGRVYLAREIKSKYVVALKVIFKAQIEKYRLHHQLKREMEIQTSLCHPNVLRLYGWFHDSERIFLILEYCYGGELYRELRKTGYLTEKQAATYIASLTQALAYCHEKHVIHRDIKPENLLLDHEGRLKIADFGWSVQSTNKRRTMCGTLDYLAPEMVENKAHDYAVDNWTLGILCYEFLYGVPPFEAESQSDTFKRIMKVDLSFPSNPHVSAEAKNLISRLLVKDSSKRLSLQKIMEHPWIIKNANPTGTCNK

SEQ ID NO: 20035 - protein, 321 aa, Vitis vinifera
MADQLPQVLVLRPPPVFTLFETQFSQKFHFLRAWESPLPTAEFLATHAASVKAVLCSGSTPITADILRHLPSLQLIVTTSAGLNHINLPECRRRSISIANAGEIFSDDCADLAVGLLMDVLRKISAADRFIRAGLWPIRGDYPLGSKLGGKRVGIVGLGSIGLEVAKRLEAFGCIILYNSRRKKANISYPFYSNVCELAANSNALIICCALTDETRHMINKEVMKALGKEGVIINIGRGAIIDEKELVQCLVQGEIGGAGLDVFENEPDVPKELFTLDNVVLSPHVAVFTQESFSDLYDLMVGNLEAFFSNKTLLSPVLDE

SEQ ID NO: 20036 - protein, 218 aa, Vitis vinifera
MVRGKTQMRRIENATSRQVTFSKRRNGLFKKAFELSVLCDAEVALIIFSPRGKLYEFSSSSMQETIERYQRHTKDVHTNNYKTTEHNMQHLKHEAANMAKKIELLEISKRKLLGEGLGSCSIEELQQIEQQLERSVSSIRARKNQVFKEQIEQLKEKEKALAAENAMLCEKCGVQPYQAPNQENETLPSAERSQNSDVSTDLFIGLPEGRAKRLLLGN

SEQ ID NO: 20037 - protein, 208 aa, Vitis vinifera
MAKLTLSFLLLLLFVFSVLGSVEPASVQHARKSRARTFIEASCRSTRYPSLCVKCLSGYANKTQQSPFQLAQVALSVSLAKTRHTRAYVMEVASNFKDVEGRTHQDISDCLDQINDGVDRLAQSIIELRRMNQEGGDSDFTWRMSNIETWVSAALTDATTCVDGFSGRDMGKLKATIKGKVLNVAQVTSNALALVNRFAARHRATNKP

SEQ ID NO: 20038 - protein, 341 aa, Vitis vinifera
MRNIARKGIHYWQKLNAANVPAELIENGQNRVIDASLTLIRERAKLKGELVRALGGALASSSLLGVPLGHNSSFLQGPAFAPPRIREAIWCGSTNATTEEGKELNDPRVLTDVGDVPVQEIRDCGVDDDRLMKIISESVKLVMEEDPLRPLVLGGDHSISFPVVRAVSEKIGGPVDILHLDAHPDIYHSFEGNKYSHASPFARIMEGGYARRLLQVGLRSITSEGREQGKRFGVEQYEMRTFSRDRHILENLKLGEGVKGVYISLDVDCLDPAFAPGVSHIEPGGLSFRDVLNILHNLQADVVAADVVEFNPQRDTVDGMTAMVAAKLVRELTAKMSKMKN

SEQ ID NO: 20039 - protein, 235 aa, Vitis vinifera
MGEIGLPPIREHSEASICFPVSTSGEKPVYGRSSSFNSLMPFLTENWGDLPLKVDDSEDMVLYGVLRDAVSVGWTPFGLPPPPEVKEEPREEVAAPAMPEVRAAPSRGRHYRGVRQRPWGKFAAEIRDPAKNGARVWLGTYETAEEAAVAYDRAAYRMRGSRALLNFPHRVGSGEPDPVRITAKRRSPEPEPSPESGSPKRLKNGLAAEVERRSNVFQVGHQMGALPVGEQLLVV

SEQ ID NO: 20040 - protein, 592 aa, Vitis vinifera
MGHCCSKDISVVKDDTVAGESAAGIGGKPTAPLRLVGNGAVDVKRTPAHSFNSPCPSPYPQGSSPLPPGIAPSPARTPRSRVRWPFPPPSPAKPIMSSILKRRGSAKPKEGPIPEEGAGEGETQLDKSFGYAKNFSSKFELGKEVGRGHFGHTCWARGKKGELKGQTVAVKIISKAKMTTAIAIEDVRREVKILKALSVHKNLVKFHDACEDASNVYIIMELCEGGELLDRILSRGGRYREEDAKAIVVQILNVVAFCHLQGVVHRDLKPENFLFTTRDEDAPMKVIDFGLSDFIRTDQRLNDIVGSAYYVAPEVLHRSYNLEADVWSIGVITYILLCGSRPFWARTESGIFRSVLRADPNFDDLPWPAVSPEAKDFVKRLLNKDYRKRMTAAQALTHPWLRDENHAVPLDILVYKLVKSYVRVSPFKRAALKALSKALTEDELVYLRAQFRLLEPKNGRVSLENFKMALMRNATDAMKESRVADILNMMESLSFKKMDFEEFCAAAISPLQLEALQGWEKIATTGFEFFEQEGNRVTTVEELAREMNVGPAAYSAFNGWIRSSDGKLSFLGFTKFLHGSVSRPITRQQQHV

SEQ ID NO: 20041 - protein, 722 aa, Vitis vinifera
MEAGVSYECPIKQVDVTVPKTDDPTIPVLTFRMWVLGLSSCIVLSFVNQFFWYRSQPLIISSISAQIAVVPIGHLMAKKITKRVFLKGSRWEFTLNPGPFNVKEHVLITIFANSGAGTVYATHILTAVKLLYKRNLTFIPALLVMTTTQVLGFGWAGLFRKFLVEPGEMWWPSNLVQVSLFRALHEKEKRPKGGTTRTQFFLIVFICSFTYYVAPGYLINMLTSFSWVCWLAPKSILVQQLGSGLEGLGIGSIGLDWSTISSYLGSPLASPWFATANVALGFCLVMYVMTPATYWSNVYNAKNFPLYSEKLFTSNGSRYNILSIIDSNFHLSKEQYVKSGPLNMSTFFAMTYGLGFATLSATIVHVALFNGSELWKQTKGAFGEKKMDIHTWLMKKYKSVPNWWFFVIHVVNIATIIFACEYYNDVLQLPWWGVLLACAIAFFFTLPIGIITATTNQTPGLNIVTEYVMGYMYPGRPVANMCFKVYGYISMTQALTFLADFKLGHYMKIPPRSMFMAQVVGTVVAVIVYVITAWWLMATIPNLCDTTMLPADSPWRCPMDNVFFDASVIWGLIGTRRIFGNLGAYSNVNWFFLLGAIAPLLVWLMHKAFPKKKWIPLIHMPVLLGSTAMMPPASAVNFTSWIIVGFLSGFVIFRHKPKLWERYNYVVSGGLDAGTAFMTILIFLTLGSRNVSIDWWGNNPEGCPLASCPTAKGIVVDGCPVF

SEQ ID NO: 20042 - protein, 697 aa, Vitis vinifera
MYGAWGLRASSVVLGILLVGCLVAISIAKEESNKLGTVIGIDLGTTYSCVGVYKNGHVEIIANDQGNRITPSWVAFTDTERLIGEAAKNQAAVNAERTVFDVKRLIGRKFDDKEVQKDMKLFPFKIVNKDGKPYIQVKIKDGETKVFSPEEISAMILTKMKETAEAFLGKTIKDAVVTVPGNVKQFDLMDEVNCCFSVEMTYVSILTTSTAYFNDAQRQATKDAGIIAGLNVARIINEPTAAAIAYGLDKKGGEKNILVFDLGGGTFDVSILTIDNGVFEVLATNGDTHLGGEDFDQRIMEYFIKLIKKKHGKDISKDNRAIGKLRRESERAKRALSSQHQVRVEIESLYDGLDFSEPLTRARFEELNNDLFRKTMGPVKKAMEDAGLEKRQIDEIVLVGGSTRIPKVQQLLKEYFDGKEPNKGVNPDEAVAYGAAVQGSILSGEGGDETKDILLLDVAPLTLGIETVGGVMTKLIPRNTVIPTKKSQVFTTYQDQQTTVSIQVFEGERSLTKDCRELGKFDLSGIAPAPRGTPQIEVTFEVDANGILNVKAEDKASGKSEKITITNDKGRLSQEEIDRMVREAEEFAEEDKKIKEKIDARNSLESYVYNMKTQINDKDKLADKLESEEKEKIETAVKEALEWLDDNQNAETEDYQEKLKEVEAVCNPIITAVYQRSGGAPGGSSDAGEDEDSHDEL

SEQ ID NO: 20043 - protein, 597 aa, Vitis vinifera
MVYGRLGSKAASFQQDNAAASALQQQRRRRRLCIVAVLSVVLIVAAVASTVALVVRREGSAAGSDGRVRRKPTQAISHTCSRTRFPTLCVDSLLDFPGSLTAGERDLVHISMNMTLQRFGKALYVSSEIANLQMDTRVRAAYEDCLELLEESVEQLSRSLTSVAGGGDGQAVGSTQDVLTWLSAAMTNQDTCTEGFDDVSGFVKDQMVEKLRDLSDLVSNCLAIFAASGGDNDFAGVPIQNRRRRLMQDSDISANQDSTGFPKWLTRRERSLLQMPVPAIQADIIVSQDGNGTYKTITEAIKKAPEYSSRRTIIYVKAGRYEENNLKVGRKKTNLMFIGDGKGKTIITGGKSVFNNLTTFHTASFAATGAGFIARDMTFENWAGPGKHQAVALRVGADHGVVYRCNIIGYQDTLYVHSQRQFFRECDIYGTVDFIFGNAAVVFQNCSLYARKPMAQQKNTITAQNRKDPNQNTGISIHACRILPAGDLAPVKGSFPTYLGRPWKLYSRTVYMLSYMGDHIHPKGWLEWNTTFALDTLYYGEYMNYGPGGAVGQRVNWPGYRVITSVVEATKFTVGQFIYGSSWLPSTGVAFLAGLSV

SEQ ID NO: 20044 - protein, 478 aa, Vitis vinifera
MRPIFCGNFDYDARQSDLERLFRRYGKVDRVDMKTGFAFIYMEDERDAEDAIRGLDRTGFGRKGRRLRVEWTKQERGIRRPSGSRRSSTNLRPAKTLFVINFDPYNTRTRDLERHFDPYGKILNIRIRRNFAFIQYESQEDATRALEATNMSKLMDRVISVEYAVRDDDERRNGYSPDGRRRDKSSERSYDKGRSLSPYRRERGSPDYGRGSSPSAYRRERASPDYGRDPSPSPRRRDRAIPDHGRSRSPSHHRRERTSHDSARGPSRSPYRSERSDRAIPDYGRGRSPSPGRREKIMPDYPDRPSLSPERKEKTGRSEKAIPDYGRGASPSSPRRERTNSDYVRANSRSRSRSQSQSPRQRERTKPDYGHERSVSPEQREKANPDYGRGPSRSSPRREYDRGPSQSPQQGERALPDYSRGPSDSPYQRESISPDYDRGPSPNSKREERDSPNYGGSASPMNGRYRSRSPPARERSRS

SEQ ID NO: 20045 - protein, 988 aa, Vitis vinifera
MGEKLLLEVKKRVVVCLFIWVFLFLSSLAFQLNDEGKALMSIKASFSNVANALLDWDDVHNADFCSWRGVFCDNVSLSVVSLNLSNLNLGGEISSAVGDLKNLQSIDLQGNRLTGQLPDEIGNCVSLSTLDLSDNLLYGDIPFSISKLKKLELLNLKNNQLTGPIPSTLTQIPNLKTIDLARNQLTGEIPRLIYWNEVLQYLGLRGNSLTGTLSPDMCQLTGLWYFDVRGNNLTGTIPDSIGNCTSFEILDISYNQITGEIPYNIGFLQVATLSLQGNKLTGKIPEVIGLMQALAVLDLSENNLIGPIPPILGNLSYTGKLYLHGNKLTGPIPPELGNMSKLSYLQLNDNQLIGSIPAELGKLEQLFELNLANNDLEGPIPHNISSCTALNQFNVHGNHLSGSIPPGFQNLESLTYLNLSSNNFKGRIPLELGRIVNLDTLDLSSNGFLGTVPASVGDLEHLLTLNLSRNNLDGPVPAEFGNLRSIQTIDMSFNKLSGGIPRELGQLQNIVSLILNNNNLDGEIPDQLTNCFSLTILNVSYNNFSGVVPPIRNFSRFSPDSFIGNPLLCGNWLGSICGPYVPKSRAIFSRTAVACIALGFFTLLLMVVVAIYKSNQPKQQINGSNIVQGPTKLVILHMDMAIHTYEDIMRITENLSEKYIIGYGASSTVYKCVLKNSRPIAIKRIYSQYAHNLREFETELETIGSIKHRNLVSLHGYSLSPKGNLLFYDYMENGSLWDLLHGPSKKVKLDWETRLKIAVGAAQGLAYLHHDCNPRIIHRDVKSSNILLDENFDAHLSDFGIAKCIPTAKTHASTYVLGTIGYIDPEYARTSRLNEKSDVYSFGIVLLELLTGKKAVDNESNLHQLILSKADDNTVMEAVDPEVSVTCMDLAHVRKTFQLALLCTKRHPSERPTMHEVARVLVSLLPAPPAKPCSSPPKPIDYAHFVMDKGQKQQNAQLPPHVEPDNNTSSNDAQWFVRFHEVISKNSL

SEQ ID NO: 20046 - protein, 210 aa, Vitis vinifera
MVRGKIQMRRIENATSRQVTFSKRRNGLLKKAYELSVLCDAEVAVIIFSQKGRLYEFSSSNMQSAIERYREHAKQVETNNPELEQYMQNLKQDAESMAKKIELLEVSQRKLLGQGLSSCSLDEILEIDSQLEKSLKSIRARKAQIFQEQIEELKEREKQLLEENARLSQKDTRQWQLSAQPSEGVTYSQSSPSSEVETELFIGLPEMRCS

SEQ ID NO: 20047 - protein, 175 aa, Vitis vinifera
MAVLIQKPHALLHTPILITPTKPRLRIKCQDSSEPQKPSTSAQPTSPGQGFGSASSTVKTAVNKKKEKGRRERASIIRRSPVQKPEFLGVEEQGESKEQGRNESAFLLAWLGLGGIILVEGIVLAASGFLPEEWDKFFVKYLYPSFTPTVFLFVAGTVAYGVLKYLQNEEIKTPK

SEQ ID NO: 20048 - protein, 291 aa, Vitis vinifera
MQDIHSMGAGGGRIFGGDRRLRPHQNQALKCPRCESLNTKFCYYNNYNLSQPRHFCKSCRRYWTKGGVLRNVPVGGGCRKTKRSKAKSSSDAPRERKSNSHSSSESSSLTATTTAAATTATTEAVSAPSSNAASTLVGFRESRFFAPQSPNPNFEMPTLLDHSSDGNIFPEIGSFTSLMTGSNDPAALGFNISDISPFKYQEQVDQNQQWQQQQQKMSDELKMQEITAGFLDQTVQVELSALQNRSNHGGFPSLDWQTSGDQGIFDLPGNVDQGYWTQSQWSDNDHPLYLP

SEQ ID NO: 20049 - protein, 332 aa, Vitis vinifera
MRIAMSTLSKSASSSSEEDAELRRGPWTLEEDTLLIHYIASHGEGRWNLLAKCSGLRRTGKSCRLRWLNYLKPDVKRGNLTPQEQLLILELHSKWGNRWSKIAQHLPGRTDNEIKNYWRTRVQKQARHLKIDSNSRAFQDVIRCVWMPRLLQKIEGSSSTSSTTSQVSIIPQSLNHADSQQHSAAAPPPVVAQAPVQGPLSINETINNLEHNEKNSSSENCTSPSICSSESMNISQISQIPDYPTSPFQAMSNSDDYSTLLKGYYNVDNSNYEMETFNLASMSAPQGDFENPVGDCPMVESNWVDSDLADSLWNMDELWQFWKLQEGAPRLF

SEQ ID NO: 20050 - protein, 451 aa, Vitis vinifera
MASRLLQTLKTTSPTCRLLSHLSTATAAVAAKESYEDADGISMKGVKISGRPLYLDVQATSPVDPRVLDAMLPYYLSSFGNPHSRTHLYGWESELAVEKARAQVAALINASPKEIVFTSGATESNNISVKGVMHFYKDKKRHVITTQTEHKCVLDSCRHLQQEGFEVTYLPVGSDGIVDIDQIRSAIRPDTGLVSVMAVNNEIGVIQPIEEIGKMCKELGVPFHTDAAQALGKIPIDVEKMNVSLMSLSGHKIYGPKGVGALYMRRRPRIRVEPQMNGGGQERGIRSGTVPTPLVVGMGAACELAMKEMEYDDERITALQKRLLNGINAKLDGVVVNGSRERRYAGNLNLSFAYVEGESLLMGLKEVAVSSGSACTSASLEPSYVLRALGVDEDMAHTSIRFGIGRFTTDAEIDRAVELTVQQVEKLREMSPLYEMVKEGIDIKSIQWAQH

SEQ ID NO: 20051 - protein, 356 aa, Vitis vinifera
MALLSDLINLNLSETTEKVIVEYIWVGGSGMDLRSKARTLSGPVSDPAKLPKWNYDGSSTGQAPGEDSEVILYPQAIFKDPFRRGNNILVMCDTYTPAGEPIPTNKRCNAAKIFSHPDVAAEVPWYGIEQEYTLLQKEVKWPIGWPVGGFPGPQGPYYCGIGADKAWGRDIVDAHYKACLYAGINISGINGEVMPGQWEYQVGPSVGISAGDELWVSRYILERITEIAGVVLSFDPKPIQGDWNGAGAHTNYSTKSMRNDGGFEVIKKAIEKLGLRHKEHIAAYGEGNERRLTGRHETADINTFLWGVANRGASIRVGRDTEKAGKGYFEDRRPASNMDPYVVTSMIAETTILWKP

SEQ ID NO: 20052 - protein, 497 aa, Vitis vinifera
MAQLQAISSYSSTDLLFRRPKLESSPYHDKLYWWRQLPFVPELGTRGSGINGQAIVHNNGSLFQNLTRVHSNQAIRAVVSSEKETVTSGASNGGLRGKLNKVVLAYSGGLDTSVIVPWLRQNYGCEVVCFTADVGQGIKELEGLEEKAKASGACQLVVKDLKEEFVKDYIFPCLRAGAIYERKYLLGTSMARPVIAKAMVDVAKEVGADAVSHGCTGKGNDQVRFELTFFALNPELNVVAPWREWEIRGREDAIEYAKKHNVPVPVTKKSIYSRDRNLWHLSHEGDILEDPENEPKNDMYMMSVDPEHAPDQPEYIEIGMVSGLPVSVNGKELSPASLLSKLNEIGGRHGIGRIDMVENRLVGMKSRGVYETPGGTILFTAARELESLTLDRESIQQKDSLALKYAELVYAGRWFDPIRESIDAFMKKITETTTGSVRLKLYKGSVTVAGLKSPYSLYRQDISSFESGQIYDQADAAGFIRLYGLPMKVRAMLEKGI

SEQ ID NO: 20053 - protein, 377 aa, Vitis vinifera
MDWNLKTPSWDLTELETEAIPNIDVVGGTSSSGVHKTGGDFSIDLKLGQVSNPSSDFADKLKEQKFSSIAAPLPSGSSKRARATNNGSQTVSCLVDGCNSDLSNCREYHRRHKVCELHSKTAQVTIGGHTQRFCQQCSRFHSLEEFDEGKRSCRKRLDGHNRRRRKPQPEPLSRPGSFLTNYQGSGLLPFSSPHLYPTTAMMSPNWGAGLVKTEEGAILYNQHQQLPLLEKQHLHLGSSSSFYKGGKQLTFLQADHPSLSNYTTSEAPVCQPLAGHGCKMFYDRLTNQVLESDCALSLLSSPQTQSSGISLSNMVQPNSVSLAQPSAPSLHYNNQPVDSVLVSNAGVTDIHCPGIFHIGSDGSSGNEAPQKLPFFWD

SEQ ID NO: 20054 - protein, 371 aa, Vitis vinifera
MAATSKMGLHFSEDLRKKKLNKNVGLAKKLLKVEYYCSPMIRKENLLRRKLSVVANSTGYRAAQTDMINGKKLNGIHAGKMISSTDACMLGKFVEERFVYRQTFVIRSYEIGPDKTATMETLMNLLQETALNHVSSSGLAGNGFGATREMSLRKLIWVVTRIHIQVEKYSSWGDVVEIDTWVDAAGKNGMRRDWIIRDCNTQKIITRATSTWVIMNRETRRLCKIPEQVREEVQPFYLNRLAIAAAAQNHNEKIDKLTDETAGRIRSGLAPRWSDMDANLHVNNVKYIGWILESVPVDVLEHYNLTSMTLEYRRECRQSDLLESLTSMKAKVSEESSNKSRDLLSTHLLRMDDDKAEIIRARSEWQSKQQH

SEQ ID NO: 20055 - protein, 349 aa, Vitis vinifera
MAAFSYQHPPFLLDSVFLPSTPIKMSGFMEEGNTTTCFSQFFPSESLHEVPADARVHESTSLQHSSKVTLSDNEPCVTQKLSTDSSSVVDRLELGEQVTQKVAPIERERKRKSRDGSSLTSAQSKDAREGKGKKAKKGSGLVKDGEEEQLKADKKDQKKASEEPPTGYIHVRARRGQATDSHSLAERVRREKISERMKLLQALVPGCDKVTGKALMLDEIINYVQSLQNQVEFLSMKLASVNPMFYDFGMDLDALMVRPERLSALTSPLPSLQQCSPSQPTAYADTTTTFTATNNYPVMDTSASILFHQGQRLNVFSQDNGSLLWDVDDQRQKFINPSGLISNNLCSFN

SEQ ID NO: 20056 - protein, 246 aa, Vitis vinifera
MGRGRVELKRIENKINRQVTFAKRRNGLLKKAYELSVLCDAEVALIVFSSRGKLYEFCSGPSMAKTLEKYQKCSYGALEASQPVYELTQSSYQEYLKLKTRVEVLQRSQRHLLGEDLDPLNTKELEQLEHQLEMSLKQIRSTKTQNMLDQLADLQNKEHMLIEANNALRRKLEESNGKHPLQQSWEAAGNSALYSRLPAQSEGFFQPLERNSTLEMGYNAAGSNEITLAAPSQNDNGFGPGWMLWI

SEQ ID NO: 20057 - protein, 631 aa, Vitis vinifera
MHGLGGGERVPLLGREGGRKRNDTLVNGHLTDLEHGDAIPAANVGFCRVLSLAKPDAGKLVLATIALLIASTSSILIPKFGGKIIDIVSREIITPEQKTEALNAVKNTILEIFLIVIVGSICTALRAWLFSSASERVVARLRKNLFSHLIQQEIAFFDITRTGELLSRLSEDTQIIKNAATTNLSEALRNLSTAFIGLGFMFATSWKLTLLALAIVPAISVAVRKFGRFLRELSHKTQAAAALAASIAEESFGAIRTVRSFAQEAYEISRYSSQVEETLNLGIKQAVIVGLFFGGLNAASTLSVIVVVIYGANLTINGSMSPGALTSFILYSLTVGSSVSGLSGLYTVAMKAAGASRRVFQLLDRVSSMPKSGNKCPLGDQDGEVELNDVWFAYPSRPDHMVLKGITLKLQPGSKIALVGPSGGGKTTIANLIERFYDPIKGRILLNGVPLVEISHEHLHRKISIVSQEPVLFNCSIEENIAYGYEGKASSADVENAAKMANAHEFISKFSEKYQTHVGERGVRLSGGQKQRVAIARALLMNPRVLLLDEATSALDAESEYLVQDAMDSLMKGRTVLVIAHRLSTVKSADTVAVVSDGEIVESGTHDELLDKDGIYTALVRRQLQGPRNEV

SEQ ID NO: 20058 - protein, 317 aa, Vitis vinifera
MASGRVNLAAMLQNQRVPCSSQPLDALFLSASSPSFLGSRSMLSFEDVRAGKRPDNPFFCQFDHDENGDEDLDEYFHQPEKKRRLTADQVQFLERNFEVENKLEPERKVQLAKDLGLQPRQVAIWFQNRRARWKTKQLEKDFGALQASYNSLKAEYENLLKEKDELKTEVILLTDKLLVKEKERGNLEVSNTDTLSQELPQVVVADSVSEGEVSKVSLVVCKQEDLSSTKSDVFDSDSPHYADGGHSALPEPGDSSYVFEADQSDVSQDEEDNFSKSLLPPSYIFPKLEDVDYPDPPTNPCSFGFPVEDHAFWSWSY

SEQ ID NO: 20059 - protein, 503 aa, Vitis vinifera
MGEVREENQRLRMYLDQIMKDYKTLQMQFYDVVRQEAKESTEKASILQIEEPEFVSLSLGRVSSDPKKDEKNKTTSKVEDDGVKGGLSLGLDCKFEVLNPSPENSFGGPKEAAGESWPPSKSLKTMRTGDDEISQQNPAKRCRVSVRARCDTPTMNDGCQWRKYGQKIAKGNPCPRAYYRCTVAPSCPVRKQVQRFAEDMSILITTYEGTHNHPLPYSATAMASTTSAAASMLMSGSSSSQSGSGSCPLSATSADLHGVNFYLSDNSKSKQFYSINSSLSAVSSNPTITLDLTTASSSSSSSSHFNRLSSNYPPPRFPSTGFNFSSSESNSLPISWSNGLLSYGSTTTTQPYNRNHTGSQNSGRHTQENFFHPHVQKNNPAPVQQPLPDPIAAATKAIASDPSFQSALAAALTSIMGANGGTHANHSGGEAFGQKLMWGSESLPAVSTYQSTSKGNGCASSYLNKSPPTNSQPGSLMFLPPALPFSTSKNASASPAENREHTS

SEQ ID NO: 20060 - protein, 242 aa, Vitis vinifera
MDPINFIKGYNKLNHLEDQAAPSTHTHKKPLLITITISFILLFTLIIGAVVGALVHHSYTQSPEYPSLSSSYADSIKTICNVTQYPVSCFSTLSTLNASPKFDPELIFMASLKISFTHLSNLSSFPKTLILRAKDPRSEAALRDCESLLEDASAQVNNTISAMEVGPGKKMMTESKIEDMRTWLSSAITDQETCLDGLEEMNSSVVEEVKNTMQPSKEFTSNSLAILANIKVLLQNFNLTMH

SEQ ID NO: 20061 - protein, 124 aa, Vitis vinifera
MGSVLGKGKSKEEVEMALAKAKEIVSSTPVVVFSKTYCGYCKRVKQLLSQLKATHKTIELDQESDGAEIQSALREWTGQSTVPNVFIGGKHMGGCDSVMEKHQEGKLVPLLKEAGAIAEVSTQL

SEQ ID NO: 20062 - protein, 862 aa, Vitis vinifera
MVSRSSYTSFLDAASGDLLNFPQTPRTLPRVMTVPGIISDGDGNGSNDEDSDIFSSKCREKKIIVANFLPLLAQKDLNTGRWCFSFDEDALLLQMKDGFSSETDVVYVGSLKVDVDTSEQEEVAERLLAEFNCVPTFLPPDLQKKFYHGFCKQYLWPLFHYMLPMSPEHCNRFDRFLWQAYVSANKIFADKVMEVINPEEDYVWIHDYHLMILPTFLRKRFYRVKLGFFLHSPFPSSEIYRTLPVRDDILKALLNADLVGFHTFDYARHFLSCCSRMLGLNYESKRGHIGLEYFGRTVYVKILPVGIHMGQLESALNLPSTSIKVKEIQEQFKGKKIILGVDDMDIFKGLSLKLLAMEHLLQHYEELRGELVLVQIVNPARSTGKDVQEAKRETYAITERINANFGFPGYEPVVLIDHPVPFYEKTAYYALAECCIVNAVRDGMNLMPYNYIVCRQGTPKIDEALGITSGSSRTSTLVVSEFIGCSPSLSGAIRVNPWDIDAVADALNIAITMPGLEKQLRHEKHYRYVSSHDVAYWACSFMQDLERACKDHYSKRCWSIGFGLSFRIVALSPNFRKLSLDHIVKAYKRANRRAIFLDYDGTVVPQSSIVKTPSPEVISILNDLCNDPKNTVFIVSGRGKNSLSDWFAQCQNLGIAAEHGYFIRWSQSSNWESRPLLMDFDWKRIADPVMQLYTEATDGSYIETKESALVWHHQDADPDFGSCQAMELLDHLENVLANEPVEVKRGHHIVEVKPQGVSKGQVTEKILSTMISDGKPPDFVMCIGDDRSDEDMFESISSTIYSPSLPAPPEIFACTVGQKPSKARYYLDDSADVLKLLQGLARASSMKPKCSTQIQFSFESVA

SEQ ID NO: 20063 - protein, 364 aa, Vitis vinifera
MSRIPSQLKQKDDILIHPPPLSPVSSFSYPYSSTIYEKGSTPSPSSSVSRISPTLLLIIVILAIIFFISGLLHLLVRFLMKRPSSLLYQSGRYIETSGSNAFQRQLQQLFRLHDRGLDQAFIDALPVFTYKDIVGLKEPFDCAVCLSEFSENDQLRLLVMCSHAFHINCIDTWLLSNSTCPLCRGTLLSSGLPLENPVQNGDDPREASNTFPSEGDHEGCSSSQKPVTMEETGSQRRVFPVRLGKFRSLNNEGTQSGEREQEGTSSSYLDARRCYSMGPCQYVVGDSNLQVALSHDNGASSEEKHAKARDQHGNCSTDHEDAEGKKISSRIRGESFSVSKIWLWPKKNKVPSSSDPHMSLPFAP

SEQ ID NO: 20064 - protein, 911 aa, Vitis vinifera
MNPEKFTHKTNETLAGAHELAMNSGHAQLTPLHVAVALITDPNGILRQAIIGAGGNEEAANSVERVFNKALKKLPSQSPPPDEIPVSTTLIKVVRRAQSSQKSRGDTHLAVDQLILGLLEDSQIGDLLKEAGVSTSRVKSEVEKLRGKEGKKVESASGDTTFQALKTYGRDLVEQAGKLDPVIGRDEEIRRVIRILSRRTKNNPVLIGEPGVGKTAVVEGLAQRIVRGDVPSNLAEVRLIALDMGALVAGAKYRGEFEERLKSVLKEVEEAEGKVILFIDEIHLVLGAGRTEGSMDAANLFKPMLARGQLRCIGATTLEEYRKYVEKDAAFERRFQQVYVAEPSVPDTISILRGLKERYEGHHGVRIQDRALVVAAQLSSRYITGRHLPDKAIDLVDEACANVRVQLDSQPEEIDNLERKRMQLEVELHALEKEKDKASKARLVEVRRELDDLRDKLQPLMMKYKKEKERIDELRRLKQKREELLFALQEAERRYDLARAADLRYGAIQEVEAAIANLEGTTDENMMLTETVGPEQIAEVVSRWTGIPVTRLGQNDKERLIGLAERLHQRVVGQDQAVSAVAEAVLRSRAGLGRPQQPTGSFLFLGPTGVGKTELAKALAEQLFDDENLLVRIDMSEYMEQHSVSRLIGAPPGYVGHDEGGQLTEAVRRRPYSVVLFDEVEKAHIAVFNTLLQVLDDGRLTDGQGRTVDFTNTVIIMTSNLGAEHLLSGLVGKCTMQDARDRVMQEVRRHFRPELLNRLDEIVVFDPLSHDQLRKVARLQMKDVASRLAERGIALAVTDAALDVVLAESYDPVYGARPIRRWLEKKVVTELSKMLIREEIDENSTVYIDAGVSGKGLAYRVENNGGLVNASTGQKSDVLIRIPNGPRSDAAQAVKKMKIEEIEDEEDEMDL

SEQ ID NO: 20065 - protein, 159 aa, Vitis vinifera
MSDEEHHFESKGDAGASKTYPQQAGTIRKNGYIVIKSRPCKVVEVSTSKTGKHGHAKCHFVGIDIFNGKKLEDIVPSSHNCDVPHVNRTDYQLIDISEDGFVSLLTENGNTKDDLRLPTDDNLLTQIKDGFAEGKDLVVSVMSAMGEEQICALKDIGPK

SEQ ID NO: 20066 - protein, 876 aa, Vitis vinifera
MEDGAPPPETALGTVPDSSMDLDFMDELFLGGCWLETTDGSEFLLQSPSNSGSVFDPSSLWPTFGSNNVDLSANLSANNIQEETQRSNLDDFDLSRRWWIRPKSSPGPSSTVMERLIRALSYIRGSTKNKDALIQIWVPVNRGGRRVLTTNDQPFSLDPSCPRLARYRDISVSYQFSAEEDSNELAGLPGRVFLGKVPEWTPDVRFFRSEEYPRVDYAQHFDVRGTLALPVFEQGSQTCLGVIEVVMTTQKSNYRPELESVCKALEAVDLRSSEVLSTRNVKACNKFYQAALPEILEVLTSACGTHGLPLAQTWVPCIQQGKWGSRHTDGNYIHCVSTVDSACCVADPRTQGFHEACSEHHLLKGQGIAGRAFTTNEPCFSADITSFSKTQYPLSHHARMFGLCAAVAIRLRSIHVPVSDFVLEFFLPVDCRDPEEQKGMLCSLSIIIQKVCRSLRVVTDKELEGETPSLVSELTVLSDGSPGREETQKEAQQSIDITPPSQKEKVRERLSEKSLEFRQHQQDSSQQGSFDCRDDSTFGKSSLSSVGKTGERRRSKAEQTITLQVLQQYFAGSLKDAAKSIGVCPTTLKRICRQHGIKRWPSRKIKKVGHSLHKIQLVIDSVKGASGAFQIGNFYSKFPELASPELSGTHPYSTSKLFDHQNPLSVQPEGDNSSTGVAASKSLSSSCSPSSSSSQCCSTGTQEHPSTCSVTGSDPMVGENSAEGMLKRVRSEVELPISSQEELKLLPRSQSHKSLPECPNLESHPAIPQSGSLASQEGDAWRVKVTYGDEKIRFRMQSNWGLKDLRQEIGRRFNIDDSSGFHLKYLDDDLEWVLLTCEADFEECKDICGSSQNHVIRLAIHQISHHLGSSLGSTCP

SEQ ID NO: 20067 - protein, 153 aa, Vitis vinifera
MKGGRSKSDTKKADAKLSVKKGAAATKAGKKTKKEKPVKDPNKPKRPASAFFVFMEEFRKQYKEKHPSNKSVSVVGKAGGDKWKSMSEAEKAPYVAKAEKRKVEYEKNMKAYNKKQAEGTKVVEEEDESEKSLSEVNDQEDDEDGSEEEEDDE

SEQ ID NO: 20068 - protein, 358 aa, Vitis vinifera
MATAVNAAVSLPSSKSSSLPIRNHIIVSPERIFLYSRNVCVGRKVVTIKAQVTTEAPAKVEKVSKKNDEGVVVNKFRPKNPYIGKCLLNTKITGDDAPGETWHMVFTTEGEVPYREGQSIGVIPDGIDKNGKPHKLRLYSIASSALGDFGDTKTVSLCVKRLVYTNDQGEIVKGVCSNFLCDLKPGADVKITGPVGKEMLMPKDPNATVIMLATGTGIAPFRSFLWKMFFEKYEDYKFKGLGWLFLGVPTTSSLLYKDEFEKMKEKAPENFRVDYAVSREQTNEKGEKMYIQTRMAQYAEELWELLKKDNTYVYMCGLKGMEKGIDDIMVSLAARDGIDWTEYKRQLKKSEQWNVEVY

SEQ ID NO: 20069 - protein, 483 aa, Vitis vinifera
MSLSIRLHISSNLSLNFHPQTTIRRTNHSTSIRPRPIYHSNPLAPALLRRAMSAIPSHKSSSSSTIKSSLIEPDGGALVDRVVPESERAAKALEAESMPKVGLTQIDLEWVHVISEGWASPLKGFMREDEYLQSLHFNCIRMKDGTIVNMSLPIVLAIDDEAKERIGASQDVGLVGPTGDLVGILRSIEIYKHNKEERVARTWGTTAPGLPYVEEVITPAGNWLIGGDLEVLKPIKYNDGLDHYRLSPQQLRKEFDKRQADAVFAFQLRNPVHNGHALLMNDTRRRLLEMGYKNPILLLHPLGGYTKADDVPLDVRMEQHSKVLEDGVLDPETTIVAIFPSPMHYAGPTEVQWHAKGRINAGANFYIVGRDPAGMGHPTEKRDLYDPDHGKKVLSMAPGLEKLNILPFRVAAYDTVGKKMAFFDPSRAKDFLFISGTKMRTYARNGENPPDGFMCPQGWSVLVRYYESLQAEDTTQQSAVVSA

SEQ ID NO: 20070 - protein, 187 aa, Vitis vinifera
MLKLPNVIFMGSKCGGEELPMRPPSPSQGNSTDGNLVKLRLDCSKVDFSGAELKKIMGNEKLAEIALVDPKRAKRILANRQSAARSKERKVRYMAELEHKVHTLQTETTTLSHLLTLLQRDSAELTSRNNELKLRIQAMEQEAQFRDALKEALTLEVHRLQLLGTAEPSGGKVFFSSLCFVRDSGPN

SEQ ID NO: 20071 - protein, 232 aa, Vitis vinifera
MTSGFGESTSRPPQSPSFSSNNGSNSDAGNFECNICFDLAQDPIVTLCGHLFCWPCLYKWLHIHSHSQECPVCKALVEEEKLVPLYGRGKTSTDPRSKSIPGINIPNRPTGQRPETAPPPDANHFMQHGFGFMGGLGGFAPMATARFGNFTLSAAFGGLFPSLFNLQVHGFPDATMYGPAAGFPYGFSNSFHGGHAHGFPQHPPTQGQQADYYLKMLFLMIGVFVIIALIWS

SEQ ID NO: 20072 - protein, 479 aa, Vitis vinifera
MGWLNKIFKGSSHKISEGNYHGRYQGDTVQNEPSCSGDVWAETENEDIDRAIALSLSEEEQKGKKVIDNEFQLEEDEQLARAIQESLNIESPPQHGNGNGNGNIYQPIPFPYSTGFRICAGCNTEIGHGRFLSCMGAVWHPECFRCHGCGYPISDYEYSMNGNYPYHKSCYKEHYHPKCDVCKHFIPTNPAGLIEYRAHPFWVQKYCPSHEHDRTPRCCSCERMEPRDTRYVALNDGRKLCLECLDSAIMDTNECQPLYLDIQEFYEGLNMKVQQQVPLLLVERQALNEAMEGEKSGHHHMPETRGLCLSEEQTVSTILRRPKIGTGNRVMNMITEPCKLTRRCDVTAVLILYGLPRLLTGSILAHEMMHAWLRLNGYRTLAQDVEEGICQVLAYMWLDAELTSGSGSNVPSTSSASTSSKKGAGSQCERKLGQFFKHQIESDTSLVYGAGFRAGHQAVLKYGLPATLKHIHLTGNFPY

SEQ ID NO: 20073 - protein, 447 aa, Vitis vinifera
MGSNLNFKNFGGSQQGDGSGRPPGNMPLVRQGSIYSLTFDEFQSTMGGIGKDFGSMNMDELLKNIWSAEEAQTMAAVAAATAPPISVQEGVVAGGYLQRQGSLTLPRTLSQKTVDEVWKDMSKEYGGGAKDGSGAGGSNLPQRQPTLGEMTLEEFLVRAGVVREDTQLAGKPNNGGFFGDLANLGNGNGLGIAFQQMGQNTGLMGNPRITESNNQISTQSPILPLNVNGVRSTQQQPQQLQQLQQLQQRSSQQQLFPKQAPVTYTTPVSVQSNSQLCNPGIRNGMVGISDSGINGNLVQSSVLHGGGMGMVGLGAGGATIASGSPANQSSDGIGKSNGDTSSVSPVPYAFNGGIRGRKCSGAVEKVIERRQRRMIKNRESAARSRARKQAYTMELEAEVAKLKEKNEELEKKQAEMMEMQKNQVMEMMNLQREVKKRCLRRTLTGPW

SEQ ID NO: 20074 - protein, 291 aa, Vitis vinifera
MSEEASHGNLWQNHSCDFLNSDSNSGGSGGEKLGEKPPDSSSNSPVENRQGMALVGRKRGRRAKASDGGGGESEHETHIWTERERRKKMRNMFSSLHALLPQLPPKADKSTIVDEAVNYIKTLQNSLTKLQKQRHEMQQGATAVDCEQSIITSQALAPDTRETSLPAGDRSLKNYFSLPTNKPNLLSAPSSSLCFQTWFSPNVVVSMCGNDAHISVCSSRKPGLLATIFYILEKHKLDVLSAHISSTQQRSIYMIHAHASGVSDDQLPKGLTVEEIFKLAVGEMTLWLSSC

SEQ ID NO: 20075 - protein, 605 aa, Vitis vinifera
MAASCSTNLISFPPSLRKSTSPSYSLSWQASLPSTVSFAVGRRVSSRTTKSLVVVVTAMMEAKPTVLVAEKLGEAGLELLKGFANVDCSYNMSPEELCTKISLCDALIVRSGTKVTREVFESAGRRLKVVGRAGVGIDNVDLSAATEHGCLVVNAPTANTIAAAEHGVALLTAMARNIAQADASVKAGKWERSKYVGVSLVGKTLAVMGFGKVGSEVARRAKGLGMHVIAHDPYAPADRARAIGVNLVTFEEAISTADFISLHMPLTPATSKILNDESFSRMKKGVRIVNVARGGVIDEEALIRALDSGIVAQAALDVFTEEPPPKDSKLVQHENVTVTPHLGASTTEAQEGVAIEIAEAVVGALKGELAATAVNAPMVPAEVLSALAPFVVLAEKLGRLAVQLVAGGSGVRSVKVTYASSRGPDDLDTRLLRAMVTKGLIEPISSVFVNLVNADFTAKQRGLRITEERVVLDGSPENPLEFIQVQIANVESKFASAISESGEIKVEGRVKDGKPHLTKVGSFGVDVSLEGSLILLRHVDQPGIIGKVGSILGEENVNVSFMSVGRTAPRKQAVMTIGVDEEPSREALTRIGNLPAIEEFVFLEL

SEQ ID NO: 20076 - protein, 197 aa, Vitis vinifera
MAFAGTTQKCMACDKTVYLVDKLTADNRVYHKACFRCHHCKGTLKLGNYNSFEGVLYCRPHFDQLFKRTGSLDKSFEGTPKIVKPEKPIDSEKPIANKVSSMFAGTRDKCVGCKNTVYPTEKVTVNGTAYHKSCFKCTHGGCTISPSNYIAHEGRLYCKHHHTQLIKEKGNLSQLEGDHEKDTANEKVNGREVAAES

SEQ ID NO: 20077 - protein, 270 aa, Vitis vinifera
MGFEDVCCTGLGLGLGRQDRPQSRLQSDHQEKKKKLCLKYDNSFPCLTLGPSEDTYQLAAKINDAGKGYGESTDLHRQASSLSAVSSFSNSSIKKERDLCGEVEVEVEIERVSSRASDEDEEGNSRKKLRLTKEQAVILEDSFKQHSTLNPRQKQVLAKQLNLRPRQVEVWFQNRRARTKLKQTEVDCELLRKRCETLTDENQRLQKELQELKALKLATPLYMQLPAATLTMCPSCERIGSGGDASSKTSFTIGAKPRFCNPFTHPSPAC

SEQ ID NO: 20078 - protein, 117 aa, Vitis vinifera
MENEGVSLSRPVIGFPVGLALLLIMLLCMSALMSFCFHWDKFRCLRHSTEDHTSNTQSRIPHSPPKSVPPHMKWKQNQSPSLPVLMPGDEAPKFIAIPCPRVIVKVETPLAFREPLY

SEQ ID NO: 20079 - protein, 316 aa, Vitis vinifera
MASLSLFSFFCMFSFLLGMAHAQLSPNFYASSCPRALSTIRTAVNNAVAKERRMGASLLRLHFHDCFVLGCDASILLDDTANFTGEKTAGPNNNSLRGYDVIDTIKSQMESLCPGVVSCADIVAVAARDSVVALGGPTWTVQMGRRDSTTASLSTANADLPAPTSDLDVLTSLFSNKGFTTQEMVALSGTHTIGKAQCIKFRYRIYNETNVDAAFAKSKQKICPWTGGDENLSDLDETTTVFDTVYFKDLIEKKGLLHSDQQLYNGNSTDSMVETYSTDSTTFFTDVANAMVKMGNLSPLTGTDGEIRTNCRKING

SEQ ID NO: 20080 - protein, 316 aa, Vitis vinifera
MASLSLFSLFCMFSFLLGMAHAQLSSDYYSSSCPSALSTIQTAVNNAVADESRMGASLLRLHFHDCFVLGCDASILLDDTANFTGEKTAGPNNNSVRGYDVIDTIKSQMESLCPGVVSCADIVAVAARDSVVALGGPTWTVQLGRRDSTTASFSTANSDLPAPTSDLDALISLFSNKGFTTQEMVVLSGTHTIGKAQCSKFRDRIYNETNIDATFATSKQAICPSSGGDENLSDLDETTTVFDNVYFTNLIEKKGLLHSDQQLYNGNSTDSMVETYSNDSTTFFTDVASAMVKMGNLSPLTGTDGEIRTNCRAING

SEQ ID NO: 20081 - protein, 317 aa, Vitis vinifera
MASLSLFSLFCVFSFLLGMAHAQLSSNFYASSCPKALSTIRAAVNNAVAKERRMGASLLRLHFHDCFVLGCDASILLDDTASFTGEKTAGPNKDSVRGYEVIDTIKSQVESLCPGVVSCADIVAVAARDSVVALGGPTWTLQLGRRDSTTASLSTANSDLPGPASDLSTLISRFSNKGFTTKEMVALSGTHTIGKARCTSFRSRIYNETNIDAAFATSKQKICPSTGGDNNLSDLDETTTVFDNVYFRNLKAKKGLLHSDQQLYNGGSTDSIVETYSTNSATFFTDVANAMIKMGNLSPLTGTNGEIRTDCKKINGS

SEQ ID NO: 20082 - protein, 318 aa, Vitis vinifera
MASPSLLSLFFIFSLLLGMAHAHYLSPNFYARSCPRALPTIRTAVNKAVAKEKRMGASLLRLHFHDCFVLGCDASILLDDTATFTGEKTAGPNNNSVRGYEVIDTIKSQVESLCPGVVSCADIVAVAARDSVVALGGPTWTVRLGRRDSTTASFSAARTDLPGPNLNLSQLISAFSKKGLTTKEMVVLSGTHTIGKARCTSFRNHIYNDTDIDPAFAASKQKICPRSGGDDNLSPLDGTTTVFDNVYFRGLKEKKGLLHSDQELYNGGSTDSIVETYSINTATFFRDVANAMVKMGNISPLTGTNGQIRTNCRKVNGS

SEQ ID NO: 20083 - protein, 287 aa, Vitis vinifera
MKRFSSSVSLAPLVSMCSPKEGKNSKNYPVYDSEFQAMLDSFDEEDCAEETGLITEKKKRLSFDQVKALERSFEIENKLEPERKVKIAEELGLKPRQVAIWFQNRRARWKTKQLERDYGILKANYDALKLDYESLEQEKEALVAELRELKAKLQGGNMELNQSVKEEALVSESENNVSEQGKNNGNISGIHGLGDFKDGSSDSDSSGVLKNESNFNAQLMMSPASSSSLRLNCASLSSPSPMNWFPSKAFQHQFGRMEEQSFFSAEEPCNFFWGDQAPSLHWYFPDQ

SEQ ID NO: 20084 - protein, 335 aa, Vitis vinifera
MERYEIIKDIGSGNFGVARLVSDKRTRELFAVKFIERGQKIDEHVQREIMNHRSLMHPNIVRFKEVLLTPTHLAIVMEYAAGGELFGRICNAGRFSEDEARFFFQQLISGVSYCHSMRICHRDLKLENTLLDGSTAPRVKICDFGYSKSSVLHSQPKSTVGTPAYIAPEVLSRKEYDGKLSDVWSCGVTLYVMLVGAYPFEDPDDPRNFRKTIGRILSVHYSIPDYVRVSIECRHLLSRVFVANPDKRITIPEIKTHPWFLKNLPIEMMDGGSWQKNDVNNPSQSVEEILSIIQEARKTTGVRKAGGPFMEGSMDLDDIDADEDIETSGDFVCPL

SEQ ID NO: 20085 - protein, 654 aa, Vitis vinifera
MPMEQQQQLNIEDGSKTQRAEWVLNSPEPPGLCHEIVSSIKSAVFPNGGKHSSSSTKQTRSTAAGVVSFLYGLFPILTWGRNYKATKFRNDLMAGLTLASLSIPQSIGYATLANLAPQYGLYTSVVPPLVYALMGSSREIAIGPVAVVSLLLSSMIQNVVDPVANAVAYRKLVLTVTFFAGTFQFIFGLFRLGFLVDFLSHAAIVGFMGGAAIVIGLQQLKGLLGISHFTTKTDVVSVLEAVFRSLHHQWYPLNFVLGCSFLIFILFTRFIGRRNKKLFWLPAIAPLISVVLSTAIVFLTKADEHGVKIVKHIKRGLNPISAHELQFSGQHVGQAAKIGLVSAIVALTEAIAVGRSFASIRGYHLDGNKEMVAMGFMNIAGSLTSCYVATGSFSRTAVNFSAGCETVVSNIVMAIAVFLSLELLTRLLYFTPIAILASIILSALPGLIDIPEAYHIWKVDKMDFLACAGAFFGVLFVSVEIGLLAAVTISFAKIILNSIRPSVEGLGKLPGTDIFCDINQYPMAIKTPGILIVRINSGLLCFANANFVRERIMKRVTEKDEEGKENSKERTQAVILDMSTVMNIDTSGICALQEVYNKLVSHNIHLAVANPRWQVIHKLKLAKVVDKIGKDWIFLSVGEAVDACSSKMVNFSSC

SEQ ID NO: 20086 - protein, 1223 aa, Vitis vinifera
MGIGSFGEAEGGGDEFEFMLDVADLLTNNDIEMPSDENIQSYLTSESVELPPFPGSNLLQVTQISSNHHDEYNNYEGLENVQLENHPNLVQPVETSSVNPSLVQPLLHAYNPITELQPYDHEADAPHAENVLRPQNMSLYQPQMQMTQYAFDPHSHNTIPYDQPSLVSRPPEAQFQGLANQTAGFNVLNPNEVAQQIQIVVSMPQEVHFEVFPSESAGPSLPSNQIQIFVSGLQELQPQGFPTQTAPPIAHNPIQGIYQQSQFMQTEQGFEGLDLQVSVPQLLEGSSSTHIEYRRLAQHTHARPQMELGESSSRPRKRVARRDHQVPSGLNPQQVSDIFQSQGNEAQDNKRRILNGLYDPLYEGTGLPIDPHLRQFVPDSIQMESDSLSDQFGFAFDGADLEGMEMGPLSGSNQAVINQGNWNEDPPFSGHNNIGQLLDTQLETSAFNAYHPDRDSNIIQLQPSNYLVYGELPSSIRRSGRPNVNHNLMQFTNSTTSAHQAGSSFSDPPSKPKPPTTAGVVNGNSSLVNRQQTTSHTQNHAYISLPPSRSDHLLDHQASQGLMVPYVLNPQHPNSIPLQSDEPLRYGQHQHLNNQVTVTPSIVGVRLRCSRPPQVSVTFRPRTQVPTAQYVQEGPNSMQLVGSSMPSSSSRYLLLGLLSSSLKYRPQQSSKWVDNAAFEFRPQQVRCHHHNQLNQAQMVPTVKDPQKQNYTLAGPSMLSRPLRLHLQELPRQTAGSGVNNLGQGTCQQTQISQIEPQRDPAQRRARARTPVELQLFPERPSKMARQEEAPPASSPPQANIISPIQGNDAQNSSRSLEKRFHVKRLRMGTLVRAESISKQVEVDISLSPRVNSVKPSKTIAVTDLATALVQAGVPVIRLAAGEPDFDTPTVVAEAGINAIREGYTRGGGKAGVPLLEEGVSFVTKDITAETSQDVIIPGPFYVSYPEMARLADATPVILPTLISNNFRLDPEVLKSTISEKSRVLILCSPSNPTGSVYPKKLLEEIADIVAKHPRLLVIADEIYEHIIYAPAIHTSFASLPGMWERTLTVNGFSKTFAMTGWRLGYLAGPKHFVAACGKIQSQVTSGASSISQKAGVAALGLGYRGGEAVAKMVKAFEERRDFLVESFRELGGVKISEPQGAFYLFLDFSSYYGAEAEGYGIIKDSESLCKYLLDKAQVALVPGDAFGDDKCIRISYAASMSNLQAAMERIKGAIVHLKATVPA

SEQ ID NO: 20087 - protein, 868 aa, Vitis vinifera
MDGEANLPAPSASANNLSRPILPDSYQNRSITSSSSSSSSSSSFYSSSPPDFLRHVQAAFKRHRPLGTMQSNSIMPRRILVPRRETSKITASNVVPTIDAKKSQDVRPSMHQGNTGKELVVEIRNKVSVVGETEEDAPITPPSISGSITNEDLYDVQRVQCKPVAGCKNTDGVSFSHVESQHVPVVDGQKKVQFLLGKNASSQGADDRMATGTDDLSSHMSSLALTEMEWDVSNQVEAPTDVNHDLKHGYFQNLESDVTSRSDGGISSLLAKKPVLAQDQLHRFRNFLQSDINHPMTQASVAGSSCATTISVHATSAPVINSTTYCSSSHQDISPHLAVETLGDVNLNSQPISKGDVMQPSHPPSKSTSGVIVDRTAIAAQASSSSIDTQSKVKEYGFSEQQDRVPNERDIPKNPSPLDDNSTKGKGFTGDVTDLQSQVPLSKSSSSDVKLETSKSEKQEKVVSGKGSSVPRKKNYDPDMFLKVNGKLYQRLGKIGSGGSSEVHKVISSDCSIYALKKIRLKGRDYATAYGFCQEIQYLNKLKGKSNIIQLIDYEVTDKTLLQEVMNGSMSNKDSRVKDDGCIYMVLEYGEIDLANMLSQKWKEMDSSDRTIDENWLRFYWQQILQAVNTIHEERIVHSDLKPANFLLVKGSLKLIDFGIAKAIMSDTTNIQRDSQVGTLSYMSPEAFMCNESDANGNTIKCGRPSDIWSLGCILYQMVYGRTPFSEFKTFWAKFKVITDRNHEIKYEPVSNPWLLDIMKKCLAWDRNERWRIPELLQHPFLVPPVPVLAQLSSSQDQSCKLLQLITEACANDPKALILCRQLQQLLRDPVTVPTSQVLTSRDQQCKLLSYVSKLCCQLQEYLSDPDT

SEQ ID NO: 20088 - protein, 228 aa, Vitis vinifera
MAESKRSTGTVKWFSGQKGFGFIAPDDGGEDLFVHQTSIRSDGFRTLSEGETVEFAVDHGEDGRTKAVEVTAVRGSYSSGGGGGRGFSGGRSRGGSYGRYGGGGYGGGGGGGGGGGGGGGYGRGVRGGRRSGRTDDGYGGGGACYNCGRTGHLARDCYQGSGGGRRGYGGGGGYSAGAGGGGYSAGAGGGGYSAGAGGGGYSFGAGGGACYNCGEEGHFARDCPNGQK

SEQ ID NO: 20089 - protein, 911 aa, Vitis vinifera
MMQLSQCTWTFPELLKRPAFLRRSIDSISSRSRSSSKYPSFMASASTVSAPNTEAEQTHNPPQPLQVAKRLEKFKTTIFTQMSMLAIKHGAINLGQGFPNFDGPEFVKEAAIQAIKDGKNQYARGYGVPDLNSAVADRFKKDTGLVVDPEKEVTVTSGCTEAIAATMLGLINPGDEVILFAPFYDSYEATLSMAGAQIKSITLRPPDFAVPMDELKSAISKNTRAILINTPHNPTGKMFTREELNVIASLCIENDVLVFTDEVYDKLAFEMDHISMASLPGMYERTVTMNSLGKTFSLTGWKIGWTVAPPHLTWGVRQAHSFLTFATCTPMQWAAATALRAPDSYYEELKRDYSAKKAILVEGLKAVGFRVYPSSGTYFVVVDHTPFGLKDDIAFCEYLIKEVGVVAIPTSVFYLHPEDGKNLVRFTFCKDEGTLRAAVERMKEKLKNNGFGLGVGCIIARALEHGGHLIHPESPLERGDQTAGKVFQSQMDGQKSQAKLTRTQSSLLRSSPTIRSSIHSLSSINEDEMIASQEEEKKPHRSGSTPRTGSHRFASVLAMASLTFCTLSFLFFFFFFYLRREEIPTSENLLLALIFVAIALFFAGKNKGFLHHTISILKHSWDCNVRKLGFSKSNAKPVQWFIGESTTNKVQKAKRIVREGVEFYSNGDFYEGEFHKGRCNGSGVYNYIVNGRYEGDWIDGRYDGYGIESWARGSRYRGQYRQGLRHGYGVYRFYTGDSYAGEWVNGQSHGIGVQTCSDGSCYVGEFKCGVKHGLGCYHFRNGDRYAGEYFGDKIHGFGVYHFANGHCYEGSWHEGRKQGYGMYSFRNGDTRCGEWDSGTLKNPLPPLTDAVLRAVQAARRTAENAIHVPRVDEQVNKAVTAANRAATAARVAAVKAVQNRMDGKFCETTDV

SEQ ID NO: 20090 - protein, 268 aa, Vitis vinifera
MGHLIEEKALGDDHQRGDSLEEKISLFFDEEDEELDRNSEGDWADDEAANNELHDPIERKEFWDSQEALLLEIMERCNSMGAKLREEIGRVVERARETLVCSCSKSNSDECALCLRRRVVDLLCLKGFSASLRTSKWRHTHKFPGGSHEYIEVMASTPGRKKQIPFLIELEFRTEFEMAKACDEYRRLIAQLPKSYIGKSDYLNAILRVVCDAAKRSMKEQKIHMGPWRKRSFMQMKWSGYNDRKQPSKDQPWNKFSLSGITAAVVVK

SEQ ID NO: 20091 - protein, 425 aa, Vitis vinifera
MSFRSIVRDVRDGFGSLSRRSFDVRLPGHHRGKSHGSVHELQDQPLVVQNSRWAGLPPELLRDVIKRLEASESTWPSRKHVVACAAVCRSWREMCKEIVKSPEFSGKLTFPISLKQPGPRDGTIQCFIKRDKSNLTYHLFLCLSPALLVENGKFLLSAKRNRRTTCTEYVISMDADNISRSSSTYIGKLRSNFLGTKFIIYDTQPPYNGSQLSPPGRTSRRFYSKKVSPKVPTGSYNIAQVTYELNVLGTRGPRRMHCTMHSIPASSLEPGGTVPGQAELLPRNLEDSFRSISFSKSIDNSTEFSSSRFSDIIGPRDEEDEGKDRPLVLRNKPPRWHEQLQCWCLNFRGRVTVASVKNFQLIAATQPAAGAPTPSQPPASDHDKIILQFGKVGKDMFTMDYRYPLSAFQAFAICLSSFDTKLACE

SEQ ID NO: 20092 - protein, 757 aa, Vitis vinifera
MSKLRQVILLFLLHSVALVSAQGSTNGTSSWQTLNGNAPLVIARGGFSGLFPDSSSAAYSLALMTSLSNVVLWCDVQLTKDGAGICFPDMKLENASDISIVFKNRNNVYLVNGVSTPGWFSVDFTLTDLETVALNQGVYSRSGRFDGNLFPILTVQEMVKLIRPPGLWLNLQHDVFYTKHNLSMRNFVLSVSKSVIVDYISSPEVAFLRGVSQRFKATKTKLIFRFLEKEETDPSTNQTYGSLLNNLTFIKTFASGILVPKGYIWPVNKNSYLESSTLVVQNAHKEGLEVFGSDFINDIPFSYNYSYDPIAEVLNFIDNDAFSVDGVLSDFPITPSAAIDCFAHIGKNASGQEKPLIISYNGASGDYPSCTDLAYTKAISDGVDVLDCNVQMTKDGTPICLSSINLMDSTKVAQTPFSTFTTTITELQKGSGIFTFNLTWEDIRSLTPAISNPYSTFRLSRNPAAKTAGKLVSLSDFLSIAKEANSLSGGVLIGIEHAAFLVKVGLSVTDAVLDALSKAGYDNVTTPRVMIQSTNSSVLKEFKEKKKNYELVYRVDENIRDASDATIEDIKKFATSVVISKDSIYPENKAFITGATDIVSRLKKNNLPVYVQRFDNEFISQAWDFFSDATVEINSFVTGAGIDGVITSFPQTAASYRKNRCLKYKNAPSYMSPVQPGSLMQVITSDDMPPALAPYPVLTESDVAEPPLQEVAPATPTSSTNAGTTAPAPTSPNGQPRIATCIVLSNLAVLLVAVLLL

SEQ ID NO: 20093 - protein, 224 aa, Vitis vinifera
MRRGRAAPTATLATSAAGGAGGSGFVKDMRYRGVRKRPWGRFAAEIRDPWKKTRVWLGTFDSPEEAARAYDAAARTLRGPKAKTNFPAVSGAAVAVPAFDRNLNGQFGDGHHNRVYRADQFQEQQIHAQRPTSSGMSSTVESFSGPRPAPANLPPATLRRHPRSPPLLPDDCHSDCDSSSSVIDNGDIAAATSVRKPLPFDLNVMPSDDDELIMGDLHSTALRL

SEQ ID NO: 20094 - protein, 370 aa, Vitis vinifera
MGSVEPVCEFCGVARAVVYCKQDMAALCLQCDGFVHSANFISQRHVRSLLCDKCNSQPATIQCLEDEACLCESCECNVNSCLGSEHKHQPLSFYSGSPSPEEFIEIWSSSPSCKSPVSLSTNCINSYWENRNNSRSLFWSVTSLTNRMKELETFTKMSSSPMSPPQALFFSSVPQLLKQDPSESQNLHICNVNNPCEGRMDDAELNLEKSDKVYGSLQCYINSFEDIGMSCPYMDKSLPADESNIKAVNDQEPINPCRSQSVNLNFPTGLVQSGASLSLSNITGESCVADYQDCGLSAVILNGNPTWDANLGTSCSQARVEAKKRYNKKKKTRMFGKQIRYASRKVRADSRQREKGRFVKAGETYGYNFH

SEQ ID NO: 20095 - protein, 298 aa, Vitis vinifera
MKEMKECELCSFPARMFCESDQARLCWDCDEKVHGANFLVARHSRSLLCHACQAPTPWKASGTRLAPTVSVCEACVLRCDKDRHRSSGEDRESEGGNTDDEEDDDDDHDDDDENDGDEGDEDDDVEEEEDGENQVVPLSSSAASLLLPPDASSSSSEDGEASSRFSARGRGGVSALKRTRQNADLDLDSDDDIGCCSWQHNHKASRTAYDEEDTSLSSRRPCYERQPTELNRSLKLEDQGETESTSTAIVGSIKRFQKSIISGDEAPAMILGICKLSKDPRAVDLRPTANPTIPSRTV

SEQ ID NO: 20096 - protein, 361 aa, Vitis vinifera
MGRTPCCDKNGMKKGPWTVEEDQKLLDYIQKHGHGRWRTLPKNAGLKRCGKSCRLRWTNYLRPDIKRGRFSFEEEEAIIQLHGILGNKWSAIAARLPGRTDNEIKNYWNTRIRKKLLRMGIDPVTHAPRMDLLELASLLGSSLYNSSLQLNVPAGSLGMGPMVNDDVLTLATALLSSHCENPELQLQNLLENQLRNPQVQNQFESFQGNNLQSSIQEVQACPTSSAASTPFLNETQLMQAIAEHLSQNPTDFAYQNSLPNLWQVHGGHPITAASFTNPTLSFDSIPSSITGHQTLKSNAVSNNTQNFSFDSVLSTPSSTSTPLDSSQMTYAKGSTEDERDSYCSNFLMFDIPSDLDVNAIM

SEQ ID NO: 20097 - protein, 856 aa, Vitis vinifera
MEGSSESGWRNSDISRGLNVSIVSHGRNPRQRHANRIGLSGGASHDSGFISGRKERDHVLSSHTKNHKNQVGISQVCDDDVALDPFVRAIEWGDVSLRHWLDKPERRVDALECLHIFTQIAEIVNAAHSQGVVVNNVRPSCFVMSSFNHVSFIESVSCSDSGSDSLEDGSNSHTEEDNGLSSFSVSATHVTLVEDREEYKSTDRRSVEQSEEKKQTFPMKEILLMETNWYTSPEEISGAQTSCASDIYQLGVLLFELFCTFSSREEKSRTMSCLRHRVLPPQLLLKWPKEASFCLWLLHPEPSSRPKISELFQSEFLTEPRDKMEEREAAIELRERIEEQELLLEFLLLMQQRKQGAVDKLQDTISFLSSDIEEVGKQQATLRKRGGSYQELVKDDQSTSDLSPMDVDENEDSTSVRSSKRFRQGVHHIKELDDTLNNGQKLGMNAENPEILISKSSRLMKNFKKLESAYLLTRRKPTKPSGKPSNKISPPSSNGRGSIVVTERSSVNNLASKDQYNEHGQSGWINPFLDGLCKYLSFSKLKVKADLKQGDLLNSSNLVCSVSFDRDGELFATAGVNKKIKVFECNSILNEDRDIHYPLVEMACRSKLSSICWNSYIKSQIASSNFEGVVQVWDVTRSQVLTEMREHERRVWSIDYSLADPTMLASGSDDGSGVSVGTIKTKANVCCVQFTPDSGRYLAFGSADHRIYYYDLRNSKIPLCTLLGHNKTVSYVKFVDSTHLVSASTDNTLKLWDLSMCTARVLEGPLQSFTGHQNVKNFVGLSVSDGYIATGSEANEVVIYHKAFPMPALTFKFNSMDSDHESDDSAQFISSVCWRGQSSTLVAANSAGNIKILEMV

SEQ ID NO: 20098 - protein, 220 aa, Vitis vinifera
MAPRDKPTGVTAGATGNKEIRYRGVRKRPWGRYAAEIRDPGKKSRVWLGTFDTAEEAARAYDAAAREFRGAKAKTNFPSPTDLAAAAATTANRSPSQSSTVESSSREALSPGAIAGPPALDLNLSHPAAAGQFSAVRYPAVGVFPIAQPLFFFEPFSRPEKPKTHRDMFDLDRAVADFHPAIAGSVHSDSDSSSVVDFNYHDRSTRLLNLDLNHPPAEVA

SEQ ID NO: 20099 - protein, 328 aa, Vitis vinifera
MSDSAYRVETTSRLAQWRIDNLASCTYRKSDPFKIGKWNWHLSIEKNRTLSVKLYPETSNLTRDNPPIASFIIRVLSSVGDRKALVHPEITDKQLKNNDDFVWAIEVPLTGKFIVDVEFLDLKTSSPNGGEPCSIWAEGFAQKRSSTTALASLGRMLSENIHTDIIINASDGSIGAHRAVLASISPVFRSMFSHDLKEKELSTVNISDMSIEACQAFLNYIYGNIQHDEFLIHRLPLLRAADKYDIEDLKEACHESLLEDIDTKNVLERLQNASLYQLSKLKTACLRYLVKFGKIFDIRDDFNAFLQCADRDLIAEVFHEVLTAWKGF

SEQ ID NO: 20100 - protein, 713 aa, Vitis vinifera
MELISEYFSWCEGGRKSSIDPGNRVLSSASEEEEEEAVVGIRAGKNEIPLYQRKKKKERPSELGQMGKNEVYIYGEFFDILVVVEGNDGFLCCNSNRLAATSSLSSTAKWQQIYERLSSSSSPSQSSVVVRSPTSPFHFLLPNHGSNNNNNNNDGGNGGGGGGWNSSWGSNWNWGWWGNEENALFIFFCSRVLHEHGSETAHMLRAVLLFVFSVLYSFFHFQLDTALSKEKEEEGVWEVRGGKWHKIIPDSSKDEFLVVTPGIGAVGAPKSSTLPNLWLQCKELFLRLMLPEGFPHSVTSDYLDYTLWRGVQGVASQISGVLATQALLYAVGLGKGAIPTAAAVNWVLKDGIGYLSKILLSKYGRHFDVHPKGWRLFADLLENAAYGLEILTPAFPHQFLLIGAVAGAGRSAAALIQASTRSCFYAGFAAQRNFAEVIAKGEAQGMVSKSIGIMLGIALANCIGSSAPLSFASFTVVTAVHMFCNLKSYQSIQLRTLNPYRASLVFSEYLLSGQVPSIKEVNEEEPLFPVVPLLNAKPTYKAQSAVLSTEAKDAAAEIERRLQLGSKLSEVVSSKEDVLALFDLYRNEAYILTEHKGRFFVILKESCSPQDMLKSVFHVNYLYWLERNAGIISMGASDDCRPGGRLQISLEYVQREFNHLKNDSEFVGWATDGLIARPLPNRIRPGHKREMVLLSPNLNQAGKHSLQLLVCIR

SEQ ID NO: 20101 - protein, 1200 aa, Vitis vinifera
MASVSSQPQFRYTQPPSKVLHLRNLPWECTEEELIELGKPFGKVVNTKCNVGANRNQAFIEFADLNQAIAMISYYASSSEPAQVRGKTVYLQYSNRQEIVNNKTSADVAGNVLLVTIEGADARLVSIDVLHLVFSAFGFVHKITTFEKTAGFQALVQFSDSETASAAKNALDGRSIPRYLLPEHLGPCTLRITFSAHTDLSVKFQSHRSRDYTNPYLPVASSAIDGSGQFSMGFDGRKVEPESNVLLASIENMQYAVTLDVLHMVFSAFGPIQKIAMFDKNGGVQALIQYPDVQTAIVAKEALEGHCIYDGGFCKLHISYSRHTDLSIKVNNDRSRDYTSPVLSSQPSVLGQQPVPIPGPSTHQFEGAQYASPSDQPVIHQPSAGWATSAAAAGAPPPPPQSMPMQQHNHPYMPPGTMPPQPVPGMMPMQTQTGLPQSAAMPPYTVSPKSRFRNHRLSIRCTLQPEMEGEWQEVENLVMNSGESEGGLVEAEQGVSGLEAVESEGLVENEGTKSRLAVVVFAMGVWGAVRTWFEKVLGSEWFSWWPFWRQEKRLERLISEADANPKDVEKQSALLVELNKHSPESVIKRFEQRDHAVDSRGVAEYLRALVVTNAIAEYLPDEQSGKPSSLPTLLQELKQRASGNMDEAFLNPGISEKQPLHVVMVDPKVSSRSSRFAQELISTILFTVAVGLVWVMGAAALQKYIGSLGGIGASGVGSSSSYAPKELNKEVMPEKNVKTFKDVKGCDDAKQELEEVVEYLKNPAKFTRLGGKLPKGILLTGAPGTGKTLLAKAIAGEAGVPFFYRAGSEFEEMFVGVGARRVRSLFQAAKKKAPCIIFIDEIDAVGSTRKQWEGHTKKTLHQLLVEMDGFEQNEGIILMAATNLPDILDPALTRPGRFDRHIVVPNPDVRGRQEILELYLQDKPLSDDVDVKAIARGTPGFNGADLANLVNIAAIKAAVEGADKLNASQLEFAKDRIIMGTERKTMFLSEESKKVCFLCLLCFISFQLTAYHESGHAIVAFNTDGAHPIHKATIMPRGSALGMVTQLPSNDETTISKKQLLARLDVCMGGRVAEELIFGQDHVTTGASSDLNTATELAQYMVSTCGMSDTIGPIYIKDRPGVEMESRIDAEVVKLLREAYDRVKALLKKHEKALHALANALLECETLNAEDIKRILLPYREGRLPEQQTQPEVDEELALA

SEQ ID NO: 20102 - protein, 1124 aa, Vitis vinifera
MGLGSRGGERRATHRTPTFSSSAASNMNNPNSRNNTIAQYNADARLLAEFEQSGESGKSFNYSRSVMNAPESVPEDQIIAYLSRVQRGGLVQPFGCMLAIEEPTFRIISYSENSMDFLGLNTLSETTQLKSLIGVDVRTLFTPPSSASLAKAAMSREISLLNPIWVHSRSAQKTFYAILHRIDVGIVIDLEPTRSGDSALSLAGAVQSQKLAVRAISRLQSLPGGDIGVLCDTVVEDVQKLTGYDRVMVYKFHDDDHGEVVSEIRRSDLEPYLGLHYPATDIPQAARFLFKQNRVRIICDCNAKAVRVIQSEELKQPLCLVNSTLRSPHGCHLQYMFNMGCIASLAMAVVINGNDATKLWGLVVCHHTSPRYVPFPLRYACEFLMQAFGLQLYMELQLASQLAEKKILRMQTLLCDMLLREAPLGIVTHSPSIMDLLKCDGAALYYGGRCWLLGVTPTESQVKDIAEWLLTEHGDSTGLSTDSLADAGYPGAALLGDAVCGMATARITSKDFLLWFRSHTAKEVKWGGAKHHPEDKDDGGRMHPRSSFKAFLEVVKSRSLPWEVSDINAIHSLQLIMRDSFQDIEDSSGKVMVHTQKYDSEMQGLNELGSVACEMVKLIETATAPIFGVDSSGCINGWNAKIAELTGLQAKEAMGKSLVDEIVHEDLRGAVDNLLCRALQGKEDKNVELKLKNFGLNQQDSALYIVVNACTSRDYTNDIVGVCFVGQDITSEKIVMDKFIRLQGDYKAIVQCLNPLIPPIFASDGNACCSEWNTSLEKLTGCMRHEVIRKMLPGEVFGGLCPLKSQDTLTRFTILLYQAISGQDTEKFPFGFFDKSGKLVEVLLTANKRTDANGNVIGCFCFLQIDTPDKHQGLGHGPEYRECFSKFKELAYIRQEMKNPLNGIRFTHKLLETTATSVYQKQFLETSEACERQMMSIIADIDMGIIEEGSMELNVEEFLLGNVLDAVVSQVMMLLKEKKLQLVCEIPEEIKTLPLSGDQIKLQQVLSDFLHNIVHHAPSSDGWIEIKISTGLKMIQDFNEFVHLQFRMTHIGQGLPPDLIQDMFEGGDQWNTQEGLGLNLSRKLLSAMNGRVQYVREHGKCYFLVDIDLKNRRAREKGKQIQVR

SEQ ID NO: 20103 - protein, 376 aa, Vitis vinifera
MKGMKGKLLKKLKSIRPIGYLKEDRVLQVNASDGFLDGSSWNPSVGVQAQFVCKGTVQNGLDRTGGTEREPEVIDVMELMRDLEGEDMEFDDLMDDKENIGPPVRAKDPVGVKEKSENPVRSEPGFQRKDDGTWEATGNPGHTPLSEIDISSFRRPDLNSGSLFDPNLLAAFQQAVMDQIRINEEERKARMKEEDVEIDDEPPPKARRVEDDTNPLLGFEERCPPGGSDAVVLYTTSLRGIRKTFEDCTSIRFLLESFRVIFYERDVSMHLEFREELWRILDCKALPPRLFIKGRYIGGAEQVLGLHEQGRLRALFHGLPIDHSKGPCEGCAGIRFVMCYKCCGSRKIVSDDGNHGLSNNCPHCNENGLIICPICC

SEQ ID NO: 20104 - protein, 208 aa, Vitis vinifera
MADSSFFHNSNSQFSPESSLGSPDFFSFHDPLPFDQNDSEEMLLYGVLSEAVADDSYMKEEVCSKVKAIEEEPMKEVSYRGVRKRPWGKYAAEIRDSTRNGVRVWLGTFDTAEAAALAYDQAAFAMRGSLAVLNFPADMVYESLREMKYGFQEGCSPVLALKKRHSIKNKSRKRKEKELRLENVVEFEDLGTDYLEELLSISESTNPW

SEQ ID NO: 20105 - protein, 321 aa, Vitis vinifera
MARFCCACSPQSSPLTFIPKSSSNFRAFTCSATRLLSIRTPSRRPLSLTATLATVHSAEASGVDSRDKKLLLEVKDLTAVISESKQQILKGVNLVVYEGEVHAVMGKNGSGKSTFSKVLVGHPDYEVTGGTVVFKGENLLDMDPEERALAGLFMSFQSPVEIPGVSNIDFLNMAYNAQRRKLGLPELGPIEFYGYISPKLDIVNMKIDFLNRNVNEGFSGGERKRNEILQLAVLGADLAILDEIDSGLDIDALKDVAKAVNGLLTPVNSVLIITHYLRLLEFIKPTYIHVMEDGRIVKTGDISIAKVLEEEGYKAISEAQL

SEQ ID NO: 20106 - protein, 434 aa, Vitis vinifera
MYSNFKEQAIEYVKQAVQEDNAGNYSKAFPLYMNALEYFKTHLKYEKNPKIKEAITQKFTEYLRRAEEIRAVLDDGGTGPASNGGNASVAAKPKTKPKNGDGGDGDDAEQAKLRAGLNSAIITEKPNVQWSDVAGLESAKQALQEAVILPVKFPQFFTGKRRPWRAFLLYGPPGTGKSYLAKAVATEADSTFFSVSSSDLVSKWMGESEKLVSNLFQMARESAPSIIFIDEIDSLCGQRGEGNESEASRRIKTELLVQMQGVGHNDQKVLVLAATNTPYSLDQAIRRRFDKRIYIPLPDLKARQHMFKVHLGDTPHNLTEHDFEHLAYRTDGFSGSDISVCVNDVLFEPVRKTKDASYFVKTSNGIWVPCGPTQRGAVQVTLQELEAQGLASKILPPPISRTDFEKVLARQRPTVSKADLEVHNRFTKEFGEEG

SEQ ID NO: 20107 - protein, 715 aa, Vitis vinifera
MEYGSGGGGGGSGGSGGDPDGSDSRRKKRYHRHTAHQIQRLEGMFKECPHPDEKQRLQLSRELALAPRQIKFWFQNRRTQMKAQHERADNCALRVENDKIRCENIAIREALKNVICPSCGGPPIGEDSYFDEQKLRVENAQLKEELDRVSSIAAKYIGRPISQLPPVQPVHISSLDLSMGSFGGQGMGSGPSLDLDLLPGSSSAMPILPFQGTGISDMDKSLMADVAGNALDELLRLLQTNEPLWMKSTTDGRDVLNLESYERIFPRANSHLKNPNVRIEASRDSGVVIMNSLALVDIFMDSNKWMELFPTIVSMARTLEVLSSGMMGGQSGSLQLMYGELQVLSSLVPTREFYFLRYCQQIEQGSWAIVDVSYDFPRDNQFAPQNPSHRLPSGCLIQDMPNGYSKVTWVEHVEIEDKTPTHRLYRDLIHRGLAFGAERWLATLQRMCERFACLMVKGTSTRDLGGVIPSPDGKRSMMKLAQRMVNNFCASISTSNGHRWTTLSGLNEVGVRVTIHKNTDPGQPNGVVLSAATTIWLPVSPQNVFNFFRDERTRPQWDVLSNGNAVQEVAHIANGPHPGNCISVLRAFNTSQNNMLILQESCIDSSGSLVIYCPVDLPAINIAMSGEDPSYIPLLPSGFTISPDGRLDQGDGASSSSSTTASMGRSGGSLITVVFQILVSSLPSAKLNLESVTTVNNLIGNTVQQIKAALNCPSS

SEQ ID NO: 20108 - protein, 182 aa, Vitis vinifera
MSRVYVGNLDPRVTERELEDEFRVFGVIRSVWVARRPPGYAFIDFDDRRDAQDAIRELDGKNGWRVELSHNSRGGGGGGRGGGRGRSGGSDLKCYECGEPGHFARECRLRGGSGRRRSRSPRYRRSPSYGRSRSYSPRGRSPRRRSLSPRGRSYSRSPGYRGREELPYANGNGLRERRRSRS

SEQ ID NO: 20109 - protein, 586 aa, Vitis vinifera
MDTHGSSSFSSFTAYARALAQTPSRLARRACSVSTSFEEMSRVRARSGSDMQRNLRWFDLVGFGLGGMVGAGVFVTTGRASRLYAGPAVVLSYAIAGICALLSAFCYTEFAVDMPVAGGAFSYLRVTFGEFAAFLTGANLVMDYVLSNAAVARSFTAYLGTAIGFPTTKWRFTVSGLPKGFNEIDLVAVAVVLIITLIICYSTRESSVVNMVLTAMHILFIAFVIVVGFWRGDWKNFTEPADPRRHQGGFFPFGASGVFNGAAMVYLSYIGYDAVSTLAEEVRNPVKDIPIGVSGSVMLVTILYCLMAASMSKLLPYDAIDPEAPFSAAFRGQSNGWKWVSNVIGAGASFGILTSLMVAMLGQARYMCVIGRSKVVPSWFARVHHKTCTPVNASAFLGIFTAAIAVFTDLNVLLNLVSIGTLFVFYMVANAVIYRRYVSVGATNPWPTLSFLVSFSLTSIIFTLIWHFAAPGHPKEVMLGACTVVAVAILQMFHCMVPQVRKPEHWGVPLMPWIPSISIFLNIFLLGSLDRPSYVRFGYFSALAVLVYVLYSVHASFDAQEDGYYIQKNAEIPKDSEASVDAITMV

SEQ ID NO: 20110 - protein, 564 aa, Vitis vinifera
MLPMSSFKAYGKVNEAEQERLLARRKTRRRITIISLSSIILVAVIVAAVVGTTTNSGGKSKNAGNSVSTSIKAVCDVTLYPDSCYNSLAPMVKSSQLKPEDLFNMSMEVALNELHRTFQRFSEHEGFKGITDKMLAGALDDCYELLDLAIDNLNSSLSSSLDNFDDLKTWLSAAGTYQETCINGFESGNLRSSVLEFLKNSTEFSSNSLAIITEISKLAGSISSRRLMGLPEDKVPKWLSAKDRKLLQSSSTLKKKADAVVATDGSGKYKTISEALKAVPDKSKKSFVIYVKKGVYNENVRVEKSKWNVLMIGDGMNKTVVSGKLNFVDGTPTFSTATFAVFGKGFVAREMGFRNTAGAIKHQAVALMSSADQTVFYRCLIDAFQDSLYAHSHRQFYRECDIYGTVDFIFGNSAVVFQNCNILPKQPMPGQQNTITAQGKNDPNQNTGIAIQNCTILPSADLSSVKTYLGRPWKNYSTTVYMHSMMGSLIDPAGWLPWTGTTAPNTIFYSEFQNFGPGSSTKNRVKWKGLRNITQKEASKFTVKSFIDGSKWISDAGVSFKPGL

SEQ ID NO: 20111 - protein, 899 aa, Vitis vinifera
MEGCDLVVFSSSSSSSQTPGFLSLSCGATADFVDSTNISWVSDSTYVDTGNTTTIDFIEGTSSSHVPIRFFPDSKGRKCYRLPVKNVSSVVLVRTQFVYKNYDGLAKPPAFSVSLGTAITTTANLTVSDPWTEEFVWSVNQDILPLCLHALPGGGVPVISSLEVRPLPQRAYTSGMEDFPNKSLRKCYRINCGYANGSLRYPLDSYDRIWDADQSFSPFHLSTGFNIQLSFNLSSIEESPPLAVLQTARVLARRDALAYYFPLDKLGDYYIVLYFAGILPVSPTFDVLINGDVVWSSYTVKNSEATALFFTRKGIKSLSITLKNISFNPLINAIEVYEMVDIPSETSSTTVSALQVIQQSTGLDLGWQDDPCSPTPWDHISCQGSLVTSLGLPNINLRSISPTFGDLLDLRTLDLHNTSLTGKIQNLDSLQHLEKLNLSFNQLTSFGSDLENLISLQILDLQNNSLEGTVPESLGELKDLHLLNLENNKLQGTLPDSLNRESLEVRSSGNLCLSFSISTCSEVPSNPSIETPQVTIFNKKQHDDHNLRTIILGAVGGVLFAVIVTSLLVFLYMRRKRTEVTYSERAGVDMRNWNAAARIFSHKEIKAATNNFKEVIGRGSFGSVYIGKLPDGKLVAVKVRFDRTQLGADSFINEVHLLSQIRHQNLVSLEGFCHESKQQILVYEYLPGGSLADNLYGANGRRITLSWVRRLKIAVDAAKGLDYLHNGSNPRIIHRDVKCSNILLDMEMNAKVCDFGLSKQVTQADATHVTTVVKGTAGYLDPEYYSTQQLTEKSDVYSFGVVLLELICGREPLSHSGTPDSFNLVLWAKPYLQAGAFEIVDESIKGNFDVESMRKAALIASRSVERDAAQRPVMAEVLAELKEAYSIQLSYLASCGHLN

SEQ ID NO: 20112 - protein, 305 aa, Vitis vinifera
MASGNTYFDDMRSKSEVIDPPQSEDMMEVSEHVNDPAQTTLKPNVTVSSSVRELLECPVCLNAMYPPIHQCSNGHTLCSGCKPRVHNRCPTCRHELGNIRCLALEKVAASLELPCKYQSFGCLGIYPYYSKLKHESQCVYRPYNCPYAGSECTVIGDIPYLVAHLKDDHKVDMHNGSTFNHRYVKSNPHEVENATWMLTVFSCFGQYFCLHFEAFQLGMAPVYIAFLRFMGDDNEAKNYSYSLEVGGTGRKMIWQGVPRSIRDSHRKVRDSFDGLIIQRNMALFFSGGDRKELKLRVTGRIWKEQ

SEQ ID NO: 20113 - protein, 656 aa, Vitis vinifera
MANVAATNITFFKPFLQHYSNFPTSFFNITIPIPNHYHKPTSTKCLSRCHLSVTPEPSPGAPETFVSRFAADQPRKGSDILVEALEREGVTHVFGYPGGASMEIHEALARSSMIRNVLPRHEQGGIFAADGYARASGRPGVCLTSSGPGATNIISGIADANFDSIPIVAITGQVPRGLMGTDAFQEVPLIDITRPITKFNYLVLDVEDIPRTVKEAFLLATSGRPGPVLIDIPRDIQKELVVPNWNKPIMLPGNASRLPKLPEKAHLEEIVRLISVSKRPVVYAGGGCMNCSEELRRFVGLTGIPVASTLMGLGIFPCTDDLSLHMLGMHGTIQANYAVDRSDLLLAFGVRFDDRVTGKVESFARNATIVHIDIDPAEIGKNKKPHLSICTDVKLALEGINTILEKNAAKQPTAENKRGKGTKFNDNVSAWIEEIDEQKEKYPASYRTFGEAIPPQYAIQLLDELTNGNSIICTGVGQHQMWAAQYCKHKNPRHWLSSSGLGAMGFGLPAAMGAALAKPDAIVVDIDGDGSFMMNIQELATIRVENLPVKIMLLNNQHLGMVYQYEYEYGDGDSLHSYMGNPSNQAQVFPDMLMFAEACNITAARVTKKAELREAIEKMLKTPGPFLLDVMVPHQAQVLQLIPDGGTFKDAIKGAQ

SEQ ID NO: 20114 - protein, 198 aa, Vitis vinifera
MARASVLVVLVVVSVLLYTSRVAESAAANSGSTSFIKAKCSATRYPALCVQSLSVYASTIQKSPKQLAHTALTVSLAKAQSAKAFVSKLGKIKGMKARELEAVQDCLEEMNDSIDRLSRSVQELEEAGKSKGQDFLWHMSNVDTWVSAALTDDNTCVDGFAGRALDGRVKASIRGWLVTVAQVTSNALALVNQFAAKN

SEQ ID NO: 20115 - protein, 211 aa, Vitis vinifera
MEACILRNPSAFHVLSSLFFTLLLFNSITLTSSANTSTISLTISKQFIKTSCNSTTYPGVCYKSLSSYASKVQTSPLKLANVALTVSLKAARNASSTITLLLERKGMTRMETSIVKDCVENFGDCIDELQQSLQEFKSLGGGKNVAFQMANIKTWVSAALTDEYTCSDGFEGQKVSSSLQQQIKNYISNVAKITSNALALINNLSVTDIKS

SEQ ID NO: 20116 - protein, 212 aa, Vitis vinifera
MESFTCLRLSSSPGLAVIFALFFFYLSLTTPCSAASPEPHPPTNTTQFIRTSCGVTMYPKLCFKTLSAYASTIQTSHMELANAALCVSLKGAQSSSNKVLKLSKGQGLSRREAAAITDCIENMQDSVDELQQSLVAMKDLQGPDFQMKMSDIVTWVSAALTDEDTCMDGFAEHAMKGDLKSTIRSNIVSVAQLTSNALAIINKFLSIQGNQL

SEQ ID NO: 20117 - protein, 200 aa, Vitis vinifera
METSPCTRFLSALLFSLAFTSINLISAARPATDKASTEFIRTACGTTTYPQLCFTSLAAHASVIQTNPKLLASTALSVTLATARSTSSDMSTLLKRHGLTPREVSAMRDCVEELSDSVDQLKKSMGEMSQIKSSNFGLMINDIQTWVSAALTDEDTCANGFTENAMTENVRTVVNARIVNIAHMTSNALALINSYASLHH

SEQ ID NO: 20118 - protein, 200 aa, Vitis vinifera
MEGSSNSAHFLAAFLILFAFHFNSISAAGPAARKDNTEFIRTSCGTTIYPRLCFTSLSAHANVIQTSPRLLADTALSVTLSTARSTSSVMSNLLLSHGLKPREVVAMKDCVEELSDSVDQLRKAMGEMNQIKGSNFGLIMNDIQTWVSAALTYEDTCTDGFAGNTMDGKLKKAVRTRIVKIAHMTSNALALINSYASFHN

SEQ ID NO: 20119 - protein, 201 aa, Vitis vinifera
MEGSFSSHFLAALIIFLSFTSCANLSSAARPAAEKASTEFIRTSCGTTTYPKLCYTSLSAHASVIQTSPKLLADTALAVTLSTARSTSSLMSKMVQSHGLKPREVAAMHDCVEELSDSVDQLRKAMGEMTQIKGSNFGLMMNDIQTWVSAALTDEDTCTDGFAGNAMNGNLKTTVRARVVNMAHMTSNALGLINSYASLHN

SEQ ID NO: 20120 - protein, 202 aa, Vitis vinifera
MEGSFFSSHFLPALLIFLSLTSYINLSSAARPAADKASTEFIRTSCGTTTYPRLCYTSLSAHASVIQTSPKLLADTALAVTLSTARSTSSLMSKMVQSHGLKPREVAAMHDCVEELSDSVDQLRRAMGEMTQIKGSNFGLMMDDIQTWVSTALTDEDTCTDGFAGNAMNGNLKTTVRARIVNMAHMTSNALGLINSYASLHN

SEQ ID NO: 20121 - protein, 564 aa, Vitis vinifera
MALKPLTSVFLSPLSLPYSPSNPTPKFSSFYTKPTPISCQTQAHQQAAPTSDPYRPESDGLGAAAPTRGDLFLEHHQSVAASEVVFNANKKKKKVKFSGSWKASAASACYGCGAPLQTLETDAPGYVDPETYELKKKHRQLRTVLCGRCRLLSHGQMITAVGGNGGYSGGKQFISAEELREKLSHLRHEKALIVKLVDIVDFNGSFLAHVRDLAGANPIILVVTKVDLLPKETDLNCVGDWVVEATMKKKLNVLSVHLTSSKSLVGISGVASEIQKEKKGRNVYILGSANVGKSAFINALLKMMAQRDPAAAAAQRYKPIQSAVPGTTLGPIQIDAFLGGGKLYDTPGVHLHHRQAAVVHSEDLPALAPRSRLRGQCFPNFQVAFDDSTLSRIKSNGLNGFSIFWGGLVRIDIVKVLPQTRLTFYGPKALNIHMVPTDKADEFYQKELGVLLTPPTGKQRAEDWLGLETERQLQIKFEDSDRPACDLAISGLGWIAVEPIGRSLRTSDSDLEETAEQLQLSIQVPKPVEIFVRPPIPVGKGGGEWYQYRELTEKEVEVRPQWYF

SEQ ID NO: 20122 - protein, 714 aa, Vitis vinifera
MEFRTGGNGSGGDQDGPNPRRGRKVYNRHTPQQIQRLEAFFKDCPHPDEAQRRQLGRELGLESRQIKFWFQNKRTQTKTQHERADNTALRAENERIQCENLAIREALKNVICPSCGGPPFGEEERQRNIEKLQLENAQLKEEHEKVSNLLAKYIGKPITQMHLLPPALGSSLDFSPGSFPSQETGGLSIPTVGPALGLELAPVDVCNASVMYQFKGFPDMEKTLMTETAAGAMDELIRLVRINEPLWVKSATNEKYVLHHDSYERIFPKATHFKSSNARIESSKESVVVAMNGMQLVNMFLDPNKYVDLFPTIVTKASTIQVLEAGIIGSRSGSLQLMYEQMHILSPLVAPREFYFLRYCQQIELGVWVMVDVSYDYSKDGQPNSLRFWKLPSGCMIQDLPDGCSKVTWVEHVEVDDKSLTHRLYRDLVSGSLAFGAERMVGTLQRMCERLAYLADENTPTRDLAGVISLPEGRRSIMKLGHRMVKDFCGVLSMSGKLDFPQLSEVDTSGVRVSVRKSTEPGQPGGLIVSAATSLWLPMQCQTIFDFIRDEKMRPQWDVLSSGNPVHEIAHIANGVNPGNCTSIIRPFVPTENNMLMLQESCVEPLGGLVVYAPIDIPAINVAIRGEESGNIPILPSGFIVSGDGRSDSGAGCTSDGNIMGSGGSLLTVAFQVLVCGPAAPQQQLNMESVATVNTLISSTVQKIKIALNCSGLD

SEQ ID NO: 20123 - protein, 297 aa, Vitis vinifera
MMVDKEDLGLSLSLSFPQDAHRPLQLNLMPSLLPASSSSPSPSPFALQKPSWHDAFPSSDRTSETCRGDARSFLRGIDVNRLPSTADCEEEAGVSSPNSTISSVSGKRSEREANGDEHEMERACSRGISDEEDGDTSRKKLRLSKDQSAILEENFKEHNTLNPKQKLALAKQLNLRPRQVEVWFQNRRARTKLKQTEVDCEFLKRCCENLTEENRRLQKEVNELRALKLSPQFYMQMTPPTTLTMCPSCERVAVPPPSSEARSHQMATTHHRPIPINPWATATPIPHRPFDALHPRS

SEQ ID NO: 20124 - protein, 386 aa, Vitis vinifera
MLDLPRLKALAALGRGAKGAVFLVEPEAEAGEERLALKAVSRKLVESKSKDNDKNGSNNDKESDYRRICFEQEALRRFRHPLLPRLHGIVCTDRIVGYAIDYCPGRDLNQLRKKQSEKMFSDDIIRFYAAELGLTLEYLHGLRIVYKNLKPENVLIQKKGHLMLKTRLSSFHRLCNSGIASEKSDPALESERNSVRTESDSSAKSNSFVGTEEYVAPEIILGSGHDFAVDWWSLGVMLYEMLYGTTPFKGSNRKETFYRILAKAPELVGEATPLRDLIAKLLEKDPKQRIILEDIKGHDFFRGIEWDMVVEIGRPPYIPENEHVEGGFQDLDIESLVQEAFKIGDGDDNQKNSNNNNNNNKEGSEKKGAWVEGLNHKSEINDFLIF

SEQ ID NO: 20125 - protein, 120 aa, Vitis vinifera
QKQKQALAKQLNLRPRQVEVWFQNRRARTKLKQTEVDCEFLKKCCESLTDENRRLQKELQELKALKLAQPLYMQLPAATLTMCPSCERIGGVTDGASKSPFTMAPKPHFYNPFTNPSAAC

SEQ ID NO: 20126 - protein, 394 aa, Vitis vinifera
YPVDPNDRIWKAESSSIPNSLLEKTPPNPISSSANVSITTAVPLQVLQTALNHSERLEFLHNDLDIGVYNYNLSLYFLEFIESVDTGQRVFDIYINNVRKRPDFDIMADGSKYREAAFRFTANGSFNLTLVKVSDKSLFGPICNAYEIFQVRPWVQETNQEDVNVIMKVKDELLKKNQGNKVLGSWSGDPCLPLVWHGLICNNSINNSPVITELDLSSSGLQGSLPASIVKLAYLEKLKLSDNKFTGVIPEFPASSMLISLDLRHNDLMGKIQESLISLPQLAMLCFGCNPHFDRELPSNFNSTKVTTDYGNCADQGSSHSAQGILIGTVAGGSFLFTIAVGIAFVCFYRQKLMARGKFHEGGYPLTKSEHREAAKRKTLDWPTRLSIALGAAR

SEQ ID NO: 20127 - protein, 309 aa, Vitis vinifera
MARATARIPAIHRNFLSANLELGFTAGQAASLSDMAFGFLEDGEGWPESFSSTGGCSENGALDDDEDDADKEKNSSSVEENKNFWESQHQILHTTLCRTSSLELGIRNATKEALKEIQMDDNVCVCLRPVVGGCRSCLLREVSDRLRNAGYNSAICKSKWRSSPNIPSGEHTFLDVVHNSSAKKGEVRVIIELNFRAEFEMARASEEYNRLIRRLPEVFVGKVERLHTLVKILCMAAKKCMKEKKMHMGPWRKHRYMQAKWLSTCVRSTSTSSLLSGDSGRLPKPKASMLTVDLMEKLPNMHCTAVEVV

SEQ ID NO: 20128 - protein, 283 aa, Vitis vinifera
MGFDDGCNTGLVLGLGFTATAAALDQTPLKPCTTTDHDQRSKKTCLRFGPLAAAPTSFEPSLTLSLSGETYQVTGKMDMNKVCEEAAADLYRQPSPHSTVSSFSNASVKRERDLGSEEVEIERLSSRVSDEDEDGSNGRKKLRLTKEQSALLEESFKQHSTLNPKQKQALAKQLNLRPRQVEVWFQNRRARTKLKQTEVDCEFLKKCCESLTDENRRLQKELQELKALKLAQPLYMQLPAATLTMCPSCERIGGVPDGASKSPFTMAPKPHFYNPFTNPSAAC

SEQ ID NO: 20129 - protein, 335 aa, Vitis vinifera
MKRLGSSESLGALMAICPTTDEHSPRNNHVYSREFQTMFDGLDEEGCVEESGQIVEKKRRLSVDQVKALEKNFEVENKLEPERKVKLAQELGLQPRQVAVWFQNRRARWKTKQLERDYGILKANYETLKLNYDAIQHDNEALLKEIRELKSKLNEEKTESNLSVKEELVVSESDEKVKVMEQSETAMGAGVGGSDAKDLSNDDSFKDGNGGGRVSVFPDMKDGSSDSDSSAILNEDNSPNAAISSSGVLQNNHHHHLLMSPPSSSLRFNSSSSSSINCFHFSDSSRPTLGNTQKAYQPQFVKMEEHNFFGADESCNFFSDDQPPTLPWYCPDQWT

SEQ ID NO: 20130 - protein, 249 aa, Vitis vinifera
MCGILAVLGCVDNSQAKRSRIIELSRRLRHRGPDWSGLHCHQDCYLAHQRLAIVDPTSGDQPLYNEDKTVVVTVNGEIYNHKQLREKLTSHQFRTGSDCEVIAHLVKYGEDFVDMLDGMFSFVLLDTRDKSFIAARDGIGITPLYIGWGLDGSIWFASEMKALSDDCERFMSFLPGHYYSSKRGELRRWYNPPWYSEHIPSTPYDPLVLREAFEKPLSLTARMLILFLNIRKLRSLVHNSSEEVILSWH

SEQ ID NO: 20131 - protein, 160 aa, Vitis vinifera
MSDEEHHFDSKADAGASKTYPQQAGAIRKNGYIVIKARPCKVVEVSTSKTGKHGHAKCHFVGIDIFNGKKLEDIVPSSHNCDVPHVNRTDYQLIDISEDGFVSLLTENGNTKDDLRLPTDDNLLSQIKDGFADGKDLVVTVMSAMGEEQICALKDIGPKN

SEQ ID NO: 20132 - protein, 271 aa, Vitis vinifera
MANRRCLRTLTLTLTRHDSAVFSSTPFLQPPPPSSSLKTVNHQHLHTLPLPSKPSHILRIPQPTWPPHPRHFSSHSGDDEDEDEEEDDDEEMGESSDSEKVSASNRVYSAEDKERESAAIGYKVVGPLQPSDRVFKPYEPVFAVVQIGSHQFKVSNGDCIYTERLKFCEVNDRLILNRVLLIGSTSQTIVGRPTLPDVAVHAVVEEHALDAKVIIFKKKRRKNYRRTKGHRQELTRLRITDIQGIEKPEIPDVGKSEKAALKKPQKVAVAA

SEQ ID NO: 20133 - protein, 137 aa, Vitis vinifera
MQPACSNPISADSIISSKTDPNLCFPPRQAHSSLSLSFSGLTGESSTGDYQDCGVSSMLLMGEPPWCSPCPENSLPSANRDSAVLRYKEKKKARKFEKKIRYASRKARADVRKRVKGRFVKAGDAYDYDPLNQTRSF

SEQ ID NO: 20134 - protein, 401 aa, Vitis vinifera
MGQLCDFCGDQRSMVYCRSDAACLCLSCDRNVHSANALSRRHSRTLLCERCNSQPATVRCVEEKISLCQNCNWIGHGSTTSASDHKRQTINCYSGCPSAAELSRIWSFVLEFLSVDDSNCEQGMVLMSLTENSVGSCSLPPVNNNINDSTVAGRTNAQENVDKSDLWMASSPVPALNPISSSVDQPTDLVNSPTTKLCCSGICDDDDLLYEDFSMADVDLSIENYEELFGVSQNHSEQLLENGGIDSLFGIGNLPAGSCQEPLTMQPACSNPISADSIISSKTDPNLCFPPRQAHSSLSLSFSGLTGESSTGDYQDCGVSSMLLMGEPPWCSPCPENSLPSANRDSAVLRYKEKKKARKFEKKIRYASRKARADVRKRVKGRFVKAGDAYDYDPLNQTRSF

SEQ ID NO: 20135 - protein, 709 aa, Vitis vinifera
MSLLSTNSFVVFVSSVVPNYILGYAAVIAFTALFFLFCGYFLNGQDIPSYWKWMNKFSTMTYPYEGLLMNQYQTNDTFGVNPYGQNITGNDILNQLNVSTVEFDKWKKVFIMLAFVSIRCCAESTFTEPSTNISWIPDDGWYSNTLGCQNINKPVENYQGDKIRIFKGDLAKKWCYNLSTTKGHEYLIRGTFLFGDSVRTSLAILFNVSIGVTPIGLVNGSDDSVEVEGVFTARNHHIDFCLLKGTGDPYIYKLELRPLNVLKYLQGGTSSVLKLVKRVDVGNTGEDIRYPVDPNDRIWKAESSSIPSSLLEKTPPNPISSSANVSITTAVPLQVLQTALNHSERLEFLHNDLDIGEYNYNLSLYFLEFIESVDTGQRVFDIYINNVRKQPDFDIMADGSKYREAAFRFTANGSFNLTLVKVSDKSLFGPICNAYEILQVRPWVQETNGEDVNVIMKVKDELLKKNQGNKVLGSWSGDPCLPLVWHGLTYLHTFAGRSVIHRDVKSSNILMDHNMSAKVADFGFSKYAPQEGDSGVSLEVRGTAGYLDPEYYSTQHLSAKSDVFSYGVVLLEIISGREPLNIHRPRNEWSLVEWAKPYIRDSKIEEIVDPSIKGGYHAEAMWRVVEVALACIEPYSAYRPCMVDIVRELEDALIIENNASEYMKSIDSFGGSNRFSIEKIERKVVLPPTPTLTDPSPDILQALTPPQPR

SEQ ID NO: 20136 - protein, 924 aa, Vitis vinifera
MVELMEFTRLGLMADGTFVSIRCCAESTFTEPSTNISWIPDDGWYSNTLGCQNINKPVENYQGDKIRIFKGDLAKKWCYNLSTTKGHEYLIRGTFLFGDSVRTSLAILFNVSIGVTPIGLVNGSDDSVEVEGVFTARNHHIDFCLLKGTGDPYIYKLELRPLNVLKYLQGGTSSVLKLVKRVDVGNTGEDIRYPVDPNDRIWKAESSSIPSSLLEKTPPNPISSSANVSITTAVPLQVLQTALNHSERLEFLHNDLDIGEYNYNLSLYFLEFIESVDTGQRVFDIYINNVRKQPDFDIMADGSKYREAAFRFTANGSFNLTLVKVSDKSLFGPICNAYEILQVRPWVQETNGEDVNVIMKVKDELLKKNQGNKVLGSWSGDPCLPLVWHGLICNNSINNSPVITELDLSSSGLQGSLPASIVKLAYLEKLKLSDNKFTGVIPEFPASSMLISLDLRHNDLMGKIQESLISLPQLAMLCFGCNPHFDRELPSNFNSTKVTTDYGNCADQGSSHSAQGILIGTVAGGSFLFTIAVGIVFVCFYRQKLVARGKFHEGGYPLTKNAVFSLPSIDDIVFKSIDIQNFTLEYIEIATNKYKTLIGEGGFGSVYRGTLPDGQEVAVKVRSATSTQGTREFENELNLLSAIQHENLVPLLGYCCEYDQQILVYPFMSNGSLQDRLYGEAAKRKTLDWPTRLSIALGAARGLTYLHTFAGRSVIHRDVKSSNILMDHNMSAKVADFGFSKYAPQEGDSGVSLEVRGTAGYLDPEYYSTQHLSAKSDVFSYGVVLLEIISGREPLNIHRPRNEWSLVEWAKPYIRDSKIEEIVDPSIKGGYHAEAMWRVVEVALACIEPYSAYRPCMVDIVRELEDALIIENNASEYMKSIDSFGGSNRFSIEKIERKVVLPPTPTLTDPSPDILQALTPPQPR

SEQ ID NO: 20137 - protein, 243 aa, Vitis vinifera
MANRRCLRTLTLTLTRHDSAVFSSTPFLQPPPPSSSLKTVNHQHLHTLPLPSKPSHILRIPQPTWPPHPRHFSSHSGDDEDEDEDEDEEEDDDEEMGESSDSEKVSASNRVYSAEDKERESAAIGYKVVGPLQPSDRVFKPYEPVFAVVQIGSHQFKVSNGDCIYTERLKFCEVNDRLILNRVLLIGSTSQTIVGRPTLPDVAVHAVVEEHVSWSNFMSNELQVAWSSGFLINGTDWSVNGIQ

SEQ ID NO: 20138 - protein, 362 aa, Vitis vinifera
MGRSPCCDKNGLKKGPWTPEEDQKLIDYIQKNGYGNWRTLPKNAGLQRCGKSCRLRWTNYLRPDIKRGRFSFEEEETIIQLHSILGNKWSAIAARLPGRTDNEIKNYWNTHIRKRLLRMGIDPVTHSPRLDLLDLSSILSTSLYNSSHMNVSRFLGMQPLVNPELLRLATSLMSSQRENPNFLLQNVQENQLCNAQVQNSFTHLVQPNQIQTPIQEIPACNPLSSSFSNESQVMEPNAEQFPSNITDFSSQNSQLISDWQSNGLPSDLSEEYYVPHPSSVGYYGSEQTIMDPSSDNSVFQSNNNFSFASVLSTPSSSPTPLNSNSTYINSSTEDEREISYGSNMYLKFETPDHLLDVNYEMM

SEQ ID NO: 20139 - protein, 291 aa, Vitis vinifera
MEVGFLGLGIMGKAMSINLIRSGFKLTVWNRTLSKCDELVELGASIGETPAAVVKKCNYTIAMLSDPSVALSVVFDKDGVLEQICHGKGYIDMSTVGADTSSKISEAITSKGGSFLEAPVSGSKKPAEDGQLVILAAGEKALYDEAIPAFDIMGKKSFFLGQVGNGAKMKLVVNMIMGSMMNAFSEGLVLADRSGLNPHTLLDVLDLGGIANPMFRLKGPTMIQNNYSPAFPLKHQQKDMRLALALGDENAVSMPVAAAANEAFKKARSLGLGDLDFSAVYETVKTLEHSS

SEQ ID NO: 20140 - protein, 287 aa, Vitis vinifera
MEVGFLGLGIMGKAMSINLIRSGFKLTVWNRTLSKCDELVELGASIGETPAAVVKKCNYTIAMLSDPSVALSVNGVLEQICHGKGYIDMSTVGADTSSKISEAITSKGGSFLEAPVSGSKKPAEDGQLVILAAGEKALYDEAIPAFDIMGKKSFFLGQVGNGAKMKLVVNMIMGSMMNAFSEGLVLADRSGLNPHTLLDVLDLGGIANPMFRLKGPTMIQNNYSPAFPLKHQQKDMRLALALGDENAVSMPVAAAANEAFKKARSLGLGDLDFSAVYETVKTLEHSS

SEQ ID NO: 20141 - protein, 362 aa, Vitis vinifera
MGRSPCCDKNGLKKGPWTPEEDQKLIDYIQKNGYGNWRTLPKNAGLQRCGKSCRLRWTNYLRPDIKRGRFSFEEEETIIQLHSILGNKWSAIAARLPGRTDNEIKNYWNTHIRKRLLRMGIDPVTHSPRLDLLDLSSILSTSLYNSSHMNVSRFLGMQPLVNPELLRLATSLMSSQRENPNFLLQNVQENQLCSAQVQNSFTHLVQPNQIQTPIQEIPACNPLSSSFSNESQVMEPNAEQFPSNITDFSSQNSQLISDWQSNGLPSDLSEEYYVPHPSSVGYYGSEQTIMDPSSDNSVFQSNNNFSFASVLSTPSSSPTPLNSNSTYINSSTEDEREISYGSNMYLKFETPDHLLDVNYEMM

SEQ ID NO: 20142 - protein, 174 aa, Vitis vinifera
MPRERDPLVVGRVVGDVLDPFLRSITLRVTYNNREVANGCEFRPSQLVSQPRVDIGGDDLRTFYTLVMVDPDAPSPSNPNLREYLHWLVTDIPATTGANFGQEIVCYESPRPTAGIHRFVFVLFRQLGRQTVYAPGWRQNFNTRDFAELYNLGLPVAAVYFNCQREGGSGGRRS

SEQ ID NO: 20143 - protein, 584 aa, Vitis vinifera
MCGILAVLGCVDNSQAKRSRIIELSRRLRHRGPDWSGLHCHQDCYLAHQRLAIVDPTSGDQPLYNEDKTVVVTVNGEIYNHKQLREKLTSHQFRTGSDCEVIAHLVKYGEDFVDMLDGMFSFVLLDTRDKSFIAARDGIGITPLYIGWGLDGSIWFASEMKALSDDCERFMSFLPGHYYSSKRGELRRWYNPPWYSEHIPSTPYDPLVLREAFEKAVIKRLMTDVPFGVLLSGGLDSSLVASVASRYMLQSEAACQWGSQLHTFCIGLKGSPDLKAAREVANYLGTRHHEFHFTVQEGLDALEEVIYHIETYDVTTIRASTPMFLMSRKIKSLGVKMVLSGEGSDEIFGGYLYFHKAPNKEELHQETCRKIKALHLYDCLRANKATSAWGVEARVPFLDKEFINIAMNIDPEWKMVRPDLGRIEKWVLRNAFDDDQKPYLPKHILYRQKEQFSDGVGYRWIDGLKDHANEHVTDAMLLNANFIYPENTPTTKEGYYYRAIFEKFFPKNAARSTVPGGPSVACSTAKAVEWDVAWLKNPDPSGRAALGVHECAYEEAVDAKNANLINGTTQKPQEGILEKTTTAI

SEQ ID NO: 20144 - protein, 114 aa, Vitis vinifera
MSATGGVAGAGAGTGGQEEDKKPMDQGAHINLKVKGQDGNEVFFRIKRSTQLRKLMSAYCDRQSVELNSIAFLFDGRRLRGEQTPDELEMEDGDEIDAMLHQTGGVAWMCLTAN

SEQ ID NO: 20145 - protein, 335 aa, Vitis vinifera
MKRLGSSESLGALMAICPTTDEHSPRNNHVYSREFQTMFDGLDEEGCVEESGQIVEKKRRLSVDQVKALEKNFEVENKLEPERKVKLAQELGLQPRQVAVWFQNRRARWKTKQLERDYGILKANYETLKLNYDAIQHDNEALLKEIRELKSKLNEEKTESNLSVKEELVVSESDEKVKVMEQSETAMGAGVGGSDAKDLSNDDSFKDGNGGGRVSVFPDMKDGSSDSDSSAILNEDNSPNAAISSSGVLQNNHHHHLLMSPPSSSLRFNNSSSSSINCFHFSDSSRPILGNTQKAYQPQFVKMEEHNFFGADESCNFFSDDQPPTLPWYCPDQWT

SEQ ID NO: 20146 - protein, 454 aa, Vitis vinifera
MASRLHSSRLFQTLKTTSSICRLRHLSTATAAAAKESYEDADGISMKGVKISGRPLYLDMQATSPVDPRVLDAMLPYYLSSFGNPHSRTHLYGWESDLAVEKARAQVAALINASPKEIVFTSGATESNNISVKGVMHFYKEKKRHVITTQTEHKCVLDSCRHLQQEGFEVTYLPVGSDGIVDIDQMRSAIRPDTGLVSVMTVNNEIGVIQPIEEIGNICRELGVPFHTDAAQALGKIPVDVEKMNVSLMSLSGHKIYGPKGVGALYMRRRPRIRVEPQMNGGGQERGIRSGTVPTPLVVGMGAACELAMKEMEYDDKRISDLQERLLNGIKAKLDGVVVNGSKEKRYAGNLNLSFAYVEGESLLMGLKEVAVSSGSACTSASLEPSYVLRALGVDEDMAHTSIRFGIGRFTTEAEIDRAVELTVQQVEKLREMSPLYEMVKEGIDIKSIQWAQH

SEQ ID NO: 20147 - protein, 209 aa, Vitis vinifera
MWEIEILRQKNGKYGVGGICNGGGGASALFDAAKLRKLRPSFKDGGSVTAGNASSISDGAAALVLVSGKKAVELRLQVIAKIAGYGDAAQAPELFTTTPALAIPKAISNAGLKASQIDYYEINEAFAVVALANQKLLGLDPEKVNVHGGAVSLGHPIGCSGARILVTLLGILRQKNGKYGVGGICNGGGGASALVLELMPVARLGHSKL

SEQ ID NO: 20148 - protein, 430 aa, Vitis vinifera
MIDHNHHHHHHHHGDVPMLDLPCLKALAALGRGAKGAVFLVEAEAGEERLALKAVSRKLVESKSKDNDKNGSNNDKESDYRRICFEQEALRRFRHPLLPRLHGIVCTDRIVGYAIDYCPGRDLNQLRKKQSEKMFSDDIIRFYAAELVLALEYLHGLGIVYRDLKPENVLIQENGHLMLVDFDLSTKLSPKSPENPPPIIKKPAQKPAKKTRLSSFHRLCNSGISSKKSDPALESERNSVRTESDSSAKSNSFVGTEEYVAPEIILGSGHDFAVDWWSLGVMLYEMLYGTTPFKGSNRKETFYRILAKAPALVGEATPLRDLIAKLLEKDPKQRIILEDIKGHDFFRGIEWDMVVEIGRPPYIPENEHVEGGFQDLDIESLVQEAFKIGDGDDNKKNSNNNNNNKEGSEKKGAWVEGLNHKSEINDFLIF

SEQ ID NO: 20149 - protein, 572 aa, Vitis vinifera
MAAIQTALSSIFFSNYLHSLSQTPHRLRKRMLATWTSDQELNQVRLRSGADMKRKLGWYDLVALGVGGMLGVGVFVTTGPVALHHSGPSVFISYIIAGISALLSSMCYTEFSVEIPVAGGAFSYLRVTFGEFVGYFAGANILMEYVLSNAAVSRSFTEYLSCAFGGNLNSWRVEVHGFTKGFNMLDFPAVAIILLLTLCLCYSTKESSILNFVMTIFHVVFFGFIIIAGFLKGSAKNLVNPDGLAPFGVKGVLDGAAQVYFSYIGYDSVSTMAEEISNPSKSLPVGIMGSVFIVSGLYCLMSFALCMMLPYNQIPEKASFAIAFQRMGWKWASNIVGAGASLGIVASLLVAMLGQARYLCVIGRARLVPLWLAKVHPSTGTPLNATLFLGAFTASIALFTELEIVVDMVNLCTLLVFYLVANALIYRRYVITVNNPPFHTLLFLSLLSCSSIAFSLSWKLKQWWGLPLFGGIMIIITACFHYFAPYPNQPSKWSVPFMPWPAAMSIFLNVFLMTTLKKLSLQRFGVWSCLIILFYVLYGVHSTYRAEEMGMDAGGVNPNSSAQQTKLDIQLL

SEQ ID NO: 20150 - protein, 458 aa, Vitis vinifera
MGMTRERPMFYWVLICMLFSFVLTEAAPQTALVTKLPGFNGTFPSKHYSGYVTVDENHGKKLFYYMVVSENNPSEDPVVLWLNGGPGCSSFDGFVYEHGPFNFEASTQGDLPQLHLNPYSWSKLSNIIYLDSPAGVGFSYSENLTDYRTGDLKTASDSHAFILKWFELYPEFLSNPFYIAGESYAGVYVPTLAYEVVKGIKGGIKPILNFKGYMVGNGVTDEEFDGNALVPFAHGMGLISDELFQTSLGNIRLPSSFQKLGETDRPFAVRKRMFGRAWPLRAPVREGLVPTWPQLLNSGSVPCTDDEVATSWLNNKAVREAIHAALVSSLHVSFPDQESVAGKWELCTDRILYHHDAGSMIKYHKNLTSDGYRALIFSGDHDMCVPYTGSQAWTRSVGYKVVDEWRPWFFDEQVAGYVQGYENNLTFLTVKGSGHTVPEYKPREALAFYSRWLTGRPI

SEQ ID NO: 20151 - protein, 103 aa, Vitis vinifera
MSATGGAAGGQEEDKKPTDQGAHINLKVKGQDGNEVFFRIKRSTQLRKLMSAYCDRQSVELNSIAFLFDGRRLRGEQTPDELEMEDGDEIDAMLHQTGGVAWM

SEQ ID NO: 20152 - protein, 500 aa, Vitis vinifera
MGMTRERPMFYWVLICMLFSFVLTEAAPQTALVTKLPGFNGTFPSKHYSGYVTIDENHGKKLFYYMVVSENNPSEDPVVLWLNGGPGCSSFDGFVYEHGPFNFEARTQGDLPQLHLNPYSWSKLSNIIYLDSPAGVGFSYSENLTDYRTGDLKTASDSHAFILKWFELYPEFLSNPFYIAGESYAGVYVPTLAYEVVKGIKGGIKPILNFKGYMVGNGVTDEEFDGNALVPFAHGMGLISDELFQDISNLCQGNYYNSLDENCESKLSKVDKDIEGLNIYDILEPCYHEKSPETSLGNIRLPSSFQKLGETDRPFAVRKRMFGRAWPLRAPVREGLVPTWPQLLNSGSVPCTDDEVATSWLNNKAVREAIHAALVSSLHESVAGKWELCTDRILYHHDAGSMIKYHKNLTSNGYRALIFSGDHDMCVPYTGSQAWTRSVGYKVVDEWRPWFFDEQVAGYVQGYENNLTFLTVKGSGHTVPEYKPREALAFYSRWLTGRPI

SEQ ID NO: 20153 - protein, 842 aa, Vitis vinifera
MAQNVERSAKNENKFKKAKMVTWSKLKVMKDKYKNLLLAILISSYFKIFLMAMMVWKLPSSVIFIIDVFVLSSNTLALKGQKYFLSAGFTRILQHYLNSEIDRSADGTIEGLCRTEIVASCATRQTPECRVLATVSYFSMASIKRQLSEPEEPESKKPKAALSDSPEHKTKQRVVLNPADCDLDFNIVGDGLQGSALHDHGFAYCWSGARGNVGITGGKYCFGCKIISTQPVDMEDTPPDQQHVCRLGISRGDDAVGNLGETEHSFGFGGTGKFSVAGKFSNYGEKFGVGDTIVCAVNLETKPLASISFSKNGKWLGVAKEFDAGVKGLGVVDSPMRQLHWESALFPHVLLKNVMVQVQFSTEEGLVPEEGYKPWASALYDGNAIMGPSFSSPRDCEVMMMVGLPASGKSTWAEKWVKEHAEKRYVLLGTNLALDQMKVPGLLRKQNYGERFERLMDRATGIFNTLLSRASKTPHNYIIDQTNVYKNARKRKLKPFANFQKIAVVLFPKPEELKFRAEKRFKEMGKEVPADAVNEMIANYVLPGSKDMPGSDEDFDQVLFPELNRGEAQKCLEEMKRALGTASHLNLKSNFSPYSQESSLQSYNSSSLQNQGAPSVPDERSLSYHPPLPQNYYYQRPAHMNSGHQGVALHGRVEPFPRAYQDNQNPFMPRDAPYETSLGYSRNFLSRNDSNSYGTYGYDNSRGSIPGVGMASYQSFGMVDPYRRTNLESRNPIPMGATDPYVSGMVESHDKYNVEGVNHYETQAESMRTSLFSHNTLGGHGSVPGGFGANQLVPRDPRNLPTPSQMSYGSPYGAPLVRPSYGNFPTDMQHPGGYAPPRPRYY

SEQ ID NO: 20154 - protein, 282 aa, Vitis vinifera
MCDYSSNPSSDFALLESVRRHLFDDSDSRRFDAPLYCRSNSFSSLFETGGELPLKEDDSDDMVIYGFLRDAASGGWTPTLAPLFSETASHGFSTAPAVAVKSEPEVFPAEVIGVPEKTVDPPAKLPAPAVVPAKGKHYRGVRQRPWGKFAAEIRDPAKNGARVWLGTFETAEDAALAYDRAAYRMRGSRALLNFPLRVNSGEPDPVRVTSKRSSPEPSSSSTSSSSSDNSSPKRRKKVSSLAAPAVAPATAQTGIEIGKSMEGSQAGYEVAQLTHGPQLLVR

SEQ ID NO: 20155 - protein, 227 aa, Vitis vinifera
MSAFHLFKLSLLLSLLPNSIIPNSQKSTGLFPPTCSRIECPTYDLIQAGNGYEIRRYNSTVWISTSPIQDISLVDATRDSFLQLFDYIQGKNEYQEHIEMTAPVITQVSPSDGPFCESSFVVSFYVPKKNQANPPPAKGLHVQKWGPAYAAVRQFSGFVSDSEVGEEAAALEASLAGSIWSAAIEKSRPDDPTSTYTVAQYNSPFEYEERVNEIWMMFDMEDEVGAL

SEQ ID NO: 20156 - protein, 188 aa, Rhizobium huautlense
LPLWGFDGSSTMQAEGRSSDCVLKPVALYPDPARTNGVLVMCEVMMPDGVTPHPSNSRATILDDEDAWFGFEQEYFFYENGRPLGFPESGFPAPQGPYYTGVGYKNVGSIAREIVEEHLDLCLAAGINHEGINAEVAKGQWEFQVFGKGSKKAADQIWMARYLLLRLCEKYGIDIEFHCKPLGDTDWN

SEQ ID NO: 20157 - protein, 188 aa, Rhizobium tropici
QLPLWGFDGSSTMQAEGRSSDCVLKPVAIYPDPARTNGALVMCEVMMPDGVTPHESNSRATILDDEDAWFGFEQEYFFYKDGRPLGFPESGYPAPQGPYYTGVGYKNVGDVAREIVEEHLDLCLEAGINHEGINAEVAKGQWEFQIFGKGSKKAADQIWMARYLLLRLCEKYGIDIEFHCKPLGDTDW

SEQ ID NO: 20158 - protein, 188 aa, Bradyrhizobium yuanmingense
ASLWGFDGSSTQQAEGHSSDCVLKPVAVFPDGARTNGVLVMCEVMMPDGKTPHPSNKRATILDDSGAWFGFEQEYFFYKDGRPLGFPTAGYPAPQGPYYTGVGYSNVGDVARKIVEEHLDLCLAAGINHEGINAEVAKGQWEFQIFGKGSKTAADQMWMARYLMLRLTEKYGIDIEFHCKPLGDTDWN

SEQ ID NO: 20159 - protein, 189 aa, Rhizobium sullae
LPLWGFDGSSTMQAEGRSSDCVLKPVAIYPDPARTNGVLVMCEVMMPDGVTPHASNARATILDDEDAWFGFEQEYFFYENGRPLGFPESGYPAPQGPYYTGVGYSNVGSVAREIVEEHLDLCLAAGINHEGINAEVAKGQWEFQIFGKGSKKAADQIWMARYLLQRLTEKYGIDIEYHCKPLGDTDWNG

SEQ ID NO: 20160 - protein, 188 aa, Rhizobium etli
LPLWGFDGSSTMQAEGRSSDCVLKPVAIYPDPARTNGALVMCEVMMPDGVTPHPSNARATILDDEDAWFGFEQEYFFYQNGRPLGFPEQGYPAPQGPYYTGVGYSNVGDVAREIVEEHLDLCLAAGINHEGINAEVAKGQWEFQIFGKGSKKAADQIWMARYLLQRLTEKYGIDIEYHCKPLGDTDWN

SEQ ID NO: 20161 - protein, 251 aa, Wolbachia endosymbiont of Muscidifurax uniraptor
MACKLLSLQKLYFTSEESYIVTMDKIIIKKFGGTSLTDLNRVANLIKNDIEKGCNVIVVVSAVAGFTDQMVFQARQISNLSYRQELSEYDVMLSAGEQISCGLLAITLQSIGVNAKSWLAWQLPIVTDDFYSESKIKTIKIERVKRSFAEGYTAAIIAGFQGINDDRITTFGRGGSDISAVAFAVAFGVRTCEIFTDIDGIYTADPRIVPKARKLKFISYDEMLEMSSSGAKILHNRSVQLAMKHNIKVQV

SEQ ID NO: 20162 - protein, 279 aa, Wolbachia endosymbiont of Muscidifurax uniraptor
VLSEQTLNPSSLHKRGQEARKILQDARDNVRGAIGVSSDKEIVFTSGATEANNLVMRGIAGYLHIISAIEHPSILNSACNPYIIPVNQEGIADFLELEKILSELKGNKAIVSVMMANNETGVIQPIEEIAKIVHKFGAICHTDTAQSVGKIKVNMEDLGVDLLTLSAHKFGGVAGSGVLIFNKELAIEPIIIGGGQEKGFRGGTENIVAIAGLSAALQNIPDLLSKMDEVKELRDQLECELLNLASDIRIFGKNSKRLPNTSFIYMPGVKSDVQLMHFD

SEQ ID NO: 20163 - protein, 532 aa, Wolbachia endosymbiont of Muscidifurax uniraptor
GPGSGGLQLSREIAKVFEDSIGIARRNKDSFVAVERLLQGLTAQKDDTVGKILAENGVTLQKLNSVIAEMRKGSSADSPNSEEKLNAAKKYTKDVTELAMQGKLDPVIGRDEEIRRTMQVSLRRTKNNPVLIGEPGVGKTAIVEGLANRIVANDVPLGLHDAKVLALDLGALIAGTKFRGEFEERLKAVINEISRAEGKIILFIDELHTLVGAGATSGAMDASNLLKPALARGEIRCIGATTLDEYRQHIEKDPALARRFQPVFISQPTETDTISILRGLKERYEVHHGIRITDGAIIAAATLSNRYITDRFLPDKAIDLIDEAASRVRIEMDSKPEVIDELERKVIQLKIEAEALKKESDENSKQRLKKINEEIENLNSKFADLNSKWQMEKNKIARIQETAEKLDNARKELELVQRSGNLGRAGELMYGVIPQLENELKNQEKVTDSFLKKEVTGDDIANIVSKWTGIPVDNMMHSEKEKLLNMENEIGRRVIGQKDAIEAISNAVRRSRSGVQDTNRPFGSFLFLVQPE

SEQ ID NO: 20164 - protein, 566 aa, Wolbachia sp. wRi
MSEAKSLILAAILSMLIMVSWRIIYDNFFSTNQNQPLIEHIESFNDLAPIIHQNRSEIINSTREQRVSLTNNMIKGSISLKGARFDDLILTNYHLEPSSSSPQVVLLSPAESKDVYFAEFGWLDPSNKIKVPDSKAVWRADKLNQKEVNLSWDNENGILFRMKINLDDNYMFKVEQVVENNTKDNVVLVPYGKINRKRDNINESYWISHEGVLGAFDNKLEEWTYKDISKKHLIKANTSEKNWFGFADKYWLTVIIPEKSDKINVSIKHTNANDIDKFQVDFVKSYKSILPGASTSNVNYFFAGAKKLNLLDSYKDTLNIPLFDKAVDFGVLYFITKPVFLLLEYFNFVLKNFGLAILLLTLVIKLLMLPLSNRSYVSMFKVKSLQPELTRVKELYKNDSLKQHKETIALFKRNNVNPMSSIFPMLIQIPVFFALYKVLFVTIEMRHAPFFLWIKDLSAPDPTNIFTLFGLFNYNFPISIGILPIIFGATMIIQQKLSEKDQTSKDDIQVNVMKFLPYISVFIFSSFPAGLVIYWIFSNIITLIQQSLIKLFLTKKVVVNVENTNS

SEQ ID NO: 20165 - protein, 640 aa, Wolbachia sp. wRi
MGRAIGIDLGTTNSCVAIMQGKDTKVIENKEGARTTPSIVALTSSGERLIGAPAKRQATTNASNTFFATKRLIGRQYSDPEMKNLSVPYKVFAAKSGDAWVKTTDNKEYSPSQIGAFILQNMKEAAEAYLGEEVKDAVITVPAYFNDSQRQATKDAGKIAGLNVLRIVNEPTAAALAYGLDKKHGHTIVVYDLGGGTFDVSILEIGDGVFEVKATNGDTHLGGEDFDNGVVSYLLDEFKKSNGIDLKNDPMAMQRIKEAAEKAKIELSSAMETEINLPFITADASGPKHLNMKLTRAKLESLVNDLIERTMAPCKKALEDAGLSASQIGEVVLVGGMTRMPKVIEKVKEFFGKDPHRGVNPDEVVAIGAAIQAGIIQGDVRDVLLLDVTPLSLGIETLGGVFTPLIERNTTIPTKKSQVFSTAEDNQTAVTIKVHQGERKLAVDNKLLGQFSLEGIPPAPRGRPQIEVTFDIDANGIAHVSAKDKATGKEQKIRIQSSGGLSDDEINRMVKEAEEKAQEDEKRKKFIEVKNQADSLVHSTEKSLTEYGDKVSPEDRSAIENAVNELKEVSKSDNIDDADSIQQKVTNLSQLSMKLGEAMYQASQQNSAENGFSSEGNPNDKEEKVVDSDYQDIDNKEENK

SEQ ID NO: 20166 - protein, 424 aa, Wolbachia sp. wRi
MSNKIDFWAIFALVISSQIGSGIFMLPISLAPYGMYSLISWIISGLGAISLALVFASLCAKFPETGGPHVYVKHAFGPAAAFFVGWTYWVISWVSTTAVIVVGVGYLTPFFHEDIQNVHLFLEMLLLTIITLINFRGVATAGRVEFLLTVIKISVLLVIPIAALFFFDRNNFIISEEISNLTTSQILARSTLITLWGFIGVELATAPAGSVDNPARTIPRAVVLGTISVAVVYFINNLAIMGLINGNDLASSRAPYVDAIKIMASGNWHLIISITAFIFCVGTLNAWVLASGQVALGLAKDKLMPQFFAQRNKHGSPFWGITTSSVGTATLLILTSSNNFAKQITSIIDFSVVSFLFVYLACSLAFLKVIVQEKSCYKFLIGSIATTFCCWVIFETSVNTLLIASLFTASGVPLYLFWYRRVSV

SEQ ID NO: 20167 - protein, 410 aa, Wolbachia sp. wRi
MACKLLSLQKLYFSSEESYIVTMDKIIIKKFGGTSLTDLNRVANLIKNDIEKGCNVIVVVSAVAGFTDQMAFQARQISNLSCRQELSEYDVMLSAGEQISCGLLAITLQSIGVNAKSWLAWQLPIVTDDFYSESKIKTIKIDRVKRSFAEGYTAAIIAGFQGINDDRITTFGRGGSDISAVAFTVAFGVRTCEIFTDIDGIYTADPRIVPKARKLKFISYDEMLEMSSSGAKILHNRSVQLAMKHNIKVQVLSTFKEVEGTTVLHKRDVLERYLITGITYSTNEALVTFTNLANNLRTLRDIVGANVKIDMVHGSSFVISKFDIDLMEKLLNKNENYAINDNVAKISIIGIGVMSNTEVMHRTLKVLSEKKIEILAITTSEIKISIIVQKEYVVALVKDLHTEYELDMQH

SEQ ID NO: 20168 - protein, 397 aa, Wolbachia sp. wRi
MSDLAKRMFLIKPSPTIAVTDKANKLKNEGKKICVLAAGEPDFDTPDHIKKAAIQAISEGKTKYTAVDGTRELKEAIINKLRKDNNLEYTLNQICVGTGAKQVLFNLFMATINSGDEVIIPAPYWVSYVDMVSLFGGLPVVVECKQNFKLTAELLKSRITKKTKWLILNSPNNPAGAVYTCDELKDIAQILLEYPHMNVVTDDIYEHIIYDEKFFTIAQVEPKLYDRVFVVNGVSKAYAMTGWRIGYIAGRSDVVKAISTLQSQSTSNPNSIAQAAAAAALNGDHSFLKERTRIFKSRRDFMVKELNSAPGLSASVPQGAFYLFVSCEGLLSKSTKSGKIINNDLDFTEYLLGDHLVAVVPGIAFGLENFIRISYATSQEQLEIGCDSITKACQELK

SEQ ID NO: 20169 - protein, 308 aa, Wolbachia endosymbiont of Muscidifurax uniraptor
MKIIIGNASKELGESVVNRLDVQPSSAWISKFTDGEVNVEVANDLYNQEVYIIQSLSPPVNDNLMELLLIIDAVNRLGAKRIVVIIPYYGYSRQDRIIKNNNVQSALSAKLVANLIQTAGASSVAVIDLHSSQIEGFFDVPITNLNCFEAFVDSIHTENLAIVAPDVGAIGRARAFAKTLEEKYKIGLSDKIIVVDKYREKAGTSQVMNIIGEVANKNCVIVDDIVDSGGTLCNAALALKSYGAKSVTSCITHGVLSGSAVEKISSSSLDKLVITDTILHKFEKTGKIEVVSVVDILTHFIQGGKDAS

SEQ ID NO: 20170 - protein, 640 aa, Wolbachia endosymbiont of Muscidifurax uniraptor
MGRAIGIDLGTTNSCVAIMQGKDTKVIENKEGARTTPSIVAFTSSGERLIGAPAKRQATTNASNTFFATKRLIGRQYSDPEMKNLSVPYKVFAAKSGDAWVKTTDNKEYSPSQIGAFILQNMKEAAEAYLGEEVKDAVITVPAYFNDSQRQATKDAGKIAGLNVLRIVNEPTAAALAYGLDKKHGHTIVVYDLGGGTFDVSILEIGDGVFEVKATNGDTHLGGEDFDNGVVSYLLDEFKKSNGIDLKNDPMAMQRIKEAAEKAKIELSSAMETEINLPFITADASGPKHLNMKLTRAKLESLVNDLIERTMAPCKKALEDAGLSASQIGEVVLVGGMTRMPKVIEKVKEFFGKDPHRGVNPDEVVAIGAAIQAGIIQGDVRDVLLLDVTPLSLGIETLGGVFTPLIERNTTIPTKKSQVFSTAEDNQTAVTIRVHQGERKLAVDNKLLGQFSLEGIPPAPRGRPQIEVTFDIDANGIAHVSAKDKATGKEQKIRIQSSGGLSDDEINRMVKEAEEKAQEDEKRKKFIEVKNQADSLVHSTEKSLTEYGDKVSPEDRSAIENAVNELKEVSKSDNIDDADSIQQKVTNLSQLSMKLGEAMYQASQQNSAENGFSSEGNPNDKEEKVVDSDYQDIDNKEENK

SEQ ID NO: 20171 - protein, 213 aa, Wolbachia endosymbiont of Muscidifurax uniraptor
MEIFLDSVDLNEIKELKEFIDGITTNPSLIAKSGRKDKYEDLVREICSIIKGPVSVEVVADSHEEMITEGLNLAKIADNVVIKLPLTHEGLISCKKLWTEHKIPVNITLCFSPGQALLAAKVGACFISPFIGRLDDISYDGLSLIEDICTIYSNYGFDTKVLVASVRSPAHVIEAARLGADSITVPAKVLRQLINHPLTDQGLAIFGKDWGVK

SEQ ID NO: 20172 - protein, 397 aa, Wolbachia endosymbiont of Muscidifurax uniraptor
MSDLAKRMFLIKPSPTIAVTDKANKLKNEGKKICVLAAGEPDFDTPDHIKKAAIQAISEGKTKYTAVDGTRELKEAIINKLRKDNKLEYTLNQICVGTGAKQVLFNLFMATINSGDEVIIPAPYWVSYVDMVSLFGGLPVVVECKQNFKLTAELLKSRITKKTKWLILNSPNNPAGAVYTCDELKDIAQILLEYPHMNVVTDDIYEHIIYDEKFFTIAQVEPKLYDRVFVVNGVSKAYAMTGWRIGYIAGRSDVVKAISTLQSQSTSNPNSIAQAAAAAALNGDHSFLKERTRIFKSRRDFMVKELNSVPGLSASVPQGAFYLFVSCEGLLSKSTKSGKIINNDLDFTEYLLGDHLVAVVPGIAFGLENFIRISYATSQEQLEIGCDSITKACQELK

SEQ ID NO: 20173 - protein, 147 aa, Sesbania rostrata
GFTDKQEALVNASYEAFKKNLPGHSVLFYSFILEKEPAAKGLFSFLKDSDGVPQNNPSLQAHAEKVFGLVHDAAAQLRATGVVVLADASLGSVHVQKGVTDPHFVVVKEALLKTLKEAAGATWSDEVSIAWEVAYDGLAAAIKKAMS

SEQ ID NO: 20174 - protein, 303 aa, Nicotiana repanda
MGSKYSNGTTISAASNLSYRVPFPALLEATSNFDESLVIGIGGFGKVYRGVLCDGTKVAVKRGNPKSQQGLAEFRTEIEMLSQFRHRHLVSLMGYCDEKNEMILVYEYMENGTLKSHLYGSDLPSMSWKQRLEICIGSARGLHYLHTGYAKAVIHRDAKSANILLDESFMAKVADFGLSKTGPELDQTHVSTAVKGSFGYLDPEYFRRQQLTEKSDVYSFGVVLFEVLCARPVIDPSLPREMVNLAEWAMKWQKKGQLEQIIDPNLKGKIRPDSLRKFGETAEKCLADFGVDRPSMGDVLWKL

SEQ ID NO: 20175 - protein, 303 aa, Nicotiana repanda
MGSKYSNGTTISAASNLSYRVPFPALLEATSNFDESLVIGIGDFGKVYRGVLCDGTKVAVKRGNPKSQQGLAEFRTEIEMLSQFRHRHLVSLMGYCDEKNEMILVYEYMENGTLKSHLYGSDLPSMNWKQRLEICIGSARGLHYLHTGYAKAVIHRDVKSANILLDESFMAKVADFGLSKTGPELDQTHVSTAVKGSFGYLDPEYFRRQQLTEKSDVYSFGVVLFEVLCARPVIDPSLPREMVNLAEWAMKWQKKGQLEQIIDPNLKGKIRPDSLRKFGETAEKCLADFGVDRPSMGDVLWKL

SEQ ID NO: 20176 - protein, 178 aa, Oryza sativa Indica Group
MAGSGRDDPLVVGRIVGDVLDPFVRITNLSASYGARIVSNGCELKPSMVTQQPRVVVGGNDMRTFYTLVMVDPDAPSPSNPNLREYLHWLVTDIPGTTGATFGQEVMCYESPRPTMGIHRLVFVLFQQLGRQTVYAPGWRQNFNTKDFAELYNLGSPVAAVYFNCQREAGSGGRRVYP

SEQ ID NO: 20177 - protein, 178 aa, Oryza sativa Indica Group
MAGSGRDDPLVVGRIVGDVLDPFVRITNLSVSYGARIVSNGCELKPSMVTQQPRVVVGGNDMRTFYTLVMVDPDAPSPSNPNLREYLHWLVTDISGTTGATFGQEVMCYESPRPTMGIHRLVFVLFQQLGRQTVYAPGWRQNFSTRNFAELYNLGSPVATVYFNCQREAGSGGRRVYP

SEQ ID NO: 20178 - protein, 178 aa, Oryza rufipogon
MAGRGRDDPLVVGRIVGDVLDPFVRITNLSVSYGARIVSNGCELKPSMVTQQPRVVVGGNDMRTFYTLVMVDPDAPSPSNPNLREYLHWLVTDIPGTTGTTFGQEVMCYESPRPTMGIHRLVFVLFQQLGRQTVYARGWRQNFSTRNFAELYNLGSPVATVYFNCQREAGSGGRRVYP

SEQ ID NO: 20179 - protein, 178 aa, Oryza longistaminata
MAGSGRDDPLVVGRIVGDVLDPFVRITNLSVSYGARIVSNGCELKPSMVTQQPRVVVGGNDMRTFYTLVMVDPDAPSPSNPNLREYLHWLVTDIPGTTGTTFGQEVMCYESPRPTMGIHRLVFVLFQQLGRQTVYAPGWRQNFSTRNFAELYNIGSPVATVYFNCQREAGSGGRRVYP

SEQ ID NO: 20180 - protein, 178 aa, Oryza rufipogon
MAGSGRDDPLVVGRIVGDVLDPFVRITNLSVSYGARIVSNGCELKPSMVTQQPRVVVGGNDMRTFYTLVMVDPDAPSPSNPNLREYLHWLVTDIPGTTGITFGQEVMCYESPRPTMGIHRLVFVLFQQLGRQTVYAPGWRQNFSTRNFAELYNLGSPVATVYFNCQREAGSGGRRVYP

SEQ ID NO: 20181 - protein, 178 aa, Oryza rufipogon
MAGSGRDDPLVVGRIVGDVLDPFVRITSLSASYGARIVSNGCELKPSMVTQQPRVVVGGNDMRTFYTLVMVDPDAPSPSNPNLREYLHWLVTDIPGTTGATFGQEVMCYESPRPTMGIHRLVFVLFQQLGRQTVYAPGWRQNFNTKDFAELYNLGSPVAAVYFNCQREAGSGGRRVYP

SEQ ID NO: 20182 - protein, 179 aa, Oryza rufipogon
MAGSGRNRDPLVVGRVVGDVLDAFVRSTNLKVTYGSKTVSNGCELKPSMVTHQPRVEVGGNDMRTFYTLVMVDPDAPNPSDPNLREYLHWLVTDIPGTTAASFGQEVMCYESPRPTMGIHRLVFVLFQQLGRQTVYAPGWRQNFNTKDFAELYNLGSPVAAVYFNCQRETGSGGRRIYN

SEQ ID NO: 20183 - protein, 544 aa, Arabidopsis thaliana
MASLQLYGVKTPGLALSSKRLEFASKGACFSVTLPSSSAVFRDVEHSCRNIGLRVSCEALRVDLLQRKEPETCDSSGTGKELTCVMKFGGSSVGSAERMKEVANLIFSFPDERPVIVLSAMGKTINKLLKAGEKAVTCGVTNVGSIEELSFIKELHLRTAHELGVETTVIEKHLEGLHQLLKGISMMKELTLRTRDYLVSFGECMSTRLFSAYLNKIGHKARQYDAFEIGFITTDDFTNADILEATYPAVSKTLVGDWSKENAVPVVTGYLGKGWRSCAITTLGRGGSDLTATTIGKALGLREIQVWKDVDGVLTCDPNIYPGAQSVPYLTFDEAAELAYFGAQVLHPLSMRPARDGDIPVRVKNSYNPTAPGTVITRSRDMSKAVLTSIVLKRNVTMLDIASTRMLGQYGFLAKVFTTFEDLGISVDVVATSEVSISLTLDPAKLWGRELIQRVNELDNLVEELEKIAVVKLLQRRSIISLIGNVQKSSLILEKVFQVFRSNGVNVQMISQGASKVNISLIVNDEEAEQCVRALHSAFFETDP

SEQ ID NO: 20184 - protein, 266 aa, Hordeum vulgare subsp. vulgare
APQGAEVTGLPGFDGALPSKHYAGYVTVDEGHGRNLFYYVVESERDPGKDPVVLWLNGGPGCSSFDGFVYEPGPFNFESGGSVKSLPKLHLNPYAWSKVSTMIYLDSPAGVGLSLYSKNSDYETGDLKTATDSHTFLLKWFQLYPEFLSNPFYIAGESYAGVYVPTLSHEVVKGIQGGAKPTINFKGYMVGNGVCDTIFDGNALVPFAHGMGLISDEIYQQASTSCHGNYWNATDGKCDTAISKIESLISGLNIYDILEPCYHSRS

SEQ ID NO: 20185 - protein, 581 aa, Sulfurihydrogenibium azorense Az-Fu1
MEKKRGADIVVDVLLHEGVDTIFGLPGGAIMEVYDALFDAPFKNVLTRHEQAACHMADGYARATGKVGVVIATSGPGATNLVTGLATAYMDSIPLVAITGQVPRHYIGTDAFQEADVIGITRPITKHNFLVTDIKDLPLILRQAFYIARTGRPGPVLVDIPKDITQQVSEYYIPSDEEVKESLPGYNPHVEGNPVQIKKAAELIRKATRPVLYVGGGAILADAAEEVTKLARLTKIPVTTTNMGKGAFPETDPLSLHMLGMHGTYYANMAVYHSDLLIAVGARFDDRVTGKISEFAPEAKIIHIDIDPASISKTITVDVPIVGDVKNVLQKLIKELEEKPVEWVAARENWLKQIQEWKEKHPLSYRKSDKIIKPQYVIEEIYNITNGDAIISAGVGQHQMWAAMFYKYSYPRQFLNSGGLGTMGFGFPAAVGAKIGRPDKTVFAIEGDGSFIMNVQDLATAVQYRVPVKIAIINNGFLGMVRQWQQFFYDSRYASVCLSVQPDFVKLAESFGAVGLRATKPSEVKEVLAKAMEINDRPVLIDFVVDREENVLPMVPAGKSYREMILTPKQKGEAETMYLVG

SEQ ID NO: 20186 - protein, 311 aa, Sulfurihydrogenibium azorense Az-Fu1
MSKVLKLISGNANKSLAKEISDYLETPLVDVLLTKFSDGEIRVQINENVRGADVFVIQSLTHPVNDHIMELLLLLDALKRSSTHRITAVIPYFAYARQDRKDKPRVPISAKLLADIIQKAGADRVLTVDLHSAQIQGFFDCPVDNIYALPVIYEYLKAKNIEDLVIVSPDAGGVERARMLQNRLGGNLAIIYKKRPAPNVVETLDVIGNVEGKNAVIIDDIIDTAGTIVAAADMLKSKGAKSVIAACTHPVFSGPAIERLKNSAIEEVIATNTIPLEGKEFDKLTVLSVAELIGEAIKRINIESSVSSLFI

SEQ ID NO: 20187 - protein, 1468 aa, Sulfurihydrogenibium azorense Az-Fu1
MSEILEKDACGVGFLANIKGIKSHKILHDALESLANLDHRGAVSADGKTGDGAGILTQIPYKFFEKQLKKLGIKIPSIEDFAVGVFFLPKGKEESLKKEIEDIINQKFKFLGWREVPINQDEVGEIAKRTQPTILQGFISKEGIKTENFEKDLFILRKKLEKLTLNQDYKDFYIPSLSSRTIVYKGLITAPKLRDFYLDLQDEDYETAFAIFHQRYSTNTFPNWKLAHPFRMLAHNGEINTISANRNWLKAKEQDIREVWGDLADIILPITNDTDSDSASLDNAVEFLVHSGKDILTAINVLVPRAWENDDRLTPEERAFYEYFACIFESWDGPAAIAFTDGKIIGGKLDRNGLRPARYIITNDVLLMASEVGVIEFPEEEVILKGRLGPGDKIALNLETGKIYFSEEIIDLLVKDKNYKEWVESNIVPFIPAKETPEIDYKDVLKELITFGYDKDEINMVVKEMALKGVEPTYSMGNDTPISVLSRRPKMLASYFKQRFAQVTNPPIDPIREKKVMSLKTYVGKKENFLLETPKHANQIVFESPIIFDNEMEELIKTYPDKVQIIPTIFPPYETALEPTLDEICQRVEEAVDNGKEIIILSDRDVSIEGAPIPMGLAVGAVNTYMAKKGKRSKFSIIADSGEVRDTHSVAFLIGYGATLVNPYMAVQVIRNLIEDDKKFEITFEEAVKNYRKALNEGLLKIMSKMGIATIKSYRGSGLFEALGISQEVIDRCFPGTVSKLDGIGFIEIAREVLARFNPAFSGEMKDLPVGGEYRHRREGGEFHSWNPKALTSLHRAVRQIKLEEYKAFTELAYAEKPVELRDLLEISSDRPPIPIEEVEPIESIMKRFVGAGMSVGALSREAHETIAEALNTIGGKSNSGEGGEDPARYGTIKNSKIKQVASGRFGVTPEYLNSAEEIEIKIAQGAKPGEGGQLPGKKVDVYIAFLRHAKPGITLISPPPHHDIYSIEDLAQLIYDLKMINPKAKVIVKLVSESGIGVVASGVAKAFADIIHISGHDGGTGASPLSSIKNAGTIWELGLPEVQKALIDNDLRSRVKLRVDGGIKTGRDIIIGALLGAEEFGFGTALMIAEGCVMARQCHLNTCPVGITTQDKRLREKFPGKPEHIINYLKFVAQEVRQYLANMGYRSLDEIIGRTDLLRPIIPHDHYKAKKIKFDHVLIPYDPTKPSKSTQDSNPIPDSKKPFDLEILPEILPAIEKDQNFSGFYVLRNTYRSFGTRIAHEIVKRYGDKGLRNGKIELNLRGTAGQSFGAFCVHGMILSLTGQANDYVGKGMAGGMIIIKPPKEFKGESHKNVIAGNTILYGATGGQVFISGKVGERFAVRNSGAVAVVEGVGDHGCEYMTDGIVMVLGDIGVNFGAGMTGGVAYIYDPNGEVSKKINKSYVEVMPLEEEDIDQIEKLLTKHKAYTDSKIAEKILYNFKQEIDNFVKVVPIEVKKPSDETDEVEVKK

SEQ ID NO: 20188 - protein, 318 aa, Sulfurihydrogenibium azorense Az-Fu1
MDVQIIDLGKQTIEEEIRALNRLKECLDESFEKAVKLILEAQGKVIITGMGKSGLIGKKIAATMSSTGTPAFFLHPAEALHGDLGMVEKKDLIIAISNSGETPELLAIIPILKRWGNKIIAITNKRDSSLTKYADVSLYLNVDKEACPLNLAPTSSSTATLVLGDALAVALLRLRNFTPENFAMFHPGGSLGKKLMKVADIMRKDLPIVCEDTPLKEAVIVMSEKGLGSTLVLDKDNNLTGIITDGDLRRFINKGKSIDNSLSKDAMTKNPKTASPDWLVLQALELMERHNITVLPVVEDKKPVGIIHIHDILKSGVI

SEQ ID NO: 20189 - protein, 391 aa, Sulfurihydrogenibium azorense Az-Fu1
MELSNRIKKIKPSQTLAITAKANELKAKGIDIISFGAGEPDFDTPDFVKEAAIKALKEGKTKYTAAAGIPQLREAIAQKLKTRNNIDYSPSEVIVVPGAKMGLYEIFAILLNPGDEVIVPAPYWVSYTEQIALNDGESVIPQLSEENGFVLTADIVESSITPKTKALVLNTPSNPTGAVIPKKELEKIAEVCLKHSIMIISDECYEEFSYGEPHVSIASLSKEVREITFTVGAFSKSYSMTGWRLGWVAAPEKYIKAMTNIQSQTISNPTTFAQYGALEALKDNGQFPAMMRSEFMKRRDYIVEALNSIKGIKCTKPEGAFYAFPNVSYYIKGDIKNDIDLTTYLLEEGKVAVVPGSAFGKEGYIRLSYATSMENIKEGVERIKQALEKLG

SEQ ID NO: 20190 - protein, 644 aa, Sulfurihydrogenibium azorense Az-Fu1
MCGIVGLVCNENINSTLIRDMANTIKHRGPDDEGFIFLSEESIVLAGGDDTSDKVWNSNFLYSPKSHINSLEGKKFKVALGHRRLSILDLSPAGHQPMCDEAQKVWIVFNGEIYNYLELREELKQKGYTFITNTDTEVLLKSYIEWGFDCVSKFNGMWAFAILDLRKNILFLSRDRFGVKPLYYYKDDNYFAFASEIKALLRLPFIKKEVNYEAVFDYIALGLEEQGEESFFKGIRELKPSYNIVLNLNNFEFKLHKYYELLYYDKFEKYNPEKEKKYISEIRELIFEAIRLRLRSDASVGSCLSGGLDSSTIVCVMNEIIKNQHLSQVGDYIKCFTASYKDDKVDESNWAKIVVESTKSQWIRTFPTEKELIEDLEDLIYTQDIPFGSTSIYAQYRVMKAAYESGVKVLLDGQGGDELFTGYTGYFPTYYRELIKNFDFTDLINEIKNVNNSPIDIKSIIKMAIKSELGKFLTFPKIRDFLIKRISYPISLLNPEFYKEFSYRIKDRQEKIPNSLNQQLHQLITGFSLKRLLRYEDRNSMRFSIESRTPFADDINLIEYCFEIPSVYKIHNGFSKYVLRQAMDGVLPEQIRKRVDKVGFATPEEKWLRINKGFVEDIMFESHILKDIANIQKLKNDCISFNTQ

SEQ ID NO: 20191 - protein, 348 aa, Sulfurihydrogenibium azorense Az-Fu1
MFIDKAKIFVKAGDGGNGCVAFHREKFVPMGGPSGGDGGKGGDVILVADSHLQTLMDFKYKRHYKAEKGQHGQGGNKKGKDGEDLIIKVPVGTVVKDAQTGEILADLVEEGQSVIVAKGGRGGKGNAAFKSPTNQAPLTAEPGEKGEEKWIELELKLLADVGIIGFPNAGKSTLISVLSKAKPKIADYPFTTLTPVLGVLQLDVDDFLVLADIPGLIEGASEGHGLGHEFLRHIERTKFLIHLIDVSDFRERDPIDAFNIINKELENYSPDLLKKPQIVVANKIDALSDKSLIDKLEKYFAEKGYPFVAVSLITKEGVDKLINILREKKKEWISNLEKKDESTVLGNT

SEQ ID NO: 20192 - protein, 68 aa, Sulfurihydrogenibium azorense Az-Fu1
MKVTGTVKWFDSKKGFGFITRDDNGQDIFVHFSAIQGRGFKNLEEGQKVEFEIVQEEKGPRAANVVKL

SEQ ID NO: 20193 - protein, 514 aa, Sulfurihydrogenibium azorense Az-Fu1
MQQEDMQKRMLIFFAVVSFLFISFTVISQFFFPENKKESPQSSQKQEINNQNIPIQTSGNFDLILTNERVNLDTSKNIKVKTKFGYIEFTPFGGRITSVYVEKYNHDMISDFSKKNKIFIGELITSNPNLTRILNFSEYTVSQNNKEITFKLEKENVSIEKTYTIQDDGVISIAVKTKGIENTSVALLSGVSLNSEGSFGHEGAIIKTDKDLIRIDKELKQPQIIRDNILWAGEENKYFLQIFAPKNGTNTVNVIPVAKDTTAVLVNVSPDFEGFIYSGAKLYSILGQITDYYKDLWKVDLDLRSSIDFGFFGILGKPLFLLLHFFYTYIPNWGVAIIILTVLIRILFFPLNHKSLKAMRKMADLAPEIEKLKKKYAKDPQKLQEEIMKLYAEAGANPMSGCLPILVQIPVFIALYNVLMVTVELKNAPFILWIKDLSDKDPYYILPILMGLSMIAQQWITPSSDKNQKMIMYIMAGVFTFMFMNFPAGLVLYWLTNNILGLLQSFIVNKTMKK

SEQ ID NO: 20194 - protein, 399 aa, Sulfurihydrogenibium azorense Az-Fu1
MKKRVVLAYSGGLDTSVIVRWLTDRGFEVITYTADVGQGEELSEIEEKALKAGAVKAIIDDIKEEFARDYCMPLMRATALYEGKYTLLSSLSRPLIAKKLVEVAHREGAHYVAHGSTGKGNDQVRFEASVWALDPDIEVLAPVREWEFKSREEEIDYAMKHGIPVKATKEKPYSYDRNLWGVAIEAGPLEDPWTEPPEDAFEITVSPEKAPDTPEYIEIEFKEGTPIKLNGKEYDQLWKLIWDLNEIAGKHGVGRIDMVENRLVGIKTREVYESPAGLILISAYDDLESIVLDRFTYHYKKDHISHPYAKLVYEGLWFSKLRESLDAFNNEIAKIVNGKVRVKLYKGSFKIVGRQSPNSLYSEDLATYSPKDAFDHKAGGAFTKVWALPLKVFARANKR

SEQ ID NO: 20195 - protein, 218 aa, Sulfurihydrogenibium azorense Az-Fu1
MKFFIDTADIEEIRKANSLGFLDGVTTNPTLIAKTKRPFMEVVKEILSEVPDKPVSLEVASTDYQGMVREGEKLAELGKNVVIKIPMTVEGLKAVKYFESKGIKTNVTLVFSPAQALLAMKLGASYISPFVGRLDDISHTGMDLIRQIKTIKENYCFKSEIIVASVRNPIHVLESAIIGADIATIPYNVISQLAKHPLTDIGLERFLKDWESVPEKPF

SEQ ID NO: 20196 - protein, 991 aa, Sulfurihydrogenibium azorense Az-Fu1
MFSENLLDRKSRELLETAKSIASKNQDSMVDTDHLLMAFISKEDNPLVKIIEKRGIDTKSLKENITNYIQDLYSQINKAVSEYTDYIKNLYSQLSQVRTQALEIYRELKEIKAQKERLKRELSYESSFFFGGGSRLELERLSIYEKQLESNLNSLKSQLIQLTDPQTADRFLSGDLNLLSFIYKVIENSSLIKQIDDLGFSKDRFVEKIVENVVGSKTQKQYASKLIKVLENAEKIAFNSGSTVVSPSHIATALIESKDTIAGKVLNEILNFDKKEGGKEKMEGKNIQQEMAEEEKSALEKFTVDLTKAAKEGKLDPVIGREREIQQVIEILLRRTKNNPVLIGEAGVGKTAIVEGLAQKIVNKEVPEELQNKRILSLDLGALVAGTKYRGEFEERMKSLLDELKKDPNIILFIDELHTIVGAGKGEGASDAGQLLKPALARGEIRVIGATTLDEYRKYIEKDPALERRFQPVYVEEPDIDTTIEILKALRPRLEKHHNVKISDKAIEAAAKLTGRYIPARKFPDKAIDALDQACARKKLKLVYASPEVIELERKIKMLDEQIVQASLDGNYEKEAKLKIEKANLEKQLKDLKAKSSNEKAKLEELERQLQEVEKQIEFYSQKGDYEKEAEYKIKKAQIEKEIKALQQKLAESVVVTENDVAEVVAEWTGIPISKMKEEEMERLLHLEEEMHKRLIDQEHAVKLVAEAIRRARAGLSDPRKPLASFMFLGPTGVGKTELAKTLAELLFDDEDAMIRLDMSEFKEEHSVAKLIGAPPGYVGYEEGGKLTEAVRRRPYSVILLDEIEKAHPRVFDLFLQVLDDGRLTDSQGRTVNFRNTVIIMTSNIGSQYLTIIPVDAPEDVIEKEFEIAKQKVLEEVKHYFRPEFLNRIDEIIVFKPLFKKDIIQIIDLMINALNKRLHDRNIKVELTDKAKEVLIKLGYDPVYGARPMRRAIQKYIETPLSEKILRREIKEGDTVIIDAEGDNLTFSVKQ

SEQ ID NO: 20197 - protein, 265 aa, Sulfurihydrogenibium azorense Az-Fu1
MKPFLKWPGNKYRIVKHIKKVLPAGKRLVEPFVGSGSVFLNTDYKSYLLCDINPDLINLYQTVKTYKYEFIDYCKSFFSKENNTKDKYYQLRDLFNKTDDKVLKSALFVYLNRHCYNGLVRYNSKGEFNTPFGRYDKPYFPEKEMRFFIEKCERSEVEFKCQDFRETFKQVKKGDVVYCDPPYIPLSDTANFTSYSKEGFNMEDQRILGSLARYYSNKGIPVIISNHYNEDLIEIYNTLIIPLKVRRNISCKDRKKVDELIAVFK

SEQ ID NO: 20198 - protein, 451 aa, Sulfurihydrogenibium azorense Az-Fu1
MIWFIFVYLLFLIGIGVFSKKLIKSGRDYLLAGQSLPLSLSTFALFATWFGSETILGATDEVLKGGFVKVIEEPFGAALCLILAGFLIVKPIYRMGLVTFGDFFRVKYGEKVEILATLMLIISYFGWIAAQYVAFGLIFKTITNFSFEVSILIGFFVVLILTYLGGMWAIALTDFIQTIVIIFSILFIFFEVLLLAGGFVAFEKIPPSYYSLIPDFNYKDIVMYLAGLITISLGSIPGQELFQRYMSSKSEDVAFKSSILAGFMYLTVALIPLFTVLIIKFALEFETQNTLIDYISLHTNDYVKTVFFAGLMSAVLSTASAAILAPSALLSNNILPKIFKTFSESTLLTFSRFSVLIISVISLILAFSGESIYQLVATSSIITLVSLFSPFILGIYWSKSNKVGAAASIVIGFVSWFVVNFIVGLEYEAVLLGFVLNVLSMVFFSTIFKKI

SEQ ID NO: 20199 - protein, 429 aa, Sulfurihydrogenibium azorense Az-Fu1
MRRLAFILGTSIPTFVFAGEAQKIDSGNTAWIIVATALVMLMTPAGLALFYGGMTRSKNILNTIAMNFLAYCVASIIWIFWGYTLAFGTDISGIIGSLEHSFLMGISVNDVWSTGNIPTLLFVAFQMTFAAITVALISGAIIERVKFQFWLLFTVFWLTFVYSPIAHWVWGGGFLSKLGALDFAGGTVVHINAGIAGLVLALLVGKRKDYGKKAILPSSVVLTVLGAVLLWFGWFGFNAGSELAADGIAANAFLVTNTAAALGAISWMITEWIIYKKPTLLGAASGVVAGLVAITPAAGFVDLFGSIVIGVISGILGFIGVFWLKKKFGYDDSLDTFGVHALNGIWGAIATGIFANPSVNPAGKGLLYGNATQVLIQIEAVLATIVYTAILTGILYFIVSLITKGARVDDESETTGLDEAIHGERGFEL

SEQ ID NO: 20200 - protein, 616 aa, Sulfurihydrogenibium azorense Az-Fu1
MGKVIGIDLGTTNSVVSVVIGGEPVVIANQEGFRTTPSIVSWTKEGEILVGEPAKRRAVLDPENTIYESKRFIGRKYDEVLNEIKNVPYKVVADEKGDAAFDVPNAGKIVRPEEVGAYILKKLKEAAESYLGEKVTEAVITVPAYFNERQRQATKDAGKIAGLEVKRIINEPTAAALAYGLDKKSDIKILVYDFGGGTFDVSILEGGDGVIEVKASDGDTHLGGSDIDARIINWIVEEFKKEHGIDLRNDKTAFQRLKEAAEQAKKELSFKMETEINLPFITIDPNTNQPLHLQKKLTRSRLEEMIKDLVDRTMEIVKRTLEAAKLKPSDIDEVVLVGGSTRIPLVQQRIREFFGKEPNKSVNPDEVVAVGAAIQGGIIQGEVKDVLLIDVTPLSLGIETLGGVMTVLIPRNTPIPTKKCEIFTTAVDNQTTVEIAVYQGERSVARENKLLGSFKLTDIPPAPRGVPQIEVCFDIDADGILHVTATDKATGKSQSIKVTPSSGLTKEDIEKIIEEAKRHEEEDKKFKETVELRNQLDALVYSFEKTLNENKAKFTPEELAEAEGVISEAKKAIESNDKATIQSAMDKLQNVANKFASKLYGQGGQEGGDVINPEVH

SEQ ID NO: 20201 - protein, 460 aa, Sulfurihydrogenibium azorense Az-Fu1
MKDFFRKRYYDGIKDTKLKRSLGLWDLVFIGVGGIIGAGIFVITGQAAAAYAGPGIILSFVLSAIAIGITALVYAEFSSAFPISGSAYSYTYATLGEVIAWLVAWNILLEYGVAAAAVATGWSGYLRTFLENNFGFTLPVALSGAFDPSKGTVIDLFAFLGMAGVFALLTIGIKESARVNFFIVLLKLAVLLVFIFIGLKYVKLENITSNFLPYGWQGVWSAASLIVFAYLGFDAVSTLAEETKDPQKTLPKGLILSLSISTVLYITVSFVLVGILPYYSYEGKPDSLAYAMYQVNEKWVADFISLGAVITITSVMIVMGLGFTRVLYSLARDRLFFKTFADIHPKFNTPYKASILGGVFLSVLAGFLPLKILAEMVNIGTLFAYFMVGVAAIVIKNRPDIRPIFKVPYPNLLLPLNLIFLMFIMAGLPFDTWMRFFIWTIIGILIYFFYGYKNSILGKS

SEQ ID NO: 20202 - protein, 130 aa, Sulfurihydrogenibium azorense Az-Fu1
MGFPSDAKILTVDDMATMRKIIKSLLTQLGYTNVDEAENGKEALAKLKQQKYDLVLLDWNMPEMDGITLLQEIKKDPDLKNIPVIMVTAEAKKENVLQAIQTGANNYIVKPFTAETLKEKMDKVWAQLQG

SEQ ID NO: 20203 - protein, 134 aa, Sulfurihydrogenibium azorense Az-Fu1
MYRTLLKSKVHRIKITGADLHYEGSLTLDEAIMEAANLIPFEKIEVYNVNNGQRFSTYVIPGVRYSGECILNGAAARLGHYNDIIIIASYAAVNEKDLENFYVDLVYIDENSNTIKEHKRVKALNSKVLTSVDE

SEQ ID NO: 20204 - protein, 402 aa, Sulfurihydrogenibium azorense Az-Fu1
MRRIYVDHLATTPVCDEAIEAMMPYFKEKFGNPTSLHEMGIEAKKAINKAREQVAELLNVSNPDDIVFTSGAIEANNLAIKGFAKAPGRRGKHIVVSAIEHHSILHSCKTLEKEGFEITEVQPDEYGIIDPQKLADAVREDTILVSVGFANREIGTIQDMPALVAAVKEKNPRVVFHSDIAAAVGHMPVDVEGWGLDMASFTGHYFYAPKGVGGLYVKKGIRLKPLIEGGIQEGGRRAGTENVPGIVGMGAAAELAIKEMDDRVNRLRYLRDKLKKGIEERIPHIKFTGHPEKRLPNHLSLIVMYIEGEAMLLMLNIKKTYAASGSACVSYALKQSHVLAAIGVEKEASNGSIVFSLGRDNTEEDIDYIIEEYPKVIARLREISPFNPENWEDFTKKASKFK

SEQ ID NO: 20205 - protein, 411 aa, Sulfurihydrogenibium azorense Az-Fu1
MPLIVQKYGGTSVGNIERIKNVARKIKKAVDEGNQVVVVSSAMTGETDRLIGLTRELSNRPNPREQDMVVATGEQVAIGLVAIALQELGVPAISLTGWQVPIITDNVHTKARIKKIDTHRIRKHLDEGKVVIVAGFQGVSEDGDITTLGRGGSDTSAVALAAALKADVCEIYTDVPGVFTADPRIVENARKIPVISYEEMMEMASLGSKVMQIRSVEFGAKYGVKIHVRSSFNDEEGTWIMEENEEMEKVVVRGISHELKESRITVVRVPDKPGVAAKLFKALGDKNIVVDMIVQNVSHKGFTDISFTVNKTDADYAEEIAREVAKEVGAEDVERNDKIAKISVVGLGMKTHSGVAGKMFEVLYKEGINIYAISTSEIKISCLIDEKYAELAVRALHEAFIENMEGDIQYE

SEQ ID NO: 20206 - protein, 300 aa, Sulfurihydrogenibium azorense Az-Fu1
MSFKAGFVALVGRPNVGKSTLLNNILGTKLSIVSPKPQTTRMRILGVKHLPDAQIIFLDAPGVQKGGDLLSKSVLESAVASMEDADVIVMIIEADKGWTKEDKEIVENYIKKYNKPVILAINKIDKIQRDLVLPLIEESTKIYDFKEYVPISAIKNINIDELLNTIKKYLPESPPLYPEDMITDLPLKLWIAEIIREKVFFNTKQEVPYSVAVEVESIKEGEKNKNLLIIDAVIYVERDNHKGIIIGKKGQMLKKIGSQAREELEFLLGKKVHLNLYVKVKENWKEDLPLLRSLGYNQIS

SEQ ID NO: 20207 - protein, 632 aa, Sulfurihydrogenibium azorense Az-Fu1
MQLTRSLLIWFLIGAMMILAFNMFGTKQISDSKVSFTDFMTMVNEKKVVEATVRGEELTAITEDGKKVETVIPQGYSKLYDILSENGVQVKVVSTENSSWLMTLLISWLPILLFIGLWIFMMRQMSGGPNRAFSFAKSKGKLYLEERPNVKLDDVAGMDEVKEEVKEIIEYLKDPSRYQKLGGRAPKGILLYGDPGVGKTLLAKAIAGEANVPFISISGSDFVEMFVGVGAARVRDLFETAKKHAPCLIFIDEIDAVGRARTGVGFGGGHDEREQTLNQLLVELDGFDTNEGIIVIAATNRPDILDPALLRPGRFDRQISVPKPDVKGRYEILKVHVKKKNIPLAEDVDLMTIAKGTPGFSGADLANLVNEAALLAARRKKEKVGMQELEDALDRIMMGLERKGMAITPKEKEKIAYHEVGHALVGVMLEEADPLHKVSIIPRGMALGVTVNLPEEDRHLYSKKDLMARILQLFGGRAAEEVFYGKDGITTGAENDLMRATELAYRIVAAWGMSDEIGPIHVPTNRSGSIFMGGQGIEISEETARKIDEEVNKILRESYQKAKNIIETYKDAVIAVVQLLLDKETITCEEMFAILKEYGVPVLNRCRKFENVNVITDSSAPDVPGAELPTVA

SEQ ID NO: 20208 - protein, 529 aa, Sulfurihydrogenibium azorense Az-Fu1
MYKVLVTDDISPKGLEILNNDEMIDLDYQPEIKFNELLEIVKDYDAIITRSRTPVTKELLERAEKLKVVGRAGVGVDNVDLEEASRRGILVINTPGANTIGAAEITMAHLYAVLRKLHLAHKSMLEGQWDRKRFMGEELDGKVVGIIGLGNVGSQVAIRCKAAGAKVIAYDPYIPREKGERLGVELIDNLHDLIKMSDIITLHCPLTEETRNMIGKKEFDLMKKGVYFINCARGGIVDEDALYEAVKEGKIAGLGLDVFSKEPPDDRIRRLFEFPNISLSPHIGANTYESQDNVAIKIAQYVIAALKGQFVEVAVNAPFTITEGFENIKAYLELAEKLGSFLTQYAGGHFTEINIEVRGTIRDHIEPIVAFFLKGYLSPVLDTPVNIINAPFIAKERGINIIKSTREAGLNFKEFIKITAKAQDKEVVVGGTAFYDKLPRIMLVDNYWIDIEPSGVILMFENKDVPGVIGKLGTILARHNINIAGFRLGRLEKGKIALGALQLDDKLNEAVLEEIHQIPEIIKAKQVIL

SEQ ID NO: 20209 - protein, 376 aa, Sulfurihydrogenibium azorense Az-Fu1
MIYFDNAATSPVLPEILDSLKTLYEEYYANPSSIHKEGQKARNLIEKSRYGISQYIGCNADEIIFTSCATESNNLAIIGLAESYPEKDHIITTPIEHKSVLMPLKHLSSKGYKVDFVKVDKNGIVDLDHLKSLINNKTLLVCVIHGNNETGVLQDLENIGKVCKEKDVFFFTDVVQSFCKEDIPLQYIDMFSISGHKINAPKSIGMLYKKEGIKLTPIIFGGGQERGLRSGTESPQLIHSLFIAIEYWNKNKDRLVNHLKSIKDLFEEKLTQSVEEIEIVSKDIKRLPNISNIIFPKIDAQSLIMALDTEGVAVSSGSACSSGTPTPSHVLKAYGYTDKQALSSIRFSFGIFNTVQEVEVTVEKITNIYRDLRSFF

SEQ ID NO: 20210 - protein, 182 aa, Sulfurihydrogenibium azorense Az-Fu1
MKAVFLDRDGVINVDKGYVHKIEDFEFYPNVFEALKKLQDNGFKLFIVTNQSGIAVGYYTEEDFLKLTDYMLKEFEKHGIKIEKVYYCPHHENGTVEKYSIKCDCRKPESGMIRQAIKEFSVDPSKSFLIGDKENDILAAHKEGIKAALVKTGQGLKYIENTTADFIGEDILDVVENFILKH

SEQ ID NO: 20211 - protein, 488 aa, Persephonella marina EX-H1
MEKGSNLIVVSAVLPIHIKKEDGRYTVHISPGGLVTALKQVLHKRKALWIGWAGSEKITPKMKNLIFEEGKKEGFLLYPISLTEREIDHFFNGFSNGIIWPMFHTFQYFCRFEPEYWKAYQEVNRKFARYIKSISTEKDLVWVHDYHFFLLPQYIENLGLKRKTAFFLHIPFPNPELFFKIPWRVEILKGMLRYDLIGFHTFIDRKNFLDCIDELVEGVNILSTEPVTEILYEGKKIKIGVFPISVDFNYYSSLSEKSEKSRFPFKDLKVILGIDRLDYTKGLIQKIRSYKRFLEKYPEFHKKVVLVQAVAPNIKKLPEYDQLKVELEHLISETNGRFGTPDWTPIYYYPRRMPFEDLINYYRFSDICWVNSIKDGMNLVAKEYIACQIENKGALMLSEFTGAAAELRDHACLVNPYDIEGCADALYRVLTKDSSKKELKMQRMREHIKHYDISWWGNTMLETAFGKKIIDFPELEEDIPLHELSKSF

SEQ ID NO: 20212 - protein, 581 aa, Persephonella marina EX-H1
MPKKRGADIVIDVLLEEGVDTVFGLPGGAIMEVYDALFDAPLRNILARHEQAAAHMADGYARATGKVGVVLATSGPGATNLVTGIATAYMDSVPLVAITGQVPTSYIGTDAFQEADVVGITRPITKHNFLVTDIKDLALILREAFYLARTGRPGPVLVDIPKDITQQEYDYKMPTEKDVLDALPGYKPHYEGNPFQIKKAAELIRKAKRPVLYVGGGTVISGASEELRELAELTRIPVTTTNMAKGAFDETHPLALHMLGMHGTYYANMAVYHSDLLIAVGARFDDRVTGKIQEFAPEAKIIHIDIDPASISKNITVDVPIVGDVKVVLGKLLKELKKKPIEWVKARESWLKQIEKWKEKHPLTYDRTSKIIKPQYVIEEIYKITDGEALITAGVGQHQMWAAMFYKYRYPRQFLNSGGLGTMGYGFPAAVGAKIGNPDKTVFAIEGDGSFVMNMQDVITAVQYRIPVKIAIINNEFLGMVRQWQQLFYDSRYSSVCLAVHPDFVKLAESMGAVGLRATKPEEVRPVLEKAMKINDRPVIMDFVVDREENVLPMVPAGKSYREMIVSPKQKGEAETMYLVG

SEQ ID NO: 20213 - protein, 391 aa, Persephonella marina EX-H1
MEFSQRVLRVQPSQTLVITAKAAELRKKGIDIIGFGAGEPDFDTPDFVKEAAIKALKEGKTRYTPAAGIPELREGIAKRLKEKNGIEYSPSEVIVTPGAKMGLYEVFSVILNPGDQVIVPAPYWVSYTEQIKLCDGEPVILELSEENGFVLTADKLKEAITERTKALVLNTPSNPTGAVIPRSELERIAQVCLENNILIISDECYEEFCYDEEHVSIASLSKEVRDITFTVNAFSKSYSMTGWRLGWVAAPEEYIKKITVVQSQTISNPTSFAMYGALAALEDGGKFPAMMKEEFRKRRDFVIEQFLSIDGITCPVPKGAFYAFPNVKAYIVGDIKDDIELTAYLLEEAKVAVVPGSAFGKEGYIRLSYATSMDNLKEGMRRIKEALSKLR

SEQ ID NO: 20214 - protein, 321 aa, Persephonella marina EX-H1
MKDKSPSQIGKKVLEEERNALQKTLSALDNNFDKAVELILNTKGKVVVTGMGKSGLVGKKIAATLASTGTPSFFLHPAEAIHGDLGMISKEDIVLAISNSGETPELLAIIPTIKRWGNKVISITNNKNSTLAKESDIHLYLNIEREACPLNLAPTSSSTATLALGDALAVALLEMRGFTAEDFARFHPGGSLGRKLMRVSEIMHRGEELPVVHPETELKETVIVMSEKGFGAALIINKDGDLTGIITDGDLRRFIKKGGSIDRSLTEEAMTVNPKYINKDILVVEALEIMERYNITVLPVVEDKKPVGLVHLHDILKSGVI

SEQ ID NO: 20215 - protein, 537 aa, Persephonella marina EX-H1
MNNNDQEMQKRMFIFFIAVAVLLIAYSIISSYLYPTEPSPEKNQKTQEVVEVKEEIKEQRKVPEPEERITYKQTGDYDLLLDKRRINADNLKDTVRINTDFGYIEISKIGARIVSIYVEKFKTDMISDFSKTNRLFPTEIITTSPELTALINFSPYSFRQEGDRLIFELKQGDISVRKIFEVNKDSTLSLKIDTEGLEKYGLSVINGISLKAESRAFGHSGAIIKTDKELIKLDADIDKKQTIRGHILWAGEENKYFLQMLAVKGGFSATHVVPIAEEKTVVFSEIPTSVEGFFFGGPKLYSLLGDITEKYKKEWNIDLSLRESIDFGFFGILGKPLFLIMHFIYDYIHNWGLTIIILTVLLRIVLFPLNHKSLKAMKKMADLAPEIKKLQKKYQKDPQKLQEEMMKLYAEHGTNPMSGCLPIVAQIPIFIALYNVLMVTVELKMVPFLWVQDLADKDPYYILPILMGVSMIAQQWITPSSDKNQKIIMYIMAFVFTFLFMNFPAGLVLYWLTNNILGIGQSFIVNKQMGLYKPKNK

SEQ ID NO: 20216 - protein, 376 aa, Persephonella marina EX-H1
MIYFDNAATTKVFPEVLDKIKIWSQDFYANPNSIHSDGQRSRMAVEESRRYIASFLGVPEDEIIFTSCATESNNTIIRGLAEGYPEKDEILISPIEHKSVLNPVRYLSKRGYKIRFLKVDSQGIVDLDDLNKKITPKTLFVSIIHVNNETGVVQDLESIGKVCKERDVLFFSDTVQSFCKIDINSDSVDFFSVSGHKINAPKGIGFFRRKKDIQLTPLLFGGGQEFGLRSGTENVVYIKALSETVRIWNENRAYFIKKLKDLSGKFINGLKTIIPDVEIVSENAERSPNIITVIFPKIDAQTFIMALNTEGIAVSSGSACSSGTPSPSHVLLSYGYSEEKALRAVRFSFGVDNTEEEVDILLEKIKDIFGKLSVFY

SEQ ID NO: 20217 - protein, 529 aa, Persephonella marina EX-H1
MFKVLVTDHISSVGLDILNNDEEIELDYQPEIQWSELLEIISDYDAIITRSRTPVTEELLERAKRLKVVGRAGVGVDNVDLEAASRRGILVVNTPGANTVGAAELTIAHMYAVLRKLHLAHESMLQGEWNRKKFMGEELDGKVVGIIGLGNVGSQVAIRCKAAGSKVIAYDPYIPREKGDRLGVELVDTLEELIRRSDIVTLHCPLTEETRGMIGRKEFEMMKDGVYFINCARGGIVDEDAMYDFMKKGKFAGIGLDVYGKEPPDDRIRRIFEFPNISLSPHIGANTYESQDKVAIKIAKQVIAALKGQFVEAAVNAPFTVTEGFENIKAYLLLAERLGSFLTQYAGGNFRELHVEVRGSIAEHVKPIVAYVLKGFLSPILDRPVNIINAPFLAKERGIEVVESTREEGLNFKEFIKITAKDNGKEHTVGGTAFYGKFPKIMLIDRYWIDIDPEGVILVFENKDVPGVIAKLGEILARHNINIAGFRLGRLEKGKIALGALQLDERINEAILEEIQNIPEIIKAKEIIL

SEQ ID NO: 20218 - protein, 627 aa, Persephonella marina EX-H1
MQFSKSLLIWFLIGALMIFAFNMFSAKPSFEHKVSFTEFVEMVNEGKIKEATVKGEEIVAISENGKKIETVIPEGYDKIYDILSENNVQITVVPQEKSGWLATLLISWLPILLFIGLWIFMMRQMSGGSNRAFSFAKSKAKVYLEEKPNVKLDDVAGMDEVKEEVKELIDYLKEPQRFQKLGGRAPKGILLYGDPGVGKTLLAKAIAGEANVPFISISGSDFVEMFVGVGAARVRDLFETAKKHAPCLVFIDEIDAVGRARSGVGFGGGHDEREQTLNQLLVELDGFDSSEGIIVIAATNRPDILDPALLRPGRFDRQISVPKPDVKGRYEILKVHVKKKNIPLGDDVDLMVIARGTPGFSGADLANVVNEAALLAARRRKEKVGMREFEDAMDRIMMGLERKGMAITPAEKEKIAYHEVGHAIVGMMFKESDPLHKVSIIPRGMALGVTVNLPEEDRHLYSKKDLMARLHQLFGGRAAEEVFYGKDGITTGAENDLMRATELAYRIVASWGMTDELGPIHVSTSRNNPFTPSQGPEISEETARKIDEQVSRLLRESYERAKQIIENYKDAVTAVVELLIDKETITCEEMLSILEKYGVPVVNRCRKSVVEVISDSSAPEVPAGQVD

SEQ ID NO: 20219 - protein, 340 aa, Persephonella marina EX-H1
MRFIDKAKIHVKAGDGGNGCVAFRREKYVRMGGPSGGNGGKGGDVIIMADKSLKTLMDFRYKKHFKAENGQHGSGNNRHGRNGKDLIIKVPVGTVVKDAETGEILADLIYDGQKVVVAKGGRGGRGNAAFKTSTNQAPDYAEEGQPGEERWIELELKLIADIGIIGFPNAGKSTLISVLSKAKPKIADYPFTTLTPVLGVLQLDYGKSVVIADIPGLIEGASKGAGLGHEFLRHIERTKALIHMIDISDQRERDPIEAFEIINKELEKYSPELVKKPQIVVGNKIDMLSDRSLIEKLKKEFSKRGYPFVAVSLVTKEGLDQLIKLIAEVYEKISEKELIK

SEQ ID NO: 20220 - protein, 338 aa, Persephonella marina EX-H1
MKIYFFGIEDWEKLHIERKLKEAGIEGDIKFTKEPLSIDNVDLYKDADIISVFIYSKVTKEVIDRMENLRLIVTRSAGYDHIDVSYAKEKGIYVAYIPGYGNNTVAEYTFALILALSRKFKPMIDRTARGVFSREGLMGIDLLGKTIGIIGTGRIGCYVARLAHGFGMKILAYDRTKKKEIIEKYGVEYVGLEELLMRSDIVTIHLPYTKSTHYLINRFNIKLMKLNAMLINTSRGAVVEIDAVVEALKEGRLAGGVALDTFEAEEVLIEEEFLRRDDIPAIKLKKAMEAYYVLHEDNVIVSPHLAYYTKDASERILDIAVDEIKHFLTEGKPVNIAQ

SEQ ID NO: 20221 - protein, 762 aa, Persephonella marina EX-H1
MIKNGIYRDYLKDIERFNQLYDQYKKGEAFESDFKAFRLNNGIYGQRQQEFHMVRIKIPAGVLTPDQIREIADIGDQFSNGVAHVTTRQDIQYHWIKLDDVPVIIQRINEAGLTTKDACGNTLRNITASYLSGVCPYEPFEVERIALKITELLIGRYEDLPRKFKIAFACCRKHSFLIPFNDLGFIPVVKDGKAGFEVYIGGGLGDRPKYAHKYTDFLPIEDLTIIISAVMDLFDRYGDRKNKRHNRLKFLIEKLGFERFLELLQDSIERARSVEESFSCDITINGTKTVERKLPYSEEPQFNFWLESNILPQRQEGLYTALVKLSLGNITTGKLRSLADIAEEYSLTVKATHDQNVALLNIPEEDLESVYTQLKLSALDAVGASSYLDITSCPGSETCSLGITAARELSRAIYDILPKDRETFEKIKDITIKVSGCPNSCAHHHVASIGFHGIAMKIGETLIPAYVLHLGGSGDIDGAKIGHTVLKIPAKNVPDVVKHLIDLYLNYGEGRPFERFVEEYGIDRIKEELSVYQELKEGIEYNKDWGSDKEFSLEDLGTGECAGIIADKVETALKEGERLIKQAESHISKGFKDDAYPHIEKAVQIIASGLLIPFGVKAEGKDAIDRFIEHIIGRKLIDERYISLLTGEIKDIDKLLEESKKFYQDAKRTYLKLRRDTEKKKEEKKEETARKEFLDLRGVECPFNYVKAKMKLKEMDTGSILVLTIDGEESIRSVPQSIRDDGHEIIDIQEENGYYTVVVRKR

SEQ ID NO: 20222 - protein, 1467 aa, Persephonella marina EX-H1
MLNILERDSCGVGFIVNIKGIKSHKLVSDALESLKNLDHRGAVSADGKTGDGAGILTHIPYRFFEKELKKEGINIPDSKDFAVGVFFIPQGKEEIKKEIQEIIDEKFRFLGWRKVPIVEEELGVIAKSNMPEIWHGFISKEGIQSENFERDLFILRKKLEKLSQREGYEDFYIPSLSNRIIVYKGMVTAPRLKYFYPDLQDESYESAVAIFHQRFSTNTFPQWKLAQPFRMLAHNGEINTISANRNWINAKAEDIRELWGELAEEILPVVRYDDSDSASLDNALEFLVMSGKDPFVAINALIPRAWENDDRLTPKERAFYEYFSCIFEAWDGPAAIAFTDGNVVIGKLDRNGLRPARYVITEDTVIMASEVGTVDIPEEKILKKGRLGPGDKIAVDITEGKIYFSKDIIEKAAEGKPYKEWVEENLKEFIPVKEIPEVEKKDVTRELIVFGYDLDQINMLIKPMAEKGVDPVYSMGNDTPLSVLSKRPKLLPSYFKQRFAQVTNPPIDPIREKKVMSLNTYVGKKENFLKETPEHAKQLLFPSPLIFDNEMEELINLYGDKAQIIPAIFDPYDDALEPALEDICKRVEEAVDNGKELIVVTDRGVSIEGAPIPIGLAVAAINSYMGRKGKRSRFSLIADTGEARDTHSIAFLIGYGATLVNPYMVVQIIRNLVEEDKKFNLSFEEAIKNYRKAVNEGLLKIMSKMGIATIKSYRGSGLFEALGIGKEVIDKYFPGTPSQIGGIGVKQIAQETLIRFNKAFFEEKVTLPQGGEFRHRRDGEFHSWNPNAVRDLHRAVRGESWEEYKKFTEDAWKEKPVTIRDLFEIQSDRPPIPVDEVEPAEEIVKRFVGAAMSIGALSKEAHETIAEAMNRVGAKSNSGEGGEDPARYGTIKNSKIKQVASGRFGVTAEYLNSAEEIEIKIAQGAKPGEGGQLPGKKVNAYIAFLRRARPGTTLISPPPHHDIYSIEDLAQLIYDLKMINPRAKVIVKLVAETGIGTIASGVAKAFADIIHISGHDGGTGASPLVSIKNAGTIWELGLSEVQRVLIENDLRDRVRLRVDGQIKTGRDIIIGALLGAEEFGLGTSLMVAEGCVMARQCHLNTCPVGVATQDERLREKFPGQPEHVIRYLMFLAHDVRQWLADMGYRHLDEIIGRVDLIKPKIPSDHYKAKFVDLGYILKDPDPTGKKPRRAMKDRNDPPSKPFDEEILKDALPYIEKQENFAGFYVIKNVYRTVGTRIAHEITKRYGDKGLRLAKIELNLVGTAGQSFGAFCVPGLNLILIGDANDYVGKGMTGGLIVLKPPKEFRGNPHENVIMGNTCLYGATGGQLFASGIAGERFAVRNSGATAVVEGVGDHGCEYMTNGTVVILGKTGVNFGAGMTGGVAYVYDPDGEMERNINSSYVFIDELDEEDVEEIKRLITKHKAYTESKIATKILDNFDEEINNFVKISPVEIKKPAPETDEAKIEKK

SEQ ID NO: 20223 - protein, 305 aa, Persephonella marina EX-H1
MTEEKEFRAGFVALIGRPNVGKSTIMNNILGTKLSIVSPKPQTTRMRILGVKHNKDAQIIFLDTPGIQKGKDLLTKTVVESAVSSMEEADVLVMIIEADKGWTKEDEQLLHNYIEKLNKPTILVINKIDKMKDKRLLLPLIEESAKKYNFVEIIPVSAIKGQNLDDFVQTLKKYLPPSPPLFPEDQITDLPIKFYIAEIIREKVFQNTKKEIPYSAAVEVESIEEGKVKKDLLIIRANIYVEKENHKAIIIGKKGQMLKKIGKEAREELEHLLGKKIHLELWVKVKPRWKEDIRLLKVLGYQYIS

SEQ ID NO: 20224 - protein, 186 aa, Persephonella marina EX-H1
MKNKAVFLDRDGVINEDYGFVHRIEDFRIYPEVFPALKKLQDAGFKLLIVTNQSGIAVGYYTEEDFLKLTEYMLDIFSKNGIKIDKVYYCPHHPDGVVPELRMVCDCRKPESGMIKQGIEEFSIDPSRSFLIGDKENDIKAAHKEGIKAALVKTGQGLKYIDNTEADFVGENILDVVENFILKEGY

SEQ ID NO: 20225 - protein, 622 aa, Persephonella marina EX-H1
MGKVIGIDLGTTNSVVSVIQGGEPVVIANQEGFRTTPSIVSWTKEGEILVGDPAKRRAVLDPENTIYESKRFIGRKYDEVQEEIKHVPYKVVSDDKGDAAFDVPNAGKIVRPEEVGAQVLKKLKEAAENYLGEKVTEAVITVPAYFNERQRQATKDAGKIAGLEVKRIINEPTAAALAYGLDKKSDVKILVYDFGGGTFDVSILEGGDGVIEVKVSDGDTHLGGSDIDARIINWLLEEFKKDHGIDLKQDKTAFQRLKEAAEQAKKELSFKMETEINLPFITIDPNTNQPLHLEKKLTRARLEEMIKDLVDRTMDIVKRALEEAKLTPADIDDVVLVGGSTRIPLVQQKIKEFFGKEPHKGVNPDEVVAIGAAIQGGVLAGEVKDVLLIDVTPLSLGIETLGGVMTVLIPRNTPIPTKKCEIFTTAADNQTQVEIHVLQGERKMAKENKSLGKFFLTDIPPAPRGVPQIEVCFDIDADGILHVTATDKATGKSQSITVQQSSGLTEDEINRIIEEAKKHEEEDKKFQETVELRNQLDALVYSLEKTINENKGKLSDEDVKEAESVIKEGKDAIASNDRGKIQSAIDKVTSVANKIAQKLYQSGAQQSEGKKGDDDVIEPEVN

SEQ ID NO: 20226 - protein, 995 aa, Persephonella marina EX-H1
MFSENLLDKKSRELIDLSKSIAQKQGDKLVDTDHLLLALISKKDSPLIKILEKRGIDTEDLVNKIDSYLKDLYSQINRSVTEYINYIKDLQRQLTKVRNDLINIQEELKRVSAEKRELENELRYEESSFWGGFGSSVRIEYERLKRYEDQLRSQIDQIKRSLLQVMDEKTAEAFISGNITLSAVLYRVIENSDLVKQIDDLGFSPDRVVVKISQEALGTETGKIYSNKFIKVLETAEKKALSSGETQVKPYHIASALIEDETTIAGKILKQILSGGKEKMNGENIQKEMAEEEKSPLEKFTVDLTALAREGKLDPVIGREKEIQQVIEVLLRRTKNNPVLVGEAGVGKTAIVEGLAQKIVNKEVPEELYDKKILALDMGALLAGTKYRGEFEERLKGIIDEIKNDGNVILFIDELHTIVGAGAAEGATDAGNLLKPSLARGEIRVIGATTIDEYRKHIEKDPALERRFQPVYVEEPDVETTIEILNALKPRLEKHHGVKIDPSAIEAAAKLTHRYVTDRKLPDKAIDALDQACARKKLKLVYAPPEVIEIERKIKMLDEQIVQASLEGDYEKEAQLKIEKAKLEKELKEVMSKSDSEHLKLDQLKKQLEELERRIIETAEKGDYEKETELKIEKAKLEKQIKELELKIAEKTVVSEDDVAEVISDWTGIPISRLKEEEMQRLLRLEEELHKRVVDQEHVIKTVAEAIRRARAGLSDPRKPLASFMFLGPTGVGKTETAKALAEVLFGDEDALIRLDMSEFKEEHSVAKLIGAPPGYVGYEEGGKLTEAVRRKPYSVILLDEIEKAHPRVFDVFLQVLDDGRLTDSKGRTVNFRNTIIIMTSNIGSQYLTLIPFDAPDDVVEKEFESAKQKVLDEVKNYFRPEFLNRLDDILVFKPLLKNELLQIVDMMLKLLNARLRDRDIHLEATDKARELISKLGYDPVYGARPLRRAIQKYVETPLSEKILSGEVKPGDTVVLDEENGQLVFRVKQEAEARS

SEQ ID NO: 20227 - protein, 638 aa, Persephonella marina EX-H1
MERLIKISEEKNKRLNKIEQLKERYSAEEAFERIKIYAQKGFSSIPEHDLNFFLKNFGIFYRPSTPERFMIRVRVPGGRLKKEQAIEIGRIAREFGRDYIDITTRMQVELRYIRIEDIPVILERLESVGITTYQTGVDNFRNIVQDPLDGLSFDNVITTWDILQKIQSIFLKNPEWLCKLPRKFNISINGSFSNRCNAFGHDLCFVLAEKNGIFGFNVYLGGKVGEVAKPADLFLTGDLVPTFFEGVGKIYRKYGFRDSRNRNRIKYLIDAVGMKEFINAVENEIGIEFQKSGRTLTELDGGDHPEKIQLKDGSFAVHVVVPAGIFSGSDLLEAVRIIEENGNGEIRFTVEQNFYITGIKDPESIKDYPLFKKYRNRSTAYFTNLTACAGTEHCPFGIIPNKPDAIKLADYLSEKYPLDSSEGKIRMYWSACQKGCGIHGMGDLGFVGVKFKKDGKVVTGVDIYYGGTVIGESTEGKLLLRSIPLDQISSYIEQIVKIYIELKKEKESFEKFYKRVLSRISKEALRFIIIFNNLIKNDYPQLSLTVNSSVLNRSSEEEEIFTLGFQLYRRATGKNPYSRNNILEIYDQPEPERPSKLNPYIPKKLESVILRMITKDNKKRYRVFTEIEEDLKEVFYGK

SEQ ID NO: 20228 - protein, 403 aa, Persephonella marina EX-H1
MSEVMLSKENLSFNDFQISKETLNSIRKMGFKKPTEVQEKTIPLILEGKDIIAQAQTGTGKTAAFGIPIVETVNTKSRKIQALVLVPTRELAIQVTKEIKDIGREKRIFALAVYGGKSIRHQIDFLKKGKDVVIVGTPGRIKDLIERKVLNLNDVKIFVLDEADRMLDMGFIEDIEFIFEQTPPVKQTLLFSATMPKAIMRLAERFLNDDYEIVKIKPEEVTVDRIKQKAYRVDTGKEFETLTKILNENEGKKSIVFTETKRGADELSKKLRREGFNADAIHGDYSQAKRERVLRDFRRNRIDILVATDVAARGLDIKGVDVVYNYSLPRDVESYIHRIGRTGRAGKDGLAISIISTLEDRLFEIVKKKTRSDIQLINLSDKPIEKLERRDFTSNRRRRFLRR

SEQ ID NO: 20229 - protein, 218 aa, Persephonella marina EX-H1
MKFFIDTADIEEIRAANELKILDGVTTNPTLIAKTGKPFMDVVKEILAEVPDKPVSLEVASTDYEGMIREGEMLAQLGKNVVIKIPMTIDGLKAVKYFEYNGIKTNVTLIFSPAQALLAMKAGASYISPFVGRLDDISHTGMELISQIKTIIDNYGFSSQIIVASIRNPMHVLEAALIGAHISTIPYKVIAQLVKHPLTDLGIERFLKDWESVPEKPF

SEQ ID NO: 20230 - protein, 371 aa, Persephonella marina EX-H1
MERTEKIRPFIVMDIVRKASKIKDAVHFEIGEPDLQPSPLVWELAEKAVKDRVNYYTESLGLPLLREKISSFYYERYGVDIAPERIALTVGTSGAFLVAYSMLLNRGDKIALPDPSYPCYKNFAYLLDIQPVFIPVGRESSYQLTAEHLREYSDIKAVHISSPSNPVGNIYKKENLKELVEYCDEKGIYFISDEIYHGLVYEGKEHTAVEFSDNAIVINGFSKYFCMPGFRLGWIILPEKLVRKAEIIIQNVFISPPTISQYAALGAFDHKHLEKNKEIFRKRRDFLFRELKEIFTIDVEPEGAFYIWANIEKYSDNSFEFAKELLEKIHVAVTPGVDFGSYRTDRYIRFAYTRDIQHMEEGVRRLKDYLL

SEQ ID NO: 20231 - protein, 68 aa, Persephonella marina EX-H1
MRLTGTVKWFNSKKGYGFITRDDGQGDVFVHFSAIAENGFKTLEEGQKVEFDVVQEDKGQKAQNVVKI

SEQ ID NO: 20232 - protein, 411 aa, Persephonella marina EX-H1
MLKKRGYVYADHLATTPVADEVLEAMLPYYKDKFGNPTSLHQFGVDAKKAINRAREQIAQLLNISRPEDIVYTSGAIEANNLAIKGYAKAPGITRRGKHIVVSAIEHHSILHSCKSLEKEGFEITYVQPDQYGIIHPDKLAEAVREDTILVSVGYANREIGTLQDMPALVKAVKEKNPRTVFHSDIAAAVGHTPVDLEGWGVDMASFTGHYFYAPKGVGGLYVKKGVRLKPLIEGGIQEGGRRAGTEPVPEIVGMGAAAELAIKEMDDRVNRLKKLRDKLKKGIEEKIDYIQFTGHPEKRLPNHLSLIVMYIEGEAMLLMLNYKKIYTASGSACVSFALKQSHVLAAIGIDKEASNGSIVFSLGRENSEEDIDYIIEEYPKVIQRLREISPFGPENWDQFAKKADKYKHVR

SEQ ID NO: 20233 - protein, 290 aa, Persephonella marina EX-H1
MSKKIGWIGLGHMGLPMATNLFNAGYDIHVWNRTLDKAKESGLPYKRDLNELVKEKDIIITMLFGSESVNDLYTRILKSGVDLKGKLFIDMTTVHPETARKVAEDLIKKGADFLEAPVLGSVIPAKKGILTIVVSGDQDKFDQNRDIFEVLGKEIFYMGDYGIASTMKLINNTVLGSFMAVLSEAFAFAKKVGIDPELALSVLENGAGRSLVLEAKKEKLLKEDYSTHFSVGLIHKDLTYAIDIAHKNRYPLFLTSVTRELFNSAKAYGLEDEDFCSVLEIFKKLSNYTD

SEQ ID NO: 20234 - protein, 311 aa, Persephonella marina EX-H1
MSKHIKLITGNANPDFAEKIADYLHVPLVDTLVTRFSDGEIRVQIKENVRGADVFVIQPLTQPANDHIMELLLILDALKRSSTHRITAVIPYFAYARQDRKDRPRVPISAKLLADIIEKAGAQRVLTVDLHSAQIQGFFDCPVDNLYALPVILDYLRNKNLENMVIVSPDAGGVERARMLANRLGASLAIIYKKRPAPNVVETLDVIGDIEGKNAIIIDDIIDTAGTIVSAANMLKEKGAKSVIAACTHPVFSGPAVDRLKNSEIEEVIVTDTIPTTGKEFDKLTVLSVAELVGEAIRRINIESSVSSLFV

SEQ ID NO: 20235 - protein, 227 aa, Persephonella marina EX-H1
MDKDAFLRKVRLFSGLKDEEIKEISKYFHFKEFHKNEYVFFEGDEEPGIYIVIDGIIKLTKETAEGKTVILRLVTPGEVFGWLVLGESKPTSTYTAQALIDSKVLYISNADFLRLMTEYPALAVRITCEASKMVLEAYDRLKSLAAEKVEGRIASLLLELSKKIGEDQGDKIVIKAPITRQDLAEMTGTTVETAIRIMSKWKKEGLINTERGKIEILDPEYLETLIS

SEQ ID NO: 20236 - protein, 140 aa, Persephonella marina EX-H1
MRRTILKSKIHRITITGADLHYEGSLTLDEAIMEAANLVPFEKIEIYNVNNGHRFSTYVIPGQRYGGECILNGAAARLGHAGDIIIIVSWADLDEEELKNFKVNLVYMDEENNIKEHKVTTVFSEEVKEIAERNKNLVRD

SEQ ID NO: 20237 - protein, 410 aa, Persephonella marina EX-H1
MPLIVQKFGGTSVGSIERIKNVANKIKRAVEEGNKVVVVSSAMAGETDRLLTLTRELSSKPDPREQDMVVSTGEQVAIGLISIALKEMGIDAVSLTGWQVPIYTDDAHTKARIKKIDTGRILSELDKGRVVIVAGFQGISDYGDITTLGRGGSDTTAVALAAALNADVCEIYTDVTGVFTADPRIVENAKKIPVISYEEMMEMASLGSKVMQIRSVEFAAKYGVKIHVKSSFIEEDGTWIVEENEEMEKVVVRGISHDLKESRITVVQVPDKPGIAAKLFKALGDRNIVVDMIVQNVSHEGYTDISFTVNKIDAEYAEEIAKEVAKEIGAKGVERNDRIAKISVVGLGMKTHAGTAGKMFEVLYREGINIYAISTSEIKISCLIDEKYAELAVRALHEAFIENTENIVTG

SEQ ID NO: 20238 - protein, 399 aa, Persephonella marina EX-H1
MKKRVVLAYSGGLDTSVIVRWLTDKGFEVITYTADVGQGEELDEIEEKAKASGAVEAIIDDIKEEFAREYCMPLMRSGALYEGRYTLLSALSRPLISKKLVELAHRYDAHYVAHGSTGKGNDQVRFESSVWALDPDIEVLAPVRDWEFKSREEEIEYALKHGIPVKATKEKPYSYDRNLWGVAIEAGPLEDIWAEPPEDAFEITVNPENAPDSPEYLEIQFEKGVPVAINGKRYDQLWKLIWDLNEIAGKHGVGRIDMVENRLVGIKSREVYESPAGIILIKAYDEIESLVLDRFTYHYKLTHISQPYADLVYNGLWFSKLREALDAFTSEIAQLVNGTVRFKLYKGNAQIVGRKSPNGLYFETLATYSPEDEFDHKAGEMFTKIWGLPLKVFAKANKR

SEQ ID NO: 20239 - protein, 432 aa, Persephonella marina EX-H1
MNIRLLALFSSLIPAVSFAEEAKLDTGDTAWMIVATAFVVLMSIGGLTLFYGGMTRTKNILNTVMMVFLAYATATVVWVLWGYSLAFTDGEGAIYSFVGDLSKILLSGISYTDLSGTYPEFVFIAFQGTFAAITVALISGAAIERMKFSTWLIFVVLWVTAVYAPIAHVVWGGGFLFDAGALDFAGGTVVHINAGVAGLVLAILLGKRKDYGKTAILPSSVILTLVGAALLWFGWFGFNAGSAFGANDVAGVALLTTNVATAMGVISWTLTEWIVAKKPTLLGAASGAIAGLVAITPAAGFVDAKGAIIIGLVAGVVGWFGVFVLKKALGYDDSLDAFGIHGLAGIWGAIATGFFALQSLAWDGSPLKDNGDRIAQIMVQIESVVFTIIYTAIATAVVYLIASVLTKGGRVDDETETMGLDEAVHGERGFNL

SEQ ID NO: 20240 - protein, 487 aa, Streptococcus equi subsp. zooepidemicus
MKFTIVRNYDKLSRTILRLESDKMTIFRKKRQAINKTEMNRHLKMLDLIFLGLGSMVGTGIFTITGIGAANYAGPALTISIILSAIAISILALFYAEFASRIPANGGAYSYVYATLGEFPAWIVGWYIIMEFLTAISSVAVGWGSYLKGLLANYGLQLPNALNGTFDPQKGTYVDLLPVLVMLLVTAIVLMNSKAALRFNSFLVLLKFSALALFVIVGLFFIDAANWSHFAPYGFGQIYGGKSGIFAGASVMFFAFLGFESISMTVDEVKEPQKTIPRGIVLSLTIVTILYVIVTMVLTGIVHYTKLDVPDAVAFALRSIGLYWAADYVSIVAILTLITVCISMTYALARTVYSISRDGLLPRALCQITEKTRIPRNATLVVGALSMICAGIFPLASLAEFVNICTLAYLVIMSFAIIKLRKNAGKPQSGEFKTPFVPLLPILAIIICVTFMSQYMVFTWIAFGISTVLGILVYTCYGYTHSQERRK

SEQ ID NO: 20241 - protein, 399 aa, Streptococcus equi subsp. zooepidemicus
MSKTIAINAGSSSLKWQLYQMPEEKVLAQGIIERIGLTDSISTVKYDGKKEEHILDIPDHTEAVKRLLNDLIHFGIIGTYDEITGVGHRIVAGGEYFKESVVVDDKVVEQVEELAALAPLHNPGAAAGIRAFRKILPDITSVCVFDTSFHTTMQKHTYLYPIPQKYYTDYKVRKYGAHGTSHKYVAEEAAKMLGRPLDELKLITAHVGNGVSITANYHGQSVDTSMGFTPLAGPMMGTRSGDIDPAIIPYLIAQDPELKDAADVVNMLNKQSGLGGVSGISSDMRDIEAGLQANNPDAVLAYNIFIDRIKKFIGQYFAVLNGADALVFTAGMGENAPLMRQDVVNGLSWFGMEIDPEKNVFGYRGDISTAASKVKVLVVSTDEELCIARDVERLKQTIS

SEQ ID NO: 20242 - protein, 69 aa, Streptococcus equi subsp. zooepidemicus
MTMAQGTVKWFNAEKGFGFISTENGQDVFAHFSAIQSDGFRSLDEGQRVTFDVEDGQRGPQAVNITKLS

SEQ ID NO: 20243 - protein, 454 aa, Streptococcus equi subsp. zooepidemicus
MKVTKFGGSSLASAQQLEKVLAIIKDDPERKIIVVSAPGKRSPTDTKVTDALIAYYKAYVSDRHYHKHLEWIINRYQQICNDLTLDSKIITQIKASLEQLARLPKEHNPYLYDTFLAAGEDNNAKLVAAYLKANGLTASYLHPKDAGLIVSSEPQHARLLPISYDKLEALKDHDDILVIPGFFGVTNENQICTFSRGGSDITGSIIAAGVTADSYENFTDVNGIFAAHPGVVKQPQTITELTYREMRELAYAGFSVLHDEALIPAYRGKIPIVIKNTNNPSHPGTTIVLEHQRKSNPVVGISGDDHFVSINLSKYLMNREIGFGRKLLQILEDLNIRWEHMPTGIDDLSIVLRERELTPIKEEEILRRLVQQLEVDEVSITRNLSIIMIVGENMKSHIGVTSAATKALSEHHINIAMISQGSSEVSVMFVINSTDEKKAIRALYQTFFSPDLPL

SEQ ID NO: 20244 - protein, 260 aa, Streptococcus equi subsp. zooepidemicus
MRYTMSILEINNLHVSIEDKEILKGVNLTLRTGEIAAIMGPNGTGKSTLSAAIMGNPNYQVTEGEILLDGVNILELEVDERARLGLFLAMQYPSEIPGITNAEFMRAAMNAGKEDKDKISVRDFITKLDEKMALLGMKEEMAERYLNEGFSGGEKKRNEILQLLMLEPKFALLDEIDSGLDIDALKVVSKGVNEMRGQAFGAMIITHYQRLLNYITPDLVHVMMDGRIVLSGDAALATRLEKEGYAGIAEELGIDYKEEV

SEQ ID NO: 20245 - protein, 372 aa, Streptococcus equi subsp. zooepidemicus
MEELFCIGCGIQIQTTRKQEAGFTPAAALVKGIEAREIYCQRCFRLRHYNDITDVHITDEEFLRLLHEVGDSDALVVNVIDIFDFNGSVIPGLSRFVAGNDVLLVGNKKDILPKSVKDSKVTQWLTERAHEEGLRPLDVLLTSAQNKYAIKELIERIDQLRQGRDVYVVGVTNVGKSTLINAIIQEITGDKDVITTSRFPGTTLDKIEIPLDDGSFIFDTPGIIHRHQMAHYLSAKNLKFISPKKEIKPKTYQLNPEQTLFLGGLARFDFISGERQGFTAYFDNQLLLHRTKLEGADAFYDKQAGQLLTPPDKKELDDFPRLVRHEFLLDQKVDIVFSGLGWIRVNANKETATKVAAWAPDGVAVVVRKAII

SEQ ID NO: 20246 - protein, 214 aa, Streptococcus equi subsp. zooepidemicus
MKFFLDTANVEAIRAINELGVVDGVTTNPSIISREGRDFETVIKEICEIVDGPISAEVTGLTAEEMIAEARSIAKWHDNVVVKIPMTTEGLKATNVLSQEGIKTNVTLIFTVSQGLMAMKAGATYISPFIGRLEDIGADPYQLISDLRGIIDLYGFQAEIIAASIRTAAHVEAVAQLGAHIATIPDPLFAKMTEHPLTTNGLKTFMEDWASFKQ

SEQ ID NO: 20247 - protein, 298 aa, Streptococcus equi subsp. zooepidemicus
MFKSGFVAILGRPNVGKSTFLNHVMGQKIAIMSDKAQSTRNKIMGIYTTETEQIVFIDTPGIHKPKTALGDFMVESAYSTLREVETVLFMVPADEKRGKGDDMIIERLKAARIPVILVINKIDKVHPDQLLEQIDDFRSQMDFKEIVPISALQGNNVETLVQLLKDNLEEGFQYFPEDQITDHPERFLVSEMVREKVLHLTQQEVPHSVAVVVDSMKRDEVTDKVHIRVTIMVERDSQKGIIIGKQGAMLKKIGKLARRDIELMLGDKVYLETWVKVKKNWRDKKLDLADFGYNQKEY

SEQ ID NO: 20248 - protein, 396 aa, Streptococcus equi subsp. zooepidemicus
MLVKEVVITTAVRTPIGSFGGAFKSVSAVQLGKVVVEALLEKSGVKPEQIDEVIFGNVLHAGLGQNVARQVAITAGIPNDKPAFTVDMVCGSGLKSIELAAQSIVCGDSDIIIAGGTENMSQASYVLKDYRWGGRLGDGKIIDTMVNDGLTDAFHDYHMGITAENIAKNYGISRKAQDIFALASQEKAAAAQAAGRFVDEIIPVPVPQRKGDPILVAEDEYIKAGTTLEKLTALRPAFVRDGSGTVTAGNASGINDGAAAVLLMSRDKAEELGLPILGAIKGYASAGVAPEVMGTGPIPSTQKALAKVGWTIEDLDLVEANEAFASQAISVVDELGLNADIVNVNGGAIALGHPIGASGARILVTLLHEMEKRQAHKGLATLCIGGGQGTSVLIEK

SEQ ID NO: 20249 - protein, 627 aa, Streptococcus equi subsp. zooepidemicus
MLDKHKTGDEEVFLDLFAGTNVVSNFFKQYYTVYSNDILYFNYVKAKAIIENNSYLSFNKLKAIGILDPIDYLQRLNGKVGYYTKNYSPLGDCMYLTQENTEKIDNIRQIIEDWNNNQLLTEYEYFYLLNALIEAIPYVSNITGTYGAFLKHWDKRALHSLTLAEETIFDNYRPNKAFNENANELVKKIKADIVYIDTPYNARQYASNYHLLENIARHQKPILKGITKIFDWKTLKSDYSTKTKALKAMEDLIANINASHIILSYNTEGIISEEDLTLLLQRYSFNNQIDVKRIPYRKYQSKKKSQNKDLYELLFYIQRKPINNRFKSQTKKKAAIISQKKYIKSPLNYIGGKYRLLNQIIPIFPRHINTFVDMFSGGANVGINVPAKKHIFNDMNYRINDMFRYFQSHDPLEILEQIEHRISEYQLSKTNEQGFLTFRKHYNTHPNPLDLYVLSSYSYNYQFRFNNSMEFNNPFGRNRSHFSENMKSNLLNFVARLHRLDATFSDQFFSDFDISTLSIDDFVYLDPPYLITTGSYNDGNRGFTNWGEKQEIEMYQLIRDLNKKQIKVALSNVLVHKGKHNDLLEQFVQDESLYLTTLNYNYKNASYNTRKEDSIEVLITNYKPNPK

SEQ ID NO: 20250 - protein, 437 aa, Streptococcus equi subsp. zooepidemicus
MSMFLDTAKVSVQAGRGGDGMVAFRREKYVPNGGPWGGDGGKGGSVIFKVDEGLRTLMDFRYNRKFKAKSGEKGMTKGMHGRGSEDLIISVPQGTTVRDAETGKVLTDLVEHGQEFVVAKGGRGGRGNIRFATPRNPAPEIAENGEPGEERQLELELKILADVGLVGFPSVGKSTLLSVVSSAKPKIGAYHFTTIVPNLGMVRTKSGESFAMADLPGLIKGASQGVGLGTQFLRHIERTRVILHVIDMSATEGRDPYEDYVAINKELEAYNLRLMERPQIIVANKMDMPGAKEQLQRFKEQLAVQYDDFDELPMIFPISSLAHQGLDSLLEATAELLAKTDDFLLYDEADFAEDEAYYGFASEEKAFEISRADDAAWVLSGEKLERLFVMTNLERDESIMKFARQLRGMGVDEALRERGAKDGDIVRIGKFEFEFVD

SEQ ID NO: 20251 - protein, 250 aa, Streptococcus equi subsp. zooepidemicus
MGLRYSESLKLSFDFCDVKADVKLPLLLAHCLTVSARQSAKIGRGNEVLLQQYGLIWVVTDYDVTIDRVPRFGETVTIETQAISYNKLFCYRQFHIYDQAGHAIMTILSHFALLNPKTRKAAMIPDDLVAPYQADFVKKIKRPIKIDELQDPMVQAYQVRYFDIDMNGHANNSKYLDWMYDVLGHEFLLHHRPCHLTLTYIKEVKPSTQITSGYHLEQLTSYHEIRSLGQLNAQAVIKWQPMTTKESETN

SEQ ID NO: 20252 - protein, 375 aa, Streptococcus equi subsp. zooepidemicus
MIYFDNAATTPLSQAAIKAMTEAMADDFGNPSSIHAYGRQANKQLRECRKAIANCLGAAESHIIFTSGGTESNNTAIKGYALAHQEKGKHLITTAIEHHSVLSTMAYLEERFGFEVTYLEAKNGIIDLDQLKAALREDTILVSMMFANNETGDLLPIQAVGSMLEQHQAIFHVDAVQAIGKVPIQPADLGIDLLSASAHKFHGPKGTGFLYNKGLKLDPLLHGGNQENKRRAGTENLINIIGMTQALNEAIARLPQHYQHAKELSQLLLSELEGIPYQLNHSDHHLPYIVSIGFPSYQNHVLLTQLDLAGFAVSSGSACTAGAVEPSHVLAAYFGKQSHRLTEAIRISFSEQNTQKDVIALATQLKHILGGSYGI

SEQ ID NO: 20253 - protein, 333 aa, Streptococcus equi subsp. zooepidemicus
MSIRNLFGGLREKIVGKNMKIVFPEGNDERVVRAAARLKFEGLVEPIILGQADDIRSLLTQLGFADQHYTIINPNDYADFEKMKAAFVELRKGKATLEDADRLLRDVNYFGVMLVKLGLADGMVSGAIHSTADTVRPALQIIKTKPGISRTSGVFLMNRENTEQRLVFADCAINIDPTAQELAEIAVNTADTAKIFDIDPKVAMLSFSTMGSAKAPQVEKVQEAVRIAKELRPELALDGELQFDAAFVPSTAAIKAPDSSVAGHANVFVFPDLQSGNIGYKIAQRLGMFDAIGPILQGLNKPVNDLSRGSSAEDIYKLAIITAAQALENESIN

SEQ ID NO: 20254 - protein, 380 aa, Streptococcus equi subsp. zooepidemicus
MIYFDNAATTKPYEEALKTYQEVASKIYGNPSSLHQLGANASRILEASRRQIAALLDVEAKEIFFTSGGTESDNWAIKGIAFEKSHFGKHIIVSAIEHPAVRESAKWLESQGFELSYAPVTDKGVVDVKKLAALIRKDTILVSIMAVNNEIGSIQPIAAISELLADKPTITFHVDAVQAIGKLPVEAYLTARVDLASFSGHKFHAVRGVGFLYKKSGKRITPLLVGGGQEDELRSTTENVAAIASMAKALRIITERQDRSQARIAAMKKVIYQALQAYEDTILFSEIDDFAPHILTFGIKGVRGEVIVHAFEKHEIYISTTSACSSKAGKPAGTLVSMGIPATLAQTAVRISLDDDNDMGQVEQFLTIFKQIYEKTQKVR

SEQ ID NO: 20255 - protein, 258 aa, Streptococcus equi subsp. zooepidemicus
MVSVLALAACGQTNKTSLQDRIRENGKLVVAVSPDYAPFEFKALVDGKDTIVGADIELAQAIADELGVKLELSAMNFDNVLSSLQTGKADIAISGLSYTKERAKVYDFSEAYYETENAILVKASDAKRYANKDSLAGKKVAVQKGSIEEGLVKEQLDKANCVSLTVMGEAINELKSGQVQAVDLEAPVAAGFLAQHKDLALAPFKLQTGDGDAKAVAMPKGSDDLRQTINKVIKQLNKDGKYKAFIQEAALLTGNAVE

SEQ ID NO: 20256 - protein, 403 aa, Streptococcus equi subsp. zooepidemicus
MTKLSRRVLAMEESVTLAAGARAKALKAQGRDILSLTLGEPDFITPQHIQEKAIEAITTGKASFYTVASGLPELKDAIAAYMERSYGYTPTRQEIVVGAGAKYVLYAFFMAVLNPGDQVLIPTPYWVSYADQIKMVDGVPVFVQGLEENQFKVTVEQLEAARTDQTKVVLINSPSNPTGMIYSRQELEAIGNWAVQHDILILADDIYGALVYNGNQFTPISALSEAIRRQTITVNGVAKSYAMTGWRLGFAVGDTDIIAAMGKIIGQTTSNVTTASQYAAIEAFGGDQTSVEEMRQAFEERLNTIYPLLNQVPGFEAIKPQGAFYFFPNVKKAMEMKGFTDVTAFTDAILEEVGLAVVSGAGFGAPENIRLSYATDLATLKEAIRRLNQFMTTDSSHDNKENE

SEQ ID NO: 20257 - protein, 256 aa, Streptococcus equi subsp. zooepidemicus
MKTPEQILAATITIGEHKVAKPFLAKAILGFIGGAMISLGYLLYVRIAASGLETFGAFSSILGACAFPIGLIIILMAGGELITGNMMAVSAAFFAKKIKAKDLMANWLVITLFNILGALFVAFVFGHFLGLTASGSFKEEVIEVAHAKLAATPLQAIVSGIGCNWFVGLALWLCYGASDATGKLLGTWFPVMTFVALGFQHSVANAFVIPAAIFEGGASWMDFVTNFALVYVGNVLGGAIFVSLFYYKAYDHSKEA

SEQ ID NO: 20258 - protein, 226 aa, Streptococcus equi subsp. zooepidemicus
MIRREDYQYLRKLDDFCHFSIEQFDKIVGQMEFRQAKKDHMLFFEGDKRDRLFLVTSGYFKIEQSDRTGTFTYTDFIRHGTIFPYGGLFTDDYYHFSVVAMTDVTYFYFPTDLFEDYSLHNQQQMKHLYSKMSSLLELHELKVRNLITSSASSRVIQSLAILLVEMGKDSDTLPFQLTTTDIAQMSGTTRETVSHVFRDLKKSGLIAVKGKYLTYLDKNYFLQYTT

SEQ ID NO: 20259 - protein, 228 aa, Streptococcus equi subsp. zooepidemicus
MTYKILLVDDELEIIDINERYLQQAGYRVTTASDGSQALELFHKDQYDLIITDVMMPNMDGYDFIGEVLLEKPDQPFLFITAKTSEPDKIYSLSLGADDFISKPFSPRELVLRVKNILNRIYGKANQADSLVIGDLVMDHSTRRVTVANQELTLTNKAFDLLWILANHLNHVFSKTELYERVWEEEYLDDTNTLNVHIHSLRNDLAKYSTEQTPTIKTVWGLGYKLEE

SEQ ID NO: 20260 - protein, 363 aa, Streptococcus equi subsp. zooepidemicus
MKVFASPSRYIQGKNALFTNSDIIKKLGQKPVLLCDDIVYSIVGERFEGYLSEHGLPPVHVAFNGEASDNEINRVVAIARENDNDVIIGLGGGKTIDSAKAIADILEIPVIIAPTIASTDAPTSALSVIYTDEGAFEKYIFYAKNPELVLVDTQVICQAPKRLLASGIADGLATWVEARAVMQKNGDTMAGGNQTLAGLAIAEACERTLFADGLKAMASCEKKVVTPALENVIEANTLLSGLGFESAGLAAAHAIHNGFTALTGDIHHLTHGEKVAYGTLTQLFLENKSREEIDRYVDFYQAIGMPTTLKEMHLDTATEEDFLKIGRQATMAGETIHQMPFTITAEDVAAALVAVDAYVCSRK

SEQ ID NO: 20261 - protein, 222 aa, Streptococcus equi subsp. zooepidemicus
MEYMLDTLNLEAIKKWNRILPLAGVTSNPSIAKKEGDIDFFERIREVRAIIGDKASIHVQVVAQDYEGILKDAAAIRQQCGDSIYVKVPVTTEGLAAIKTLKAEGYHITATAIYTTFQGLLAIEAGADYLAPYYNRMENLNIDPEAVIGQLAEAIDRECSDSKILAASFKNVAQVNQAFALGAQAITAGPDVFEAGFAMPSIQKAVDDFGKDWQAIHHRQTI

SEQ ID NO: 20262 - protein, 66 aa, Acidobacterium capsulatum ATCC 51196
MEQGTVKWFNDAKGFGFLSRPNGEDVFVHFSAITSNGFRSLQEGQAVQFNVVKGAKGWQAENVQAL

SEQ ID NO: 20263 - protein, 521 aa, Acidobacterium capsulatum ATCC 51196
MTQVTTPSEESFSAPSKQPHLVATLGWFSATAIVVGSMIGSGIFLVPAEISRDTGSPALLIAAWLVTAVMTIIGALSYGELAAMMPDAGGQYVYLREALGPLPGFLFGWTLFLVIQTGTIAAVAVAFGKFLGVFFPSVSSSHWLWHIGHVPAWHVGPMVLGNMDIGVNTANLTGILIILLLTFVNIFGVRLGALIQNVFTTAKTAALLGLVILGVLFGRKAVAMAANFGHNFWAGAGWHTLHPLQIGVGGPVTMVGLLTILAVVQTGSLFSADAWNNVTYTAGEVKNPRRNLPLSLVLGTGVVLGLYILANFVYLFALPLHGDAHGATVAARGIAHAADDRVATAALQQIFSNGGAYLMAGAILISTFGCANGLTMAGPRVYYAMSRDRLFFEGAGKLHPRYKTPVIALLIQGVWTCVLCISGSYSQLLDYIICSELIFYILTIGSLFVLRRKRPDAQRPYKALGYPVLPALYIVMAAWICIVLLRYKPQYTWPGIVIVLLGVPVYAIWSRVAKRSPVTPS

SEQ ID NO: 20264 - protein, 514 aa, Acidobacterium capsulatum ATCC 51196
MAKLFAVKPLSALKNEAVEEGEHTLKRSLGPVNLITLGIGAIIGAGIFVLTGQAAALHAGPAVALSFIVAGITCAFAGLCYAEFASIIPIAGSAYTYGYATLGELVAWVIGWDLVLEYAFGAATVASGWSGYLVSFLEQIGLTPSPALARWTTTYGNTLYFLHGHWVSQAALPMGTPTAGLLKVHGIFDLIAFLAILAVTTILVIGIKESANLNSLIVFVKLAVVGIFLVLGIGFLMHHPHVASLNWHPFIPKSEGPGKYGFNGIVAGASSVFFAYIGFDAVSTAAQEARNPQRDMPIGILGSLVICTLLYIAVSLVLTGLVSYRSLDVADPVALGIDATGVAWGSLLVKIGAIFGLGTVMLVMLLGQSRVFFSMSRDGLLPKWASAIHPKFRTPWISNIVVGTIVAFLPALLPINKLSELVNMGTLLAFAIVSAGVWVLRVRMPDLERPFKTPLVPLVPILGVLSAVYLMANLPLLTWIVVLVWLVVGLLIYFNYSTKHSKVQRMQQQGAGQE

SEQ ID NO: 20265 - protein, 176 aa, Acidobacterium capsulatum ATCC 51196
MLLFDAKTRTKRRSFQEDFPVYSLQLMGLIIRSSSIHAAGCYTTTPIRKGARVVEYTGPRITKEAADAKYENSPTTYLFGVGNGDEVIDGHGTAMFLNHCCDPNCETGEVKGRVWIKAIRDIAAGEELTYDYHLYDGDEDEARCNCGKPKCRGTMYAPEEMERRRKEARKAARRKN

SEQ ID NO: 20266 - protein, 621 aa, Acidobacterium capsulatum ATCC 51196
MRMSNFSMRAERGSAGRHRTRAEEPKKKPRLRRVMPEVWALIRPRKWLMLFGLVLMAINRVAGLFLPVSTKYLVDHVLDQHHGNMLLPLVGAVFVATAIQAATSYALTQLLSKAAQRMIADLRKRVQRHVGRPPVRFYDANRTGVLVSRIMNDVEGIRNLIGTGLVQFVGGLLTALLVFGFLLYRSRNMTLIIFGVVVLFVLILQQAFKTIRPIFRERGRITAEVTGRLTESLGGVRVVKGYHAEDRETRVFGEGVDRLLANVISSLTATSVLSFAATTVMGVVGGLVMLMGGHLVLRGKMTTGDYFQYTMLLAYMIAPIFQIVSVGTQLTEAAAGLDRTLEVLDESDEFADPKRVRVLDEIEGRVTFEDVHFAYEPDKPVIKGVSFEAQPGTVTALVGSSGSGKSTIISLVCAFHNPESGRVLVDGIDLTTVQLDSYRAQLGVVLQESFLFDGSIRANILFSNPDASEQQFLSACSIARVDEFAERFPEGYETIVGERGVKLSGGQRQRLSIARAILADPRILILDEATSSLDSESEAMIQEGLSYLMQGRTTFVIAHRLSTIRRADQILVVESGEIVERGSHAELFALGGRYWDLYTRQHGLEQNLFLAPGEGDTVEAK

SEQ ID NO: 20267 - protein, 321 aa, Acidobacterium capsulatum ATCC 51196
MGQWISDFDDALLPGAAIPSVLDALMEDEARRSPLPTAVCWPCSAFALAGALDAAEAGVIEPILVAPAQLLAKVAEEARLSLRNFKVIEAANEHEAARVSAELCRSGEAGALMKGSLHTDVLMHAVLARDSGLRTTRRVSHVFVMDAPLYNRTLFITDAAINIYPTLDDKVDIAQNAIDLARRLGVAAPRVAILSAAETVCSKITSTLDAAALCKMADRGQITGGILDGPLALDTAVSAQAAEVKQLRSEVAGKADILLVPDLESGNMLAKQLEYLGGAQLAGIVLGAKVPVILTSRADPPRSRVVSCAIAALLARDGGVR

SEQ ID NO: 20268 - protein, 317 aa, Acidobacterium capsulatum ATCC 51196
MTSSGPLFEPDALIECVPNFSEGRDEQAIHKIIAAMAVEGVQLLDYSLDHDHNRSVVTIAGHPAAVQEAAIRAAGAAAELIDLTRQQGVHPRIGAADVIPFVPIRGISLEQCALIARQAGREVWRRYGVPVYFYEAAAARPDRAQLEEVRRGQFEGLREAVRNEPARRPDVGGPELHPTAGAVAIGARKFLIAYNIYLDTPDVGIARAIAREVRHSGGGLHGVKALGVLVNGEAQVTMNVTDFTRVSVGEVFALVKQKAQAHGTVPIRGELIGLIPEAAYERESEWARLLHEFDPDQKVLERRLAWPIAWPGAGQQG

SEQ ID NO: 20269 - protein, 66 aa, Acidobacterium capsulatum ATCC 51196
MEQGTVKWFNDAKGFGFLSRQGGEDVFVHYTAIKTNGFRSLQEGQAVQFDVVKGPKGWQADNVQVL

SEQ ID NO: 20270 - protein, 576 aa, Acidobacterium capsulatum ATCC 51196
MKASDYIASVLQQQRVAAVFELVGGMITHMIDSVFVQGEVPIVSMHHEQGAAFAAEAVGKITGIPGVAMATSGPGATNLLTGVGSCYFDSSPAVFITGQVNRHEQKGNRAVRQLGFQETDIVSMARPVTKHSVLVQDVRDLPNTLHGAFRLATDKRPGPVLIDIPMDVQRENVEPEWLMHHAADAPLLPEERDLVALKEALLKAQRPLVLAGGGVRAGRVTAEFRQMVEMLSIPVVHSLMGVDALPWSHTLNAGMIGSYGNRWSNLAISQCDLLVVVGSRLDVRQTGADTQGFKEGRQIFHLDCDAGEMNNRVTGCHAILGELRPALLALHEMLLPIRDTVAANCMHWLGEIAALRRRWPDTQEIPDLQGINPNSFMHGLSQAGASAGAYVVDVGQHQMWAAQSLEIADDQRFLTSGGMGSMGFALPAGIGAAIALAGQPVVVIAGDGGFQCNIQELQTVARLGLPIKIVVVNNNCLGMVRQFQESYFKGRYRSTLWGYTAPDFEAVAKAYGIPSKSISDPTQIASASEWLFADHQSPALLQVMVSPNANAYPKLAFGKGMTSMEPQEKPIAMEGT

SEQ ID NO: 20271 - protein, 623 aa, Acidobacterium capsulatum ATCC 51196
MKRLFRLLSYARHYLVYAFAAVVLAAGVGLFDAFRVLLVGPIFDDVLHPGGNSGNRQISLISQAGSHFHIHLTLQQFVPSGLHNDWNMVAYALVLSTLLKGICDYGGTYLASYAGYGTITDLRDDLYEAILRRSVSFFQKHATGTLLSALINDIERVQYAMATILSDFLQQFFTLIFMLYVVIALGGKLAWILLIFVPVVFASMRRIGRGVRKTTRKGQDKLAEIQNILHETITGNRIVKAFNMEFWELIRFRKAARRLLRANMRTVSAQALSSPLMDVIGAIAIALLLRVGHSSINHHSMQPGQFLAFIVALFKLYDPIRRFAVYYNSFQQALGSSQAIFDFIDDEDRVVEKPHAHKLKPFKEGIVLDHVSFRYQDEEGVKEVLHEIDLTIRRGEVLALVGPSGAGKTTLVNLIPRFFDVTSGRILIDGHDLRDVTLSSLREQIGKVTQETILFNDTVRNNIAYGQPDVPLARVVEAARAALAHEFIEAMPEGYDTIIGEKGFRLSGGQRQRLAIARAILKNAPILILDEATSALDAESESLVQAALANLMTDRTSIVIAHRLSTVRRADRIAVLEQGRITAIGSHEELLLSSPTYQKLHRLQFMDIDHKNDFDFVAREAAE

SEQ ID NO: 20272 - protein, 193 aa, Acidobacterium capsulatum ATCC 51196
MQNLQNKMFIFLDRDGVINRKPPEGEYVERWEDFHILPGVEQAVAVLNTHGKKVIVVTNQRGVALGKYRAADVEFIHQKLQEQLANAGGHIDAFYYCPHDREECDCRKPKPGLILQAFHDFPEANAANSVIIGDSLSDLEAGHSLGMPSIFIDGPRERQKPGAEQARSVAGKTCHSLAEAVDAILRPQRIKPE

SEQ ID NO: 20273 - protein, 639 aa, Acidobacterium capsulatum ATCC 51196
MAKIIGIDLGTTNSVVAVMEGGEPKVIANEEGGRTTPSVVGFTKSGERLVGQVAKRQAITNPENTIYSIKRFMGRRQNEVNDEMKMVPYKVKQQGDHIVVEAQGKDYTAPEVSAMILQKLKKAAEDYLGTSVTEAVITVPAYFNDAQRQATKDAGKIAGLDVKRIVNEPTAAALAYGLDKKKDETIAVYDFGGGTFDISILEVGEGVIEVKSTNGDTHLGGDNLDQKIVDWLIDEFKKDEGLDLRAKGNEMALQRLKDAAERAKIELSTALETEINLPFITADATGPKHLVKKLTRAKLEQLVEDILQRSIEPCKKAMADAGVDASKIDEVVLVGGQTRMPRIQEIVKQLFGKEPHRGVNPDEVVAIGAAVQAGVLAGEVKDLLLLDVTPLTLSIETLGGVATPMIPRNTTIPTKKTETFSTAGDSQTEVEVHVLQGERPMAGQNRTLGKFKLSGIPPAPRGVPQIEVTFDIDANGILNVTAKDTATGKDQKITITSSSGLSKEEVERMAKEAEAHSAEDKAKRDEIEARNQLDNLVYNIEKMLKENGDKVSGEEKAEVETALADAKKTLEGTPTAEELNAAREKLTASSHKLAEAMYKANAAAGAAPAGEPAPGEPQAEQKKDDGVIDAEYVDVDEKK

SEQ ID NO: 20274 - protein, 202 aa, Acidobacterium capsulatum ATCC 51196
MKRPRPAFFLDRDGVITENVFYQDTNQWEGPRSIEDFRLLPGVVPALEALQDAGYALILVSNQPNAALGKSLMSQLSEMHHALRREMRRNGIRFLDYCYCLHHPQSRIPELGGLCRCRKPSPYWLHYAAARHGVDLRASWMAGDRETDSLCAARAGVRAIRVGHGLVHDGLAAMIAPDLPAAVQRILRPRSLRREDWVAATL

SEQ ID NO: 20275 - protein, 442 aa, Acidobacterium capsulatum ATCC 51196
MSTDAAPTVPVLRRSLKLWHLILYGIIIIQPTAPMSIYGVVSNAARGHVVTTILIAMVAMLLTAVSYGRMARVYPSAGSAYTYVAQELHPLAGYIVGWSMLMDYMLNPIICAVWCSVAAQGMLPQIPYAAWVLAFVLVFTGLNLLGVQASARVNALLAAGMGIVVAVFLAFAFHYIATVLHPVGWAWLAPFYDPVTFSVSRIFHGTSIAVLTYIGFDGISTMSEEVENPRRNIMLGTVFTCVAIGLLSAVEVYAAQLAWPAGWHFPPALVDTAFVHVGLRVGGRFLFFLLNLTLLVANMGSGIAAQFGAARLLYGMGRDNALPKRIFGVISPRTGIPRNNVLLLGGATLAGALLLSYERGAELLNFGAFIAFMCVNIAALVHYRFRSKEKVRLAVTIPLLGFLICGFIWLHLTRDAQVLGAGWIAIGLILYFAMHRRRKSRR

SEQ ID NO: 20276 - protein, 637 aa, Acidobacterium capsulatum ATCC 51196
MCGIVGFTTKEWIAPEGRIRDAAMTLIHRGPDQQGVHRSLLCSLGAARLKILDLAAGDQPIYSEDRDTVIVFNGEIYNHLELRKELEARGHRFVTHCDTETVLHAFMEWDVECFARLRGMFGVALWQQSRHRLVLARDRMGIKPLYVARRGEDLLFASELKGILIHPEFERRLSLQGLDCYLSMNYVPAPWTLVEGIEKLAPGHWLEWRDGRTETQPYWRIPSMQPGKISQPEAEAELDRLLRQSVSEHLLSDVPLGVWLSGGVDSTTMLHYAAEASGSKLRTYSISFKGHSFDESAYIREVVEKYGTIHEQLDLNPEQDLEGAIRELTYYSDEPSADSGALPVWFLSKLCRKSCTVAFSGEGADEIFGGYLTYRANRIAQQVRHLPQGVIRAAQRAMQAWPASNEKISFEYKVKRMLQGSLLAPEQAHVYWNGTFSELEKAALVRQPLPGAMPWLLSGLRAEIPGDGIAPYLKFDQECYLPDDILVKSDRMSMAHSIEVRPPFLDHRLVEFAAGLPSALKIRGSRQKYLLKQLMQSKLPPSILRRKKIGFDIPAHEWFRGPLKGVLMDALEGAEAEHGDLFCFDKIYELTQQHMNRSINLGFHLWGLMVLFLWMRQWKIQSAPAQQLSPAFAALGE

SEQ ID NO: 20277 - protein, 370 aa, Acidobacterium capsulatum ATCC 51196
MASGRILVVDDEPYIRAVIATMLEKSNYLPVLAANGQEALEHLEQDAPYDVVLSDIMMNGMDGIGLLEKLREVHPDTPMIMVTAMHDVSIAISAMRKGAYDYLLKPFAKEQLLATVGRALDYRRLVQQNSMYRQNLEELVSARTEMLRQAMNDLERSYDITLEALGDALDLKDAETEGHSKRVTAYTIALARHMGVSAQQMRTVARGAFLHDIGKMAIPDAILLKPGRLNPEEQAIMREHCARGYQILRKIPFLREAAEIVYSHQEHYDGSGYPRGLRGDQIPLGARIFAVADTLDAITSDRPYRRANSFDSARGEIRRCAGSQFDPAVVEVFLRIPDQIWRDLQAEISRQTRFSPLFFMGEGSDLVLPT

SEQ ID NO: 20278 - protein, 548 aa, Acidobacterium capsulatum ATCC 51196
MKKFRNRVWICAVALLLALGNTAHAQAGSAAADLKAAAAAAPTATQMSQGDPGGTLTGTINDVPVSNAKAGVTTGDVANQVGQNKIAINFVWTLVTGFLVMFMQAGFAMVEAGLCRVKNANHTYMMNFTVYACGLFAYWLIGFAIQMGGAAGNGNLGGLATLAPEHMITLFGAHWGVWGTQGMFLSGHTYDVGVMVIFLFEMVFMDTALTIVTGAAAERWKFLTFCVSSVLMGAFTYPLFGNWAWGGGWLSALGSNLGLGHGYCDFAGSGVVHAVGGLTALAVALILGPRIGKFNRDGSSNAIIGHDISAVLVGCFILAFGWFGFNPGSTLGASAAGNLRIGTIAVDTMLAGCTGTFGALLYMWIFKGKPDAGMGANGLLAGLVAITAPSGFVNTVSAAIIGFIAGVLVCISVAFIENKLKVDDPVGAVSVHGTCGLWGVLSVGLFADGKSNYGGAWNGVNGSVTGLFYGDAGQLVAQLVGIVTLIGFVFTFSFVLNWILDITVGQRVSAESEVAGLDLPEMGQLGYPEFVFKPEPAFLTMAEEAAIA

SEQ ID NO: 20279 - protein, 458 aa, Acidobacterium capsulatum ATCC 51196
MAESTQQNSPARLRKVLGLWDLVFYGMVLIQPTAGVPLFGVAQKLSNGHTVTTILIAMFAMMITAVSYGRMAALYPSAGSAYTYVGRTINPHLGFMVGWAMLLDYILQPLINVVWISAALHSRYIAEVPFPLIALGITAFITALNLIGIRSSARMNKLLLMAMCVVIAVFLVMGVHFLYHQGQWAALFSIAPFYTPATFSLSKVWGATSFAALTYIGFDGITTLSEDVENPRRNVMLATVLVCLLTGLLAGAQTYLGQRIWPDWHTFPNLETAFMDICRRVGGPVLFEAMGVILILAALGSALTGGVGAARLLFGMGRDGVLPRRFFAHLHAETNTPTYNILLIGAVAWLGAVALNYVGSAYEHAGELLNFGAFLAFMGVNLSSFWHFSLLRKAGKPRVMADIVLPLTGFVFCASIWWNLNILAKVVGGVWFAVGLIWLAATTSGFRQSPKMIDFSEG

SEQ ID NO: 20280 - protein, 295 aa, Acidobacterium capsulatum ATCC 51196
MRIAFLGLGKMGVAILKHLLPGNEITVWNRTLSTAEALRSEGVKVAATPQEAVKEAEAVFSILLNDAAVEDVFLEQGALKAMPSGAIHACLSTISVASSQRLTEAHQQAGRPFVGAPVFGRPHVAEAGKLWSVLAGEDASLAKLRPLVERYSRGVTVVGEQPWSAHAMKVGGNFMITAMIASLTEGFVFAEANGIEPATYLQVVNQGLFQSPFVEMYGGLMLHPPETPGGTIALGEKDARLFLEAARGAHVPAPLAHQFHEHLKQAMTEGMQDADWAGGYYQLAKTVAGRKRGNN

SEQ ID NO: 20281 - protein, 386 aa, Acidobacterium capsulatum ATCC 51196
MRRIYLDANATTPVLPEVLEAMRPWFLESFGNASSIHQPGQRARAAVEQAREFAAQLVGCRPGEIVFTSGGTESDNAALFGALKPGDHLITTTIEHHAVLHTAEKLRDRGMEVTFLPVSAEGVVDPDEVRRAFRPNTRLVSIMYANNETGAIQPIAEIGRLTREAGILLHTDAVQAAGKLPIDVKELNVDLLSISGHKMHAPQGTGLLYIRRGLQLEPMLFGGSHERQRRAGTENVPGIVGFGKAAELAMAGLASGAIEKMAALRDRLEQGVLAAVEGAGAHSTGVPRTANTTSLYFDQLEGEALVISLDLRGLAVSGGSACMSGATDPSHVLLAMGVPGPRARATIRCSLSKLNTAEDIDAALEVIPACVARLRELSPANAGTLG

SEQ ID NO: 20282 - protein, 72 aa, Acidobacterium capsulatum ATCC 51196
MAQYKGKVKWFNNAKGYGFIGRDDGPDVFVHYSAIQIDGYKSLKEGDEVEFDIVQGQKGPQADQVTRMREIA

SEQ ID NO: 20283 - protein, 331 aa, Acidobacterium capsulatum ATCC 51196
MTPSDMQPGRTPAQLVRTEAAALLALAERLEGPMQAAFERAVETVIACGRDRGRVVVTGMGKSGLIAQKIAATLSSTGTPALFLHPAEAVHGDLGMIARGDVVLALSASGETEEILRLLATLKRMGDALLSFCCNLNSTLAGASDVALDVSVPGEACDLGLAPTASTTAMLALGDALAIAVSMRKGFRAEDFAELHPGGKLGKRLARVHELMHAGEALPRVTPATPMKDVIYEMSRKGLGMTTVVEDGRLAGILSDGDLRRLLEHEGAACLDKTAAEVMNPRPQIIAPGELAARALHRMEERKITSLVVVDDAGVLQGVLHLHDLWETELF

SEQ ID NO: 20284 - protein, 371 aa, Acidobacterium capsulatum ATCC 51196
MIIGVPKEVKDHESRVGITPAGAKELTAAGHKVLVETRAGELSAFTDDEYQAAGAEIAGNAAEVWGHAEMVVKVKEPVEKEYIFFREGLVLFTYLHLAPLPVLTDQLLKKKVTGIAYETIRDRHNTLPLLTPMSEVAGRMSVQVGASYLEKERGGRGLLLGGVPGVPPANVCIIGGGIVGTNAAKIALGMGAKVTLVDLNLNRLRELDDIFNGRLYTLASNSYNVAQAVREADLVIGGVLIPGAAAPKIVTREMVSQMKKGAVIVDVAIDQGGCIETARPTTHSDPAYEVDGVVHYCVTNMPAAVPNTSTLALTNATFPYVMRLARLGAKAAILEDRGLSDGVNTYNGVLTCEPVAVSQNKDWEGILSLLQ

SEQ ID NO: 20285 - protein, 346 aa, Acidobacterium capsulatum ATCC 51196
MRSGFVSIVGRPNAGKSTLLNALAGEKVAIVTSKPQTTRNRIHGIVEVPAQNTKAGKRPAAQIVFVDTPGVHKPGNTLDRRMLQEVHAALETRDIVIWMVDASRRVALAEAAAAEGETKTQRDLLESNEDAFVFELIRKLDCPVFLVINKIDLVDRETLAPLIAELSRLHNFAEVFPISARKRNSLDELLAKLVDYLPEGQRYFPEGQFTDQPERFLVAELIRERILMETGEEVPYASAVIIEQYEEPVSQTNPLTRIAAAIYCERPGQKAILIGKGGSKLKEIGASARKEIESLLGTRVYLELHVKVKDRWRESEPFIESLDWRRQLEELSAKANRERKQRGEEE

SEQ ID NO: 20286 - protein, 520 aa, Acidobacterium capsulatum ATCC 51196
MQECALSQLFTRKSIDKLIAESEDPERRLRKTLGPISLIALGIGAVVGSGIFTVIGTAISGQQFSTSSVLNTPLLDFLVRHHAMAGRPGAGPALAFSLVLVAIVCGFTGLCYAELASMIPIAGSAYTYTYATLGELIAWINGWSLILEYAFSNMAVSVGFAGHMVDLMDWFGIHPPLKWISPAYLPSGLQDFSGHVLYQPGWHFGFNIPAFIVVMVITMVLVHGIRESARTNNIMVLLKIGAILVFILAGAQFIHPSYYHPFAPNGWSGILTGGSIIFFTYIGFDSVSTAAEECKNPQRDLPIGIIATLIVCTLLYLGVATVLVGLRHWNTMADDAAPVVNTLRHLSQQSGGHLLRYIHLAVLVGAILGMVSSILVFQIGQARVWFAMSRDRLLPTIFSRVHPRYRTPAVSTWVAGIVVAIPAGLLDIGTVADLSNIGTLFAFVLVSAGVLILRYQDPHRHRSFRVPFGPVFPVLSIVFCVLLMMGLEVMTWVRFFAWLAIGLVIYFFYSRKRSEFYAGK

SEQ ID NO: 20287 - protein, 608 aa, Acidobacterium capsulatum ATCC 51196
MCGIAGLISFSTAEDVVGLSSRPDTLSQALASRGPDAHNRWISPGRHAALDHRRLSIIDLHSRADQPMISDDGRYAIVFNGEIYNYAELRSELTGRGVRFHTTGDTEVLLQMFAQYGPAMLPRLRGMYAFAIWDEPEQRAFLARDPLGIKPLYYARSRERLYFASQVRALLTVPGLDLSEQPAGHVGFFLWGSVPEPYTLYRGIHCLPAGHWMTVDRSGETTVRKFASPVEEFGQYRLEEMPGSDAECKSRLHAALAGSVRAHQTADVPCAIFLSAGIDSSVITALSAEQGLPATTLTLGFDMLRGSENDEVPLAQIIARHYDTPNHPQYIGQPFFLEHRDRILEQMDQPTIDGVNTYLVSWLARQFGFKVALSGIGGDEVFGGYPSFQQIPQTVHALAPLAHAPFLGRGWRILTAGVMRRFTSAKYAGLFEYGGTWGGAYLLRRGLYMPWELPAFLDADLVRAGWEQLHSIPAMNALVHLVDRLPFAESGQADFLRISALEMTYYMRSQLLRDADWAGMAHSVEIRVPFVDMFLLRQLAPLRASRFFPRKPAYAECLSRPLPASILHRPKTGFHVPVREWMQQETERGLRPWSRFVYRAKFASAGSD

SEQ ID NO: 20288 - protein, 256 aa, Acidobacterium capsulatum ATCC 51196
MDRQYYRARLEKKILLSEPAQCFHLEFSIPELESFDFQPGQFVSFVATDERGKHQMRAYSLASAPRGASFDVCVNRVAGGFFSNLLCDLKPGQEVEFHGPHGMFVLRAPLTDSILIATGTGIAPVRGFVEWLFPEEGESRSEGREIWLVYGTRHASEVYYEDHFERVAAKHANFHYVKTLSRPDESWTGHRGYVQDHVARIVHERRAKHGAVTAPKGADFDIRAYICGLNEMVAANRERLKEMGWDRKQIVFERYD

SEQ ID NO: 20289 - protein, 360 aa, Acidobacterium capsulatum ATCC 51196
MKTEATETVTPTTTTTEMQEATGSSTAQATRAKGSAATSSRRRFSLSGDKHFKIFAGSANRDLAEKVCEHLGVTLGETKLQRFADGEIYFQLLENVRGADVFLVQPTCYPVDQNLVELLIMIDALKRASAGRITVVVPYYGYARQDRKDRPRVAISSKLVADLITTAGANRALFMDLHAAQIQGFFNIPVDHMFASPVLVSYFRELNMPNLTVVSPDAGGVERARHFAQKVDAPMAIVDKRRTDINVTEVMHVIGDVKDRTCLIVDDIVDTAGTLVKTVDALLQEGATKVYACASHAVLSGPAIERIANSRLEELVVTDSIPLRPEAQRVAKIKVRSVSGLLAATIESIHMETSVSSLFN

SEQ ID NO: 20290 - protein, 605 aa, Acidobacterium capsulatum ATCC 51196
MPEIQNPNQQSGGPDSRTLLIYAVIFLAIFLGLQYFRSKNAPPAPPNGKHTPAAQKNSPAPSAAPASAPGQTASGNAPAAATTPAVLAAAETTTTVESPLYRVTFTNRGGVAKSWILKKYTNDAQNRPLDMVNDKAAQQFGYPLSLYTYDAALTQQLNQAMYVPSATGTIQAPATLTFRYSANGLTVEKTFRFEKSYVLETDVKVTRNGAPVTALLAWPSGFGDQETLPQYQNAQIDQETGAKTGFHLAGGPNVKQIEPKKVSGGDTVQGPLDYAGVSDLYFASIFLPPNPDNALMVTLHHALELPRDPAHPKTSKMDQVPVLGAAVGSTTGEVHDRLFVGPKALDVLKSIHTAYHFNLEGIVHYGFWGWIAKPMFLVLQFFHNHGIPNWGWAILLLTLILNAAMMPTRVTMMKKSLAMMRIQPQMDAIKAKYAKYKATDPRKQEMNKEMMDLQKREGINMFAGCLPMLLQYPLLIGFYRMLEVTIALRHAHWMWLPDLSAPDPYYILPIFVVVSMFLVQFFTPSPGVDPAQQRMMAFMMPAFFGFMMLHIGSGVALYWAGGNILGVGQQWVMNSTGMGREMKELAAKRAARKRAQGGKVINARR

SEQ ID NO: 20291 - protein, 343 aa, Acidobacterium capsulatum ATCC 51196
MFIDEAKIRVKAGDGGNGCMAFRREKFVPRGGPSGGDGGRGGDIVMESTQRHNTLLYFRYNPEHKAERGEHGMGSNCTGRDGKDIILKVPVGTVVYNAESGELLHDFQQPDERLIVAHGGRGGRGNQHFATSTHQAPREHEMGYPGEEFTLRLELKVLADIGIVGYPNVGKSTLISRISAAKPKIADYPFTTLEPNLGVVTVGEMPHEETFVVADIPGLIEGAHEGAGLGDRFLRHVERTHLLVHLVDVSDASGRPDPVADYKTIAAELANFGGELEDKPVIVVASKIDSVNPDKLKKLAAMAKRRKLPFYEISAVTGQGVQQLKYAMAERVRELRKQTQIEL

SEQ ID NO: 20292 - protein, 391 aa, Acidobacterium capsulatum ATCC 51196
MLAINSGSSSLKVGVYCYRDGDVFALLSGSVSGVGRTDGRLKLEDAEGKELLNRQYTLPSQREALGEMMRALAVTAPGEVAAVGHRVVHGGPHLTEHQRITQEVVETLRESVHFAPLHIPPALALIEATEELLPGVPQFACFDTAFHATIPAVAHHYAVPERFYEQGLRRYGFHGLSYESILHRLRAENGGEVPKRIVCAHLGSGASLAAVLEGKSVDTSMGLTPLGGVPMSSRPGDLDPGVVLYLLRAGQFTADALEEVLNHQSGLYALSGGETAMQALVEARAQGGPRATLAVEAFAMSVRKFIGAYAAVLGGVDLLIFSGGIGEHSAEVRGLCCEGLEMLGIHTNDAEGGSGKVRVMQAEEEMQIARHCFRLANLSEEVSTAKEHAAP

SEQ ID NO: 20293 - protein, 66 aa, Acidobacterium capsulatum ATCC 51196
MEQGTVKWFNDAKGFGFISRQNGEDVFVHYSAISSNGFRSLQEGQAVQFNVVKGPKGWQAADVQPL

SEQ ID NO: 20294 - protein, 402 aa, Acidobacterium capsulatum ATCC 51196
MQSQSSSMEQIVIVSGVRTPVGKFQGTLSGMKATELGAIAVREAVARAGVDPAMVDECIMGNVVSAGLGQNPARQAALFGGLPPAVSAFTINKVCGSGLKAVALAAQSIQTGNAEIVVAGGMESMTNAPYLLPQARAGFRMGNSVAVDSMVNDGLWDIYNDYHMGVTGENVAEKYNITREEQDEYALNSHRKAAAAQQAGHFKNEIVPVEIPAKKKGQPATFFDTDESVRADASIEALRALKPAFKKDGTVTAGNAPGVNDAGAACLVTSARKAAELGLKPLARIVAQASSGVEPRWVMMAPVTGVQKVLARAGWSTDSVDLFELNEAFSVQAIAVTRELGIPLDKVNVNGGSVAIGHPIGASGARVLVTLLHEMIRRDAKRGVAALCLGGGNSVAMAIERD

SEQ ID NO: 20295 - protein, 389 aa, Acidobacterium capsulatum ATCC 51196
MAGNGAFRTAKRLDEVGFSDIVQIRNKVLELRAAGVPVHAFHGGEPFFDTPEPIKQAMTRALAENQTRYAPSSGIAPLREIIAEKLRTKNHMDVQVEDVIVTVGGAHALYAAFQTVLDPGDDVLLFSPYWTPIRDMITGAEARPLLVSTASARQSGITQMLERLSTPQTRAIYYNTPQNPSGTVFSRKEAEEVAAFAMERDLIVFADEAYEDLVYDGDHVSIASLPGMAQRTITCYTLSKSYGMTGWRVGYAVAKEPFMTGLRKMVLYSTNGVSTPTQYAALEALKTPQTELDARRAEYRKRRDLLVAGLNELGLTCPVPEGAFYAFPSVAKISKDSRKAANLLLEKAHVATIPGVVFGAQGEGSVRFGYAVPEQAIHAGLDALRAFLK

SEQ ID NO: 20296 - protein, 430 aa, Acidobacterium capsulatum ATCC 51196
MQFSELNLSSHLKNQLAVNQFVTPTPVQEAAIPPAMEGKDVLATAQTGTGKTLGFLLPAMERLLATKGKHPAVLILTPTRELALQVEKQYAQLAGKSLPQAATLIGGASENNQIRDLKAGARLIVATPGRLEDFLERRLIDLKRIEVLVLDEADRMLDMGFIPAIRRIVAKLPRQRQTMCFSATIDPAVAHLLDEILTNPVRLSFGSTQQTSSSVRLIAYEVDADQKAALVHRVVTAEEGQSLVFVGTKRRTEHVAKRLDRAGISVAVLHGDRSQSQRNRALEDFQRGRARVLVATDVASRGIHVDNIAQVINYDMPKMTEDFIHRAGRTGRAGATGVAATFYTPLERREFNRFEKTLNRKIERVMIASDSGLDREERGQMVNHAPVLRMATVAPTKPRGKGKGKSKAPAAAAPQQRVYLEGERLQRYAN

SEQ ID NO: 20297 - protein, 525 aa, Acidobacterium capsulatum ATCC 51196
MKIVLAEKVSPATLAVFAAEPGWKIVTHDQVKDLHAEVADADGLVVRSAVQVDDALMAAAPKLRVVGRAGVGVDNVDAEAATRRGIVVMNTPGANAVAVAELTLALMIGLARNLPRANATMHAGKWEKKSLQGVELRGKTLGVLGLGRIGLEVARRARSFGMEIIGHDPFVSAAVARENAVRLVSTEDLFREADYLTLHVGLTPQTHGIINETTLATMKKGVRIINCARGELIVEAALADALKSGQVGGAALDVFVTEPPKESPFFGLDNVILTPHIAGSTAEAQEAVGIQIAKQMREYLKLGVVQNAVNLPSLTHEEYLELSPYMTLGEKLGAFLGQFSTGSIESIEISYNGRIAEGKTDLIRNAAIAGVLGHSEQVNRINAASVAEERGIRLHEQKKENAAGGSGNVLKIALHSASGKVSASGTVLHGNSARLLNLDGIDIEAPLEGMLLSLRNLDVPGVIGRVGTILGDHQINIGNFALGRSDRDHHGTALAVIQVDGAVTEQVLQALRGVEAITEVRLVTL

SEQ ID NO: 20298 - protein, 874 aa, Acidobacterium capsulatum ATCC 51196
MAIRWDKFTVKSQEAVQAASGIASEHGNPELLTLHLLAALLADQESIVVPVLEKVGVPTAQLRTKVEEAIAKLPKVSGASAQPGIAATLNKVFDQAFKEAENFKDDYVSTEHLLLAMAAQKNDGAQLLLASVGATYDAILKSLSSVRGSQRVTDQNPEGKFQALEKYAKDLTELARRGKLDPVIGRDEEIRRVVQVLSRRTKNNPVLIGEPGVGKTAIVEGLARRIVHGDVPEILREKRVISLDLGSMLAGAKFRGEFEDRLKAVLKEIEESNGQIILFIDELHTLVGAGAAEGAIDASNMLKPALARGELRAIGATTLNEYRKYIEKDAALERRFQIVFVGEPNVEDTIAILRGLKERYEAHHKVRIKDAAIVSAATLSHRYISDRFLPDKAIDLVDEAAASLAIQIGSVPTEIDQLEREATSLEIERTALKRETDQNSKDRLEVVERELAALKEQATGLRARWQKEREAITQLSELKNRVEALRFEADEQTRRGNLERAAQIQYGELPRLEAEVQKLNAQQEGAENAQRMLKEEVDEEDIARVVSKWTGIPVAKMLEGEVQKLVQMEERLRDRVVGQDEALSTVANAIRRSRAGLSDPKRPIGSFIFLGPTGVGKTETARALAEFLFDDEQAMIRIDMSEYMEKHAVARLIGAPPGYVGYDEGGQLTEAVRRRPYSVVLFDEIEKAHPDVFNVLLQVLDDGRLTDSKGRTVDFKNTVLIMTSNLGAQALHAEALQDEAAFEQAREQVMEVLRQSFRPEFLNRVDDIVIFRPLGEAQLVHIVDLRLKDLEQLLKERHITIELTDAARHQLFLSGYDRAYGARPLKRAMQRLIQDPLAMRILDGEVLHGDHVRIDADPLKNQLSFEVTGREAVK

SEQ ID NO: 20299 - protein, 428 aa, Acidobacterium capsulatum ATCC 51196
MSTATTTNGASSSAAIAGIPVPAGVKLPIYMDNHATTRMDPRVLEAMMPYFTETFGNAASRNHSFGWEAEQAVEQARAQIAKLIGATSKEIIFTSGATESNNLAIKGIAEMYRERGNHIITQATEHKAVLDTCKRLEKSGYQVTYLPVKADGLIDIEDLKNAITDKTILVTIMIANNEIGVVQPVEEIGKLCHERGVLFHTDGVQAVGKIPVDVNAMQIDALSLTAHKIYGPKGVGALYVRRRNPRVQISEQINGGGHERGMRSGTLNVPGIVGLGKACELAGEEMESEAKRLTAMRDRLKHKLESSLDYIHVNGTMERHLPGNLNMSFVYVEGESLLMGINDVAVSSGSACTSATLEPSYVLKALGLGDDVAHSSIRFGLGRFNTDAEVDYVADKVIDVVQKLRELSPLYEMVKEGIDLTKIEWAAH

SEQ ID NO: 20300 - protein, 394 aa, Acidobacterium capsulatum ATCC 51196
MPEAVIVSAVRTPAGKAPRGRLAAVRPDDLAAIAIQGALARVPALDSREIEDIIVGCAMPEAEQGMNVARIAALRAGLPVETAAMTVNRFCSSGLQTIALAAQQILTGQSRVVLAGGTESMSMVPMGGNKVSANPWLIDHHPDVYLSMGLTAENLARKFGITREDADTFALASHQKALAAIEQGIFAGEIVPVTVTNTSPGASPAHVAQASALFDTDEGPRADTSLEALAKLKPAFHAQGTVTPGNSSQTSDGAAMAVVMEAARARELGLAPLARFVSFATAGCAPEEMGLGPVFAIPKALRQAGLTLEQIDRIELNEAFAAQSLAVIREAHLDPGKVNVHGGAIALGHPLGCTGAKLTATLLHSMRRDRLRYGLVTMCVGGGMGAAGIFENLA

SEQ ID NO: 20301 - protein, 487 aa, Acidobacterium capsulatum ATCC 51196
MKEREVVIVSNRLPLSIKHDQGVAKARRSSGGLVTALLPILRDKGGVWIGNAGTHEDEHATELLQQEARNEGFACVPIYVTEQEDRNFYEGFSNQVLWPLFHDFIGECRFEPAYWEFYRKVNAKFADAVMSVYRGDQTLWVHDYQLMHVAAALRERGCKGRVAFFLHTPFPSYDVFAKLPWRRDLLLSLLQYDLIGLQTERDTRNLVSCLRRLVPEAVMTSTHTAHHVMFQGRRIVIQDFPISIDFEEFAQAAREPEVEERTRSIIARMGMGQMIFGVDRQDYTKGIPHRLRAYGALLRRRPDLVGRVRLVQIVVPSRQNIPGYEALKARIEHLVASINGEFTQPGWVPIHYIHRSIPREELLALYRAANVALVTPLKDGMNLVAKEFCATRIDDHGVLVLSEFAGAAAEMYRGALLVNPFDLEGVAGALEQALEMPLNQQQERMRKLRRFLKHANVHRWVNEFMQVIEHVNHHGSTRSNHGSARSK

SEQ ID NO: 20302 - protein, 1482 aa, Acidobacterium capsulatum ATCC 51196
MEQRSSTAPASLSGGSHFSLLDARFDHESCGVGFIAALRNTPTHDVLAMALTALSRLAHRGAVAADGLSSDGIGITTGIPRDFLLTETGLTLAAGRPLGVGMLFLPADFAEAERELVAALAEQQLEVLGWRDVPTRPEVLGRIALSSMPVIRQVLITPKYASTPLDELDRRAYLARKQFERSHAKGYVCSLGFSTLIYKSMCAGRLLPEFFPDLADERYTTAFAVFHQRFATNVAPSWDRAQPFRMIGHNGEINTIWGNRARMDARAATLPDELKPIYTADGSDSTSLDETIELLTRNGRTVAESVRMVLPPAVTPKDSAFLQYNGDCMEPWDGPAAVVFTDGRLVGAALDRNGLRPCRFFLTDDELVIVGSEAGLVDLDPEHVVHSGRLGPGQMLLADLVRHALYEDEQVQALFDGVAPLYEELLEDATLEDDVPVTHLEASEVSRLQLGFGYTREDVNMVLKPMVVDAKDAVWSMGDDTPLAPLARAPRPVYAFFRQRFAQVTNPPIDSLRESCVIRLHTRLGPWPHILDKTEPLPGLSLASPILSLGQMEALRQRRHVLADEMPLAVLDCVFHPECNLVTALDDLCAKAHELVRGGAAILLLSDRSCGVNAMPLPMAMALGAVHHSLIRSGLRTNVGLAVEAGDCRDLHHVAVLLGMGAGAVCPWLALESARQLQPESGEANLLHAMDAGLAKVMSKMGISVVDSYRSAHLFDCLGLSHDVVEKCFAGTPAPIGGVGFQQIESNLRELWLGGYHDGGQAEEGKKTDLPDYGWVRFRKAERAEPHSWQPQTVRLLQSVVGTAKSSTVAVLEPEARAQAWAAFRTQTVEQTPTVLRELLQIRAAASPLPMEQIEPVPQITHRFIASAMSLGSLSPEAHQTITAAMNMLGARSNTGEGGEDPEVYQPKAELPLLNEKVPATLLNNRIKQVASARFGVTAEYLAHAEEIEIKIAQGAKPGEGGQLPGHKVTELIARLRHAQPGVQLISPPPHHDIYSIEDLAQLIFDLRRVSPKASIGVKLVAECGVGTVAAGVAKAYADYIVIAGHAGGTGASPLTSIKYAGDPWELGLAETQQVLLATGLRGRVRLRADGGLRTARDVVIAAMLGADEFAFGTAVLVALGCDMARQCHLNTCPTGIATQRPELRAKFRGRPEHLVRLFEELARDIQQLLAELGLPSLDAAIGRTDLLEQVHFDGCLDLRAMLAAKPEGEIRWQGKGNARPEEHAALDDAWLEPGLAAYRAGEGLRIDTRVSNEDRTLGARLAGQIAALRTAGVESDGLLDFRLKGIAGQSFGAFAVAPMQLTLEGMANDFVGKGLSGGEIILRGQGRAALHSELHTILGNVALYGATSGALFAAGCAGERFGVRNSGALAVVEGVGDHGCEYMTGGLVVVLGSTGTNFGAGMTGGLAWIYDEDGAFVEKQRFHTSFLHPEPFATLDAEAQASIHNLVSLHAEKTGSTRAYRLLASWDELAPRFVRMTPKPQ

SEQ ID NO: 20303 - protein, 565 aa, Acidobacterium capsulatum ATCC 51196
MAETAVVKETKAQKMERLKREKNPWDYFDEVRQFAREGRDSVVPEWASAYFKWWGVYTQGDGVGVTGGKGGEGLATQYFMMRIGLPNGILRSDQLRVIADLTQRYARDLADITVRQNIQLHWLTIESLPEVVDALERVGLSPRGACGDVVRNVTGCPLAGLAADELTDASPLAIDLATALIGNSEFYNLPRKFKICATGCSSWCCYPEINDIAFTATRRGDQIGYSVRVGGGLSNEPHLAVKLDAWVEPGQVLDVARVITEIFRDQQALRESRDRARIKYLFLKEGWTAESFLAELHARLGYQLAAGVEEQVPDEVHRDHVGIHAQKQPGLSYVGASVLRGRLTGLQLHQAADLADRFGNGELRATTMQNLIFVNVPTGRAAELAREIERIGMRVEGSQFWRGGVACTGTEFCKLAITETKGFLRWLVDELEERLPAFDQQLKLHVTGCPNSCGQHWIADIGLEGKKIKHNGQLVDAYYFCVGGSVGKYAGVSRPVGYRAPATEVPAALERLLSHYVQHREPQENLRAWFSRHEDSTLRALLAGETVAPVERDLPTGRVPQGVAG

SEQ ID NO: 20304 - protein, 445 aa, Acidobacterium capsulatum ATCC 51196
MSVILEHLPTGQKVGIAFSGGLDTSAALHWMKQKGALPYAYTANLGQPDETDYEAIPRKALEYGAEIARLIDCREPLVREGIAALQSGAFHITTAGVTYFNTTPIGRAVTGTMLVTAMKEDDVNIWGDGSTFKGNDIERFYRYGLLVNPDLKVYKPWLDSAFIDELGGRAEMSEFLQKSGFDYKMSAEKAYSTDSNILGATHEAKDLELLSSSIRIVQPIMGVAFWRDDVAVKAEEVTVRFEEGFPVALNGTTYADPVELMLEANRIGGRHGLGMSDQIENRIIEAKSRGIYEAPGMALLFAAYERLITGIHNEDTIEQYHENGRKLGRLLYQGRWFDSQAIMLRESAQRWVARPITGEVTLELRRGNDYSILNTDSPNLTFKPERLTMEKGESTFSPRDRIGQLTMRNLDITDTREKLLTYAKSGLITLSHGSELPKLNSGEKN

SEQ ID NO: 20305 - protein, 87 aa, Acidobacterium capsulatum ATCC 51196
MSSQGKRGADWAIKTRGVPVKENGVVKWFNGAKGYGFIQRSTGEDVFVHFSAIQDSGYKTLNEGEAVEFECQQGPKGLNAANVVRGS

SEQ ID NO: 20306 - protein, 378 aa, Acidobacterium capsulatum ATCC 51196
MPPIYLDCNASTPIDPAVFDAMRPWLVNDFGNSSSRTHEFGLKAKRAVALARKQIASAFGVDQEEVVFTSGATESNNLAILGLASWGEQTGRKHLITSAMEHSAVLEPIAWLRDNAGFSVTELPASSDGIIDPDDLRRSLRPDTALVSLMQVNNETGVIQPLRELAIVLTDHPAYFHVDAAQGFGKEFTEISARRIDLISCTGHKIYGPQGIGALVVKRTHERPIPLKPLTFGGGHERGLRPGTLPTHLIVGFGSAASLAVADHKARESKNRSFRKQLFEGLDGLPLTTHGAPNLVIPHVTNLSIDGVSSEAAMVALRQYIAISNGSACSSAKYEPSHVLRAMGLSNEQLDGAMRFSWCHLTPEVDWRAVRALLAEFL

SEQ ID NO: 20307 - protein, 396 aa, Acidobacterium capsulatum ATCC 51196
MATTATRVFAERIGRIEVSATMAVTAEAAKLRAQGHKLVDFGAGEPHFATPQHIKDAAIQAIHDNFTRYTVVSGIPEVRKAIVERHAADFGTDYAPEECVFTTGGKLALFNAIQVLIDHGDEVILPVPYWVSYKDIIQYAGGKVVYLETDEAENFRITADAIEAAITPRTKAIILNSPSNPAGSVVSTADLERIVRLAHARGIFLMLDECYSYLQFNGEMISGASFKEAKEHVIVLGSLSKTYAMTGWRAGYALGPKAIIAAMSKLQSQSTSSTASMVQKASLAAVAGPQECVAEMRADYIKLRDRILARLAEIPGITCTKPEGAFYVYPNVSAYLGRPGAQTAMELASRLLQEAHVVSVPGEAFGTQSHIRLSYAVSHDNVEEGLARMKQFFAKL

SEQ ID NO: 20308 - protein, 388 aa, Acidobacterium capsulatum ATCC 51196
MASASALRLSEISPLIVQSEIRSMSVECDRMGGVNLAQGVCDTGVPAPVAERALAAIEQGHNIYTRLDGIAVLRDAIAQKALRYNGIHADPESEVLVTSGATGAFYAACLALLNPGDEVLLFEPFYGYHANTLRAQRAVPVAVPLENGNWAIDFDRLRRAITPRTRALLINTPSNPCGKVFTREELAQIAAIVEEHDLIVFTDEIYEYFVFEGAQHVSFATLPGMASRTITISGLSKTFSITGWRVGYLIADRSVLGTIGYFHDLTYVCAPAPLQHGAAAGLVALPDEYYQAMARDYQSKRDLLCGALTRMGLTPSIPAGAYYVLADASRIAGANAREKARTLLAATGVAAVAGTAFFAEGRGENLLRFCFAKREEDLQRACDLLGKL

SEQ ID NO: 20309 - protein, 598 aa, Acidobacterium capsulatum ATCC 51196
MSRKESSAAKEKKAAAAGADPRTNAESAKLTGAEILWAVLAGEGVDTVFGYPGGAILPVYDALRKFPIRHVLVRHEQGAVHMADGYARASGKVGVAVATSGPGATNMVTGLATAMLDSIPLVCISGQVSSKVLGSDAFQEVDITGVTLPVTKHSYLITRAEDIAPALREAFLIASSGRPGPVLLDITKDAQQAVADYDFEAAAAEARRHHPMRRVEEDAVSQATELIRNAKRPVILAGHGVLQSGAEEQVRTLAERMQIPVAQTLLGLGGFPATHPLSLGMMGMHGESWVNEAIQKADLLIACGMRFDDRVTGTLATYAPNAKKIHIEIDPSEINKNVKADVALIGDLAEVLEQLLPRLAARKDSPWLREIAASKGSAAVRDITNIPDNGHLYAAHVIHDIWRVTDGKAIVVTDVGQHQMWEAQYYKHDEPRTLITSGGLGTMGFALPAAIGAKIACPEREVWVVAGDGGFQMTAAELSTAAQENVDLNIAVINNGYLGMVRQWQEFFYEKNYESSPILSPDFVKLAEAHGIRGAAVKTRPEVVPTVEEARKTKAPFLINFMVEKEDSVYPMIPTGAALHEMIRRPEHNPLVETAEEQ

SEQ ID NO: 20310 - protein, 670 aa, Acidobacterium capsulatum ATCC 51196
MPPQQSKPENRQKSPQAEPAAKKPAQHQDDDVAGKAYDSRLMGRLLKYLGPYKWTAIIATVAVILKAGADVLGPYLTKVAVDKYMTHAPAAKQSFLAKYLSSNAWHGITQLALIYIGALVFSYVLEALQTYIVQWTGQKVMFDLRREIFRHLQRMDVGFYDRNPVGRLVTRLTNDVDALNEMFTTGVFAIFEDIFVLAGIVGVMLSMSWWLALVAFAVLPFILLVTRIFRKYVRDSYRRIRTALARINSYSQEHVSGMSIVQLFNREKPAYQSFESINKSYLDAFKDAIMAYALYYPAVEILSSIAIALIIWQGGNGVIRGAVDLGVLVAFMQYAQRFFRPIQDLSEKYNILQAAMAASERIFKLLDTEPEIVSPAQPAAAQPSGPEANSEAGRIEFRNVWFTYQRLTPQQQQQIATATPAELEAMSEIEWILRGVSFTIEPGQTAAIVGHTGAGKTTLTGLMMRFYDIQHGSVLVNGIDVRQHDLTRLRQNFGVVLQDPFLFSGTIADNIRLGSGHITDDELRLAAEQVNVDEFIQTLPAQYQEMLRERGNSLSTGQKQLINFARALAHNPRILILDEATSSVDTDTELRVRTALERMVRDRTSVIVAHRLSTVQRADVILVMHRGHLREMGSHQELLALHGLYWKLYQLQYKDQEMPTLGMSPSLANS

SEQ ID NO: 20311 - protein, 423 aa, Acidobacterium capsulatum ATCC 51196
MGIMIGSGIFLMAGSIARQLHSIAMVIAVWTLGGLMSLAGALSISELGAAFPSAGGLYVYLEEAYGSAVGFLYGWSAIVLIYSNSVAAMAAAIGFYAAPLLGLGAGWQKGLQVLCIVFFTAVNSLGVSTGKRVQNTLTALKIGGLAAMMVVLYVKGSAAHFGRNFFGPAHAGFSLTAIGVALVAVLWAYDGWHIVSFTAGEIRNPARTLPRALLLGVVLTTIIYLLANVAYYAVLSPGAIRGTDRVAALAVQHALGAKGGLLISILIIVSILGAINGVMMGAPRVNLAMARDGLFFRPFARVSRKSHAPVLATVAQGAFAMLFTTLGSFRELFTSYVFTSWIFYGLCVAAVILLRYRRPALERPYRCPLYPITPAFFLLAACGVVVTNFVVNFRQALLGVGLILLGLPLYFLFRYMERNRRPA

SEQ ID NO: 20312 - protein, 162 aa, Trema tomentosa
MSSSEVDKVFTEEQEALVVKSWAVMKKNSAELGLKFFLKIFEIAPSAKNLFSYLKDSPIPLEQNPKLKPHAMTVFVMTCESAVQLRKAGKVTVRESNLKRLGAIHFKNGVVNEHFEVTRFALLETIKEAVPEMWSPEMKNAWGEAYDQLVAAIKSEMKPSST

SEQ ID NO: 20313 - protein, 298 aa, Arabidopsis thaliana
MKKGTKRKIEIKKRETKEQRAVTCSKRRQTVFSKAADLCLISGANIAVFVTSPSDSSDVVYSFSGYSSAYEIADCYLNRKPPPKIVNPAGSKLGFWWEDPDLYHSCDDLSELSIIEDRLQRMKKHVMACLEKEEKSQLVSSFDQNPNSTCSLDVEDCDGSSYSQIASTFTPNSVNEYCSDQTFSSFHGDQNPNLSSPSFDQDCYSSLYQICGESSSQVASFDQNPSSEIQGFETEEEINQINLLLQETQTEANVNLDDEICFWNDLSNDDVFGLNSYFGLDNTNAMINFGDSDFRRHV

SEQ ID NO: 20314 - protein, 395 aa, Streptomyces violaceoruber
MKTVVVGAGIGGLAAALGLIRSGAQVEVYERGDRLRTGGNGVILWPGATGILSELGVDTKEFGKPMHRGELLTQDGTLLVWTDMRQVGEAYGHDTLLVPRGGVVERLGAALPEGTVRFGSHCTGVRPVPSGGALVSFADGSEVHADVVIGADGFRSALRRTLHPGSVARYTGVATWHGITPPPPGPLTALADSHTVRTYFGRLGIFVVHSVGDGLLHWAFEGPWRPPTADDGTAEAPRTPQIPLLRRWFGDWDPAAAAVLDAVDEDDVHVFPHALHDVLRQWGRGPLTLMGDAAHAIPPRAGMGANQALEDAWVLSHALTDGRHDPEAALRGYEAARVRRVRRVAGSARWMSRSNNMLLMLRLIRRAVPMNKLTHANVRGSSNYLNGHRFTPAGP

SEQ ID NO: 20315 - protein, 151 aa, Casuarina glauca
ALTEKQEALLKQSWEVLKQNIPAHSLRLFALIIEAAPESKYVFSFLKDSNEIPENNPKLKAHAAVIFKTICESATELRQKGHAVWDNNTLKRLGSIHLKNKITDPHFEVMKGALLGTIKEAIKENWSDEMGQAWTEAYNQLVATIKAEMKE

SEQ ID NO: 20316 - protein, 667 aa, Nicotiana sp.
MAAAAPSPSSSAFSKTLSPSSSTSSTLLPRSTFPFPHHPHKTTPPPLHLTHTHIHIHSQRRRFTISNVISTNQKVSQTEKTETFVSRFAPDEPRKGSDVLVEALEREGVTDVFAYPGGASMEIHQALTRSSIIRNVLPRHEQGGVFAAEGYARATGFPGVCIATSGPGATNLVSGLADALLDSVPIVAITGQVPRRMIGTDAFQETPIVEVTRSITKHNYLVMDVEDIPRVVREAFFLARSGRPGPVLIDVPKDIQQQLVIPDWDQPMRLPGYMSRLPKLPNEMLLEQIVRLISESKKPVLYVGGGCSQSSEDLRRFVELTGIPVASTLMGLGAFPTGDELSLSMLGMHGTVYANYAVDSSDLLLAFGVRFDDRVTGKLEAFASRAKIVHIDIDSAEIGKNKQPHVSICADIKLALQGLNSILESKEGKLKLDFSAWRQELTEQKVKHPLNFKTFGDAIPPQYAIQVLDELTNGNAIISTGVGQHQMWAAQYYKYRKPRQWLTSGGLGAMGFGLPAAIGAAVGRPDEVVVDIDGDGSFIMNVQELATIKVENLPVKIMLLNNQHLGMVVQWEDRFYKANRAHTYLGNPSNEAEIFPNMLKFAEACGNPAARVTHRDDLRAAIQKMLDTPGPYLLDVIVPHQEHVLPMIPSGGAFKDVITEGDGRSSY

SEQ ID NO: 20317 - protein, 664 aa, Nicotiana sp.
MAAAAAAPSPSFSKTLSSSSSKSSTLLPRSTFPFPHHPHKTTPPPLHLTPTHIHSQRRRFTISNVISTTQKVSETQKAETFVSRFAPDEPRKGSDVLVEALEREGVTDVFAYPGGASMEIHQALTRSSIIRNVLPRHEQGGVFAAEGYARATGFPGVCIATSGPGATNLVSGLADALLDSVPIVAITGQVPRRMIGTDAFQETPIVEVTRSITKHNYLVMDVEDIPRVVREAFFLARSGRPGPVLIDVPKDIQQQLVIPDWDQPMRLPGYMSRLPKLPNEMLLEQIVRLISESKKPVLYVGGGCSQSSEELRRFVELTGIPVASTLMGLGAFPTGDELSLSMLGMHGTVYANYAVDSSDLLLAFGVRFDDRVTGKLEAFASRAKIVHIDIDSAEIGKNKQPHVSICADIKLALQGLNSILESKEGKLKLDFSAWRQELTVQKVKYPLNFKTFGDAIPPQYAIQVLDELTNGSAIISTGVGQHQMWAAQYYKYRKPRQWLTSGGLGAMGFGLPAAIGAAVGRPDEVVVDIDGDGSFIMNVQELATIKVENLPVKIMLLNNQHLGMVVQWEDRFYKANRAHTYLGNPSNEAEIFPNMLKFAEACGNPAARVTHRDDLRAAIQKMLDTPGPYLLDVIVPHQEHVLPMIPSGGAFKDVITEGDGRSSY

SEQ ID NO: 20318 - protein, 212 aa, Ranunculus sceleratus
TTNRQVTFCKRRNGLLKKAYELSVLCDAEVALIVFSNRGRLYEYANNSVKKTIDRYKKTCSDASTALTVSEANSLFYQQESSKMKQQIDILQNSNRHLMGEALSCLSIKELKQLESRLEKGISRIRSKKNEMLMAEIEYMQKREVDLHNDNVYLRQKISENERAQQHMNSLPGNAYEAMTSAPYDSRNFLQVNLADTKDHHYGSGSTALQLC

SEQ ID NO: 20319 - protein, 584 aa, Arabidopsis thaliana
  misc_feature (254)..(254): Xaa can be any naturally occurring amino acid
  unsure (1)..(584): unsure at all Xaa locations
FISRFAPDQPRKGADILVEALERQGVETVFAYPGGASMEIHQALTRSSSIRNVLPRHEQGGVFAAEGYARSSGKPGICIATSGPGATNLVSGLADALLDSVPLVAITGQVPRRMIGTDAFQETPIVEVTRSITKHNYLVMDVEDIPRIIEEAFFLATSGRPGPVLVDVPKDIQQQLAIPNWEQAMRLPGYMSRMPKPPEDSHLEQIVRLISESKKPVLYVGGGCLNSSDELGRFVELTGIPVATTLMGLGSYPXDDELSLHMLGMHGTVYANYAVEHSDLLLAFGVRFDDRVTGKLEAFASRAKIVHIDIDSAEIGKNKTPHVSVCGDVKLALQGMNKVLENRAEELKLDFGVWRNELNVQKQKFPLSFKTFGEAIPPQYAIKVLDELTDGKAIISTGVGQHQMWAAQFYNYKKPRQWLSSGGLGAMGFGLPAAIGASVANPDAIVVDIDGDGSFIMNVQELATIRVENLPVKVLLLNNQHLGMVMQWEDRFYKANRAHTFLGDPAQEDEIFPNMLLFAAACGIPAARVTKKADLREAIQTMLDTPGPYLLDVICPHQEHVLPMIPSGGTFNDVITEGDGRIKY

SEQ ID NO: 20320 - protein, 205 aa, uncultured Bradyrhizobium sp.
TQIKEFASFPTLEQLPLWGFDGSSTQQAEGHSSDCVLKPVACYPDAARENGVLVMCEVMMPDGKTPHPSNKRATILDDDGAWFGFEQEYFFYKDGRPLGFPEEGYPAPQGPYYTGVGYKNVGSVARKIVEEHLNLCLAAGINHEGINAEVAKGQWEFQIFGKGSKTAADQMWMARYLMLRLTESYGIDIEFHCKPLGDTDWNGSG

SEQ ID NO: 20321 - protein, 205 aa, uncultured Bradyrhizobium sp.
TQIKEFASFPTLEQLPLWGFDGSSTQQAEGHSSDCVLKPVAVFPDGARTNGVLVMCEVMMPDGKTPHASNKRATILDDAGAWFGFEQEYFFYKDGRPLGFPTSGYPAPQGPYYTGVGFSNVGDVARKIVEEHLDLCLAAGINHEGINAEVAKGQWEFQIFGKGSKTAADQMWMARYLMLRLTEKYGIDIEFHCKPLGDTDWNGSG

SEQ ID NO: 20322 - protein, 205 aa, uncultured Bradyrhizobium sp.
TQIKEFASFPTLEQLPLWGFDGSSTMQAEGHSSDCVLKPVAVFPDGARTNGVLVMCEVMMPDGKTPHPSNKRATILDDAGAWFGFEQEYFFYKDGRPLGFPEHGYPAPQGPYYTGVGYKFVGDVARKIVEEHLDLCLAAGINHEGINAEVAKGQWEFQIFGKGSKKAADEMWMARYLMLRLTEKYGIDIEFHCKPLGDTDWNGSG

SEQ ID NO: 20323 - protein, 205 aa, uncultured Bradyrhizobium sp.
TQIKEFASFPTLEQLPLWGFDGSSTMQAEGHSSDCVLKPVAVFPDGARTNGVLVMCEVMMPDGKTPHPSNKRATILDDAGAWFGFEQEYFFYKDGRPLGFPEYGYPAPQGPYYTGVGYKFVGDVARKIVEEHLDLCLAAGINHEGINAEVAKGQWEFQIFGKGSKKAADEMWMARYLMLRLTEKYGIDIEFHCKPLGDTDWNGSG

SEQ ID NO: 20324 - protein, 205 aa, uncultured Bradyrhizobium sp.
TQIKEFASFPTLEQLPLWGFDGSSTQQAEGHSSDCVLKPVAVFPDGARTNGVLVMCEVMMPDGKTPHPSNKRATILDDSGAWFGFEQEYFFYKDGRPLGFPTAGYPAPQGPYYTGVGYSNVGDVARKIVEEHLDLCLAAGINHEGINAEVAKGQWEFQIFGKGSKTAADQMWMARYLMLRLTEKYGIDIEFHCKPLGDTDWNGSG

SEQ ID NO: 20325 - protein, 205 aa, uncultured Bradyrhizobium sp.
TQIKEFASFPTLEQLPLWGFDGSSTQQAEGHSSDCVLKPVAVFPDGARTNGVLVMCEVMMPDGKTPHPSNKRATILDDAGAWFGFEQEYFFYKDGRPLGFPTAGYPAPQGPYYTGVGFSNVGDVARKIVEEHLDLCLAAGINHEGINAEVAKGQWEFQIFGKGSKTAADQMWMARYLMLRLTEKYGIDIEFHCKPLGDTDWNGSG

SEQ ID NO: 20326 - protein, 205 aa, uncultured Bradyrhizobium sp.
TQIKEFASFPTLEQLPLWGFDGSSTQQAEGHSSDCVLKPVAVFPDGARTNGVLVMCEVMMPDGKTPHPSNKRATILDDSGAWFGFEQEYFFYKNGRPLGFPESGYPAPQGPYYTGVGYSNVGDVARKIVEEHLDLCLAAGINHEGINAEVAKGQWEFQIFGKGSKTAADQMWMARYLMLRLTEKYGIDIEFHCKPLGDTDWNGSG

SEQ ID NO: 20327 - protein, 205 aa, uncultured Sinorhizobium sp.
TQIKEFDAFPALEQLPLWGFDGSSTNQAEGRSSDCVLKPVAVYPDPVRTNGVLVMCEVMMPDGKTPHPSNSRATILDDEGAWFGFEQEYFFYKNGRPLGFPEQGYPAPQGPYYTGVGYSNVGDVARKIVEEHLDICLAAGINHEGINAEVAKGQWEFQVFGKGSKRAADEVWMARYLLQRLTEKYGIDVEYHCKPLGDTDWNGSG

SEQ ID NO: 20328 - protein, 205 aa, uncultured Bradyrhizobium sp.
TQIKEFASFPTLEQLPLWGFDGSSTQQAEGHSSDCVLKPVAVFPDAARTNGVLVMCEVMMPDGKTPHASNKRATILDDAGAWFGFEQEYFFYKDGRPLGFPTAGYPAPQGPYYTGVGYSNVGDVARKIVEEHLDLCLAAGINHEGINAEVAKGQWEFQIFGKGSKTAADQMWMARYLMLRLTEKYGIDIEFHCKPLGDTDWNGSG

SEQ ID NO: 20329 - protein, 205 aa, uncultured Bradyrhizobium sp.
TQIKEFASFRTLEQLPLWGFDGSSTQQAEGHSSDCVLKPVAVFPDGARTHGVLVMCEVMMPDGKTPHPSNKRATILDDSGAWFGFEQEYFFYKNGRPLGFPESGYPAPQGPYYTGVGYSNVGDVARKIVEEHLDLCLAAGINHEGINAEVAKGQWEFQIFGKGSKTAADQMWMARYLMLRLTEKYGIDIEFHCKPLGDTDWNGSG

SEQ ID NO: 20330 - protein, 205 aa, uncultured Bradyrhizobium sp.
TQIKEFASFPTLEQLPLWGFDGSSTQQAEGHSSDCVLKPVAVFPDGARTNGVLVMCEVMMPDGKTPHPSNKRATILDDAGAWFGFEQEYFFYKDGRPLGFPEYGYPAPQGPYYTGVGYKFVGDVARKIVEEHLDLCLAAGINHEGINAEVAKGQWEFQIFGKGSKKAADEMWMARYLMLRLTEKYGIDIEFHCKPLGDTDWNGSG

SEQ ID NO: 20331 - protein, 637 aa, Vibrio alginolyticus
MGKIIGIDLGTTNSCVAVLDGDKPRVIENAEGERTTASVIAYTDGETLVGQPAKRQAVTNPENTLFAIKRLIGRRFEDEEVQRDIEIMPYKIVKADNGDAWVEAKGQKMAAPQVSAEVLKKMKKTAEDFLGEEVTGAVIAVPAYFNDAQRQATKDAGRIAGLEVKRIINEPTAAALAYGLDKKGGDRTIAVYDLGGGTFDISIIEIDEVEGEKTLEVLATNGDTHLGGEDFDNRLINYLVDEFNKEQGINLKNDPLAMQRVKEAAEKAKIELSSTSQTDVNLPYVTADATGPKHMNIKVTRAKLESLVEDLVQRSLEPLKVALADADLSVNDITDVILVGGQTRMPMVQAKVAEFFGKEARRDVNPDEAVAMGAAVQGGVLAGDVKDVLLLDVTPLSLGIETMGGVMTKLVEKNTTIPTKANQVFSTAEDNQSAVTIHVLQGERKQAMYNKSLGQFNLEGIQPAPRGMPQIEVTFDLDADGILHVSAKDKQTGKEQKITIQASGGLSDEDIEKMVQEAEANKEADKKFEELATARNQADQMIHGTRKQVEEAGEALPAEEKEKIEAAISELETARKGEDKEAIDAKVQALMTASQKLMEIAQQQAQAQQAQGADAGAQSKEDDVVDAEFEEVKDDKK

SEQ ID NO: 20332 - protein, 189 aa, Rhizobium sullae
LEQLPLWGFDGSSTMQAEGRSSDCVLKPVALYPDPARTNGVLVMCEVMMPDGVTPHPSNSRATILDDEDAWFGFEQEYFFYEDGRPLGFPEQGYPAPQGPYYTGVGYKNVGSVAREIVEEHLDLCLAAGINHEGINAEVAKGQWEFQIFGKGSKRAADQIWMARYLLLRLCEKYGIDIEFHCKPLGDTD

SEQ ID NO: 20333 - protein, 176 aa, Agrobacterium rhizogenes
TLQAEGRSSDCVLKPVAIYPDPARTNGALVMCEVMMPDGVTPHPSNSRATILDDEDAWFGFEQEYFFYKDGRPLGFPEAGYPAPQGPYYTGVGYSNVGDVAREIVEEHLDLCLEAGINHEGINAEVAKGQWEFQIFGKGSKRAADQIWMARYLLQRLTEKYGIDIEFHCKPLGDTD

SEQ ID NO: 20334 - protein, 220 aa, Nicotiana tabacum
MNICTNKSSSGVKKGAWTEEEDVLLKKCIEKYGEGKWHQVPLRAGLNRCRKSCRLRWLNYLRPHIKRGDFSFDEVDLILRLHKLLGNRWSLIAGRLPGRTANDVKNYWNSHLRKKLIAPHDQKESKQKAKKITIFRPRPRTFSKTNTCVKSNTNTVDKDIEGSSEIIRFNDNLKPTTEELTDDGIQWWADLLANNYNNNGIEEADNSSPTLLHEEMPLLS

SEQ ID NO: 20335 - protein, 178 aa, Oryza glumipatula
MAGSGRDDPLVVGRIVGDVLDPFVRITNLSVSYGARIVSNGCELKPSMVTQQPRVVVGGNDMRTFYTLVMVDPDAPSPSNPNLREYLHWLVTDIPGTTGTIFGQEVMCYESPRPTMGIHRLVFVLFQQLGRQTVYAPGWRQNFNTKDFAELYNLGSPVAAVYFNCQREAGSGGRRIYP

SEQ ID NO: 20336 - protein, 179 aa, Oryza glumipatula
MARSGRDRDPLVVGRVVGDVLDAFVRSTNLKVTYGSKTVSNGCELKPSMVTHQPRVEVGGNDMRTFYTLVMVDPDAPSPSDPNLREYLHWLVTDIPGTTAASFGQEVMCYESPRPTMGIHRLVFVLFQQLGRQTVYAPGWRQNFNTKDFAELYNLGSPVAAVYFNCQREAGSGGRRIYP

SEQ ID NO: 20337 - protein, 226 aa, Juglans nigra
MSAMVSALTQVMGTIEDQQSSLVQSTPLTIHEAGPVKEEVPDSSQPVQDQENARRRHYRGVRQRPWGKWAAEIRDPKKAARVWLGTFETAEDAALAYDRAALRFKGTKAKLNFPERVQGTSEFGYPSGFGNTSVSQSAVPVQNPRPVVNPPPSTLPQESTFPGLYQYAQLLSSSDVEFPYYTSSLFNQESFASQFSSFSSPSSAASSHHPHQERQDQEEDDKGRQF

SEQ ID NO: 20338 - protein, 590 aa, Solanum tuberosum
MLRSFTSKRSLQSLLHHRRCRQNPQFPIFNPRLFSSSPGPPSSDAELRKYIGYTLLVLGSAAATYYSFPFSENARDKKAQLFRYAPLPDDLHTVSNWSGTHEVRTRTFLQPESIEDLEGIVKEANVRKHKIRPVGSGLSPNGIGLTRAGMVNLALMDKVLSVDKEKKRVTVQAGIRVQQLVDEIKEFGITLQNFASIREQQIGGIVQVGAHGTGARLPPIDEQVISMKLVTPAKGTIEISKEKDPELFYLARCGLGGLGVVAEVTLQCVERQELVEHTFLSNMKDIKKNHKKFLSENKHVKYLYIPYTDAVVVVTCNPMSKRKGPPKNKPKYTTEEALQHVRDLYLESLTKYRGQVTDSGSPDEPEIVELSCTELRDKLLAMDPLNKEHVIKVNKAEAEYWRKSEGYRVGWSDEILGFDCGGHQWVSETCFPAGTLSKPSMKDLEYIEELMQLIEKESVPAPAPIEQRWTACSKSRMSPAYSSVDDDIFSWVGIIMYLPTMDARQRRQITEEFFHYRHMTQAQLWDHYSAFEHWAKIEVPKDKEELTALQARLKKKFPVDAYNQARKELDPNRILSNNMLEKLFPSSEAV

SEQ ID NO: 20339 - protein, 316 aa, Populus x canadensis
RSKSRTTSKPIEHPSELPKWNYDGSSTGQAPGEDSEVILYPQAIFKDPFRGGNNILVMCDTYTPQGEPIPTNKRHRAAEIFSNEKVIDEVPWFGIEQEYTLLQTNVKWPLGWPVGGYPGPQGPYYCGAGADKSFGRDISDAHYKACMYAGINISGTNGEVMPGQWEYQVGPSVGIDAGDHIWISRYILERITEQAGVVLSLDPKPIEGDWNGAGCHTNYSTKTMREEGGFEAIKKAILNLPLRHKEHISAYGEGNERRLTGKHETASIDTFSWGVANRGCSIRVGRETEKQGKGYLEDRRPASNMDPYIVTSLLAE

SEQ ID NO: 20340 - protein, 543 aa, Prunus persica
MASSIAKVLQLLCIIFFSTTCGALHNSSSSSSTNATNFNPNLSSIRSFCKSTPYPDVCFDSLKLSISINISPNIITFLLQSLQVAISEAGKLSDLFYKAGRYSNIVEKQKGAIQDCKELHQITLSSLQRSVSRVRAGNTKKLNDARAYLSAALTNKNTCLEGLDSASGPMKPALVNSLTSTYKYVSNSLSVISKPGAPKGGTNRHLLAVPTWMSRKDRRILESSGDKYDPSEVLTVAADGTGNFTTITDAVNFAPNNSYDRTIIYVKEGVYVENVEIPSYKTNIVLLGDGRDITVITGNRSVVDGWTTFRSATLAVSGEGFLARDITFENTAGPEKHQAVALRVNADFAAIYKCIINGYQDTLYVHSFRQFYRECDIFGTIDYIFGNAAVIFQGCDIVSKMPMPGQFTVITAQSRDTADEDTGISIQNCSIVATDDLYSNSSIVKSYLGRPWRVFSRTVYLESYIGDFIDPTGWRQWSGDLGLDTLYYGEYENYGPGSGTENRVKWTGYHIMEYYDAANFTVSEFIIGDEWLQATSFPYDDGI

SEQ ID NO: 20341 - protein, 256 aa, Zea mays
MSTSGARSWSPPPRPSRYESQKRRDWQTFTRYLGAHRPPLELCRCSGAHVLEFLRYLDRFGKTRVHAPSCAAYGGGGGGRPVEAAVACQCPLRQAWGSLDALVGRLRAAFEERHGARGIWTSSQQPDGGVGVGVGGGDGANPFAARAVRLYLRDVRDAQSRARGISYSRKKKKRSKQQDGAAAAGCARPPVTSVTLMPAAALPHAPPPPCPPPPLPPPYCLTGVPFEFCVYGSVLGGVTANGAPGFYLPSLFNTFG

SEQ ID NO: 20342 - protein, 483 aa, Zea mays
MADSRRSVVYDAEGGDDHERQGTAWTATSHIVAAVVGSGVLALAWTVAQLGWVVGPLVLVGFSCVTYYTSALLADCYRYPDPVHGAVNREYIDAVRCYLDRKNVVLCGCAQYVNLWGTLVGYTITASASMIAIKRVNCFHRDGYGAAGCNPSGSTYMVVFGLFQLLLSQLPSLHNIAWLSVVAVATSLGYSFISLGLCSAKWASHGGHVRGTLSGAAAVAGRVDDDKQAAFNVLLALGNIAFSYTFADVLIEIQDTLRSPPAENRTMKRASAYGLAITTVFYLALGCTGYAAFGDHAPGNILTGFAFYEPFWLVDAANVCVVLHLVGAYQVFAQPIFARLESCVACRWPDAKLINATYYVRVPPCLLLLRTSSSSPPPTLPVAPLKLVLRTIVIMFTTLVAMLLPFFNAVLGLIGALGFWPLSVYFPVSMHMARLNIRRGEIRWWMLQAMSFVCLLISVAASIGSVHDIVHNLKAAAPFNTAN

SEQ ID NO: 20343 - protein, 451 aa, Zea mays
MPDPTWTSYLIAGDDGTKREDGDEKVGSISKDLAALRRQLGRSWRRYAEVAVHLLLPDGYPHSVSSDYLNYSLWRGVQGVASQISGVLSTQALLYAVGLGKGAIPTAAAVNWVLKDGLGYLSKIMLSKFGRHFDVNPKGWRLFADFLENMAYGLEILTPVFPHLFVPIGAAAGAGRSAASLIQSATRSCFYAGFAVQRNFAEVIAKGEAQGMVSKFVGIGLGIALANHIGSSVPLALISFAGITAVHMYCNLKSYQSIQLRTLNPYRASLVFSEYLLSGQVPSVKEVNDEEPLFFNLSLGASRQSKILSAEAKDAADRICRRLQMGSKLSEIIESKEDACALFDLYKNEQYLLMDYKGKFCIVLKEGSSPEDMLKSLFHVNYLYWLERYMGFKPSNVASECRPGGRLEVSLDYAQREFSHVKHDGSDGGWVMDGLIARPLPVRIRIGDGTS

SEQ ID NO: 20344 - protein, 363 aa, Zea mays
MCGGAILSDIIPPPPPRRVTAGHLWPESKKPRRAASGRRGAPVEQHEQEEDFEADFEEFEVESGESELESEDEPKPFAAPRSALARGGLNTGAAGVDGPAANSVKRKRKNQFRGIRRRPWGKWAAEIRDPRKGVRVWLGTFNSPEEAARAYDAEARRIRGKKAKVNFPDEVPTAVSQKRRAAGPASLKAPKMDVEEEKPIIKLAVNNMTNSNAYHYPAVVGHNIIPEPFMQTQNMPFAPLVNYAALVNLSSDQGSNSFGCSDFSLENDSRTPDITSVPAPVATLAAVGESVFVQNTAGHAVASPATGNTGVDLAELEPYMNFLMDGGSDDSISTLLSCDGSQDVVSNMDLWSFEDMPMSAGFY

SEQ ID NO: 20345 - protein, 195 aa, Zea mays
MRSLLTRLFTSTHIVMASSSFSSSPSRRLVHLTRHLVSSSSGELSSVGAPAAAASDADPVKSPRSTASRVHAAVLVCLFEDPSSGPRVLLTKRASSLSSHSGEVSLPGGKVDDGDADPKATALREAKEEIGLDPALVSVVTVLEPFLSKNGLTVVPVIGMVPDKALYKPVLNKAEVEDIFDAPLEMFLKVLLSLS

SEQ ID NO: 20346 - protein, 334 aa, Zea mays
MAPAAPASATKCSSGIVISVLLPLALLMAAAGTSSAQLSTGFYSSSCPGVYDAVKSVVQSAVASEQRMGASIVRLFFHDCFVQGCDASLLLDDTPSFQGEKMANPNNGSVRGFEVIDAVKSAVEKVCPGVVSCADILAIAARDSVVILGGPTWDVKVGRRDSTTASFSGANNNIPPPTSGLANLTSLFAAQGLSQKDMVALSGAHTIGQARCTNFRAHVYNDTNIDGSFARTRQSGCPRSSSGSSGDNNLAPLDLQTPTVFDNNYYKNLVCKKGLLHSDQELFNGGATDALVQSYASGQSEFFSDFVTGMVKMGDITPLTGSGGQIRKNCRRVN

SEQ ID NO: 20347 - protein, 347 aa, Zea mays
MGSLPAPASAECAPRPQGRATVAASDLAPLFSAQRRHLDHFFDRLDMAQAAAFAQALLDAPGAVFFTGVGKSGIVARKTAQTLASLGLARAGFLAPVDALHGDIGALFPGDVLVLLSKSGASDELLALAPCARAKGAYLVSLTSAASGDDCPLAAACDLNVHLPLQGEVCPFGLAPVTSTAIQMVFGDTVIAAIMEARRLSRDQYASNHPAGKIGKTLIFKVKDVMKKQNELPLCKEGDMIMDQLTELTSKGCGCLLVVDEEHHLIGTFTDGDLRRTLKASGPAIFSLTVGEMCNRNPRTITAEAMAVEAMEKMEAPPSPVQFLPVVNENNVVCGIITLHGLVSAGL

SEQ ID NO: 20348 - protein, 256 aa, Zea mays
MNQPPPHMSRPTIIIKLILWLLWTITHLAISILNLWSHLIYSLDCYLISSGLLRKYQNLHLGRLKYLAIVVDSKEAKSTVKVKRLLCWLSSMGVKYVCLYDIEGVLKKSFEPAVNVSRDRTAGEHFGIGANIKDLHCSQREMMIDCLSGSDGKEGIAKAASLLCSTYLNGDTHGDDKRKPAFTEADMAGALKAVGCGGPEPDLLLMYGPARCHLGFPTWRLRYTEIMYMGPLKSMKYGAIVKALYNFSKKHQNYGK

SEQ ID NO: 20349 - protein, 482 aa, Zea mays
MAASVTVENLNPKVLKCEYAVRGEIVIHAQRLQQQLQTQPGSLPFDEILYCNIGNPQSLGQQPVTFFREVLALCDYPCLLEKEETKSLFSADAISRAKQILATIPGRATGAYSHSQGIKGLRDAIAAGIMSRDGFPANADDIFITDGASPGVHMMMQLLIRNEKDGILCPIPQYPLYSASIALHGGALVPYYLNEKTGWGLEISDLKMQLENARSKGIDVRALVVINPGNPTGQVLAEDNQYDIVKFCKNEGLVLLADEVYQENIYVDNKKFNSFKKIVRSMGYGEDDLPLVSLQSVSKGYYGECGKRGGYMEITGFSTPVREQIYKIASVNLCSNITGQILASLVMNPPKVGDESYASYKAEKDGILESLARRAKALEDAFNKLEGFSCNKAEGAMYLFPQIHLPQKAIEAAKAAKKAPDAFYALRLLESTGIVVVPGSGFRQVPGTWHIRCTILPQEDKIPAVISRFRAFHEAFLAEYRD

SEQ ID NO: 20350 - protein, 600 aa, Zea mays
MAASGDGDVDIDGCCGGTLFPEKSFRSWSAYGQALLETGPRLRDRVTTRSMDDTEVNEVRGRSGADMRRTLTWWDLIWFGIGAVIGSGIFVLTGQEAKNAAGPAVVVSYAISGVCAMLAVFCYTEFAVEIPVAGGSFAYLRVELGDFMAFIAAGNILLEYCIGGAAVARSWTSYFATLLNHHPDDFRVHAAALAEGYSQLDPIAVAVTAVICALAVFSTKGSSRFNYVLSILHLAVLVFVVVAGLTKANAANLTADFAPFGARGVFAAAAVLFFAYIGFDAVSTMAEETRNPAKDIPVGLMGAMTLTTIIYCLLALVLCLMQPYTEMDPDAPFSVAFTAVGMDWAKYIVAFGALKGMTSVLLVSAVGQARYLTHIARTHMVPPCLAQVHPRFGTPVYATIVMMVATAVIALFTNLTILSNLLSISTLFIFSLVAIALLVRRYYVSGETAASDRNRLVACLAVIVASSTATAAYWGMTTSGGGGWVVYVVTCAAWLAATAYLQWGVPKARAPKMWGVPLVPWLPSASIFINIFLLGSIDGASFTRFWIWTAALLVYYFFVGLHASYDTAKALAVETEAARVEEGARKPTAANTADGGCRFG

SEQ ID NO: 20351 - protein, 331 aa, Zea mays
MVVSILTHPFMAAAACVAVALALLATTSSAQLDPHFYDKACPAALPTIKRLVEEAVAAEPRMGASLLRLHFHDCFVNGCDGSILLDDTPFFTGETMAAPNANSVRGFDVIDRIKGAVNAACRGNVVSCADVVAIAARDSVVALGGPSYDVPLGRRDARTASQAAANSSIPAPTFGIDRLASNFASHGLSLQDLVALSGAHTLGFSRCTNFRDRLYNETATLDGSLAASLRAACPRAAGTGDDSLAPLDPTPARFDAAYFASLLRNRGVLHSDQQLFAGGPGVADALVRLYAADTDAFRRDFADAMVRMGSLSPLTGSNGEIRYNCRKVNYS

SEQ ID NO: 20352 - protein, 227 aa, Zea mays
MMERVEDLGLSLSLSSSLASPRTHHVATMLLRAPEKRFLEMPLLLPAKRTTEVTGEDGLRGGSDEEDGGCGIDGSRKKLRLSKDQSAVLEDSFREHPTLNPRQKAALAQQLGLRPRQVEVWFQNRRARTKLKQTEVDCEYLKRCCETLTEENRRLQKEVQELRALKLVSPHLYMHMSPPTTLTMCPSCERVSSSNGNSAAATAAARARAGAGAGAIVCHPIDRATST

SEQ ID NO: 20353 - protein, 340 aa, Zea mays
MGGAAAGTKWIHHIQRLSAAKVSAEAVERGQSRVIDASLTLIRERAKLKAELLRALGGVKASASLLGVPLGHNSSFLQGPAFAPPRIREAIWCGSTNSSTEEGKELNDPRVLTDVGDVPIHEIRDCGVEDDRLMHVISESVKTVMEEEPLRPLVLGGDHSISYPVVRAVSEKLGGPVDILHLDAHPDIYDCFEGNTYSHASSFARIMEGGYARRLLQVGLRSITKEWREQGKRFGVEQYEMRTFSKDREKLENLKLGEGVKGVYVSVDVDCLDPAFAPGVSHIEPGGLSFRNVLNILQNLQGDVVAADVVEFNPQRDTVDGMTAMVAAKLVRELTAKISK

SEQ ID NO: 20354 - protein, 311 aa, Zea mays
MELGLSLGETMADAGSDLVLGLGMGVGVRREEEAQRGRRELEFETGRCARPSPEPAVRLTLLPGLGLPWPLSSETNREVPTRGFDDVNRALSVACAGAEEDEAAVAAATAAASSSPNNSSGSFAMDFSAHGEGQAAPGADRACSRASDEDDGGSARKKLRLSKEQSAFLEESFKERATPNPKQKLALARQLNLRARQVEVWFQNRRARTKLKQTEVDCEHLKRCRETLTGENRRLHKELAELRALKAVPPLLHMHLPATTLSMCPSCERVASTSSAAPAAPAPASPSPAAGAGIAASAPDPDQRPSSSFAA

SEQ ID NO: 20355 - protein, 391 aa, Zea mays
MAAPPRATAVLAWGSGEDGQLGMGGNEEKDWAHCVEALGSYAVTAVVAGSRNSLAICEDGRLFTWGWNQRGTLGHPPKTKTESSPGPVHALAGLKIVQAAIGGWHCLAVDDNGHAYAWGGNEYGQCGEEPERKEDGTRALRRDIPTPQRCAPKLKVRQVAAGGTHSVVLTQEGHVWTWGQPWPPGDIKQISTPVRVQGLEKVRVIAVGAFHNLALTEDGILWAWGNNEYGQLGTGDTQPRSHPIRVEGLSDLSLVDIAAGGWHSTALTIQGEVYAWGRGEHGRLGFGDDKSSRMVPLKVELLAGEDIVQVSCGGTHSVALTRDGRMFSYGRGDHGRLGYGRKLTTGQPMGVDIDLPPPKTRSSRDGQWQAKYVACGGRHTLAIVVWAETTD

SEQ ID NO: 20356 - protein, 285 aa, Zea mays
  misc_feature (139)..(139): Xaa can be any naturally occurring amino acid
  unsure (1)..(285): unsure at all Xaa locations
MSTSEVWSLSDFEISKCIGEGRFGKVYLAREKQSGYVVALKVIFKAKLQKYHFHAHLRREIEIQQSLDHPNVLRLFTWFHDEERVVLVLEYAARGELYKVLRAAGRFTERTSATYVASLAGALAYCHKKQVIHRDIKPXNLLIDIEGRLKIADFGWAARSNAKRHTLCGTIDYLAPEMVEKKAHDHAVDNWTLGILCYEFLYGSPPFEADEQDDTLRRIVRVDLAFPSSPCVSSEAKDLISKLLVKDSSKRLCLEDIMKHPWIKKNADPSGSCIKQKDVTRSKLL

SEQ ID NO: 20357 - protein, 303 aa, Zea mays
MQGLAPPTSVSIHRHLPARSRARASNSVRFSPRAVSSVPPAECLQAPFHKPVADLPAAARQRGTVKWFNDTKGFGFISPEDGSEDLFVHQSSIKSEGFRSLAEGEEVEFSVSEGDDGRTKAVDVTGPDGSFVRGGGGGGGGGGGYGSRGGGGSGGGGRSYGGSWGGGRRSGGGGGPGACYKCGEPGHMARDCPSADGGGGYGGGGYGGGGYGGGGGGGGGCFKCGEPGHMARDCSSGGGGYGGGGGGGGGGCYNCGQAGHMARDCPSGGGSGGGRFGGGGGGGGDRSCYNCGEAGHIARDCPT

SEQ ID NO: 20358 - protein, 570 aa, Zea mays
MTSTTPGTFGTLANSGPVALSFPTTTSFASFLGGGSSPSRIMDSGGGVGLSKFKAMTPPSLPLSSSYPPPAQSYLHAFSGLLDSPILLTPSLFPSPTTGAIPSEPFNWMGTPENDLSGSGGVEAEQRQQYTDFAFQTAAAETSTIITGAAHTASFPQSSVLMPPSGRVGDSYSGEMLQQQPPWTYQEPTAQFEAPAAQAGNMFGTGGGYGAAPGFREQRQSHRPSSDDGYNWRKYGQKQMKGSENPRSYYKCSFPGCPTKKKVEQSPDGQVTEIVYKGTHNHPKPQSTRRGASSAPASYVVQSASDAVMPEHSWGALSGTPVVTPENSSGSFGGDGDEVNGMSSRLGGSFGADDLDDDEPDSKRWRKDGGDGDAAGCSVSVASNNRTVREPRVVVQTMSDIDVLDDGYRWRKYGQKVVKGNPNPRSYYKCTGAGCLVRKHVERACHDTRAVVTTYEGKHNHDVPPARGSASLYRAALAAQMPHQQAASYQGGLVRTDGLGVGASSQGGPMPAAERGSFALSGFGDPVGTAYSYYTNHHQEQEQQQPNQAMRYAKDEPQDCMSFFEQQLLF

SEQ ID NO: 20359 - protein, 306 aa, Zea mays
MASLFPQLAQTEHGVAGASHGAPSFLFCHGAGAATADSASLETSSGVLDTSPRGGGADSGGRKARTKPREDSASASFSFSSAHSKDSSSKGSTKNRGGKRGRSSKEVEDDEEEPKGYIHVRARRGQATDSHSLAERVRRERISERMRVLQALVPGCDKVTGKALVLDEIINYVQSLQNQVEFLSMKIASLSPVLYGFGMDTTDAFSTDDHTTQKIEGMLQLHHEALAMPPSSALSRPPFEAVANSTHATASSPRSYDELHGDGGGGGAGISFPQEDGGGYMAQTVGGPRPELFNQVVFSNHMCSFQ

SEQ ID NO: 20360 - protein, 669 aa, Zea mays
MALLSATSPAKAHLPALLVYHDEPQQHQHALPPAHPQCFGGGGGKARQRARGRCAAAMRPLDAAVAPTPTPAAGEAPRKRPRVLVAGGGIGGLVLALAARRKGYDVTVFERDLSAVRGEGQYRGPIQIQSNALAALEAIDMSVAEEVMRVGCVTGDRINGLVDGMSGSWYIKFDTFTPAAERGLPVTRVISRMTLQQILARAVGNDAILNGSHVVDFIDDGSKVTAILEDGRKFEGDLLVGADGIWSKVRKTLFGHSDATYSGYTCYTGIADFVPPDIDTVGYRVFLGHKQYFVSSDVGAGKMQWYAFHNEEAGGTDPENGKKKKLLEIFDGWCDNVIDLINATDEEAVLRRDIYDRPPTMNWGKGRVTLLGDSVHAMQPNLGQGGCMAIEDGYQLAVELENAWQESVKTETPIDIVSSLRRYEKERRLRVAIIHGLARMAAIMATTYRPYLGVGLGPLSFLTKLRIPHPGRVGGRFFIKYGMPAMLSWVLGGNSSKLEGRLLSCRLSDKANDQLYQWFEDDDALEEAMGGEWYLIATSEGNCNSLQPIHLIRDEQRSLFVGSRSDPNDSASSLSLSSPQISERHATITCKNKAFYLTDLGSEHGTWITDNEGRRYRVPPNFPVRFHPSDVIEFGSDKKAMFRVKVLNTLPYESARSGNRQQQQVLQAA

SEQ ID NO: 20361 - protein, 272 aa, Zea mays
MDPSAVSFDSGGTRRGGGAQMLLFGGGGSANSNGFFRGVPMAVLGMDDATRVGKRPFFTTHEELLEEEYYDEQAPEKKRRLTAEQVQLLERSFEEENKLEPERKTELARRLGMAPRQVAVWFQNRRARWKTKQLETDYDRLKAAYDALAADHQGLLADNDNLRAQVISLTEKLQGKETYPSATTAAQEVDQPDEHTAVSGTEELLAQQLKDNLHSSGDCTGHGTLSSEEDDGGVVSDEGCSFALPDAMFAAGFTHHGAEEVQLANWTSMFWN

SEQ ID NO: 20362 - protein, 396 aa, Zea mays
MAATAAVAGTGSSLSSRRSRSVVSSSFRAAASRFRSPRCVLGSEQLRVAHEGKRMSGAESRTAWAPKVPAPESRLAALPRELRDSRMKIFSGTANRPLAQEIAAYLGIELGKILIKRFADGEIYVQLQESVRGCDVFLIQPTCSPVNENLMELFIMIDACRRASARSITVVIPYFGYARADRKAQGREPITAKLAANLLTEAGSDRVIVCDIHSTQALGYFDIPVDHIYGQPVILDYLASKTISEDLVVVSPDVGGVVRARAFAKKLLNARLAIVDKRRQGHNMSEVMNLIGDVKGKVAILIDDMIDTAGTITSAAALLKQEGAEAVYACCTHAVFSPPAIERLSGGVFEEVIVTNSILLPEDKCFPQLTVLSMANLVGETIWHVHRDGSVSSIFQ

SEQ ID NO: 20363 - protein, 277 aa, Zea mays
MLLNPASETSVLDTIRQHLLEEPAAAEARPADESFGSLVADQWSGSLPFRTDDADDMVVFGVLQDAFAYGWLPDGSFVHVKPEPVRSPDSSSYHPCSYDGSPCFGLLDPEPPLTPGTTTPGRGQEEAAAAMARGKHYRGVRQRPWGKFAAEIRDPARNGARVWLGTYDTAEDAALAYDRAAYRMRGSRALLNFPLRIGSGDKRPSPAPPEPTTSSDSSSSSASGSHKRRKRGEAAAANMAMALVPSPSQLNRPAQPWFPAAPVEQAAMAPRVEQIVV

SEQ ID NO: 20364 - protein, 458 aa, Zea mays
  misc_feature (112)..(112): Xaa can be any naturally occurring amino acid
  unsure (1)..(458): unsure at all Xaa locations
MAVHHALEVLDGRCDDDGHPRRTGTAWTCAAHIITAVIGSGVLSLAWSVAQLGWVVGPACMFCFALVTYVSAALLADCYRRGDPGNGPRNRSYMDAVRVYLGKKHTWACGSXQYVSMYGCGVAYTITTATSIRAILKANCYHEHGHGAHCEYGGSYYMLIFGGAQLLLSFIPEFHDMAWLSIVAAVMSFSYSFIGIGLGLATTIANGTIKGSITGVRMRTPMQKVWRVSQAVGDIAFSYPYSLILLEIQDTLKSPPAENKTMKRASIGSILVTTFFYLCCGCFGYAAFGSDSPGNLLTGFGFYEPYWLIDFANACIILHLLGGYQVYSQPIFQFADRFFAERFPDSRFVNDFHTVRVACLPACRVNLLRVCFRALYVASTTAVAVAFPYFNEVLALLGALNFWPLAIYFPVEMYFVQRNVPRWSTRWVVLQTFSVVCLLVSTFALVGSIEGLITQKLG

SEQ ID NO: 20365 - protein, 424 aa, Zea mays; identical to SEQ ID NO: 487

SEQ ID NO: 20366 - protein, 698 aa, Zea mays
MDFGDDVMDGGSDAQRRKKRYHRHTPRQIQQLEAMFKECPHPDENQRMQLSRELGLEPRQIKFWFQNRRTQMKAQHERQDNCFLRAENDKIRCENIAMREALRSVICPTCGGPPVADDYFDEQKLRMENARLKEELDRVSSLTSKYLGRPITQLPPAQAALSMSSLDLSVGGLGSPSLDLDLLSGGSSGYPPFHLPMSVSEMERPMMAEMATRAMDELIRMAQAGEHLWVKAGGREVLNVDTYDSVFAKPGAASFRGPDVHVEGSRDSGLVFMSAVGLVDMFMDSSKWTEFFPAIVSKARTVDVLVNGMAGRSESLVLMYEELHVMSPVVPTREFCFLRYCRQIERGLWAIADISVDLQQHDARFGAPPSRSCRLPSGCLIADMADGSSKVTWVEHMEIEDRVPIHLLYRDLILSGAALGAHRWLAALQRACERCACLVPAGMPHRDIAVAGVTPEGKRSMMKLSQRMVSSFCASLSASQLHRWTTLSGPSDVGVRVTVHRSTDPGQPSGVVLSAATSIWLPVPCDRVFAFVRDEHRRSQWDVLSHGNPVQEVSRIPNGSHPGNCISLLRGLNASQNSMLILQESCTDGTGSLVVYAPIDIPAANVVMSGEDPSAIPLLPSGFTILPDGRPGAPSSSSAGGPLVGSPAAAGSLVTVAFQILVSSLPSSRLNAESVATVNSLISTTVEQIKAALNCASH

SEQ ID NO: 20367 - protein, 181 aa, Zea mays
MYPKAADEGAQPLATGIPFSGGGGYYQAGGAMAAAFAVQAQAPVAAWSTGLCNCFDDCHNCCVTCVCPCITFGQTAEIIDRGSTSCGTSGALYALVMLLTGCQCVYSCFYRAKMRAQYGLQVSPCSDCCVHCCCQCCALCQEYRELKKRGFDMSIGWHANMERQGRAAAAVPPHMHPGMTR

SEQ ID NO: 20368 - protein, 612 aa, Zea mays
MAAPPATTATTHHRALLPPTRTHAAATHSALRLPLRAHPHAHAQRARLTAAAAPAPAASTASLESSAAGKPTVLVAEKLGAAGLALLREFANVDCSYGLSPEDLRAKISLCDALIVRSGTKVGRDVFEASGGRLRVVGRAGVGIDNVDLAAATEHGCLVVNAPTANTVAAAEHGIALLTAMAWNIAQADASLKAGKWQRNKYVGVSLVGKTLAILGFGKVGSEVARRAKGLGMHVIAHDPYASADRARAIGVELVSMEEAMTTADFISLHMPLTPATNKMLNDEAFAKMKYGVRIINVARGGVIDEDALVRALDSGIVAQAALDVFTKEPPAPDNKLVLHVNVTVTPHLGASTVEAQEGVAIEIAEAVIGALKGELAASAVNAPMVPAEVLSELAPFVVLAEKLGHLAVQLVAGGGGIKSVKVTYASARAPDDLDTRLLRAMITKGLIEPISSVFVNLVNADFTAKQRGVRITEERIILDGSPETPIDYIQVQIANVKSKFPSAISETGEITVEGRVKDGVPHLTKVGAFQVDVSLEGSLILCRQVDQPGMIGSVGSVLGEENINVSFMSVGRIAPRKHAVMAIGVDEEPSKVTLRKIGEIPAIEEFVFLKL

SEQ ID NO: 20369 - protein, 362 aa, Zea mays
MSQRKGAMAAAVTASKHREDQEAMMVELRRGPWTLEEDNLLMNYIACHGEGRWNLLARCSGLKRTGKSCRLRWLNYLKPDIKRGNLTPEEQLLILELHSKWGNRWSRIAQHLPGRTDNEIKNYWRTRVQKQARQLRVDANSAVFRDAVRCYWMPRLLEKMAAHHHGDGELPPPLHPSHNIAGTASSRSPPAHGSQQEDPSSSAPAASGHYLQQVDPSPSTSTTSGSTTSAALPPVPCFSESELRWVVDQYGAAYGYTDDLDLDGGAGVVDDDSAAAAALDSLGLDGLDLGPADGGVYSDATLLDYLNATCAGGTTVMTMMGGVHGAAGGGDGDYGPSPWRTDELGQTARKLGDPQHQWRGGI

SEQ ID NO: 20370 - protein, 474 aa, Zea mays
MTGNASYQHLGLGVDATMRSCFASGDGSVISSADAPFFHVPEYTLHGGGGFGFGEPAADVAASSFLADGSVLLAGQLLRATALQSVSPEERHGAYYGVTGGSSSYGPSPWDVTVAHAPSRMTKQPVAGEPEGGWIHESSYYCPATWFSGDGFRDPFAGAAASELSLRLRAGSSPTAGAASVSLPDQSSEVSCSGLTHWSSGGGPGMFQLPCGGAGQVAVAARPGPMHFSQVLSRWSGYADVTQQVLDEFVIRLLQDVAGFAGGGEASCPLPSSSYCSKTTSSNPNPSVFVSSEEHHNELKNDFQKLLQIMDQRCKQCLDEIQNAASKYGSLVRPGGGGGALSTLFAQRAVSATHRRLRARITGEIAAATRGGNQPSSSSSLSLADRERSWESAFIQKHWALRQLRRGDQQSWRPQRGLPEKSVAVLKAWMFENFLRPYPRDKEKEMLAARSGLSRSQVQSPTGSSTPAFGCGSR

SEQ ID NO: 20371 - protein, 185 aa, Zea mays
MARSLSTALMRGLMRSSRASTSAAVSRPAIQQFMNYSSGLSGTPNANGDSVTTRVAADHDTHQDFQPTSKSSDMSFSDIVAQDVKEHPVVIYMKGYPDAPRCGFSALAVKVLQQYGVPISARDILSDLKLKESVKAYSNWPTFPQIFIKGEFVGGSDIILTMHQKGELKELLGDIAQKAEQSGSS

SEQ ID NO: 20372 - protein, 341 aa, Zea mays
MVMETGDPGKLLRGHSLSRVPPASPFPRLRPQGDLVRAGDERARASGMPGEEDVRKVSREDIQLVQNLIERCLQLYMNQKEVVDTLSFQAKIEPSFTEIVWQRLEEENRDFFKAYYARLMLMNQIVSFNKLLEQQHQIMNKDHHYGMPAMPSTAPNGSNSNMLNQAVPFLPDTIPSTAMQDNLWSNGSSSSIVNGAPSDDQCGYSGKVAHGLPGVMDASSSLLAAHKSTVGQFNGHDGTTTKTESDYSSNSDFGFGNETVFLEQSVGDISGGSFSSSELNGQPVGSSSYGFLSQIPCNFSLSDWTDCFSQSSEIFENYGGSPFIPSDANNIPESSARENTG

SEQ ID NO: 20373 - protein, 408 aa, Zea mays
MSKNVKALDEQEVTSQHSRAQTSDAAEEQQQQQQAVDPLARQSSIMSLTLEELQNSLCEPGRNFGSMNMDEFMANIWNAEEFQAATAGCNKEGAEREPVPVATTTGTGENGGGGGSGRGLVRQGSFALPPPLSRKTVEEVWAEISQGPADFQASAAPQPVAQPQAASGGGVAASGRQATLGEMTLEDFLVKAGVVRGAFAGHGHGVGMVPAGPMGMQHNAAPPMMYQVAAAAAPPPGAVYPVMGDGMGYHGGGYPGGVAVVPPPPPSQCVAAAASPGSSDGMSAMTQAEMMNCIGNGGVVRNGGGGARKRDFPEDGCTEKTVERRQRRMIKNRESAARSRARKQAYTVELEAELNHLKEENERLRAEERTILLSKKKMLVEKMMEQARENVSAKKVGPGLRRWGSAMW

SEQ ID NO: 20374 - protein, 539 aa, Zea mays
MKAIKAKYQVKKNWMGDPCVAGTFRWDGLTCSYAISDPPKITALNMSFSGLTGDISSAFANLKAVQSLDLSHNNLTGSIPSSLSQLPSLTTLDLTGNQLSGPIPSSLLKRIQDGSLNLIYADNPDLCTNAGDSCQTAPQGKSKLVIYYVAVPMALIVVALAVLLCCLLRRRKTRGLADVSVKPRDKTPTSLASMAADEHRLSSLRLENRRFTYEDLEMITDSFKRVIGRGGFGYVYEGFLEDGTQVAVKMRSQSSNQGAKEFLTEAQILTRIHHKNLVSMVGYCKDGVYMALVYEYMSEGSLQEHIAGKRLTWGQRLRIALESAQGLEYLHRGCNPPLIHRDVKTSNILLNAKLEAKVADFGMSKALDRDTYASTNTLVGTPGYVDPEYLETMQPSTKSDVYSFGVVLLELVTGRPPILHSPQPTSVIQWARQHLARGDIEVVVDASMGGNHDVNSVWKAAEVALQCTEQASAQRPTMGDVVAQLLECLDLEKGRSANESFCDGDDSGSATASLSHSSAFVTGRIFGTVPMVETGPATR

SEQ ID NO: 20375 - protein, 153 aa, Zea mays
MQMTRLEDLTPAPSMEHSSRPTLGFPLGTALLLLVIFALSGMFSCCYHWDKLRALLRSRHPDMFLEAEEHTAVSVASSSPPRKAVSGHKLERSGEERGVPVIIMPGDKVPKFLAMARPSPRGPEAAAEKTTECRDHQEPSVSICIHDESTVSC

SEQ ID NO: 20376 - protein, 320 aa, Zea mays
MESLGVLLLHPLDTYLEQELDRRCRLLRLWEVPHDRRGEFLRAHASSIRAVVIGGGSGFGGNPALIDDLPRLEIIACYAVGYDCVDLTRCRERGVRVTNTPDVLTDDVADLAVGLAIAALRRIPHADSYVRAGLWKANDGHYGLTTRFSGKRVGIIGLGRIGLSIAKRVEGFGCPVCYYQRTRQDAYPNYIYLPTVLQLAANSDVLVVACSLNEQSRGIVSREVIEALGPTGVLVNVGRGAHVDEPELVAALADGRLGGAGLDVFQAEPDVPQALMALDNVVLAPHMGSGTHETRMAMADLVLANLEAHALNMPLLTPVV

SEQ ID NO: 20377 - protein, 270 aa, Zea mays
MVPSEMGSVATAVSTPAADKLLHGPISGKKCKKPGPRKIHKAEREKLKRDHLNDLFVELGNMLEADRQNNGKACILTDTTRILRDLLVQVDSLRKEHSDLQNESHYVTMERDEMQDENGVLRKEISELQNELTMRVSGSPAGWGHGTARSDPPLPHSTAVFSSEQAMQPPTIASVVFPLQQPLAPSAMTKPPHAAPPLELKLFPEVASAEGHEPCEDHKAPNHVARPQARYPTQSASWPVNLFSGLPRMEDEQCSSSTSGSSREDNTDIE

SEQ ID NO: 20378 - protein, 172 aa, Zea mays
MAASAPAVRPLARAAIPIPLSARPRTARVSLLPLAPPAPAQRLALGRTGQARLPARSRSVRCLAALSPEMRETLDKVVGSSKVLLFMKGTKDFPQCGFSHTVVQILRSLDVPFETLDVLANEALRQGLKEYSSWPTFPQLYIDGEFFGGCDITVEAYKSGELQETLEKAMCS

SEQ ID NO: 20379 - protein, 416 aa, Zea mays
MAIVREEAVDTSISPRVSALRPSKTMAITDQAMALRQAGVPVIGLAAGEPDFDTPPAIAEAGMDAIRNGYTRYTPNAGTLELRKAICTKLQEENGVSYLPDEVLVSNGAKQCITQAVLAVCSPGDEVLIPAPYWVSYPEMARLADATPVILPTNISENFLLRPELLTDKINEKSRLLILCSPSNPTGSVYPKELLEKIADIVKKHPRLLVLSDEIYEHIIYQPAKHTSFASLPGMWERTLTVNGFSKAFAMTGWRLGYLAAPKHFVAACGKIQSQFTSGASSISQKAGVAALNLGYAGGEAVSTMVKAFQERRDYLVKNFKELPGVKISEPQGAFYLFIDFSAYYGSEVEGFGTIKNSESLCIFLLEKAQVALVPGDAFGDDKCIRISYAASLTTLQTAMSKLKEAVALLKPCVAA

SEQ ID NO: 20380 - protein, 301 aa, Zea mays
MCLLREMEDHSVHPKSKSNHGSLSGNGYEMKNPGHEVCDRDSSSESDRSHPEASAVSESSLDEHTSTQSDNDEDHGKDNQDTLKPVLSLGKEGSAFLAPKIDYNPSFPYIPYTADAYYGGVGVLTGYAPHAIVHPQQNDTTNSPVMLPAEPAEEEPIYVNAKQYHAILRRRQTRAKLEAQNKMVKGRKPYLRESRHRHAMKRARGSGGRFLNTKQQLQEQNQQYQASSGSMCSKTIGDSVISQSGPICTPSSDAAGASAASQDRGCLPSVGFRPTANFSEQGGGGSKLVVNGMQQRVSTIR

SEQ ID NO: 20381 - protein, 126 aa, Zea mays
MALVRLAFPVFFFLAAAEFAAGTRSPSAFVQNAIYSNRITIFSKTYCPYSMRAKHIFRDLKEDPYVVELDTRVDGRDIQSVLLDLVGRRTVPQVFVNGQHIGGSDDTVNALSNGQLQKLLGKSQSQ

SEQ ID NO: 20382 - protein, 562 aa, Zea mays
MERQSSIRLGALEKLRSFRGMEKQKSFRGIMSLERRSRDSPGKRGDTPLHLAARAGSVAHAQRILAELDRALAAEMAARQNQDGETPLYVAAEKGHAEVVREILKVCGVQTAGIKASNSFDAFHIAAKQGHLEVLKEMLQALPALAMTTNSVNATALDTAAIQGHVDIVNLLLETDASLARITRNNGKTVLHSAARMGHVEVVRSLLNKDPRIGLRTDKKGQTALHMASKAQNAEIVVELLKPDVSVIHIEDNKGNRPLHVATRKGNIIIVQTLLSVEGIDVNAVNRSGETAFAIAEKMDSVELVNILKEAGGEAAKQQQVHPPNSAKQLKETVSDIRHDVQSQFKQTRQTKMQVNQIKKRLEKLHIGGLNNAINSNTVVAVLIATVAFAAIFTVPGNFVEELSQAPPGMSLGQAYVASNPAFIVFLVFDALALFISLAVVVVQTSLIVVERRAKKRMVFVMNKLMWLACLFISVAFIALTYVVVGRDDWWLAWCTMGIGAAIMLTTLGSMCYCIVAHRLEEKNTRKIRRASASQSRGSWSRSVDSDEEILNSEYKTKMYAL

SEQ ID NO: 20383 - protein, 274 aa, Zea mays
MVADTESSDSLPGSSNAASEMPANGSIHRKSQEKPPKKTHKAEREKLKRDQLNDLFVELGSMLDLDRQNTGKATVLGDAARVLRDLITQVESLRQEQSALVSERQYVSSEKNELQEENSSLKSQISELQTELCARMRSSSLSQTSIGMSDPATHQQMQMWSSIPHLSSVAMAARPASAASPLHGQEGYSADAGQAGYAPQPQPRELQLFPGSSASSSPERERSSRLGSGQATPPSLTDSLPGQLCLSLLQPSQEASGGGGGGVMSRSREERRDG

SEQ ID NO: 20384 - protein, 246 aa, Zea mays
MSGGNAWSPLPSHGFGSESSGMANRAGEPVARTNSDGGGGGSKDSGSFECNICLDLAQDPVVTLCGHLFCWPCLYEWLHVHAHSQECPVCKAVVEEGKLVPLYGRGGSSAVPRARSVAGVEIPSRPTGQRPSTAPQPDHNNHYPHQNPWFNGAGAPPLANGRWGSYTFSAAIGGLFPLLSFQVHGFPQATAYGPAAGFPYGYGHSFHGWHGHGFPRQAPQGQQVDAYLKVLLLAVGVLVIASLIAF

SEQ ID NO: 20385 - protein, 489 aa, Zea mays
MATCATDLAPLLGPAAANATGYLCSQFADTASAVDATYLLFSAYLVFAMQLGFAMLCAGSVRAKNTMNIMLTNVLDAAAGALFYYLFGFAFAFGTPSNGFIGRHFFGLQRLPRTGFDYDFFLYQWAFAIAAAGITSGSIAERTQFVAYLIYSAFLTGFVYPVASHWFWSADGWAAAGRTSGPLLFGSGAIDFAGSGVVHMVGGIAGFWGALVEGPRIGRFDHAGRSVALRGHSASLVVLGTFLLWFGWYGFNPGSFTTILKSYGPAGTVHGQWSAVGRTAVTTTLAGSVAALTTLFGKRLQAGHWNVVDVCNGLLGGFAAITAGCSVVEPWAAVVCGFVSAWVLIGANALAARLRFDDPLEAAQLHGGCGAWGVLFTGLFARQEYVEEIYGAGRPYGLLMGGGGKLLAAQIVQIVVIAGWVSCTMGPLFYALKRLDLLRISADDEMSGMDLTRHGGFAYEDPGDNAGVGEFTLKSAQNRVEPPASSNRV

SEQ ID NO: 20386 - protein, 293 aa, Zea mays
MAMATAKLVLLMVLVAGSSSGGSAWGPLMSRLRMPTARSPVEVAKERLQEDYVVSAAAPLIHALRPLLGSAGDLGRRAGVPCDSWRLAVETYNKRDWTTVPASCERYVGHYMLGGHYRRDSRVVIDEAIAYAEGLKLGGNGKEVWVFDIDETSLSNLPYYATHGFGTKLYNATSFNEYVLEGSAPVLPETQRLFKKLVSLGIKPVFLTGRTEDQRAITVTNLRRQGYSGWMTLLLKPVGLKATAIAYKSGERQKLQDAGYVIVGNIGDQWSDILGAPEGARTFKLPDPLYYIG

SEQ ID NO: 20387 - protein, 638 aa, Zea mays
MATAATAAAALTGATTATPKSRRRAHHLATRRALAAPIRCSALSRATPTAPPATPLRPWGPNEPRKGSDILVEALERCGVRDVFAYPGGASMEIHQALTRSPVIANHLFRHEQGEAFAASGYARSSGRVGVCIATSGPGATNLVSALADALLDSVPIVAITGQVPRRMIGTDAFQETPIVEVTRSITKHNYLVLDVDDIPRVVQEAFFLASSGRPGPVLVDIPKDIQQQMAVPAWDTPMSLPGYIARLPKPPATEFLEQVLRLVGESRRPVLYVGGGCAASGEELCRFVELTGIPVTTTLMGLGNFPSDDPLSLRMLGMHGTVYANYAVDKADLLLAFGVRFDDRVTGKIEAFAGRAKIVHIDIDPAEIGKNKQPHVSICADVKLALQGMNTLLEGSTSKKSFDFGSWHDELDQQKREFPLGYKIFNEEIQPQYAIQVLDELTKGKAIIATGVGQHQMWAAQYYTYKRPRQWLSSAGLGAMGFGLPAAAGAAVANPGVTVVDIDGDGSFLMNIQELAMIRIENLPVKVFVLNNQHLGMVVQWEDRFYKANRAHTFLGNPENESEIYPDFVAIAKGFNIPAVRVTKKSEVHAAIKKMLEAPGQYLLDIIVPHQEHVLPMIPSGGAFKDMILDGDGRTVY

SEQ ID NO: 20388 - protein, 349 aa, Zea mays
MDMAHERDASSEEEVVAGELRRGPWTVEEDLLLVNYVAAHGEGRWNSLARSAGLRRTGKSCRLRWLNYLRPDLRRGNITPQEQLLILELHSRWGNRWSKIAQHLPGRTDNEIKNYWRTRVQKHAKQLKCDVNSQQFKDVMRYLWMPRLVERIQNAGAAGAPQQHKAGAADTPLSSPSSWQPGGGGGADDGLYASPDLPATDACCWPPADCYPAAAAAAVGDGDHHHQLLMNNPAAVPELSASTTTAGSASPSSDSGAGAQPCWLAPVGGAEWFTTTCDASSSTAAVLLAGHQQQQQQQQWSCLLGEATWASSSELPDLGCVADFEIGSFDVESIWSTDDSLWFTQAQGV

SEQ ID NO: 20389 - protein, 243 aa, Zea mays
MAAANVGESTSGGGSSSSSGADAGGGFECNICFELPQEPIVTLCGHLFCWPCLYKWLRIHSHSPECPVCKAVVEEEKLVPLYGRGKDRVDPRSKNVPGAADIPSRPAGQRPATAPQADPNNAHFPNAANPANPWFMGGGGGGIPLANARWGNYTFSAAFGGLFPLLSFQVHGFPDATAYGQPAGFPYGYGHGHAFHGGHAGAHAHAAAAAPRHAQHQQQQADVYLKALLILVGVLVIASLVTF

SEQ ID NO: 20390 - protein, 451 aa, Zea mays
  misc_feature (26)..(26): Xaa can be any naturally occurring amino acid
  unsure (1)..(451): unsure at all Xaa locations
MALSRRLLPLFLRRGASIPTRALSTXVAPAAVASEEDEAAVTVKGVRISGRPLYMDMQATTPVDPRVLDAMLPFYLSRYGNPHSRTHLYGWESDAAVEDARARVASLVGADPREIFFTSGATECNNIAVKGVMRFYRERRRHVITTQTEHKCVLDSCRYLQQEGFEVTYLPVRKDGLVDLAQLEDAIRPDTGLVSVMAVNNEIGVVQPLEEIGRICKEKGVPFHTDAAQALGKIPIDVNRMGIGLMSLSGHKIYGPKGVGALYLRRRPRIRVEPQMNGGGQERGIRSGTVPTPLVVGFGAACEIAAQEMDYDHRRVSALQQRLLDGIRAQVDDVVINGSMEHRYPGNLNLSFAYVEGESLLMGLKEVAVSSGSACTSASLEPSYVLRALGVEEDMAHTSIRFGMGRFTTDEEVDRAIELTVHQVKKLRDMSPLYEMAKAGIDLKSIEWSQH

SEQ ID NO: 20391 - protein, 175 aa, Zea mays
MYPAKPAASSSQPAAEMAQPVVGIPISSPGAVAVGPVVGKWSSGLCACSDDCGLCCLTCWCPCITFGRIAEIVDRGATSCGVAGTIYTLLACFTGCHWIYSCTYRSRMRAQLGLPEACCCDCCVHFCCEPCALSQQYRELKARGFDPDLGWDVNAQKAAAAAAMYPPPADGMMIR

SEQ ID NO: 20392 - protein, 486 aa, Zea mays
MHLRLGSYHAVVASSADTARLVLKVHDLAFADRPRTAAGEVASYGYLGIVHTPYGAYWRMARKLCATELFSARRVDSFERVRAQEMRALARGLFECAGRGAVAVREHVAGATLRNILRMAVGEKWSGCYGSPEGEAFRRTLDEAFAVTGAVSNVGEWVPWLGWLDLQGCVRRMKRLRAQYDRFFEQILDDHDHKKTRRERGRPGAGDSAADDDLVDVLLRLVEEDEDRPETTEASRLTRDGVKAFVQDIVAGGTESSAVTIEWAMSELLRRPDALRAATAELDRVIGHGRWVTERDLPDLPYIDAVVKETMRLHPVGPLLVPHHAREHTVVAGYDVPAGARVLVNVWAIARDPASWPDAPDAFRPERFLNGSSGASVDVRGAHFELLPFGAGRRMCPAHGLAMKLVTAGVANLVHGFAWRLPDGMAPEDVSMEELFGLSTRRKVPLVAVAEPRLPAHLYTNVTPPQQVAGSTIANLSTRPEYKLVF

SEQ ID NO: 20393 - protein, 211 aa, Zea mays
MRRRGVAAADADGDVELRFRGVRKRPWGRYAAEIRDPAKKARVWLGTFDSAEDAARAYDAAARMLRGPKARTNFPLPAAAALHHPHMPAAAAAAAPPYTTYPTATGVVSTPPVARPACSSLSSTVESFSGARPRPVLPPRFPPPSIPDGDCRSDCGSSASVVDDDCTDAAASASCPFPLPFDLNLPPGGGGAGVGFYADEEDELRLTALRL

SEQ ID NO: 20394 - protein, 457 aa, Zea mays
MNLAAFSSTLATLPWYEMPSINSSATFSSSLLRRSLCASLRTISHMASAAAPTSAPVATTENGAAKAIEQRPVQVAERLEKFKTTIFTQMSMLAIKHGAINLGQGFPNFDGPDFVKEAAIQAINAGKNQYARGFGVPELNSAIAERFLKDSGLQVDPDKEVTVTSGCTEAIAATILGLINPGDEVILFAPFYDSYEATLSMAGANVKAITLRAPDFAVPLEELEAAVSKDTKAIMINTPHNPTGKMFTREELESIAALCKENDVLLFSDEVYDKLVFEADHISMASIPGMYERTVTMNSLGKTFSLTGWKIGWAIAPPHLTWGLRQAHSFLTFATCTPMQAAAAAALRAPDSYYDELKRDYSAKKAILLEGLEAAGFIVYPSSGTYYIMVDHTPFGFDSDVEFCEYLIREVGVCAIPPSVFYLDPEEGKKLVRFTFSKDEGTLRAAVERLKAKLRRK

SEQ ID NO: 20395 - protein, 423 aa, Zea mays
MCGGAILSGFIPPSGVPAAAAAAKKKQQRRATADLLWPGPGKKGAPREEDFEADFREFERGLGEDDDVDGAGDEVQELPLPEPARLAFAAAVGAPRTAVDGVMTPKDGEGDMPTTATNSAANKRRRKNQYRGIRRRPWGKWAAEIRDPSKGVRVWLGTYSTAEEAARAYDAEARRIRGKKAKVNFRDEAAAAAGAQKAPAATTPTACGNAARLGPPPPPPKFRADEVFGNMNGGTGSNDLFAIMFAFSDSSSKVVRVEPGEGAAGFLPADLLPGSKRSAANMLLLSDQSSDSYGSCDLGWEWDWDDDTMTSDYASVFAPAAPSNVVPAWYTQGGPVSKRTRSSYGYGAAMPGGFDPETNYQYQPLPYVVESSPSDGASTDDMDCLQMMRAGDVPQDGASSGGGGGDGGDIWSLDELLMAAGAY

SEQ ID NO: 20396 - protein, 397 aa, Zea mays
MQTAIEHACSVVECAATARAAMDMSHYIPDWSSSMGDTFAPLGGEDDDGLIELMWRNGHVVMQAQAPRKPPRPDDDEAAAAQAQAWFQYPVEERADLFSELFGEAQAAVGGARGEAARQSIRMMPPPPPPPRPAQAPREEKACPGDGGTATATDGAGSSVLTVVSSLCGSNGNHVQATAPGDVARARDVLMVTSSSTTRSRSCTTKSEQPGPGPGAARRSGKRKHNDATDAEDVGLECEPAQRTTTAKRRRAAQVHNLSERRRRDRINEKMKALQELIPHCNKADKASMLDEAIEYLKSLQLQLQVVWMGGGIAAAGVHQRTMVAAPGRPPHVASLPASAPDLYTRYLAVDHLPPPPLVPPPRTAAAMGLYPRQNPVPATSSPSFRTTENTRKLWQA

SEQ ID NO: 20397 - protein, 272 aa, Zea mays
MPWPEMWLPPAAGEGAVAAGLFLDGVDGTAHGALLAAMPGCSLSFGHQHRRRRGAPLGFLSLTMSVKGGRGFAPAPVGLLPDAEEKARAEESDALVAGKRAVEVATAARPLAGTAVPLPLSTRTRPARVALLSLIPPAPAQRLALRRGAWLSPPERSRSVRCLAAMSPEMRATLDKVVGSSKVVLFMKGTKDFPQCGFSHTVVQILRSLDVPFETLDVLANEALRQGLKEYSSWPTFPQLYIDGEFFGGCDITVEAYKSGELQETLEKAMCS

SEQ ID NO: 20398 - protein, 448 aa, Zea mays
MERARARAPALALAPVEVPKFFVCPISLEVMRDPVTLSSGITYDRDSIERWLFTDGHGDCPVTKLPLGADDLEPTPNHTLRRLIQSWCAAHAVERFPTPRPPVDADRVAAIVGCAKKGGQQEVLAALRELADIIGESDRNRRCVEGVPEAVEFLVSVVKKHAAGTSSSKPLGGCRSQEEPMCGVPDSPKACSPEEAALSILHSLKLSEASLKRALESSDGFVDTLASVLRWPPNYRARTYAMHLLKAALSAMQPSQLSSASTDLVEGVVRVVADRTLSPKAIKVALHVLCRLCPWGRNRVKAVEAGAVAAVVELLLNVGCGCGGSNGKRAVELAVVAIDHLCGCAEGRLELVAHPAGLAVVARAATRLSPTATESAVRALHAVARHSATPAVLQEMLAVGVVARLLYLVQAGASGERPRERAREMLKMHARVWRGSPCLASHMASYPC

SEQ ID NO: 20399 - protein, 446 aa, Zea mays
MAVQVHRHRNKVRNGQAIRCAMATGKEQGAISTASSGDQTKGGLRGKLNKVVLAYSGGLDTSVIVPWLRENYGCEVVCFTADVGQGAIELEGLEKKAKASGACQLVVKDLKEEFVSEYIYPCLRAGAVYERKYLLGTSMARPVIAKAMVDVAKEVGADAVAHGCTGKGNDQVRFELTFYALNPELKVVAPWREWDITGREDAIEYAKKHNVPVPVSKKSIYSRDRNLWHLSHEGDILEDPANEPKEDMYMMSIAPENAPSKPEYLEIGIIAGVPVSINGRDLSPASLLAELNEIGGKHGIGRIDMVENRLVGMKSRGVYETPGGTIMAAAVRELESLTLDRETMQWKDIIALKYAELVYAGRWFDPLRQSFDAFMEKVTATTTGSVTLKLYKGSVNVASRKSPYSLYREDISSFENGEIYNQADAEGFIRLYGLPTRVRAMLEKGI

SEQ ID NO: 20400 - protein, 590 aa, Zea mays
MALATPLRLRRHLLLPAGPSPATHRALSLRRGRLLPASLSSAAAGGRPTVLVTETLGSAGLDLLRAFANVDCSYELTAEELRAKVSLVDALVVRSGTQVTREVFEAARGRLRVVGRAGVGIDNVDLQAATEAGCLVVNAPTANTVAAAEHAVALLAAVARNIAPADASLKAGKWQRGKYVGVTLVGKTLAVMGFGKVGPEVARRARGLGMDVVAHDPYAAADRARAVGVDLVSFDEAISTADFISLHMPLTPSTAKLFNDETFARMRKGVRIINVSRGGVVDEEALLRALDNGTVSQAALDVFTEEPPPRDSKLVQHENVTVTPHLGASTIEAQEGVALEIAEAVIGALRGDLAATAVNAPMVPAEVLSELSPYIVLAEKLGRLVVQLVAVGSGIKGVRVVYSSARDPDDLDTRLLRAMVTKGIVEPISSAFVNIVNADYVAKQRGLRIVEERVFLDGPPEVPLDSIQVHLANVESKFAGALSDAGHICVEGKVRDGGASHLTLVGSLSVDVSLEGNLILCGQLDHPGIIGRVGSILGKMNVNVSFMSVSRTAPGKQAIMAIGVDEEPGKEALKLIGDTPSVEEFVFLKL

SEQ ID NO: 20401 - protein, 518 aa, Zea mays
MTTSSSGSIEAPANSRPGSFSFASTSTSFTNMLGGSADAAGGASRYKAMTPPSLPLSPSSFFSNIPDGLNPADFLDSPALLSSSIFPSPTTNAFASQQFSWLVTPGAEQGGKDEQRQSYPDFSFQTAPTAEDAVRTTTFQPPVPAAPPVEEAYRGQQQPWAYQQQQAAGMDAGSSQAAYGGPFHQAASSDAAAMAPHVPASGGYSHQAQQSQRRSSDDGYNWRKYGQKQVKGSENPRSYYKCTFPSCPTKKKVERSLDGQITEIVYKGTHNHAKPQNTRRNSSSAAAAQLLQGGDASEHSFGGMSGTPAATPENSSASFGDDEVGVGSPRAGNAGGDEFDEDEPDSKRWRKDGGDGEGISMAGNRTVREPRVVVQTMSDIDILDDGYRWRKYGQKVVKGNPNPRSYYKCTTVGCPVRKHVERASHDLRAVITTYEGKHNHDVPAARGSAALYRPAPPPRTPPATTTSPRRGRAWPTRRGSSTGSVTSWARSASAARRRRAAAAASRSLPASTTRWART

SEQ ID NO: 20402 - protein, 225 aa, Zea mays
MGSTSPSGLELTMAVPGLSSSSGSEGFGCNNNNGSGNGNNMRDLDMNQPASGGEEEEFPMGSVEEEEDERGGAGGPHRAKKLRLSKEQSRLLEESFRLNHTLTPKQKEALAVKLKLRPRQVEVWFQNRRARTKLKQTELECEYLKRCFGSLTEENRRLQREVEELRAMRVAPPTVLSPHTRQPLPASALTMCPRCERITAATAARTPRPAPAASPFHPRRPSAAF

SEQ ID NO: 20403 - protein, 219 aa, Zea mays
MARRASLLLAAALLVAVAAAAVPPTCERIECPAYEVVDSANGFEIRRYTDAMWITTAPIEDISFVAATRTGFLQLFDYIQGKNAYNETIEMTAPVLTRVSPSDGPFCASAFAVSFYVPAKNQADPPPAEGLRVDRWAGARYAAVRRFGGFVADADVGEQAARLEASLQGTRWAAAVNDARRADPASPYTVAQYNSPFEFTGRVNEIWMLFDADDDASTS

SEQ ID NO: 20404 - protein, 407 aa, Zea mays
MGALCDFCGEQRSMVYCRSDAASLCLSCDRNVHSANALSRRHTRTLLCDRCASQPAMVRCLAENASLCQNCDWNGHIAGSSSAGHKRQTINCYSGCPSSAELSRIWSFVSDIPNVAPEPNCEQGISMMSISDSGVSNQDNAAGDSILLDIASATLVSDIGTCDKLLVGSSSGAGVNLLPLVTGQTETAGSVDSTPDKVPYTPDKDMFSKDSIYEDFCVDDADLAFENYEELFGTSHIQTEQLFDDAGIDIYFEMKEAPAGNSTESKLKQPANSNAVSADSGMSNPGVKGDSSVCTPLRQARSSLSLSFAGLTGESSAGDNQDCVVSSLLLMGEPPWQPPGPEGSIAGGSRDSALTRYKEKKMRRKFDKKIRYASRKARADVRKRVKGRFVKAGEAYDYDPLCQTRSY

SEQ ID NO: 20405 - protein, 266 aa, Zea mays
MVPRDRAHSAAAATAPPTEKPVQGPIQNNKCEKKAPKKVHKSEREKRKRDKQNDLFGELGNMLEPDRQNNGKACILSDTTRILKDLLSQVESLRKENNTLKNESHYVALERNELLDETNMIRGEISDLQNEMRMRLEGNSIWSHDTSRPNLTAPHPATTVFTLQHSPHPQVIATMTLPLQQPAVVEQSYAAPRRELQLFPEAAPTEDTEPPQNQGISNHVMRPQARYPPATTTLPGHVYPVLPRVEDEQRSSGTTGSREEGGVGNR

SEQ ID NO: 20406 - protein, 581 aa, Zea mays
MDADEAVGSSGRMDLNLYLGPPRTPRPRRSDLGSDLALSTPMPSSPSSSAASVDAPPPPPESMHPPYTHSRADLSPPPLPLEVYFPYNPEDSPVPDAHMSYMQPPELLIPGPRNMPPPDSLISGLREGIRELRYAFHPPPPPPPPLVRANELLGWEERPSSSTASSSFFPDTAARCGLLLEQTGSRWLRTRRFRSDLPPLSSEARPSGQDATEPVPQHEPAADANELNKVAPNGLELGAPENSSEERSKTATAFECNICFEMASEPVVTSCGHLFCWSCLYQWLNVYSSHKECPVCKGEVTEANITPIYGRGNSDAEKTVEDWKSPGPTIPPRPHGHRLESFWQQFHHIRPISRRLGEAHGILSSWRRLLDQQILSSVSRLEGPSESATQEINDIRQHDHLSGLALASRMRARRFQIEALSRPDGSSTSPPDNGLTGNNPSEILTGNNALLERLAGSNSRRLELLERLAFGIANTAGAMSDDFRRIASPNQYRGSASSSNLQNNEPAVDGARIAGAPSADQASNSSTVAVIQGDGGISESAGEPSNAGSSGSLRRRGRSNASGSLDVDGGSLQQNKRHRMN

SEQ ID NO: 20407 - protein, 180 aa, Zea mays
MYPAKPTVATASEPVTGMAAPPVTGIPISSPGPAVAASQWSSGLCACFDDCGLCCMTCWCPCVTFGRIAEIVDRGATSCAAAGAIYTLLACFTGFQCHWIYSCTYRSKMRAQLGLPDVGCCDCCVHFCCEPCALCQQYRELRARGLDPALGWDVNAQKAANNNAGAGMTMYPPTAQGMGR

SEQ ID NO: 20408 - protein, 425 aa, Zea mays
MGFDKEASSSSSRLDAAPLLPQHGGGGAGGHLSSQPKTFANVFIAVVGSGVLGLPYTFSRTGWAAGTLLLLAVAALTFHCMMLLVAARRRIADAHPKIASFGDLGHAIYGAPGRHAVDAMLVLSQASFCVGYLIFISNTMAHLYPIAIGAQSPASPLLTAKALFIWAMLPFQLGLNSIRTLTLLAPLSIFADVVDLGAMGVVLGQDASVWLADRPPVFAFAGPAQLLYGLGVAVYAFEGIGMVLPLEAEAADKRRFGATLALSMAFIAVMYGLFGAMGYLAFGAATRDIITTNLGTGWLSVLVQLGLCINLFFTMPVMMNPVYEVAERLLCGKRYAWWLRWILVVLVGLLAMLVPNFADFLSLVGSSVCVVLGFVLPAVFHLKVFGTEIGWAGLVADVAIIVTGIALAVSGTWTSLVQIFSSSDL

SEQ ID NO: 20409 - protein, 270 aa, Zea mays
MHPSAVSFDSGDGRRRGGAQMLLFGGGGSANSNGFFRGVPMAVLAMDDATRVGKRPFFTTHEELLEEEYYDEQAPEKKRRLTAEQVQLLERSFEEENKLEPERKTELARRLGMAPRQVAVWFQNRRARWKTKQLETDYDRLKAAYNALAADHQGLLADNDSLRAQVICLTEKLQGKETSLSATIAAQEVDQPNEHTTGTEKLLAQQLKDDLHSSCGCTGHGALSSEEEDGGVVSDEGCNFDLPDAMFAVGVTNHGAEEAQLANWTSWFWN

SEQ ID NO: 20410 - protein, 197 aa, Zea mays
MSRSNALLWLLLLALHGRRRLHQVVVRGDGLPALCNATLAPYAAEVGASPARLSLAALTVTLDGARRATAAMKAMAAGGASSHHLVPVAAEAAADCVGMLEDAVDLLRQSVEAMERLGKEPASASASASGQAGRSVRFQVNSVQTWASAALTNDGMCMEGFKGQPAVVREAVRRNVAGAMHLTAIALAIINAMAKQM

SEQ ID NO: 20411 - protein, 301 aa, Zea mays; identical to SEQ ID NO: 367

SEQ ID NO: 20412 - protein, 167 aa, Zea mays
MPPPQSGMTLCRLPKATLGLPLSLPSLLYRPSLSLAARRTKAVSARASSSSPSPDSSFGSRMEDSVKKTVADNPVVIYSKSWCSYSMEVKSLFKRIGVQPHVIELDNLGAQGPQLQKVLERLTGQSTVPNVFIGGKHVGRCTDTVKLYRKGELASMLSDLDINIDNS

SEQ ID NO: 20413 - protein, 441 aa, Zea mays
MADVSPLLPPGKPPATTARFARCASSANDELRSFRACLAWLCVDHYSSPRVAAVGSWAVFLLLAVAAPAAVRLLGTAPPRPFDGQVQVSLTLAASLAYVCLRALLHRAGGLRRLLHLDSLRRDSEDVQAGYAAQLARSFRVLACFVLPCALAEAAYKAYWYRAAAAAYGSPWWWAAAACAVEVASWVYRVALFFMVCVLFRVICYLQILRMVGFAREFGRFADVATVLQHHRRIREQLRKISHRYRKFIVCSLVLVSASQFAALLATTRPHAIVNLATAGELALCSVSLVAGLLMCLYSAAKITHKTQAMTSVAAAWHADATVHAFDNDQENPDPDLPPTAGYLAPANAYRVAAGDESGSGGDDDDDSRSECSSLDDPKYVPFQANNISFQKRQALVTYLENNRAGITVYGFVVDRAWLHALFMIEFSLVMWLLGKTVGIS

SEQ ID NO: 20414 - protein, 401 aa, Zea mays
MASDGIGPRDVCVVGVARTPMGGFLGALSPLPATKLGSIVIQAALERANVDPALVQEVYFGNVLSANLGQAPARQAALGAGIPNSVVCTTVNKVCASGMKATMFAAQSIQLGINDIVVAGGMESMSNAPKYIAEARKGSRFGHDTLVDAMLKDGLWDVYNDCAMGMCAELCADNHALTREDQDAFAIQSNERGIAARDSGAFAWEIIPVQVPVGRGKPPTLIERDESLDKFDPVKLKKLRPSFKENGGTVTAGNASSISDGAAALVLVSGQKAQELGLQVLARIKGYADAAQAPELFTTTPALAIPKAIANAGLESSRVDFYEINEAFSAVALANQKLLGIPSEKINVHGGAVSLGHPLGCSGARILVTLIGVLRAKSGKIGVAGVCNGGGGASALVLELA

SEQ ID NO: 20415 - protein, 482 aa, Zea mays
MAPAPHNGLNNNHPVAPMDVSVEAGNAGAAEWLDDDGRPRRSGTFWTASAHIITAVIGSGVLSLAWAIAQLGWVAGPAAMLLFAFVTYYTAALLAECYRTGHPETGKRNYTYMDAVRSNLGGVKVVFCGVIQYANLVGVAIGYTIASAISMKAVRRAGCFHAHGHADPCKSSSTPYMVLFGGVQILFSQIPDFDQIWWLSIVAAVMSFTYSSIGLSLGIAQTVSNGGFKGSLTGISIGAGVTSTQKIWHTLQAFGDIAFAYSFSNILIEIQDTIKAPPPSESKVMQKATRLSVATTTVFYMLCGCMGYAAFGDNAPDNLLTGFGFYEPFWLLDVANVAIVVHLVGAYQVFCQPIFAFVERRAAAAWPDSAFVSRELRVGPFSLSVFRLTWRSAFVCVTTVVAMLLPFFGDVVGLLGAVSFWPLTVYFPVEMYIKQLRVPRGSTKWICLQTLSVSCLLVSVAAAAGSIADVIAALKVYKPFSG

SEQ ID NO: 20416 - protein, 468 aa, Zea mays
MTAVATPTPPPPRQLSLEDLKAISVLGRGAKGVVFHVVHAPGEPDGEGEGGAAAMALKAVSREAARHKKAASGDGDGDGHRRIWFERDVLLSLRHPLLPSLRGILATEAVVGFAIDRCGGGDLNSLRRRQTEKMFSDSVIRFYAAELVLALEYLHSLGIVYRDLKPENVLIQDSGHIMLVDFDLSTRLPARPQEPDAPVTSPKPAPPVAAPSPSRGSARKPAGGALCFPFRTATATKPAAPATDSPSPLSTSRTASSSSSSSSSSTSRTTASSAASAGAGSRTPAKSNSFVGTEDYVAPEIIAGRGHDFTVDWWGLGVVLYEMLYGRTPFRGQSRKETFYRVLTKQPELVGEQTPLRDLIARLLEKDPEKRIGARGVKAHPFFRGVDWDRILQVARPPFIPTPPQDEGEDEDGGEALDVEKVVREVFASNDAEGGKAWPVADGGRVGGDGDCDGRGDQSKDGDFSVFF

SEQ ID NO: 20417 - protein, 218 aa, Zea mays
MARPCRSSSAAARLLLLLAAVAAALQAAAAAPPVASGFIRKSCRATQYPSVCEQSLAAYGGSPPPRSPRELARAALAVSADRARAASAYVGRLCGSRSGSGDGSPRRGAGAMKGSAAAGPVRDCLENLADSVGHLRDAAQEIGGAGMARAGTRAFRWHLSNVQTWCSAALTDENTCLDGLSSRAVDAATRAAVRGRVVEVAQVTSNALALVNKVGPGY

SEQ ID NO: 20418 - protein, 392 aa, Zea mays
MLVTLMNLLRACWRPSSNRHARTGSDVTGRQDGLLWYKDAGQHVNGEFSMAVVQANNLLEDQCQIESGPLSFLDSGPYGTFVGVYDGHGGPETACYINDHLFQNLKRFASEQNTMSADVLKKAYEATEDGFFSVVTRQWPVKPQIAAVGSCCLVGVICGGMLYVANVGDSRVVLVRHVKATGEVLAIQLSAEHNVSIESVRKELQSMHPEDRHIVVLKHNVWRVKGLIQVCRSIADAYLKKQEFNREPLYVKFRLREPFHKPILSSEPSINVQPLQPHDQFLIFASDGLWEHLTNQEAVDIVHSSPRSGCARRLIRAALQVAAKKREMRYSDLKKIDRGVRRHFHDDITVIVVFLDSSLVSKASAHRGPTLSLRGGGASAGLRSNTLAPTSM

SEQ ID NO: 20419 - protein, 172 aa, Zea mays
  misc_feature (75)..(75): Xaa can be any naturally occurring amino acid
  misc_feature (153)..(153): Xaa can be any naturally occurring amino acid
  misc_feature (161)..(161): Xaa can be any naturally occurring amino acid
  unsure (1)..(172): unsure at all Xaa locations
MAASATAARPLAGTAVPLPLSTRTRPARVALLSLIPPAPAQRLALRRGAWLSPPERSRSVRCLAAMSPEMRATLXKVVGSSKVVLFMKGTKDFPQCGFSHTVVQILRSLDVPFETLDVLANEALRQGLKEYSSWPTFPQLYIDGEFFGGCDIXVEAYKSGXLQETLEKAMCS

SEQ ID NO: 20420 - protein, 355 aa, Zea mays
MDFPGPAGSGRRPQQQEPEHLPPMTPLPLARQGSVYSLTFDEFQSSLGGAAKDFGSMNMDELLRSIWSAEEVHSVAAASASAADHAHAHAAARGPVSIQHQGSLTLPRTLSQKTVDEVWRDLTCVGGVPSSGSAAPAAPPPPAQRHPTLGEITLEEFLVRAGVVREDMTAPPPVPPAPVCPAPAPRPPVLFPHGNVLAPLVPPLQFGNGFVSGAVGQQRGGPVPPAVSPRPVTASAFGKMEGDDLSSLSPSPVPYIFGGGLRGRKPPAMEKVVERRQRRMIKNRESAARSRQRKQAYMMELEAEVAKLKELNDELQKKQVEMLEKQKNEVLERMRRQVGPTAKRICLRRTLTGPW

SEQ ID NO: 20421 - protein, 170 aa, Zea mays
MQEQAASSRPSSSERSSSSGHHVDMEVKEGMESDDEIRRVPELGLELPGASTSGREAGPGAAGADRALAQSSTAQASARRRVRSHADKEHKRLKRLLRNRVSAQQARERKKAYLTDLEVKVRDLEKKNSEMEERLSTLQNENQMLRQILKNTAVNRRGSGSTASGEGHGQ

SEQ ID NO: 20422 - protein, 410 aa, Zea mays
MKRRRRRARRAVAAAAMVQQTLGMSLPMAAFVPEHCSANKLARPPGLPPLPQAFVAQQRGDVCMEAADPAAGPRKAHRRSRSDVPFGYFPPAGHHQLPPPKVEAGWGGHLPAGGGDDDLFNAYLNLEGLDGLNSSDDRLDDGDSRGSSMRTNGADSSENESEECAADSRAGIRLCAAAADRREGLKRAAAAPVPRHARSLSMDSLIGKLNFSAGATGAASGVIPGPNRFSLEFGSAEFSPVEMKKIMADEKLAEMALADPKRVKRVLANRQSAARSKERKMRYIGELEHKVQILQTEATTLSAQLTLLQRDSAGIATQNNELKFRLQAMEQQAQLRDALNEALTAEVQRLKLATAELGDSCSSSNLAQQIQISVQDQMFQLHQQQATPIPFYQLQQAQQNGAGKKHEPTE

SEQ ID NO: 20423 - protein, 389 aa, Zea mays
MATPLRATAVLAWGSGEDGQLGMGGNEEKDWPHFVEALGPYAVTAVVAGSRNSLAICDDGRLFTWGWNQRGTLGHPPETKTESSPGPVDALAGFKIVQAAIGGWHCLAVDDKGRAYAWGGNEYGQCGEEPERKEDGTRALRRDIPIPQRCALKLKVRQVAAGGTHSVVLTQEGHVWTWGQPWPPGDIKQISTPVRVQGLEKVRVIAVGAFHNLALTEDVILWAWGNNEYGQLGTGDTQPRSQPIRVEGLSDLSLVDIAAGGWHSTALTIDGEVYAWGRGEHGRLGFGDDKSSHMVPLKVELLAGEDIVQVSCGGTHSVALARDGRMFSYGRGDHGRLGYGRKVTTGHPMELPINLPPLSSSRDGRWQAKYVACGGRHTLAIAEWTEATD

SEQ ID NO: 20424 - protein, 395 aa, Zea mays
MAAAARQRGTVKWFNDTKGFGFISPEDGSEDLFVHQSSIKSEGFRSLAEGEEVEFSVSEGDDGRTKAVDVTGPDGSFVRGGGGGGGGGGGYGSRGGGGSGGGGRSYGGSWGGGRRSGGGGGPGACYKCGEPGHMARDCPSADGGGGYGGGGYGGGGYGGGAAGDAPTTGEHRMGTTIVGVCYEGGVVLGADSRTSTGMYVANRASDKITQLTDNVYVCRSGSAADTQVISDYIRYFLHQHTIQLGQPATVKVAANLIRLLAYQNKNMLQAGMIVGGWDKYEGGQIFSVPLGGTILKQPFAIGGSGSSYLYALLDHEWKEGMSQEEAEKFVVKVVSLAMARDGASGGVVRTVTINADGVKRNFYPGDKLPLWHDELEPQNSLLDILAAGNPDPMVQ

SEQ ID NO: 20425 - protein, 478 aa, Zea mays
  misc_feature (284)..(284): Xaa can be any naturally occurring amino acid
  unsure (1)..(478): unsure at all Xaa locations
MEVSSVEFGHHAAAASKCFDDDGRLKRTGTMWTASAHIITAVIGSGVLSLAWAIAQLGWVAGPTVMLLFSFVTYYTSALLADCYRSGDACTGKRNYTYMDAVNANLSGVKVWFCGFLQYANIVGVAIGYTIAASISMLAIQRANCFHVEGHGDPCNISSTPYMIIFGVVQIFFSQIPDFDQISWLSILAAVMSFTYSTIGLGLGIAQVVSNKGVQGSLTGISVGAVTPVDKMWRSLQAFGDIAFAYSYSLILIEIQDTIRAPPPSESKVMRRATVVSVAVTTFXYMLCGCMGYAAFGDNAPGNLLTGFGFYEPFWLLDVANAAIAVHLVGAYQVYCQPLFAFVEKWARQRWPKSRYITGEVDVPLPLGTAGGRCYKLSLFRLTWRTAFVVATTVVSMLLPFFNDVVGLLGALGFWPLTVYFPVEMYIVQKKVPRWSTRWVCLQLLSVACLVITVASAAGSVAGIVSDLKVYKPFVTTS

SEQ ID NO: 20426 - protein, 435 aa, Zea mays
  misc_feature (270)..(270): Xaa can be any naturally occurring amino acid
  unsure (1)..(435): unsure at all Xaa locations
MCGGAILSGFIPPSGVAAAAAAAKKKQQQRCRVTADLLWPGPGSKEAPQDQEEDFEADFREFERGLGEDDVDSAGEGGDPEVQELPPPEPTRFAFATAAKAAVDGVMTTTPKDVKGDRPVKRGRKNQYRGIRQRPWGKWAAEIRDPNKGVRVWLGTYNTAEEAARAYDAEARKIRGKKAKVNFPDDDAPGTGHRPANAAPRLVAPPPPPKACADEIFNNLKNDDDDNNNNNDDLFAMFAFGDNKKKVPAAKPAAAEGGSGSGSFLVPAPXVAVVPGNKRRSSATNTMLSVSDDQRSNSYGSGSSDLVGSWSWDDDAAAAAMTSDYTSSVFAPDNAVLPAASYTQGGAPKRMRSSYGGAPPSLAHDAAMPGFGLDKVSYHHYQALPPYYVGSSNASVGNLGLLQQADDAPAPQDGASAGDIWSLDELLMLAAAGAY

SEQ ID NO: 20427 - protein, 158 aa, Zea mays
MYPPKASDPAAGAAPVTGFPVGGPAASSQWSSGLLDCFDDCGLCCLTCWCPCITFGRVAEIVDRGATSCGTAGALYAVLAYFTGCQWIYSCTYRAKMRAQLGLPETPCCDCLVHFCCEPCALCQQYKELKARGFDPDLGWERNATITMLPPSAQGMGR

SEQ ID NO: 20428 - protein, 392 aa, Zea mays
MATCSPGDYLIVPRNCHISVISALVLSGVVPKYIIPEYNSGWDIAGGITPLQLDEAVKELEEDGKRVGAVLVTSPTYHGVCSNVQGIASVCHPRGIPVIVDEAHGAHFRFHDSLPSTAIEQGADLAVQSTHKVLCSLTQSSMLHMSGDLVDVDKVSQCLQLLQSSSPSYLLLSSLDAARDQLSQNRNIFDEPLAIASETKDKLARIPGISVLDLPCFASDFPAIDPLRITLSASNLQLSGYEADDILYEGHQIVSELVGTRAVTFAVNLGTRVQDAEKLVQSAKHLSEKHFFANSLKPVKENRVHGPLENISVHLSPREAFFTEKRRVKIEDSLGEICGELICPYPPGIPVLIPGEVVTHDSLSYLMSVRHQGITISGAADAELNSILVCDL

SEQ ID NO: 20429 - protein, 349 aa, Zea mays
MAESSGSGSVSVDVERISFGGKDHLVRTRCGSVTVAVYGDEDKPALITYPDVALNYLSCFQAFFFCPEVASLLLHNFCVYHINPQGHEMGAAPMSSDVPVPSVDDLADQVADVLDFFSLGSVMCLGVTAGAYVLTLFATKYRERVIGLMLVSPLCKSPSWSEWLYNKVLLNLLYYYGNQGLVKECLLQRYFSKKLRGDAQCPESDIVRASRSLLDDKQGENIWRFLHSINERHDLTDSLKKLQCRTLIFVGESSQFHEDAIHMATKLDRRYCALVEVQDCGSLVTEEQPHAMVMPMEYFLMGYGLYRPYQLSSSPRSPLSPCCISPELLSPESMGVKLKPIKTRVGISL

SEQ ID NO: 20430 - protein, 336 aa, Zea mays
MDMAHERSDASSEEEVMAGELRRGPWTVEEDLQLVNYVDAHGEGRWNSLARSAGLKRTGKSCRLRWLNYLRPDLRRGNITPQEQLMILELHSRWGNRWSKIAQHLPGRTDNEIKNYWRTRVQKHAKQLKCDVNSQQFKDVMRYLWMPRLVERIQAAAANNNASGAGVPPAGAAADDTPLSSSWQHGGGADDDGGLYASPELPTDACWPPADCYYYPAAADHQLLNNPAAAAVFPDLSSTTAGSSSPSSDSGAGTAQPWPAPLGGAEWLTTGACCDASSAAAALGGQQQQSCLVGETSWASSELPELGVADFEIGSFDVESIWSMDDSLWFTQAQGV

SEQ ID NO: 20431 - protein, 567 aa, Zea mays
  misc_feature (133)..(133): Xaa can be any naturally occurring amino acid
  misc_feature (293)..(293): Xaa can be any naturally occurring amino acid
  misc_feature (524)..(524): Xaa can be any naturally occurring amino acid
  misc_feature (567)..(567): Xaa can be any naturally occurring amino acid
  unsure (1)..(567): unsure at all Xaa locations
MSKGAIIGASTVLVVAVVAAVCVVSFKGNSGKGDGDENLSMSVKSVKAFCQPADYKETCEAELSKAAGNASSPSDLAKVIFKVTSDKIHKAISESATLEELKNDPRTSGALHDCKEMLGYAIDELKSSFDKLXGFEMTNFNKAVDDLKTWLSAALTYQDTCLDGFANATTTEASAKMQKALNASQELTEDILAVVDQFSDTLGGLSIGRRLLLTPSWVSEPADPARQRLLAADSPAGSPDFKPNVTVAADGSGDVKTIMEALEKVPVKNADLYVVYVKAGTYKEYVTVGRPQXNVAFIGDGAEKTIITGNKNFKMNLTTKDTATMQAIGNGFFMRDIRVENTAGPENHQAVALRVQSDLAVFLPVHPSTATRTRLYTHAQRQFFRDCRVTGTIDFIFGNSQVVLQNCLIQPRKPMANQANIITAQGRRDKRSVGGTVLHNCTIEPHPDFKEEAGGKIRTYLARPWKEYSRTIYIQNDIGGFIDPKGWLEWNGDFGLETLFYAEVDNRGDGADMSKRAKWGGIKXVTYEEAQKEFTVETFIQGQQFIPKFGVPFIPGLLPQEQKGRTX

SEQ ID NO: 20432 - protein, 157 aa, Zea mays
MGFVSFVGRVLFVAAFLLSAYQEFNEFGADGGPAAKALQPKFNVFVKNISAHLGVAVPHIELKHVIAATIALKGLGSLLFILTSSLGAYLLLLYLALISPIVHDFYNYDTGKEEFARLFAKFTQDVALVGALLVFLGMKNSTPKRQGKKKAHKAKTN

SEQ ID NO: 20433 - protein, 613 aa, Zea mays
MISLLRRAIAASASSPAATYRRLLVVAPLSPPAAPPGPCQAPAAGSPEPPRRAFHCSTPTLGFRSTPASWAGPCPGEGEGEGEGEGVDTGAEKGLEIARLGTSPRIVEKLAARGITRLFPIQRAVLEPAMQGKDMIGRARTGTGKTLAFGIPIMDKILSYNEKNGNGRNPLAIILAPTRELARQVEKEFRESAPLDTLCVYGGVPINQQMRALNYGVDIVVGTPGRVIDLLRRGVLNLSQIQFVVLDEADQMLAVGFDEDVEVIMEQLPQNRQSMLFSATMPSWIRKISNKYLKDPVIIDLVGDSDQKLPEGISLYSIASDNFGKPSIIGPLIKEHANVGKCIVFTQTKREADRLAYVMGRSYQCQALHGDISQNQRERTLSGFRDGRFNILVATDVAARGLDIPNVDLVVHYEIPNTSELFVHRSGRTARAGKKGSAILIYTYEQTRAVRVIEQDIGCRFTELPKMPVSDEAADMFNVMRDTRSRSVGSRRTGGPFSREGYGDFEDHRSRGFGDFDRFGGSSDRGGGFRDSGSRYHGGSGGFRRSSSDFGRPSLSRSDRSGDFGDSYFSRRGNADFGRSRSSDDSGSSHYPRGYSGTGTSDSGNFGGFKGSK

SEQ ID NO: 20434 - protein, 617 aa, Zea mays
MARILMRLLLLAAAAAVAAGDGCLNSGCVALGSYLVARNQNLTYIASLFGIGDYHALARYNPGTTNLDYIQAGQSVNISFTCGCHTFPNSDATYLGGSFPHKVVTGDTYGGIAQNYNNLTSAAWLAVTNPYPTNNIPDTNTVVNVTVNCTCGDPKISSDYGFFLTYPLMGQTLAAVAANYSFNSSSQLDLLRKYNPGMDTATSGLVFIPVKDGNGSYHPLKPPGNGGSIGAIVGGVVGGVAILVLGVLLYIMFYRRKKANKAALLPSSEDSTQLATTSMDKSALSTSQADSSSGVPGITVDKSVEFSYEELFNATEGFSMSNKIGQGGFGAVYYAELRGEKAAIKKMDMQASHEFLAELKVLTHVHHLNLVRLIGFCTESSLFLVYEFIENGNLSQHLRGTGYEPLSWAARVQIALDSARGLEYIHEHTVPVYIHRDIKSANILIDKNYRAKVADFGLTKLTEVGNTSLPTRGIVGTFGYMPPEYARYGDVSPKVDVYAFGVVLYELISAKDAIVRSTESSSDSKGLVYLFEEALNTPDPKEGLQRLIDPALGEDYPIDSILKMTVLARACTQEDPKARPTMRSIVVALMTLSSTSEFWDMNAIQENQGVVNLMSGR

SEQ ID NO: 20435 - protein, 326 aa, Zea mays
MIGEGGFGAVYRGALANGQEVAVKVRSSSSTQGTREFNNELRLLSAVWHENLVPLIGYCCEKDQQILVYPFMSNGSLQDRLYGEASKRKVLDWPTRLSVCIGAARGLVYLHNFAGRCIIHRDIKSSNILLDHSMCGKVADFGFSKYAPQEGDSNPSMEVRGTAGYLDPEYYSTQVLSTRSDVFSFGVVLLEIVTGREPLDVKRPRHEWSLVEWAKPYIREYKIEEMVDPGIKGQYCSEAMWRVLEVASVCTEPFSTFRPTMEDVLRELEDALIIENNASEYMRSIESTGTLGSNRYLSIDRKMFASGSARIESMKGNLQAMPSLPR

SEQ ID NO: 20436 - protein, 512 aa, Ocimum basilicum
MAALLLLLLLPLLLPAIFLLHHLYYRLRFRLPPGPRPLPIVGNLYDVKPVRFRCFADWAQSYGPIISVWFGSTLNVIVSNTELAKEVLKEKDQQLADRHRSRSAAKFSRDGQDLIWADYGPHYVKVRKVCTLELFSPKRLEALRPIREDEVTAMVESIYHDCTAPDNAGKSLLVKKYLGAVAFNNITRLAFGKRFVNSEGIIDKQGLEFKAIVSNGLKLGASLAMAEHIPSLRWMFPLDEDAFAKHGARRDQLTREIMEEHTRAREESGGAKQHFFDALLTLKDKYDLSEDTIIGLLWDMITAGMDTTAISVEWAMAELIKNPRVQQKAQEELDRVIGYERVMTELDFSNLPYLQCVAKEALRLHPPTPLMLPHRSNSNVKIGGYDIPKGSNVHVNVWAVARDPAVWKNPCEFRPERFLEEDVDMKGHDFRLLPFGAGRRVCPGAQLGINLVTSMIGHLLHHFNWAPPSGVSSDELDMGENPGLVTYMRTPLEAVPTPRLPSDLYKRIAVDL

SEQ ID NO: 20437 - protein, 509 aa, Ocimum basilicum
MAALLLLLLLLPAIFLLHHLYYRLRFRLPPGPRPLPVVGNLYDVKPVRFRCFADWAQSYGPIISVWFGSTLNVIVSNTELAKEVLKEKDQQLADRHRSRSAAKFSRDGQDLIWADYGPHYVKVRKVCMLELFSPKRLEALRPIREDEVTAMVESIYHDCTAPDNAGKSLLVKKYLGAVAFNNITRLAFGKRFVNSEGIIDKQGLEFKAIVSNGLKLGASLAMAEHIPWLRWMFPLDEDAFAKHGARRDQLTREIMEEHTRAREESGGAKQHFFDALLTLKDKYDLSEDTIIGLLWDMITAGMDTTAISVEWAMAELIKNPRVQQKAQEELDRVIGYERVMTELDFSNLPYLQCVAKEALRLHPPTPLMLPHRSNSNVKIGGYDIPKGSNVHVNVWAVARDPAVWKNPSEFRPERFLEEDVDMKGHDFRLLPFGAGRRVCPGAQLGINLVTSMIGHLLHHFNWAPPSGVSTDELDMGENPGLVTYMRTPLEAVPTPRLPSDLYKRIAVDL

SEQ ID NO: 20438 - protein, 308 aa, Nicotiana tabacum
GTRLDEEGCIEESGHISEKKRRLSVEQVKALEKNFEVENKLEPERKVKLAQELGLQPRQVAVWFQNRRARWKTKQLERDYGVLKSNFDALKHNYESLKHDNEALLKEILELKSKVYTENGESKGVAVKEEAMESESDDNKVIEQSKPNDNDNNNNNFLENFEEDDEEEEINFENFNVAAAATSTNIFGDNFKDGSSDSDSSAILNEDNSPNAAAISSSGAFLISTNGNGNGNGSSTSLNFCFQFTESSSKSNLGDGQKGNNNYYQPQQYVKMEEHNFFNGEESCSTLFTDEQAPTLQWYCPEDWNWKE

SEQ ID NO: 20439 - protein, 408 aa, Oryza sativa Japonica Group
MYSNFKEQAIEYVKQAVQEDNAGNYVKAFPLYMNALEYFKTHLKYEKNPKIKEAITAKFTEYLRRAEEIRAVLDEGGGGGGANGGDAAVATRPKTKGKDGEGGGDDSEQSKLRAGLNSAIITEKPNIKWNDVAGLESAKQALQEAVILPVKFPQFFTGKRRPWRAFLLYGPPGTGKSYLAKAVATEADSTFFSISSSDLVSKWMGESEKLVANLFQMARENAPSIIFIDEIDSLCGQRGEGNESEASRRIKTELLVQMQGVGHNDDKVLVLAATNTPYALDQAVRRRFDKRIYIPLPDLKARQHMFKVHLGDTPHNLNESDFENLARRTDGFSGSDIAVCVKDVLFEPVRKTQDAMFFFKADGDMWMPCGPKQSGAVQTTMQELASKGLAAKVRLIDISSTAHVRRGF

SEQ ID NO: 20440 - protein, 499 aa, Zea mays
MASGGAVRDVGSPAELEAAVAGARAVAVHFWASWCEASKQMDEVFAHLAVDFPHAAFLRVEAEEQPEISEAYGVTAVPYFVFCKEGKIVDTLEGVNPASLANKVAKVAGPASVAESAVPASLGVAAGPAVLENIQKMAQQNGSSAAESTNSGSTQDALNKRLEQLVNSHPVFLFMKGTPEQPRCGFSRKVVNILKQEGVEFGSFDILTDNDVREGMKKFSNWPTFPQLYCKGELLGGCDIVIAMHDSGELKDVFEEHNIPLKPQGSKNEEAGQPESATEKGAAVAEPMGLTDAQKSRLESLINSSPVMVFIKGTPEEPKCGFSGKLVHILKQENIPFSSFDILSDDEVRQGLKVLSNWPSYPQLYIKGELVGGSDIVMEMHKSGELKKVLSEKGVIPKESLEDRLKSLVSSAPVMLFMKGTPDAPRCGFSSKVVNALKKEGVSFGSFDILSDEEVRQGLKTYSNWPTFPQLYYKSELIGGCDIVLEMEKSGELKSTLSE

SEQ ID NO: 20441 - protein, 330 aa, Zea mays
MASAAPAPKPGVLLLRRTDADFAAALRARFRVHDLHASGAPLGAFLATAAAEPEPPRAALVMAGGDVLVDAAFLDAVPSLGCVVTTSAGVDHVDLAQCARRGVAVAGAGEAFSVDVADHAVGLLVAVLRRVAAADRYVRAGLWPAQGDYPLTTKLSGKRVGILGLGSVGSLVAKRLQAFGCAVSYHSRARKASVAYRYFPDARALAAGSDALVVACALNDATRRVVGRHVLDALGPGGVLVNVARGGVVDEQELVAALRDGRIAGAGLDVFQDEPHLPPGLGGMDNVVLTAHQAAFTEESSADLRELMIGNLEAFFSGKPLLTPVMTRPQ

SEQ ID NO: 20442 - protein, 648 aa, Zea mays
MGKNMRIKTAPKANRVPLLGDGETSRALSDLEEGSDVQPANVGFCRVIKLAKHDAGKLVLATAALLVASLSNLLVPKYGGKIIDIVSRDVRRPEDKAQALEDVKGTILYIVTIVLVGSVCTALRAWLFNSASERVVARLRKDLFSHLINQEIAFFDVTRTGELLSRLSEDTQIIKNAATTNLSEALRNVTTTAIGLGFMFSTSWKLTLLALVIVPVISVAVRRFGRFLRELSHQTQAAAAVASSIAEESFGAIRTVRSFAQEYHEISRYGEKVEETLKLGLKQAKVVGLFSGGLNAASTMSVVIVVIYGANLTINGYMTTGSLTSFILYSLTVGSSVSALSGLYTTVMKASGASRRVFQLLDRVSSMTNSGDKCPINEKDGEVELDDVWFAYPSRPSHMILKGITLKLAPGSKVALVGPSGGGKTTIANLIERFYDPLKGRILLNGVPLAEISHQYLHSKVSIVSQEPTLFNCTIEENIAYGLEGTTNFADVESAAEMANAHNFICGFPDQYKTVVGERGIRLSGGQKQRIAIARALLMNPRVLLLDEATSALDAESEYLVQDAMDSLMKGRTVLVIAHRLSTVKSADTVAVISDGLIVESGTHDELLDRDGIYTALVKRQLQGPKFEATSSISEASEIEAEPSSNGQ

SEQ ID NO: 20443 - protein, 624 aa, Zea mays
MAASRALLPSPQVSPASARVRLAAAVPSSLTLAARGGAGAGARLRVRCAILSSPAPVAPTESRPARRISPSAPDGALRPKPAVLVAEKLSEAGLAVLRQFADVECAYGMSPAELLAKAAQFDALIVRSGTKVTREVLEAGQGRLRVVGRAGVGIDNVDLQAATEVGCLVVNAPTANTIAAAEHGIALLASMARNVSQADAALKAGKWQRNKYVGVSLVGKTLAVMGFGKVGSEVARRAKGLGIHVIAHDPYAPADRARALGVELVSFDEAIARADFISLHMPLIPTTSKIFNDESFAKMKNGVRIINVARGGVIDEDALVRALDSGKVAQAALDVFTVEPPPKDSKLVLHENVTVTPHLGASTVEAQEGVAIEIAEAVVGALRGELAATAVNAPMVPAEILSELAPYVSLAEKLGRLAVQLVAGESGIKGVKVVYTTARGPDDLDTRLLRAMVTKGLVEPVSSTFVNLVNADYTAKQRGLRLTEERVAHDSPAAEAPLESVQVRLSHVQSKFAGAISDGGDVIVLEGRVKYGVPHLTLVGPYEVDVSLEGNLILCRQIDQPGMIGKVGNILGDTNVNINFMSVGRTFRGKQAIMAIGVDEEPDKDTLEKIGAILAIEEFVFLEL

SEQ ID NO: 20444 - protein, 774 aa, Zea mays
MCQLTGLWYFDIRGNNLTGTIPEGIGNCTSFEILDISYNQISGEIPYNIGYLQVATLSLQGNRLIGKIPEVIGLMQALAVLDLSENELVGPIPPILGNLSYTGKLYLHGNKLTGHIPPELGNMSKLSYLQLNDNELVGTIPAELGKLTELFELNLANNNLEGHIPANISSCSALNKFNVYGNRLNGSIPAGFQKLESLTYLNLSSNSFKGQIPSELGHIVNLDTLDLSYNEFSGPVPPTIGDLEHLLELNLSKNHLTGSVPAEFGNLRSVQVIDMSSNNLSGYLPEELGQLQNLDSLILNNNSLAGEIPAQLANCFSLVSLNLSYNNFSGHVPSSKNFSKFPMESFMGNLMLHVYCQDSSCGHSHGTKVSISRTAVACMILGFVILLCIVLLAIYKTNQPQLPEKASDKPVQGPPKLVVLQMDMAVHTYEDIMRLTENLSEKYIIGYGASSTVYRCDLKSGKAIAVKRLYSQYNHSLREFETELETIGSIRHRNLVSLHGFSLSPHGNLLFYDYMENGSLWDLLHGPSKKVKLDWDTRLRIAVGAAQGLAYLHHDCNPRIVHRDVKSSNILLDGSFEAHLSDFGIAKCVPAAKSHASTYVLGTIGYIDPEYARTSRLNEKSDVYSFGVVLLELLTGRKAVDNESNLHQLILSKADDDTVMEAVDPEVSVTCTDMNLVRKAFQLALLCTKRHPADRPTMHEVARVLLSLLPPAAKPPAPKAAAASAAAGDYTRFLATAADLRRGGVADDDTGDNSSSDEQWFVRFGEVISKHTLS

SEQ ID NO: 20445 - protein, 377 aa, Zea mays
MAPQTATRVASGRLVFGAPTTTDGKLVKGGSRLRVRSLDNNGRRVAVEAVNGAARPNGAAAVADVRQVPAPPPPEGDGDGVAFRLGKFAEGRLVYRQQFVVRSYEIGPDRTATMETLMNLLQETALNHVMCSGLAGDGFGATRQMSLRKLIWVVTRINIQVDEYSRWGNVVEIDTWVASSGKNGMRRDWIIRDRNTKNMIARATSNWVMMNRETRRLSKIPDEVRQEVLPFYLDRSIIAADTGGGRKIEKLTDSTAEHIRSGLAPRWSDMDVNQHVNNVKYIGWILESVPLDVLEDYHLTSITLDYRRECRQSQLLESLTSMTTSSSAPAEPSLTSSLCGSDLHSTHLIRQQDDRAEIVRACAEWRRKEHPRSIEQL

SEQ ID NO: 20446 - protein, 344 aa, Zea mays
MMLLVACRRRLADEHPKIASFGDLGDAVFGAHGRFAVDVMLVLSQFSFCVGYLIFISNTMAHLYPITAAASSSSALLSPKALVIWAMLPFQLGLNSIKTLTLLAPLSIFADVVDLGAMGVVLGQDVAAWLAKPVPVVAFGGAGALLYGLGVSVYAFEGIGMVLPLEAEAANKSKFGVTLGLSMAFIAVMYGLFGVMGYVAFGDATRDIITTNLGAGWLSAAVQLGLCINLFFTMPVMMNPVYEVAERLLHGKRYCWWLRWLLVVVVGLAAMYVPNFTDFLALVGSSVCVLLGFVLPASFHLKVFGAEMEWPGVLSDVLLVVIGLALAVFGTYTSLLQIFQSSSA

SEQ ID NO: 20447 - protein, 318 aa, Zea mays
MGTSLPRSVALLTLLLCLFLPCHGKLSTKFYAKSCPSVAAIVRSVMEQAVAKEPRMGASIIRLFFHDCFVNGCDASILLDDTSTFTGEKNAGANANSVRGYEVIDAIKTQVEAACKGTVSCADIVALASRDAVDLLGGPTWNVQLGRKDSRAASQSAANANLPGPGSGAASLVAAFAAKGLSARDMTALSGAHTVGRARCLFFRGRIYTDQNVNATFAAARQQTCPQSGGDGNLAPFDDQTPDAFDNAYYTNLMAQRGLLHSDQELFNGGPQDALVRKYSGNARMFATDFAKAMVKMGGLAPAAGTPTEVRFNCRKVN

SEQ ID NO: 20448 - protein, 270 aa, Zea mays
MLLNPASEASVLDTIRQHLLEEPADESFGSLVADQWSGSLPFRTDDADDMVVFGALQDAFAYGWLPDGSFVHVKPEPVRSPDSSSYPCSYDGSPCFGLLDPEPPLTPGTTTPSSRGQEEAAAAMARGKHYRGVRQRPWGKFAAEIRDPARNGARVWLGTYDTAEDAALAYDRAAYRMRGSRALLNFPLRIGSGDKRPSPAPPEPATSSDSSSSSASGSHKRRKRGEAAAANMAMALVPPPSQLNRPAQPWFPAAPVEQAAMAPRVEQIVV

SEQ ID NO: 20449 - protein, 393 aa, Zea mays
MPSASAHLRLLPDQLTSAPFTPHLLLLLRRRLPLLRLAWPWPPPALRSRAAMERYEVIRDIGSGNFGVTKLVRDVSTKELFAVKFIERGQKIDEHVQREIMNHRSLKHPNIIRFKEVVLTPTHLAIVMEYAAGGELFERICSAGRFSEDEARFFFQQLISGVSYCHSMQVCHRDLKLENTLLDGSVAPRLKICDFGYSKSSVLHSQPKSTVGTPAYIAPEVLSRKEYDGKVADVWSCGVTLYVMLVGAYPFEDPDDPKNFRKTITRILSVQYSIPDYVRVTMECGHLLSRIFVGNPEQRITIPEIKKHPWFLKNLPIEMTDEYQQSMQLADMNTPGQSLEEVMAIIQEARKPGDAMNLAGQLPCLGSVDLDDIDFDDIDDIDTENSGDFVCAV

SEQ ID NO: 20450 - protein, 204 aa, Zea mays
MVRGKTQMKRIENPASRQVTFSKRRNGLLKKAFELSVLCDAEVALVVFSPRGKLYEFASGSAQKTIERYRTYTKDNVSNKTAHQDIEQVKADAEGLAKKLEALEAYKRKLLGERLEECSFEELHSLEVKLEKSLHCIRGRKTQLLEEQLHKLKEKEMNLRKSNEDLREKVMGAKTFCRRCTAASGMPTTQENSARSSRRRRRLC

SEQ ID NO: 20451 - protein, 303 aa, Zea mays
MAPPLAAVSSSSPLFSPSSSRPIRRCHAPPPSISFQTRGRSPTAAAAAESSVSTLLEVRGLTASVKETGQQILAGVDLTIREGEIHAIMGKNGSGKSTLTKVLVGHPHYEVTGGTILFKGEDLVDMEPEDRSLAGLFMSFQAPIEIPGVSNFDFLLMAVNARRERSGLPALGPLEFYSVVSPKVDALKMDPKFLDRNVNEGFSGGERKRNEILQLSVIGADLALLDEIDSGLDVDALEDVANAVNGLLTPQNSVLMITHYQRLLDLIKPSYVHIMENGKIIKTGDSSIATQINEGGFKSIALV

SEQ ID NO: 20452 - protein, 172 aa, Zea mays
MCDAAAVAAPRYRGVRKRPWGRFAAEIRDPAKRARVWLGTFDSAEAAARAYDVAARALRGPLARTNFPALTSRPPANLPAPAPTCSSSSTVESSSGPRAGVPRAGRRAAGKPRAPPTPTADCRSDCASSASVVDDGDDASTVRSRPALDLNLPAPLDVDDGHDLELCTDLRL

SEQ ID NO: 20453 - protein, 168 aa, Zea mays
MYPAKPAASASEPVVGIPISSPGAVAVGPVVGKWSSGLCACSDDCGLCCLTCWCPCITFGRVAEIVDRGATSCGVAGTIYTLLACFTGCHWIYSCTYRSRMRAQLGLPEACCCDCCVHFCCEPCALSQQYRELKARGFDPDLGWHVNAQKAAAAAAMYPPPAEGMMIR

SEQ ID NO: 20454 - protein, 470 aa, Zea mays
  misc_feature (59)..(59): Xaa can be any naturally occurring amino acid
  unsure (1)..(470): unsure at all Xaa locations
MALGEGGDHGAALPLIADQAKHAAAGGIVRSGSMWTAAAHVITAVIGSGVLSLAWSIAXLGWVAGPAAMLVFAAVTALQSTLFADCYRSPDPEHGPHRNRTYAKAVDRNLGSSSSWVCMLLQHTALFGYGIAYTITASISCRAILKANCYHEHGHDAHCDYDGNYYMLIFGGVQLLLSFIPDFHDMAWLSVVAAAMSFSYAFIGLGLGLARTIANGTIKGSITGVRMRTPMQKVWRVSQAIGDIAFAYPYSLILLEIQDTLKSPPAENKTMKRASMISILVTTFFYLCCGCLGYAAFGSDAPGNLLTGFGLYGPYWLIDFANACIILHLLGGYQVYSQPIFQFAERLLAERFPDSGFVNGGSYTVRFACLRACRVNPLRVCLRTLYVASTTAVAVALPYFNEVLALLGALSFWPLAIYFPVEMYFIQRNVRRWSARWVVLQTFSVVCPARQRLRARRLHRGANQQEARLG

SEQ ID NO: 20455 - protein, 564 aa, Zea mays
MPSRSDSDSLLVRAEGMRDAALDYHGRPADRGATGGWRSALFIIAVEIAERFTFYGVSANLINYLTGPLGEGTAAAAAAINAWNGVAQLLPLLGGALADKWLGRYRTIVIASLLYILGLGMLAFSTLLSGSGHQCTAAGGQICAPSGLKVTFFYVSLYIVAVAQGGHKPCVQAFGADQFDQTDPKETVSRSSFFNWWYFGMCAGTAVMLVLLSYVQDNIGWGLGFGIPCAVMAAALAVFLLGTRTYRYYVTAGQGLFARAGEAFAEWRSRRKAGQLVQDSQELDPPAADAPRFSAGVDVEEQAAVRNNGGLVKEAKAIIRLFPIWAACLLYAVAYSQSSTFFTKQAATLDRRIGRHVQVPPAALQCFISVTIVVIIPIYDRVLVPVSRRYSGKPSGITMLQRIGTGMFLSLLSMVIAALVEKHRLRVAGDAGLVDKPKVPVPMSLWWMVPQYVLFGAADVFTMVGLQEFFYDQVPDKLRSLGLALYLSIFGVGSFISSALVSVIDRVTTDRGGSWFSNNLNRGHVDYFYWLLAALSGVELLAYVFFAVTYKYKNRGAVHATVDG

SEQ ID NO: 20456 - protein, 435 aa, Zea mays
MYSNFKEQAIEYVKQAVQEDNAGNYVKAFPLYMNALEYFKTHLKYEKNPKIKEAITAKFTEYLRRAEEIRAVLDEGGAGPGANGGDAAVATRPKTKGKDGDGGNGGDDSEQSKLRAGLNSAIITEKPNIKWNDVAGLESAKQALQEAVILPVKFPQFFTGKRRPWRAFLLYGPPGTGKSYLAKAVATEADSTFFSISSSDLVSKWMGESEKLVANLFQMARENAPSIIFIDEIDSLCGQRGEGNESEASRRIKTELLVQMQGVGHNDDKVLVLAATNTPYALDQAVRRRFDKRIYIPLPDMKARQHMFKVHLGDTPHSLTESDFESLARRTDGFSGSDVAVCVKDVLFEPVRKTQDAMFFFKADGDMWMPCGPKQPGAVQTTMQELASKGLAAKILPPPISRADFEKVLSRQRPTVSKKDLEVHERFTKEFGEEG

SEQ ID NO: 20457 - protein, 295 aa, Zea mays
MEVGFLGLGIMGKAMATNLLRHGFRVTVWNRTLAKCQELAALGATVGETPASVVSKCRYTIAMLSDPSAALSVVFDKDGVLEQIGSGKGYVDMSTVDAATSTKISEAVKQKGGAFLEAPVSGSKKPAEDGQLVILAAGNKPLYDGMIPAFDVLGKKSFFLGEIGNGAKMKLVVNMVMGSMMNSLSEGLCLADKSGLSPQTLLDVLDLGAIANPMFKLKGPTMLQGSYSPAFPLKHQQKDMRLALALGDENAVAMPVSAAANEAFKKARSLGLGDQDFSAVYEVVKGAGGSGSGQP

SEQ ID NO: 20458 - protein, 536 aa, Buchnera aphidicola (Schizaphis graminum)
MELQRNFFIFAFLFVSFLLWQAWQSQSLKKNKKNEETNSFFHLNHKKEDKNQIIIKNDVLRLVINMYGGDIEEASLLDYKTQLNSPENLKLLETKSDFVYQAQSGLIGKDGLDNSINKIRPLYSAKKNFFELGHNEKELRVPITFIAKNGITYIKNFILKPGKYNVEVEYDINNLSNKKLELNIFGQLKQTVKLPKNRDIYSGNFALQTFRGAAYSSSDAKYEKYKFDNIANHEHLHIITHHGWIAMLQQYFVVAWVPDTNISSSNIIYTSYLDNDGIAIIGYKSSLINIPSNSRYIIKSKLWIGPEKQQEMALVAPNLDLTVDYGFLWFLSQPLFKLLSTIHNFIGNWGFSIILITFMMKAITYPLTKAQYTSMSKMRELQPKINELKKNFGHDKQRMSKEIMALYKKEKINPLGGCLPVFIQMPIFLSLYYMLIGSVELRHAPFLFWIKDLSDQDPYYVLPIFMGLTMFFIQRTSSNNISDPFQQKIMHFMPFIFTVFFLWFPSGLVLYYIVSNLVTIIQQKYILSNFKKNQKR

SEQ ID NO: 20459 - protein, 429 aa, Phaseolus vulgaris
MAQILAPSTQWQMRFTKSSRHASPITSNTWSSLLMKQNKKTSSAKFRVLAVKSDGSTINRLEGLLNLDITPFTDKIIAEYIWIGGTGIDVRSKSRTISKPVEHPSELPKWNYDGSSTGQAPGEDSEVILYPQAIFKDPFRGGNNILVICDAYTPAGEPIPTNKRHRAAEVFSNPRVIAEVPWFGIEQEYTLLQTNVNWPLGWPVGGYPGPQGPYYCSAGADKSFGRDISDAHYKACLFAGINISGTNGEVMPGQWEYQVGPSVGIEAGDHIWASRYILERITEQAGVVLSLDPKPIEGDWNGAGCHTNYSTKSMREDGGFEVIKKAILNLSLRHKEHISAYGEGNERRLTGKMETASINTFSWGVANRGCSIRVGRDTEKNGKGYLEDRRPASNMDPYVVTSLLAESTLLWEPTLEAEALAAQKLALKV

SEQ ID NO: 20460 - protein, 644 aa, Streptomyces sp. 139
MCGIAGTYRWPDGKAVTDRLTETLAHRGPDGSGGYSHALGDGEVHLGHRRLAILDLSENGAQPMVSGGLALTYNGELYNAPELRAELEGAGVRFRGTSDTEVLLEAWRRWGTDCLPRLRGMFAFAVFDERTGDLVLVRDQLGIKPLFLLRRGKGLVFASELKALAAVTGGSLEVDPAALVASLLYYWVPDSRCAFRGAEKLPPGTWLRCRADGSVSAAGSGTCARSPPRAGAGTVRYLPDLAAVVEESTRRHLLSDVPVATFLSGGLDSSYLTALAARDRPGIPAYTIGFRAEDARFEAMPDDLRYARRVAERFGVDLREIEIAPDVLDLLPRMTYHLDEPVGDPAAINTFLICSAAREAGVKVMLSGMGADELFAGYRKHLANLIAVRYRHVPGPVRRGVASAVDRLPVATSRRGLRSVRFAKRFLSFAGLPEETAFRRSYTLYDRQELAGLLDPDLAPAVDDVLAEHADVYQDNELDDFVNRMCLADARMFLPGLNLAYTDRSSMAASTEVRVPYVDVEVVRAAFAVPGARKIAGRQGKAVLKEAATTVLPREIVYRPKGLFSAPLRAWMSRDLAPLVREVVNDGLLVRSGFLRREALARMVAEDAAGQRDFSKHLWHVLTLEYWYRDATSRAGRNSPTSTA

SEQ ID NO: 20461 - protein, 635 aa, Vibrio cholerae
MGKIIGIDLGTTNSCVAVLDGDKPRVIENAEGERTTPSVIAYTDGVSLVGQPAKRQAVTNPQNTLFAIKRLIGRRFEDEEVQRDIKIMPYKIVKADNGDAWVEAKGQKMAAPQVSAEVLKKMKKTAEDFLGEPVTAAVITVPAYFNDAQRPATKDACRIAGLEVKRIINEPTAAALAYGLDKPGGDRTIAVYDLGGGTFDISIIEIDEVEGEKTFEVLSTNGDTHLGGEDFDNRMINHLVDEFKKDQGIDLRNDPLAMQRLKEAAEKAKIELSSAQQTDVNLPYITADATGPKHMNIKVTRAKLEALVEDLVQRSLEPLKVALADADLSVNDITDVILVGGQTRMPMVQKKVAEFFGKEPRKDVNPEEAVAVGAAVQGGVLAGEVKDVLLQDVTLLFLGIETMGGVMTKFIEKNTTIPTKANQVFSTAEDNQSAVTIHVLQGERKQAMYNKSLGQFNLEGINPAPRGMPQIEVIFDLDADGILHVSAKDKQTGKEQKITIQASGGLSDAEIEKMVQEAEANKEADKKFEELATARNQADQMIHATRKQITEAGERLPADEKAKIETAINELETAKKGEDKAEIDAKVQALMAAAQKLMEIAQQQAQAQGANAGQSSAKEDDVVDAEFEEVNDDKK

SEQ ID NO: 20462 - protein, 241 aa, Alpinia hainanensis
MGRGRVELKRIENKINRQVTFAKRRNGLLKKAYELSVLCDAEVAVIVFSSRGKLYEFCSVPSMMKTLERYQKCSYGGSESNFQVKENQLVQSSRQEYMKLKARLEALQRSQRNLLGEDLGSLSVKELDYLEKQLDMSLKEIRSTRTQQMLDQLTDLQRREQVLCEANKGLRRRLEEINHTIHGGHAWENGGDAVAQPQHSHGDDGLFYPLECQPAPHIGYQSDQIVGTSAATATFMNGWLA

SEQ ID NO: 20463 - protein, 663 aa, Oryza sativa
MDRVRGSAFLLGVLLAGSLFAFSVAKEETKKLGTVIGIDLGTTYSCVGVYKNGHVEIIANDQGNRITPSWVAFTDSERLIGEAAKNQAAVNPERTIFDVKRDIGRKFEEKEVQRDMKLVPYKIVNKIGKPYIQVKIKDGENKVFSPEEVSAMILGKMKETAEAYLGKKINDAVVTVPAYFNDAQRQATKDAGVIAGLNVARIINEPTAAAIAYGLDKKGGEKNILVFDLGGGTFDVSILTIDNGVFEVLATNGDTHLGGEDFDQRIMEYFIKLIKKKYSKDISKDNRALGKLRREAERAKRALSNQHQVRVEIESLFDGTDFSEPLTRARFEELNNDLFRKTMGPVKKAMDDAGLEKSQIHEIVLVGGSTRIPKVQQLLRDYFEGKEPNKGVNPDEAVAYGAAVQGSILSGEGGDETKDILLLDVAPLTLGIETVGGVMTKLIPRNTVIPTKKSQVFTTYQDQQTTVSIQVFEGERSMTKDCRLLGKFDLSGIPAAPRGTPQIEVTFEVDANGILNVKAEDKGTGKSEKITITNEKGRLSQEEIDRMVREAEEFAEEDKKVKERIDARNQLETYVYNMKNTVGDKDKLADKLESEEKEKVEEALKEALEWLDENQTAEKEEYEEKLKEVEAVCNPIISAVYQRTGGAPGGRRRGRLDDEHDEL

SEQ ID NO: 20464 - protein, 103 aa, Herminiimonas arsenicoxydans
MYAVIKTGGKQYKVVAGEKFKVEQIPADIGSEITLDQVLALGAGETIKFGAPLVEGATVLATVVSHGRHDKVKIFKMRRRKHYQKHQGHRQNYTELQIVSING

SEQ ID NO: 20465 - protein, 858 aa, Psychromonas arctica
MRLDKLTSKFQLALSDAQSIALGRDHQYIEATHVLLAMLNQDGGAMRSILSDLEININLLRSQLSTILDRLPKVSGIGGEIQVSSQLGNTFNLCDKYAQKAKDKFISSEIFLVAVCEDKGELGQVLNKLGLTKSKVESSLKKIRQGQTVTDVNGDGPEQALEKYTIDLTERAAAGKLDPVIGRDDEVRRIVQVLQRRTKNNPVIIGEPGVGKTAIVEGLAQRIINGEVPEGLKGKRVLSLDMGSLIAGAKYRGEFEERLKAVLAELNKEEGQVILFIDELHTMVGAGKGDGAMDASNMLKPALARGELHCVGATTLDEYRQYIEKDAALERRFQKVIVDEPSVEDTIAILRGLKERYELHHKVQITDPAIVAAATLSHRYISDRQLPDKAIDLIDEAASSIRLQIDSKPESLDKLGRKIIQLTVEQKSLQNSSDEASIKRLNDLEQTLKSKGTEYKELDEIWKTEKAALSGTQNIKQALEQARLDLEVASRASDLTRMSELQYGRIPDLEKQLDLASQVEMQEMTLLKHSVTENEIADILAHWTGIPVSKMLEGERDKLLKMEKYLHSQVVGQNEAIEAVSNAIRRSRAGLSDPDRPIGSFLFLGPTGVGKTESCKALANFLFDSVDNMVRIDMSEFMEKHAVSRLVGAPPGYVGYEEGGYLTEAVRRKPYSVILLDEIEKAHPDVFNILLQVLDDGRLTDGKGRTVDFRNTVIIMTSNIGSEIIQEAFPRASYDDVKNTLLGILAKQFKPEFLNRIDETVVFHPLSEKHIKSIATIQLHALQARLKERGYLLTFNDASIELLVEAGYDPMYGARPLKRAVQQLLENALAQKILSGELSVGNNILADVEDGKIVFVQS

SEQ ID NO: 20466 - protein, 362 aa, Eschscholzia californica
MEKGKLEVGEEMELQGQADICKLMLAFIDSMALKCAVELGIPDIIHSHGQPITLSEIINGIPNLSPSFDINYLFRIMRLLVRNRVFSAYEPDLKDGSSGTKTLYGLTPSSKWLVKDSKISLAPLVLAENHPWLLDPWHYLGKCVQEGGFAFAKAHGSEIWKFGSENPEFNKLFSVGMACSSTLVVDAILDNYHEGFGDLESIVDVGGAIGTLINEIVKKYPHIRGTNFDLPHVVAEALENPGVAHVGGDMFVEIPSADAVILKWVLHDWNDEDCVKILKNCNKAISNKGKLIIIECVLKPDGEGLFDGLGLAFDLLMIAHSSGGRERTEAEWKKLLKAGGFSRYKITPIKGIPSIIEAYPDN

SEQ ID NO: 20467 - protein, 357 aa, Papaver bracteatum
MEAVSQTDQENQAIIWKQIYGFAESLVLKCAVQLEIAETIHNHGKPMSLSELASKLPIDQPVNIDRLYRVMRFLVHMKLFNKENISILSGETAQVVEDKYSLAPPAKYLIRGSEQSMVPWVLGITDEDLVAPWHWLKEGITGNCNVFEKVLGKSHADYMSENPKKNQMFNELMACDSRLVTSALVNECRSVFSDGINTLVDVGGGTGTAVSAISKAFPNIQCTLFDLPHVIGDSPEIPNVTKTSGDMFQSIPSADAIFMKNILHDWNDDECVQILKRCKEVVSVGGKVILVEMVMDTELAHPYSKLRLTLDLDMLVNNGGKEGTEEEWKKLIYAAGFTSYKITQMSAGFAAQSVIEV

SEQ ID NO: 20468 - protein, 346 aa, Papaver bracteatum
METVSKIDQQNQAKIWKQIYGFAESLVLKCAVQLEIAETLHNNVKPMSLSELASKLPVPQPVNEDRLFRIMRYLVHMELFKIDATTQKYSLAPPAKYLLRGWEKSMVDSILCINDKDFLAPWHHLGDGLTGNCDAFEKALGKSIWVYMSENPEKNQLFNAAMACDTRLVTSALANECKSIFSDGIKTLVDVGGGTGTAVKTISKAFPDIKCTIYDLPHVIADSPEIPNITKISGDMFKSIPSADAIFMKCILHDWNDEECIQILKRCKEALPKDGKVIIVDVVIDMDSTHPYAKIRLTLDLDMMLNTGGKERTKEEWKILFDAAGFASHKVTQISAVQSVIEAYPY

SEQ ID NO: 20469 - protein, 225 aa, Thalictrum flavum
MEMINKENLSSQAKLWNFIYGFADSLVLKSAVQLDLANIIHNHGSPMTLSELSLHLPSQPVNQDALYRVLRYLVHMKLFTKSSIDGELRYGLAPPAKFLVKGWDKCMLGAILTITDKDFMAPWHYLKEGILNDGSTSTAFEKALGTNIWDYMAEHPEKNQLFNEGMANDTRLIMSALVKECSSMFDGITTIVDVGGGTGTAVRNIAKAFPHIKCTVYDLPHVIAD

SEQ ID NO: 20470 - protein, 346 aa, Thalictrum flavum
MEDLSSQAKLWNYIYGFADSLVLKCAVQLDLANIIHDHGTPMTLSELSSRLPSQPVNQDALYRVMRYLVHIKLFTKSSIDGELRYGLAPPAKFLVKGWDNCMIGSILLMVDTDFMAPYHYIKDEILNDGSSITAFEKASGTNIWEYLAEHPEKNQLFNEGMANESRLTMSGLMKDCSSTFEGLTTLVDVGGGTGTTVKYIAKAFPNIKYTVYDLPHVIADAPGDTEINFVEGDMFKYIPNADAILMKGVLHDWDDNECIEILKRCKDAVPRDGGKVIIIDVVLNVKSEHPYTKMRLTLDLDMMLNNKGKERTEEDWKKLIYDDAGYKGYKITQISALQSVIEAYPY

SEQ ID NO: 20471 - protein, 605 aa, Citrus unshiu
MQRALSIRRTLQSLHHRLLFNKSVPLKHHPLPSIRTLSSTPSASPSPSPSPSPSPSDAEIRKYLGYTALLVFCGAATYYSFPFSEDAKHKKAQIFRYAPLPEDLHTVSNWSGTHEVQTRNFHQPESVEELEKLVKEANEKRARIRPVGSGLSPNGIGLARAGMVNLALLDKVLEVDKEKKRVRVQAGIRVQGLVDEIKQYGLTLQNFASIREQQIGGIVQVGAHGTGAKLPPVDEQVISMKLVTPAKGTIEVSKEKDPDLFYLARCGLGGLGVVAEVTLQCVERQELVEHTTVSNIKEIKKNHKKLLSENKHVKYLHIPYTDTVVVVTCNPVSKWKGPPKFKPKYTKNEALQHLPDLYRESLKKYRADVMTAKSPDGTEPDINELSFTELRDKLLALDPLNKEHVIKVNQAEAEFWRKSEGYRVGWADEILGFDCGGQQWVSETCFPSGTLAKLSMKDLEYTEELKQLIEKEDIPAPAPIEQRWTARSQSVMSPAYSSVQDDIFSWVGIIMYLPTMDARQRKEITDEFFNYRHLTQKQLWDQYSAYEHWAKIEVPKDKEELAALQARLRKRFPVDSYNKARKELDPNRILSNNMLEKLFPLSDTI

SEQ ID NO: 20472 - protein, 200 aa, Capsicum annuum var. annuum
MRLSKLSLLIISVGCIILQVASIGAYGSSLLPLMLDQMMGNPSNLLGESTFLDPFRMLEQIPFGLESKEESLSIAKVDWKETAEGHVIRVDVPGLKKEDMKIEIEENRVLRVSGERKKEQQQQDINDDDNHWHCVERSYGKFWRQFRLPENADIDTLKAKLENGVLTISFTKLSPDRIKGPIVVSIEGKDSYVSSAKEEL

SEQ ID NO: 20473 - protein, 391 aa, Pseudomonas nitroreducens
MSLNPRDAVIVDFGRTPMGRSKGGMHRNTRAETMSAHLISKVLERNPKIDPAEVEDVIWGCVNQTLEQGWNIARMASLMTQIPHTSAGQTVSRLCGSSMSALHTAVQAIQTGNGDVFVIGGVEHMGHVGMMHGVDPNPHLSLYAAKASGMMGLTAEMLGKMHGITREAQDKFGVRSHQLAWKATQEGKFKDEIIPMEGYDENGFLKVFDFDETIRPDTTLESLAALKPAFNPKGGTVTAGTSSQITDGASCMIVMSAQRAQDLGIQPMAVVRAMAVAGVDPAIMGYGPVPSTNKALKRAGLTINDIDFFELNEAFAAQALPVLKDLKVLDKMDEKVNLHGGAIALGHPFGCSGARISGTLLNVMKQNGGTLGVSTMCVGLGQGITTVFERI

SEQ ID NO: 20474 - protein, 402 aa, Pseudomonas nitroreducens
MENLNSAVETLVHGSNTLFILMGAVMVLAMHAGFAFLEVGTVRLKNQVNALSKILSDFAISTLAYFFVGYWIAYGVNFLQPAASLATENGYALVKFFFLLTFAAAIPAIISGGIAERARFGPQLCATALIVAFLYPFFEGLVWNANFGFQDWLKAEFGATFHDFAGSVVVHAFGGWLALAAVLLLGRRNGRYREGRLVAFAPSNIPFLAAGSWVLIVGWFGFNVMSAQTLVGASGLVAVNSLLAMVGGTVAALLVGRNDPGFLHNGPLAGLVAVCAGSDLMHPIGALVTGMVAGALFVWAFTATQVRWKIDDVLGVWPLHGLCGAWGGIACGIFGQSALGGIGGVSLASQLVGTLTGVILAFAGGLLVYGLIKSLVGIRLSQEQEYYGADLSIHKIGAINQD

SEQ ID NO: 20475 - protein, 317 aa, Pseudomonas nitroreducens
MIDVIVSSMKSEAIGVNSYELAKEDGSPLPSFSAGSHVDIHLPNGLVRQYSLCNNPAENHRYLIGVLNEPSSRGGSRYLHDNIKIGDRLKISEPRNLFPLTPSAKKTILFAGGIGITPILCMAERLTHTGADFEMHYCSRSSERTAFIETIKSSSYSDRVYLHFDDGAPEQKLQTASVLGHASSDKHLYVCGPGGFIDHVINTALSNNWQDEQIHREYFAAAPQPEGGNQVFQVRIGSTGQTFEIPTDKNVIEVLAAAGIDIPLSCEQGICGTCLTRVLEGVPDHRDMFLTAAEHAQNDVFTPCCSRSKSAVLVLDI

SEQ ID NO: 20476 - protein, 317 aa, Pseudomonas nitroreducens
MIEVIISAMRLVAQDIISLEFVRADGGLLPPVEAGAHVDVHLPGGLIRQYSLWNQPGVQSHYCIGVLKDPASRGGSKAVHENLRVGMRVQISEPRNLFPLEEGVERSLLFAGGIGITPILCMAQELAAREQDFELHYCARSADRAAFVEWLKVCDFADHVRFHFDNGPDQQKLNAAALLAAEAEGTHLYVCGPGGFMGHVLDTAKEQGWADNRLHREYFAAAPKVSADDGSFEVRIHSTGQVLQVPADQTVSQVLDEAGIIVPVSCEQGICGTCITRVVDGEPDHRDFFLTDAEKAKNDQFTPCCSRAKSACLVLDL

SEQ ID NO: 20477 - protein, 416 aa, Fusarium lichenicola
MAALTPAQVAIVRSTAPILKEHGKTITTTFYRNMLGAHPELKNYFSLRNQQTGAQQAALANSVLAYATHIDDLGKLSHAVERIAQKHVSLFIQPEQYQIVGTHLIGAIGEVLGSALTTEIKEAWIAAYGQLANIFIKREGDLYEAAGEWNSWRKFKIVKKEAENDGVTSFYLEPLDGKSLPKFLPGQYVSLQIPIPELDGILQSRQFSLSEAPGNKHLRVSVKLEGPTEEPALEDLAAGKIAGLVSNRLHKRYNVGDEVELSPPCGEFFVNPADTSAAKKPLVLVSAGVGATPLVSIYDSVLASETASRPITWIHGARYSGSSCFVPHILETAKQHDNVTAKIFLEDAKDGDAFDFEGQIDLARLEKDNLLHLDNQEAEYYICGPEDWMVGVRAWLEEKGVPRERQHLELFKTGDI

SEQ ID NO: 20478 - protein, 178 aa, uncultured archaeon
WGLFHQRTGQEGYFMMRLTNANGRLEPGQLRAIAEVADEYARGPAANPVFGNGWIDLTTRQSIQLHWVRLEDVPAIWEKLESVGVTTRSSGGDTMRNISGSPLAGKDPDEIIDTLPLLDRFQEEIRGDDALCNMPRKFNISISGTPYGGAQDSLNDIGLEPAFKTIDGEEVVGFNVRV

SEQ ID NO: 20479 - protein, 178 aa, uncultured archaeon
WWGLFHQRDGQESYFMMRLTNASGVLEPGQLRAIAEVARDYAAGPVENPEFGNGWIDLTTRQSIQLHWLKLEDVPEIWEKLESVGVSSRSSSGDTMRNISGSALHGKVEEYVDSGPLLERFQEELRGDDALANMPRKFNISVTGSKSGCAQDTLNDIGFEPARKEIDGETVKGFNVRV

SEQ ID NO: 20480 - protein, 178 aa, uncultured archaeon
WWGLFHQRDGQESYFMMRLTNASGVLEPGQLRAIAEVARDYAAGPVENPEFGNGWIDLTTRQSIQLHWLKLEDVPEIWEKLESVGVSSRSSGGDTMRNISGSALHGKVEEYVDSGPLLERFQEELRGDDALANMPRKFNISVTGSKSGCAQDTLNDIGFEPARKEIDGETVKGFNVRV

SEQ ID NO: 20481 - protein, 193 aa, uncultured archaeon
WWGLFHQRDGQESYFMMRLTNASGILEPGQLRAIGEVARDFAKGPVENPEFGNGWIDLTTRQSVQLHWLKLEDVPEIWERLEAEGVHSRSAGGDTMRNISGCPLHGKAEELVEAGPLLERFEEELRGDDALANMPRKFNISVTGCAVGCAQDSINDIGFEPAVKEIDVSESHSEARQTESDGGEEVMGFNVRV

SEQ ID NO: 20482 - protein, 192 aa, uncultured archaeon
WGLFHQRDGQESYFMMRLTNASGILEPGQLRAIGEVARDFAKGPVENPEFGNGWIDLTTRQSVQLHWLKLEDVPEIWERLEAEGVHSRSAGGDTMRNISGCPLHGKAEELVEAGPLLERFEEELRGDDALANMPRKFNISVTGCAVGCAQDSINDIGFEPAVKEIDVSESHSEARQTESDGGEEVMGFNVRV

SEQ ID NO: 20483 - protein, 179 aa, uncultured archaeon
WWGLYHQRNGQESYFMMRIGTPNGVLEPGQTEVVAEVAKEYATGPVANPEFGDAYVDWTTRQSIQLHWIKLEDVPAIFETLESVGLSTQQACGDSWRNVVGCPVAGKDGHEFVDAWPVAKELHETFKGDDDHANLPRKWKVSVTGCKEGCGQGDINDLAYEPAYKVRGGEEVKGFNVRV

SEQ ID NO: 20484 - protein, 177 aa, uncultured archaeon
WGLFHQRTGQEGYFMMRLTNANGLLDPGKLRAIGEVARDYATGPIANPEFGNGYLDLTTRQSVQLHWLDLEDIPAVWEHLEAAGVSSRSAGGDTMRNISGCALAGKADEYIDSLPLLERFQEELRGDDALANMPRKFNISVTGMKDGSAQDAINDIGFEAARKEIDGELAKGFNVRV

SEQ ID NO: 20485 - protein, 192 aa, uncultured archaeon
WWGLFHQRDGQESYFMMRLTNASGVLEPDQLRAIAEVARDYATGPAASPEFGNGFFDLTTRQSVQLHWLKLEDVPDIWEHLESVGVTSRSAGGDTMRNISGCALHGKAEEFVESGPLLERFQEELRGDDALSNMPRKFNISVTGCTEGCAQDSINDIGFEPATKEIDVSGEAGGSSDESDGGETVKGFNVRV

SEQ ID NO: 20486 - protein, 193 aa, uncultured archaeon
WWGLFHQRDGQESYFMMRLTNASGILEPGQLRAIGEVARDFAKGPVENPEFGNGWIDLTTRQSVQLHWLKLEDVPEIWERLEAEGVHSRSAGGDTMRNISGCPLHGKAEELVEAGPLLERFEEELRGDDALANMPRKLNISVTGCAVGCAQDSINDIGFEPAVKEIDVSESHSEARQTESDGGEEVMGFNVRV

SEQ ID NO: 20487 - protein, 193 aa, uncultured archaeon
WWGLFHQRDGQESYFMMRLTNASGILEPGQLRAIGEVARDFAKGPVENPEFGNGWIDLTTRQSVLLHWLKLEDVPEIWERLEAEGVHSRSAGGDTMRNISGCPLHGKAEELVEAGPLLERFEEELRGDDALANMPRKFNISVTGCAVGCAQDSINDIGFEPAVKEIDVSESHSEARQTESDGGEEVMGFNVRV

SEQ ID NO: 20488 - protein, 179 aa, uncultured archaeon
WWGLFHQRKGQESYFMMRIGTPNGRLTPEQLRVVGEIASEYATGPVENPEFGNGYCDWTTRQAIQLHWIQLRDIPEIFEKLEANGLSTIQACGDSWRNIVGSPMAGRDAKEHIDAWPVIQDLHETFKGNEEHANLPRKWKVAVTGDTRGSGQAEINDLGFEPAIKELDGEEIKGFNVRV

SEQ ID NO: 20489 - protein, 179 aa, uncultured archaeon
WWGLFHQRTGQEGYFMMRLTNANGRLEPGQLRAIAEVADEYARGPAANPVFGNGWIDLTTRQSIQLYWVRLEDVPAIWEKLESVGVTTRSSGGDTMRNISGSPLAGKDPDEIIDTLPLLDRFQEEIRGDDALCNMPRKFNLSISGTPYGGAQDSLNDIGLEPAFKTIDGEEVVGFNVRV

SEQ ID NO: 20490 - protein, 179 aa, uncultured archaeon
WWGLFHQRKGQESYFMMRIGTPNGRLTPEQLRVVGEIASEYATGPVENPEFGNGYCDWTTRQAIQLHWIQLRDIPEIFEKLEANGLSTIQACGDSWRNIVGSPMAGRDAKEHIDAWPVIEDLHETFKGNEEHANLPRKWKVAVTGDTRGSGQAEINDLGFEPAIKELDGEEIKGFNVRV

SEQ ID NO: 20491 - protein, 178 aa, uncultured archaeon
WWGLFHQRDGQESYFMMRLTNASGVLEPGQLRAIAEVARDYAAGPVENPEFGNGWIDLTTRQSIQLHWLKLEDVPEIWEKLESVGVSSRSSGGDTMRNTSGSALHGKVEEYVDSGPLLERFQEELRGDDALANMPRKFNVSVTGSKSGCAQDTLNDIGFEPARKEIDGETVKGFNVRV

SEQ ID NO: 20492 - protein, 178 aa, uncultured archaeon
WWGLYHQRDGQESYFMMRLTNASGFLEPGQLRAIAEVARDYAAGPVENPEFGNGWIDLTTRQSIQLHWLKLEDVPEIWEKLESVGVSSRSSGGDTMRNISGSALHGKVEEYVDSGPLLERFQEELRGDDALANMPRKFNISVTGSKSGCAQDTLNDIGFEPARKEIDGETVKGFNVRV

SEQ ID NO: 20493 - protein, 178 aa, uncultured archaeon
WWGLYHQRSGQESYFMMRLTNASGILEPGQLRVIGEVAQEYATGPVENPEFGNGWIDLTTRQSVQLHWLKLEDVPEIWDKLEAEGVHSRSSGGDTMRNISGSALHGKVEEYVESGPPLERFEEELRRDDTLANMPRKFNISVTGTKSGCAQDSINDIGFEPARKEMDGETVKGFNVRV

SEQ ID NO: 20494 - protein, 175 aa, uncultured archaeon
YHQRNGQESYFMMRIGPPGGVLKPGQIEVVADLAEEYAHGPVENPIFGNGWVDWTTRQAIQLHWIKLEDVPDIFERLEAVGLTTQQACGDSWRNIVGCPVAGKDKHEFVDAMELAEGLNETYKGNDDHTNLPRKWKVSVTGCREGCGQGDINDLAFEPAEKEIDGEPVRGFNVRV

SEQ ID NO: 20495 - protein, 178 aa, uncultured archaeon
WWGLFHQRDGQESYFMMRLTNASGALEPGQLRAIAEVARDYAAGPVENPEFGNGWIDLTTRQSIQLHWLKLEDVPEIWEKLESVGVSSRSSGGDTMRNISGSALHGKVEEYVDSGPLLERFQEELRGDDALANMPRKFNISVTGSKSGCAQDTLNDIGFEPARKEIDGETVKGFNVRV

SEQ ID NO: 20496 - protein, 178 aa, uncultured archaeon
WWGLFHQRDGQESYFMMRLTNASGILEPGQLRVIGEVAREYATGPVENPELGNGWIDLTTRQSVQLHWLKLEDVPEIWDTLESEGVHSRSAGGDTMRNISGCPLHGKAEEFVEAGPLLERFEEELRGDDALANMPRKFNISATGCTIGCAQDSINDVGFEPAVKEIDGEEVRGFNVRV

SEQ ID NO: 20497 - protein, 178 aa, uncultured archaeon
WWGLFHQRDGQESYFMMRLTNASGILEPGQLRVIGEVARDYATGPVENPEFGNGWIDLTTRQSVQLHWLKLEDVPEIWAKLESEGVHSRSAGGDTMRNISGSALHGKVEEYVESGPLLERFEEELRGDNALANMPRKFNISVTGSKSGCAQDSLNDIGFEPARKEIDGETVKGFNVRV

SEQ ID NO: 20498 - protein, 179 aa, uncultured archaeon
WWGLYHQRKGQESYFMMRIGTPNGRLTPEQLRVVGEIADEYARGPVDNPEFGGAYCDWTTRQSIQLHWIQLEDIPAIFDKLEANDLSTIQACGDSWRNIVGSPMAGRDAKEHIDAWPVIKDLNDTFKGNDEHSNLPRKWKVAVTGDTRGSGQAEINDLGFEPATKELDGEETKGFNVRV

SEQ ID NO: 20499 - protein, 178 aa, uncultured archaeon
WWGLYHQRSGQGSYFMMRIGTPNGVLEPGQTEVVAEVANEYATGPASNPEFGDAYVDWTTRQSIQLHWIRLEDIPEVFEKLESVGLSTQQACGDSWRNIVGNPMAGKAPEFVDALPVIMELNDRFKGNDEHSNLPRKWKVSVTGAPDGSGQGDINDLAFEPAFKEIDGEEVRGFNVRV

SEQ ID NO: 20500 - protein, 177 aa, uncultured archaeon
WGLFHQRTGQEGYFMMRLTNANGLLDPGKLRAIGEVARDYATGPIANPEFGNGYLDLTTRQSVQLHWLDLEDIPAVWEHLEAAGVSSRSAGGDTMRNISGCALAGKADEYIDSLPLLERFQEELRGDDALANMPRKFNISVTGMKDGSAQDAINDIGFEAARKEIDGELAKGFNVAV

SEQ ID NO: 20501 - protein, 178 aa, uncultured archaeon
WWGLFHQRDGQESYFMMRLTNASGILEPGQLRAIGEVARDYATGRVENPEFGNGWIDLTTRQSMELHWLELEDVPAIWEKLESVGVSSRSAGGDTMRNISGNPLHGKVEEIVDSGPLLERFQEELRGDDALSNMPRKLNISVSGTAVGAAQDSINDIGFEPARKEVGGEEVLGFNVRV

SEQ ID NO: 20502 - protein, 175 aa, uncultured archaeon
WWGLFHQRAGQESYFMMRIGTPNGVIEPGQLEVIGEVAKEYATGPVDNPEFGDAYCDWTTRQSIQLHWIKLEDIPEIFDKLESNGLTTQQACGDSWRNIVGCPVAGKDKHEHVDAWPVAKDLHETFKGNDDYSNLPRKWKVAVAGCDEGCGQGDINDLAFEPAEKNGEVGFNVRV

SEQ ID NO: 20503 - protein, 177 aa, uncultured archaeon
WGLFHQRDGQESYFMMRLTNASGILEPGQLRAIGEVARDFAKGPVENPEFGNGWIDLTTRQSVQLHWLKLEDVPEIWERLEAEGVHSRSAGGDTMRNISGCPLHGKAEELVEAGPLLERFEEELRGDDALANMPRKFNISVTGCAVGCAQDSINDIGFEPAVKEIGGEDVTGFNVRV

SEQ ID NO: 20504 - protein, 178 aa, uncultured archaeon
WWGLFHQRDGQESYFMMRLTNASGILEPGQLRAIAEVARDYAAGPVENPEFGNGWIDLTTRQSIQLHWLKLEDVPEIWEKLESVGVSSRSAGGDTMRNISGSALHGKVEEYVDSGPLLERFQEELRGDDALANMPRKFNISVTGSKSGCAQDTLNDIGFEPARKEVDGETVKGFNVRV

SEQ ID NO: 20505 - protein, 177 aa, uncultured archaeon
WGLFHQRNGQESYFMMRIGTPNGVLEPGQTEVVAELAKEYATGPATNPEFGDAYVDWTTRQSIQLHWLKLEDIPEIFERMEAVGLSSQQACGDSWRNIVGNPMAGKAPEFVDALPVIQELNDRSKGNDDHANLPRKWKVSVTGSPDGSGQGDINDMAFEPAYKEVDGEKVRGFNVRV

SEQ ID NO: 20506 - protein, 193 aa, uncultured archaeon
WWGLFHQRDGQESYFMMRLTNASGILEPGQLRAIGEVARDFAKGPVENPEFGNGWIDLTTRQSVQLHWLKLEDVPEIWERLEAEGVHSRSAGGDTMRNISGCPLHGKAEELVEAGPLLERFEEELRGDDALANMPRKFNISVTGCAVGCAQDSISDIGFEPAVKEIDVSESHSEARQTESDGGEEVMGFNVRV

SEQ ID NO: 20507 - protein, 177 aa, uncultured archaeon
WWGLFHQRTGQEGYFMMRLTNANGLLDPGQLRVIGEVARDYATGPIANPEFGNGYLDLTTRQSVQLHWPDLEDIPAVWEHLEAAGVSSRSAGGDTMRNISGCALAGKADEYIDSLPLLERFQEELRGDDALANMPRKFNISVTGMKDGSAQDAINDIGFEAARKEIDGELVKGFNVR

SEQ ID NO: 20508 - protein, 179 aa, uncultured archaeon
WWGLYHQRAGQESYFMLRIGPPSGILEPGQFRRLVEVADEFSRGPVENPEFGNGWLDVTTRQAVQLHWVRLEDVPDLFDAIEDVGLSAVQACGDSWRDIVGCPVAGKDKHEHVDAGALAEDLHDTFKRNEAHSNLPRKWEVAVTGCDEGCGQGDINDLAFEPAKKEIEGETVTGFNVRV

SEQ ID NO: 20509 - protein, 178 aa, uncultured archaeon
WWGLFHQRDGQESYFMMRLTNASGFLEPGQLRAIAEVARDYAAGPVENPEFGNGWIDLTTRQSIQLHWLKLEDVPGIWEKLESVGVSSRSSGGDTMRNISGSALRGKVEEYVDSGPLLERFQEELRGGDALANMPRKFNISVTGSKSGCAQDTLNDIGFEPARKEIDGETVEGFNVRV

SEQ ID NO: 20510 - protein, 178 aa, uncultured archaeon
WWGLFHQRDGQESYFMMRLTNASGLLDPGQLRAIGEVARDYANGPIENPEFRNGFLDLTTRQSVQLHWIDLEDVPAVWDHLESAGVSSRSAGGDTMRNISGGALAGKIDEYVDSLPLLKKFQKELRGDDALANMPRKFNISVTGSKDGSAQDSLNDIGFEAARKEIDGELVKGFNVRV

SEQ ID NO: 20511 - protein, 179 aa, uncultured archaeon
WWGLFHQRTGQEGYFMMRLTNANGRLEPGQLRAIAEVADEYARGPAANPVFGNGWIDLTTRQSIQLHWVRLEDVPAIWEKLESVGVTTRSSGGDTMRNISGSPLAGKDPDEIIDTLPLLDRFQEEIRGDDALCNMPRKFNISISGTPYGGAQDSLNDIGLEPAFKKIDGEEVVGFNVRV

SEQ ID NO: 20512 - protein, 179 aa, uncultured archaeon
WWGLYHQRTGQEGYFMMRLTNANGRLEPGQLRAIAEVADEYARGPAANPVLGNGWIDLTTRQSIQLHWVRLEDVPAIWEKLESVGVTTRSSGGDTMRNISGSPLAGKDPDEIIDTLPLLDRFQEEIRGDDALCNMPRKFNISISGTPYGGAQDSLNDIGLEPAFKTIDGEEVVGFNVRV

SEQ ID NO: 20513 - protein, 174 aa, uncultured archaeon
HQRKGQESYFMMRIGTLNGRLTPQQLRVVGEIADEYARGPVDNPEFGGAYCDWTTRQSIQLHWIQLQDIPDIFEKLEDNGLSTIQACGDSWRNIVGSPMAGRDAEEHIDAWPVIQELHDTFKGNDDHANLPRKWKVAVTGDTRGSGQAEINDLGFEPAVKEIDGEETKGFNVRV

SEQ ID NO: 20514 - protein, 179 aa, uncultured archaeon
WWGLYHQRAGQESYFMMRIGPPNGVLEPGMLRTIGEVAKEYSTGPAENPEFGNGWADFTTRQAIQLHWINIEDVPAIWDELDAAGLSTLQACGDSWRNIVGCPVAGKDKHEHVDALDTIHELHDTFKGNDAHSNLPRKWKVSVTGCDEGCGQGDINDLGFEPAEKEIDGETVEGFNVRV

SEQ ID NO: 20515 - protein, 179 aa, uncultured archaeon
WWGLFHQRSGQESYFMMRLTNASGILEPGQLRVIGEVAQEYATGPVENPEFGNGWIDLTTRQSVQLHWLKLEDVPEIWDKLEAEGVHSRSSGGDTMRNISGSALHGKVEEYVESGPLLERFEEELRRDDTLANMPRKFNISVTGTKSGCAQDSINDIGFEPARKEMDGETVKGFNDRVE

SEQ ID NO: 20516 - protein, 176 aa, uncultured archaeon
GLFHQRSGQESYFMMRLTNCGGVLEPDQLRAIGEVARDYATGPAANPEFGNGWIDFTTRQSIQLHWIKLEDVPAIWERLESVGVSSRSSGGDTMRNISGCPVAGKAEEYIESRPILDEIQETIRGDDDLCSMPRKFYISVTGCRQGCAQDSINDVGLEPAHKFIDGEEVEGFNVRV

SEQ ID NO: 20517 - protein, 179 aa, uncultured archaeon
WWGLYHQRKGQESYFMMRIGTPNGRLTPEQLRVVGEIADEYARGPVENPEFGDAYCDWTTRQSIQLHWIQLQDIPDIFEKLEAHDLSTIQACGDSWRNIVGSPVAGRDDKEHIDAWPVIKELHETFKGNDEHANLPRKWKVAVTGDTRGSGQAEINDLGFEPATKEVGGEETKGFNVRV

SEQ ID NO: 20518 - protein, 193 aa, uncultured archaeon
WWGLFHQRDGQESYFMMRLTNASGILEPGQLRAIGEVARDFAKGPVENPEFGNGWIDLTTRQSVQLHWLKLEDVPEIWERLEAEGVHSRSAGGDTMRNISGCPLHGKAEELVEAGPLLERFEEELRGDDALANMPRKFNISVTGCAVGCAQDSINDIGFEPAVKEIDISESHSEARQTESDGGEEVTGFNVRV

SEQ ID NO: 20519 - protein, 178 aa, uncultured archaeon
WWGLFHQRDGQESYFMMRLTNASGVLEPGQLRAIAEVARDYAAGPVENPEFGNGWIDLTTRQSIQLHWLKLEDVPEIWEKLESVGVSSRSSGGDTMRNISGSALHGKVEEYVDSGPLLERFQEELRGDDALANMPRKFNISVTGSKSGCAQDTLNDIGFEPARKEIDGETVRGFNVRV

SEQ ID NO: 20520 - protein, 193 aa, uncultured archaeon
WWGLFHQRDGQESYFMMRLTNASGILEPGQLRAIGEVARDFAKGPVENPEFGNGWIDLTTRQSVQLHWLKLEDVPEIWERLEAEGVHSRSAGGDTMRNISGCPLHGKAEELVEAGPLLERFEEELRGDDALADMPRKFNISVTGCAVGCAQDSINDIGFEPAVKEIDVSESHSEARQTESDGGEEVMGFNVRV

SEQ ID NO: 20521 - protein, 196 aa, uncultured archaeon
WWGLYHQRKGQESYFMMRIGTPNGRLTPDQLRVVGEIADEYARGPVDNPEFGGAYCDWTTRQSIQLHWIQLQDIPDIFEKLESNGLSTIQACGDSWRNIVGSPVAGRDQKEHINAWPVIQELHETFKGNDEHSNLPRKWKVAVTGDTRGSGQAEINDLGFEPATKEIDTDEQSSSSNQNSKNSDNGEKRKGFNVRV

SEQ ID NO: 20522 - protein, 179 aa, uncultured archaeon
WWGLFHQRNGQESYFMMRIGPPGGVLKPGQIEVVAELAEEYAHGPVENPIFGNGWVDWTTRQAIQLHWIKLEDVPDIFERLEAVGLTTQQACGDSWRNIVGCPVAGKDKHEFVDAMELAEGLNETYKGNDEHTNLPRKWKVSVTGCREGCGQGDINDLAFEPAEKEIDGESVRGFNVRV

SEQ ID NO: 20523 - protein, 178 aa, uncultured archaeon
WWGLFHQRNGQESYFMMRIGTPNGVLEPGQTEVVAELAKEYATGPATNPEFGDAYVDWTTRQSIQLHWLKLEDIPEIFEKMEAVGLSSQQACGDSWRNIVGNPMAGKAPEFVDALPVIQELNDRFKGNDDHANLPRKWKVSVTGSPDGSGQGDINDMAFEPAYKEVDGEKVRGFNVRV

SEQ ID NO: 20524 - protein, 193 aa, uncultured archaeon
WWGLFHQRDGQESYFMMRLTNASGILEPGQLRAIGEVARDFAKGPVENPEFGNGWIDLTTRQSVQLHWLKLEDVPEIWERLEAEGVHSRSAGGDTMRNISGCPLHGKAEELVEAGPLLERFEEELRGDDALANMPRKFNISVTGCAVGCAQDSINDIGFEPAVKEIDVPESHSEARQTESDGGEDVTGFNVRV

SEQ ID NO: 20525 - protein, 179 aa, uncultured archaeon
WWGLFHQRKGQESYFMMRIGTPNGRLTPEQLRVVGEVANEYARGPVENPEFGGAYCDWTTRQSIQLHWIQLKDIPDIFEKLEAHDLSTIQACGDSWRNIVGSPVAGRDGKEHIDAWPVIQELHETFKGNDDHSNLPRKWKVAVTGDTRGSGQAEINDLGFEPATKAIDGEETKGFNVRV

SEQ ID NO: 20526 - protein, 179 aa, uncultured archaeon
WWGLFHQRKGQESYFMMRIGTPNGRLTPEQLRVVGEVANEYARGPVENPEFGGAYCDWTTRQSIQLHWIQLKDIPDIFEKLEAHDLSTIQACGDSWRNIVGSPVAGRDGKEHIDAWPVIQELHETFKGNDDHSNLPRKWKVAVTGDTRGSGQVEINDLGFEPATKAIDGEETKGFNVRV

SEQ ID NO: 20527 - protein, 358 aa, Pseudomonas putida
MSQFHSLTIKQVRNETRDAVSIAFDVPEHLQAQFRFTQGQYLVMRTQLDNEEVRRSYSICSAVQDGELRVAVKRVPGGRFSAFANEVLKAGQQLEVMPPAGSFFVPLDAARQGNYLGVAAGSGITPILSIIGTTLDSEPHSCFTLLYGNRSSSGALFRDKLEDLKNRYLDRLNLIFVFSREQQDVDLYNGRVDADKCGQLFSRWLDVPGLDAAFICGPQAMTETVRDSLQANGLGKERIHFELFAAAGSETRREAREAAHQVDSALSHITVISDGRALTFDLPRNTQNVLDAGNAIGAELPYSCKAGVCSTCKCRVIEGEVEMDSNHALEDYEVAAGYVLSCQTYPVSDKVVLDFDQL

SEQ ID NO: 20528 - protein, 196 aa, Arabidopsis thaliana
MVRGKIEMKKIENATSRQVTFSKRRNGLLKKAYELSVLCDAQLSLIIFSQRGRLYEFSSSDMQKTIERYRKYTKDHETSNHDSQIHLQQLKQEASHMITKIELLEFHKRKLLGQGIASCSLEELQEIDSQLQRSLGKVRERKEKQLLEENVKLHQKNVINPWRGSSTDQQQEKYKVIDLNLEVETDLFIGLPNRNC

SEQ ID NO: 20529 - protein, 236 aa, Arabidopsis thaliana
MNGDNRPVEDAHYTETGFPYAATGSYMDFYGGAAQGPLNYDHAATMHPQDNLYWTMNTNAYQFGFSGSDNASFYGSYDMNDHLSRMSIGRTNWDYHPMVNVADDPENTVARSVQIGDTDEHSEAEECIANEHDPDSPQVSWQDDIDPDTMTYEELVELGEAVGTESRGLSQELIETLPTKKYKFGSIFSRKRAGERCVICQLKYKIGERQMNLPCKHVYHSECISKWLSINKVFVT

SEQ ID NO: 20530 - protein, 255 aa, Arabidopsis thaliana
MVFSHQGEIPYREGQSVGVIADGIDKNGKPHKVRLYSIASSALGDLGNSETVSLCVKRLVYTNDQGETVKGVCSNFLCDLAPGSDVKLTGPVGKEMLMPKDPNATVIMLATGTGIAPFRSFLWKMFFEKHDDYKFNGLAWLFLGVPTTSSLLYQEEFDKMKAKAPENFRVDYAISREQANDKGEKMYIQTRMAQYAAELWELLKKDNTFVYMCGLKGMEKGIDDIMVSLAANDGIDWFDYKKQLKKAEQWNVEVY

SEQ ID NO: 20531 - protein, 271 aa, Arabidopsis thaliana
MSLLADLVNLDISDNSEKIIAEYIWVGGSGMDMRSKARTLPGPVTDPSKLPKWNYDGSSTGQAPGQDSEVILYPQAIFKDPFRRGNNILVMCDAYTPAGEPIPTNKRHAAAEIFANPDVIAEVPWYGIEQEYTLLQKDVNWPLGWPIGGFPGPQGPYYCSIGADKSFGRDIVDAHYKASLYAGINISGINGEVMPGQWEFQVGPSVGISAADEIWIARYILERITEIAGVVVSFDPKPIPGDWNGAGAHTNYSTLRIGGQLQTWTLTLLLP

SEQ ID NO: 20532 - protein, 278 aa, Arabidopsis thaliana
MAQILAASPTCQMRVPKHSSVIASSSKLWSSVVLKQKKQSNNKVRGFRVLALQSDNSTVNRVETLLNLDTKPYSDRIIAEYIWIGGSGIDLRSKSRTIEKPVEDPSELPKWNYDGSSTGQAPGEDSEVILYPQAIFRDPFRGGNNILVICDTWTPAGEPIPTNKRAKAEIFSNKKVSGEVPWFGIEQEYTLLQQNVKWPLGWPVGAFPGPQGPYYCGVGADKIWGRDISDAHYKACLYAGINISGTNGEVMPGQWEFQVGPSVGIDAGDHVWCARYLL

SEQ ID NO: 20533 - protein, 571 aa, Arabidopsis thaliana
MVSHKCVEEFGYASYLVPSNARAPRSARKRRSIEKRISKEDDNMCAIDLLATVAGHLSFESGSSLMSIDKLIEDHRVKEEFPEEEKPLMPVALSPYRGSLSPCGFSSVINGKVENEVDGFSYSGGSDACQVGNFSQDVKPDIDGDAVVLDARPNVVVSLGSSSRTEVPSIGNCVSHGVRDDVNLFSRDDDENFSKYIHPRVTKHSPRTVPRIGDRRIRKILASRHWKGGSRHSDTKPWRNYYLHQQRSYPIKKRKNFDHISDSVTDDYRMRTKMHRGSRKGQGASFVASDSHVKLRIKSFRVPELFIEIPETATVGSLKRMVMEAVSTLLSDGHRVGLMVQGKKVRDDNKTLHQTGISQDNSHLDSLDFSLEPSSEMPQLLTSHPLGHACEELLPVCQATKIDNVLESDHHDSALFPSDSLGNNNVTEDSKAMISVALNELSSQSQPPSRKSRRSEQQQQQAAQRRIRRPFSVAEVEALVQAVEKLGTGRWRDVKLCAFEDADHRTYVDLKDKWKTLVHTAKISPQQRRGEPVPQELLNRVLNAHGYWTQQQMQPWRSSLLCVLLLLLMIM

SEQ ID NO: 20534 - protein, 396 aa, Arabidopsis thaliana
MYLSFDPAVMATYSSVPVCADVCVVGVARTPIGDFLGSLSSLTATRLGSIAIQAALKRAHVDPALVEEVFFGNVLTANLGQAPARQAALGAGIPYSVICTTINKVCAAGMKSVMLASQSIQLGLNDIVVAGGMESMSNVPKYLPDARCFLSFLTQTCRNKPKRGIFHLFLSSRLFFTLISVSRRGSRLGHDTVVDGMMKDGLWDVYNDFGMGVCGEICADQYRITREEQDAYAIQSFERGIAAQNTQLFAWEIVPVEVSTGRGRPSVVIDKDEGLGKFDVAKLKKLRPSFKEDGGSVTAGNASSISDGAAALVLVSGEKALELGLHVIAKIRGYADAAQAPELFTTTPALAIPKAIKRAGLDASQVDYYEINEAFSVIAHAELSVFYSCSVCIKRS

SEQ ID NO: 20535 - protein, 254 aa, Arabidopsis thaliana
MISVDAPLLSADDLADQIVEVLNYFGLGAVMCMGVTAGAYILTLFAMKYRQRVLGLILVSPLCQAPSWSEWLCNKVMSNLLYYYGTCGVVKEMLLKRYFSKEVRGNGHVPESDIVQECRRLLSERQSTNVWRFLEAINGRVDLSEGLRKLQCRTLIFIGENSAYHSEAVHMTTKLDRRYGALVEVQGSGSLVSEEQPQAMIIPMEYFLMGYGLYRPTQSVSPRSPLSPTRISPELLSPENMGLKLKPIKTRLAL

SEQ ID NO: 20536 - protein, 308 aa, Neocallimastix frontalis
MAQKKQQQKLGFYEDFLLAGVSATISKTAAAPLERVKLLVQNQGEMLKSGRLATPYKGIGDCFVRVAKEVGIASFWRGNGANIIRYFPTQALNIAFKERIKNALAVDKEKEGYAEWLVGNIASGGAGGALSQVFVYSLDYARTRLANDAKSANGGERQYKGLIDVYKKTYKADGITGLYRGFALSCVGIMVYRGLYFGLYDSMKPLLKNLGMEGSFAASFILGWGVTTVAGIASYPIDTIRRRMMMTSGETVKYKSSIDCAKQVMQKEGVQAFFKGCGANILRGVAGAGVLSGFDKIKEVYINWRIKN

SEQ ID NO: 20537 - protein, 491 aa, Ceratodon purpureus
KSVGQSAESVPAGAVTAYLQRMQREGLIQNFGCMVAVEEPNFCVIAYSENASEFLDLIPQAVPSMGEMDVLGIGTDIRTLFTPSSSAALEKAAATQDISLLNPITVHCRRSGKPLYAIAHRIDIGIVIDFEAVKMIDVPVSAAAGALQSHKLAARAITRLQALPGGDIELLCDTIVEEVRELTGYDRVMAFKFHEDEHGEVVAEIRRMDLEPYMGLHYPATDIPQASRFLLMKNRVRLIADCYASPVKLIQDPDIRQPVSLAGSTLRAPHGCHAQYMGNMGSIASLVMAVIINDNEEYSRGAIQRGRKLWGLVVCQHTSPRTVPFPLRSVCEFLMQVFGMQLNLHVELAAQLREKHILRTQTLLCDMLLRDAPIGIVSQTPNIMDLVKCDGAALYYGKRVWLLGTTPTENQIKEIADWLLEHHNDSTGLSTDSLADANYPGAHLLGDAVCGMAAAKITAKDFLFWFRSHTATEVKWGGAKHDPDEKDDGRK

SEQ ID NO: 20538 - protein, 182 aa, Cydonia oblonga
MLTNVLDAAAGALSYYLFGFAFAFGAPSNAFIGRHFFGLRDFPSVSGGDYSFFLYQWAFAIAAAGITSGSIAERTQFVAYLIYSSFLTGFVYPVVSHWFWSADGWASPIRPDNLLFGSGSIDFAGSGVVHMVGGIAGLWGAVIEGPRIGRFDRTGRSVALRGHSASLVVLGTFLLWFGWYGF

SEQ ID NO: 20539 - protein, 184 aa, Cydonia oblonga
MLTNVVDAVVGSLSYYLFGFAFAFGEGSNANPFIGTSFFALKDIPNSTDDYDYSFFLFQWAFAIAVAGITSGSVAERTQFSAYLIFSCFLSGFVYPVVAHWVWSSTGWLSPNSSNLLLGSGAIDFAGSGVVHLVGGVAGLWGSLIEGPRVGRFDAFGKATPIRGHNATLVVLGTFLLWFGWFGF

SEQ ID NO: 20540 - protein, 183 aa, Cydonia oblonga
MLTNVVDAATGGLFYYLFGYAFAFGGPSNGFIGHHFFGLSKVPSAATGFDYSHFLYQWAFAIAAAGITSGSIAERTQFVAYLIYSSFLTGFVYPVVSHWFWSVDGWASAGNIENLLFGTGVIDFAGSGVVHMVGGIAGLWGAFIEGPRMGRFDHSGRAVALRGHSASLVVLGTFLLWFGWFGF

SEQ ID NO: 20541 - protein, 181 aa, Cydonia oblonga
MLTNVVDAATGGIFYYLFGFALAFGTPSNGFIGQHFFGLNKFPSQSFDYGYFLYQWAFAIAAAGITSGSIAERTQFVAYLIYSSFLTGFVYPIVSHWFWSADGWASPARADNLLFESGVIDFAGSGVVHLVGGIAGLWGALIEGPRIGRFDHEGKSAAMRGHSGTLVVLGTFLLWFGWYGF

SEQ ID NO: 20542 - protein, 180 aa, Cydonia oblonga
MLTNVVDAAGGLFYYLFGFAFAFGSPSNGFIGHHFFGLKDITSSTLDYSNFLYQWAFAIAAAGTTSGSIAERTQFVAYLIYSSFLTGFVYPVVSHWFWSTDGWASALKTDDRLFGGGVIDFAGSGVVHMVGGIAGLWGAFIEGPRIGRFERSGRSVALRGHSASLVVLGTFLLWFGWYGF

SEQ ID NO: 20543 - protein, 661 aa, Oncidium Gower Ramsey
MLLFRATLLPSPPFFHKTYFSHLSPVIFSDDPLPVSLQRNRVSGCRKQKWRQIRTLALQSDTLSEVRSAPPELNVERNKFRILIAGGGIGGLVLALAAKKKGFDALVFEKDMSAIRGEGQYRGPIQIQSNALAALEAIDSQVAEEVMGTGCITGDRINGLVDGVSGTWYIKFDTFTPAAERGLPVTRVISRMSLQQILARAVGDDAILSDSKIVDFVDYGNKVAVILENGQQYEGDLLVGADGIWSKVREILFGYSEPSYSGYTCYTGIADFVPPDIDTVGYRVFLGHKQYFVSSDVGAGKMQWYAFHNEPPSGSDVPNGKKEILLKIFNGWCDNVIDLINATEEELILRRDIYDRIPIFTWGKGRVTLLGDSVHAMQPNMGQGGCMAIEDSYQLAHELEKARKESIQSRKPMDVKSALKRYEKERRLRVAVIYGMARMAAIMASTYRPYLGVGLGPLSFLTKYKIPHPGRTSGRLVIKYAMPLMLSWVLGGNSSKLEGRSLTCRLSDKASDQLRKWFEDDDALERALGGEWYLFPLNNGDIQPIRLVRDDKRFHIIGSISHDDSEGISIHLPFPQVHKTHARIACKDNIFYLTDLQSQYGTWITDNEGRRYQAPPNVPVRFRSSYSIEFGSDKKVVFKVKVLSTSHKSAVYGGQNLSPVV

SEQ ID NO: 20544 - protein, 304 aa, Nostoc sp. PCC 7119
MTQAKAKHADVPVNLYRPNAPFIGKVISNEPLVKEGGIGIVQHIKFDLTGGNLKYIEGQSIGIIPPGVDKNGKPEKLRLYSIASTRHGDDVDDKTISLCVRQLEYKHPESGETVYGVCSTYLTHIEPGSEVKITGPVGKEMLLPDDPEANVIMLAGGTGITPMRTYLWRMFKDAERAANPEYQFKGFSWLVFGVPTTPNILYKEELEEIQQKYPDNFRLTYAISREQKNPQGGRMYIQDRVAEHADELWQLIKNQKTHTYICGPRGMEEGIDAALSAAAAKEGVTWSDYQKDLKKAGRWHVETS

SEQ ID NO: 20545 - protein, 1130 aa, Glycine max
MSSSRPSQSSSNNSGRSRTSRLSARRMAQTTLDAKLHATFEESGSSFDYSSSVRMSPAGTVSGDHQPRSDRATSSYLHQTQKIKLIQPFGCLLALDEKTCKVIAYSENAPEMLTMVSHAVPSVGDHPALGIGTDIRTIFTAPSSAAIQKALRFGDVSLHNPILVHCKTSGKPFYAIIHRVTGSVIIDFEPVKPHEVPMTASGALQSYKLAAKAITRLESLTTGNMETLCNTMVREVFELTGYDRVMAYKFHEDDHGEVIAEVKRPGLEPYLGLHYPATDIPQATRFLFMKNKVRMIVDCCAKHVNVLQDKKIPFDLTLCGSTLRAAHSCHLQYMENMNSSASLVMAVVVNDNDEDGDSSDAVQPQKSKRLWGLVVCHHTTPRFVPFPLRYACQFLAQVFAVHVSKELEIEYQIIEKNILQTQTLLCDMLVQGEPLGIVSQSPNIMDLVKCDGAALLYKNKVWRLGVTPSESQIKEIALWLFECHEDSTGFCTDSLSDAGFPGAAALGDIACGMAAARIASKDILFWFRSHTASEIRWGGAKHEPGERDDGRRVHPRSSFKAFLEVVKTRSLPWKTYETDAIHSLQLILRDAFKETQSMEISTYAIDTRLGDLKIEGMQELDAVTSEVVRLIETATVPILAVDVNGMINGWNTKIAELTGLPVDEAIGKHLLTLVEDFSVDRVKKMLDMALQGEEERNVQFEIQTHHMKIDSGPISLVVNACASRDLQDNVVGVCFLAQDITAQKTMMDKFTRIEGDYKAIVQNPNPLIPPIFGTDEFGWCCEWNSAMAKLTGWKREEVMDKMLLGEVFGTQIACCRLRNHEAVVNFSIVLNTAMAGLETEKVPFGFFARDGKHVECILSMTKKLDAEGVVTGVFCFLQLASAELQQALHIQRISEQTSLKRLKDLTYLKRQIQNPLYGIMFSRKLLEGTELGAEQKQFLQTGIRCQRQISKILDDSDLDSIIDGYMDLEMVEFTLHEVLVASLSQVMTKSNAKGIRVVNDVEEKITTETLYGDSIRLQQVLADFLLISINFTPTGGQVVVAATLTQQQLGKLVHLANLEFSITHDSFGVPETLLNQMFGRDGHESEEGISMLISRKLLKLMNGDVRYLREAGKSSFILSVELAAAHKSNT

SEQ ID NO: 20546 - protein, 1130 aa, Glycine max
MSSSRPSQSSSNNSGRSRTSRLSARRMAQTTLDAKLHATFEESGSSFDYSSSVRMSPAGTVSGDHQPRSDRATSSYLHQTQKIKLIQPFGCLLALDEKTCKVIAYSENAPEMLTMVSHAVPSVGDHPALGIGTDIRTIFTAPSSAAIQKALRFGDVSLHNPILVHCKTSGKPFYAIIHRVTGSVIIDFEPVKPHEVPMTASGALQSYKLAAKAITRLESLTTGNMETLCNTMVREVFELTGYDRVMAYKFHEDDHGEVIAEVKRPGLEPYLGLHYPATDIPQATRFLFMKNKVRMIVDCCAKHVNVLQDKKIPFDLTLCGSTLRAAHSCHLQYMENMNSSASLVMAVVVNDNDEDGDSSDAVQPQKSKRLWGLVVCHHTTPRFVPFPLRYACQFLAQVFAVHVSKELEIEYQIIEKNILQTQTLLCDMLVQGEPLGIVSQSPNIMDLVKCDGAALLYKNKVWRLGVTPSESQIKEIALWLFECHEDSTGFCTDSLSDAGFPGAAALGDIACGMAAARIASKDILFWFRSHTASEIRWGGAKHEPGERDDGRRVHPRSSFKAFLEVVKTRSLPWKTYETDAIHSLQLILRDAFKETQSMEISTYAIDTRLGDLKIEGMQELDAVTSEVVRLIETATVPILAVDVNGMINGWNTKIAELTGLPVDEAIGKHLLTLVEDFSVDRVKKMLDMALQGEEERNVQFEIQTHHMKIDSGPISLVVNACASRDLQDNVVGVCFLAQDITAQKTMMDKFTRIEGDYKAIVQNPNPLIPPIFGTDEFGWCCEWNSAMAKLTGWKREEVMDKMLLGEVFGTQIACCRLRNHEAVVNFSIVLNTAMAGLETEKVPFGFFARDGKHVECILSMTKKLDAEGVVTGVFCFLQLASAELQQALHIQRISEQTSLKRLKDLTYLKRQIQNPLYGIMFSRKLLEGTELGAEQKQFLQTGIRCQRQISKILDDSDLDSIIDGYMDLEMVEFTLHEVLVASLSQVMTKSNAKGIRVVNDVEEKITTETLYGDSIRLQQVLADFLLISINFTPTGGQVVVAATLTQQQLRKLVHLANLEFSITHDSFGVPETLLNQMFGRDGHESEEGISMLISRKLLKLMNGDVRYLREAGKSSFILSVELAAAHKSNT

SEQ ID NO: 20547 - protein, 1094 aa, Glycine max
MSSSRPSQSSSNNSGRSRTSRLSARRMAQTTLDAKLHATFEESGSSFDYSSSVRMSPAGTVSGDHQPRSDRATSSYLHQTQKIKLIQPFGCLLALDEKTCKVIAYSENAPEMLTMVSHAVPSVGDHPALGIGTDIRTIFTAPSSAAIQKALRFGDVSLHNPILVHCKTSGKPFYAIIHRVTGSVIIDFEPVKPHEVPMTASGALQSYKLAAKAITRLESLTTGNMETLCNTMVREVFELTGYDRVMAYKFHEDDHGEVIAEVKRPGLEPYLGLHYPATDIPQATRFLFMKNKVRMIVDCCAKHVNVLQDKKIPFDLTLCGSTLRAAHSCHLQYMENMNSSASLVMAVVVNDNDEDGDSSDAVQPQKSKRLWGLVVCHHTTPRFVPFPLRYACQFLAQVFAVHVSKELEIEYQIIEKNILQTQTLLCDMLVQGEPLGIVSQSPNIMDLVKCDGAALLYKNKVWRLGVTPSESQIKEIALWLFECHEDSTGFCTDSLSDAGFPGAAALGDIACGMAAARIASKDILFWFRSHTASEIRWGGAKHEPGERDDGRRVHPRSSFKAFLEVVKTRSLPWKTYETDAIHSLQLILRDAFKETQSMEISTYAIDTRLGDLKIEGMQELDAVTSEVVRLIETATVPILAVDVNGMINGWNTKIAELTGLPVDEAIGKHLLTLVEDFSVDRVKKMLDMALQGEEERNVQFEIQTHHMKIDSGPISLVVNACASRDLQDNVVGVCFLAQDITAQKTMMDKFTRIEGDYKAIVQNPNPLIPPIFGTDEFGWCCEWNSAMAKLTGWKREEVMDKMLLGEVFGTQIACCRLRNHEAVVNFSIVLNTAMAGLETEKVPFGFFARDGKHVECILSMTKKLDAEGVVTGVFCFLQLASAELQQALHIQRISEQTSLKRLKDLTYLKRQIQNPLYGIMFSRKLLEGTELGAEQKQFLQTGIRCQRQISKILDDSDLDSIIDGYMDLEMVEFTLHEVLVASLSQVMTKSNAKGIRVVNDVEEKITTETLYGDSIRLQQVLADFLLISINFTPTGGQVVVAATLTQQQLGKLVHLANLEFRTLIASGVLICPSNAKNVIIMCIPFDKQLPEYRY

SEQ ID NO: 20548 - protein, 583 aa, Lactobacillus brevis
MQAQSKNNTKFNFKTFMGLINRIHPRYWQLLLGFFLGVVATAMQLMVPGIAKGIINSIGHSMDVGLIVAVILLFVSSTIIGAFSGSILGFFGEDVVYKLRTTLWDKILTLPVGYFDQTKSGEITSRLVNDSTQVKELLANSVPKTATSILQLVGALVLMLIMDWRMTIIMFIAVPLVLICLLPIVRQSHKVARARQDALADLNGKAGEMLGEVRLVKSSTAENLERTAGDKRMYRLYRIGLKEAIYDSIAGPVMGMVMMAMVLEILGYGAIRVREGAIDIGTLFSFLMYLVQMISPFAVLGQFMSDVAKASGSTTRIQALLQTHEEDRLTGTDLDIGDQTLQMNHVSFSYDQHHPILSGVSFTAEPNSVIAFAGPSGGGKSTISSLIERFYEPNEGSITIGNTNITDIQLADWRQQIGLVGQDAAIMSGTIRYNLTYGLPGHFSDEQLWHVLEMAYATQFVQKMPRGLDTEVGERGVKVSGGQRQRLAIARAFLRNPKILMLDEATASLDSESEMMVQKALDQLMANRTTLVIAHRLSTITNADEIYFIENGRVTGQGTHQQLVKTTPLYREYVKNQSATSNG

SEQ ID NO: 20549 - protein, 349 aa, Oryza sativa Japonica Group
MANLTDLVNLNLSDCSDKIIAEYIWVGGSGIDLRSKARTVKGPITDVSQLPKWNYDGSSTGQAPGEDSEVILYPQAIFKDPFRRGDNILVMCDCYTPQGEPIPTNKRHSAAKIFSHPDVVAEVPWYGIEQEYTLLQKDVNWPLGWPGPYYCAAGAEKAFGRDIVDAHYKACIYAGINISGINGEVMPGQWEFQVGPSVGIAAADQVWVARYILERVTEVAGVVLSLDPKPIPGDWNGAGAHTNFSTKSMREPGGYEVIKKAIDKLALRHKEHIAAYGEGNERRLTGRHETADINTFKWGVANRGASIRVGRDTEKEGKGYFEDRRPASNMDPYVVTGMIAETTLLWKQN

SEQ ID NO: 20550 - protein, 284 aa, Arabidopsis thaliana
MMFEKDDLGLSLGLNFPKKQINLKSNPSVSVTPSSSSFGLFRRSSWNESFTSSVPNSDSSQKETRTFIRGIDVNRPPSTAEYGDEDAGVSSPNSTVSSSTGKRSEREEDTDPQGSRGISDDEDGDNSRKKLRLSKDQSAILEETFKDHSTLNPKQKQALAKQLGLRARQVEVWFQNRRARTKLKQTEVDCEFLRRCCENLTEENRRLQKEVTELRVLKLSPQFYMHMSPPTTLTMCPSCEHVSVPPPQPQAATSAHHRSLPVNAWAPATRISHGLTFDALRPRS

SEQ ID NO: 20551 - protein, 503 aa, Nierembergia sp. NB17
MMQLSTELAIAAIIFLLAHILISKTSGRRLPPGPRGWPVIGALPLLGDMPHVSLAKMAKKYGPIMYLKVGTCGMAVASTPHAAKAFLKTLDINFSNRPPNAGATHFAYNAQDMVFAPYGPRWKLLRKLSNLHMLGGKALEDWSNVRANELGHMLKSMLDLSREGQRVVIADMLTFAMANMIGQVILSKRVFVDKGVEVNEFKNMVVELMTVAGYFNIGDYIPCLAWLDLQGIEKGMKILHKKFDVLLTKMFDEHKTTSHEREGKSDFLDMVMANRDNSEGERLSTTNIKALLLNLFTAGTDTSSSVIEWALTEMLKNPSILKKAQVEMDQVIGKNRRLLESDISNLPYLRAICKETFRKHPSTPLNLPRISSESCEVDGYYIPKNTRLSVNIWAIGRDPDVWENPLKFNPERFLSGKYAKIDPRGNDFELIPFGAGRRICAGTRMGIVMVEYILGTLVHSFDWKLPSDVIELNMEEVFGLALQKAVPLEAMVTPRLPLNVYAP

SEQ ID NO: 20552 - protein, 358 aa, Cicer arietinum
VLGHGDRENISYPREVESLSGLRTVAGACGVWHTAAIVEVIVAQSSASISSGKLFTWGDGDKNRLGHGDKDARLEPTCVSALIDYNFHRIACGHSLTVGLTTSGHVFTMGSTVYGQLGNPQSDGKLPCLVEDKLAGECVEEIACGAYHVTVLTSKNEVYTWGKGANGRLGHGDIEDRKMPTLVEALKDRHVKYIACGSNYSAAICLHKWVSGAEQSQCSTCRQAFGFTRKRHNCYNCGLVHCHSCSSRKAFRAALAPNPGKPYRVCDSCYTKLIKIAESSNNNRRNGMPRFPGENKDRLEKSELRLLKPAVPSNMDLIKQLDSKAAKQGKKADTFSLVRTSQPPSMLQLKDVVLSTAM

SEQ ID NO: 20553 - protein, 318 aa, Listeria monocytogenes
MSNEYFDPKLKIFSLNSNRELAEEIAKEVGIELGKSSVTHFSDGEIQINIEESIRGCHVYVIQSTSNPVNQNLMELLIMIDALKRASAATINIVMPYYGYARQDRKARSREPITAKLVVNLIETAGATRMITLDMHAPQIQGFFDIPIDHLNAVRLLSDYFSERHLGDDLVVVSPDHGGVTRARKMADRLKAPIAIIDKRRPRPNVAEVMNIVGNVEGKVCIIIDDIIDTAGTITLAAKALREAGATKVYACCSHPVLSGPAMKRIEESPIEKLVVTNSIALPEEKWIDKMEQLSVAALLGEAIVRVHENASVSSLFE

SEQ ID NO: 20554 - protein, 531 aa, Oceanobacillus iheyensis HTE831
MNKRLIDWPTFIGALLILLTVVIPLILFPKAGSEVINSANRFVTGNFGILYLILGLSALIFILFVAFSRNGRIKLGGRDVKKEFGTFSWAAMLFSAGIGSSILYWAMIEWAFYYQGPPFGITPESEEAINWAASYGIFHWGPIAWALYTLPALPIAYFYYVRKKPVLKISEASRPVIGKYADGPLGVIIDILFIFGLLGGAGTTLALGTPMIAEGINHLTGIPVTLPLQAIIMIICTVIFAISSFSGINKGIKRLSDLNLWLAIFILAFVFIFGPTLFLSEMTFTSLGVIVNNFFSMATWLEPKANVPGVEGTNFPESWTVFYWAWWLVYAPFVGLFVARISRGRTIKEMILGTLIYGTLGCVLFFGILGNYGLYLQLSGSFDVIGYINEYSAPATIIAILDQLPLAWLVIPIFTVLAIVFLATTFDSASYILAAVAQKQVTKGEPLRWHRLFWAFTLMILPMTLMFIGGLETLQTASIVAGFPVIFIMILLAWSFMRASTNDLNQTKQSKSSSAIIVDVDRDQNRKEKNK

SEQ ID NO: 20555 - protein, 638 aa, Rhizobium sp. NGR234
MASKVIGIDLGTTNSCVAVIEGTQAKIIENAEGGRTTPSVVAFTKDGEILVGQPAKRQAVTNPENTIFAIKRLIGRRYDDPIVEKDKKLVPYKIVKGNNGDAWIEVAGKKYSPSQISSHILVKMKETAEAYLGGKVSQAVITVPAYFNDSQRQATKDAGKIAGLDVLRIINEPTAAALAYGLDKKTAAKIAVYDLGGGTFDISLLDIGDGVFEVKATNGDTFLGGEDFDKRIVDWLADEFQKDQRIDLRNDRLALQRLREAAEKAKIELSSALETTVSLPFITADQNGPKHLEIKLRRAKLEDLVDDLIRRTEKPCKAAMKDARVKPGDIDETVLVGGMTRMPKVQEVVVEIFGKEPNKSVNPDEVVAIGAAIQAGVLRGDVKDVLLLDVTPLSLGIETLGGVFTRLIERNTTIPAKKSQIFSTAEDNQNAVTIRVFQGEREMAADNKLLGQFDLVGIPPAPRGVPQIEVTFDIDANGIVNVTAKDKATGKEQQIKIQTSGGLSQSDIDRMVKEAEANAEADKRRRALVEARNQADAQIAASQKALDEAKDKAPSADRAPVEKAIDELKSAMTGDSVDEIEAKTKALQIASVNFGAKVHEASGASTSGAGDSSGTSSGDDVVDADFEEVDDKDGQRHG

SEQ ID NO: 20556 - protein, 400 aa, Rhizobium sp. NGR234
MPTLADRLKNVSVSASAAMTQRARDLASRGVDVVSLSSGEPDFPTPSHAIEAAHAAALAGDTKYPPLDGTPALKAAIARKFKRDNNLDYEPGQILVSGGGKQVIFNAVLATCNPGDEVVIPSPAWISYADIVRFAGGVPVPVACSHENGFKLRPEDLEAAITPRTKWLLLNFPNNPTGAACSRQEMAAIAEVMLRHADVWIMTDDMYEHLVYDDFEFCTIAEVEPRLYDRVLTVNGASKAYAMTGWRLGFCGGPKALISAISNVNGQNSGGTSTITQAAVVAVLDGPQDLLKERAAIYRKRRDFVLENLDGIDGLTCHKPEGAFYLFPSIAGLIGKTTKAGRRIETDTDFVMALIDEQHVAIVQGAAYGMSPFFRISYATSVEKLADGCARIAEFCSNLR

SEQ ID NO: 20557 - protein, 561 aa, Rhizobium sp. NGR234
MTTGTKGRNGGQILIDALRIHGVERAFCVPGESYLAALDALHEAKDDIELVVCRQEGGAAYMAEAYGKLTGKPGICFVTRGPGATNASVGVHTAFQDSTPTILFIGQVARDQVEREAFQEVDYRRMFGQMAKWVVQIDDAARIPELVSQAFHRAVNGRPGPIVVALPEDMLIDCVDVADAPAYKTVEMHAGQAQLDELRSRLEQAERPIVIVGGAGWTEDAVADIRSFSEAMRLPVAASFRCQDLFDNTHPNYAGDLGLAAGPKLIQRIKDSDLLIVIGARLGEMTTGGYSLIDIPVPKQTLVHVHAGAEELGRVYHADLPINASAAAFARQAAGLAPIAEPRWAEWTRGANADYRENLEHPAVPGPVQMGDIMAWLRDHLPADAILTTGAGNYSAWAHRFYQYRTFRTQLGPTNGSMGYGVPAAIAAKLSAPERPVIAFAGDGCFLMNGQELATAMQYDARVIVLVINNGMYGTIRMHQERHYPGRVSGTQLTNPDFAALARAYGLHGETVETTEDFAPAFERAEQSGKPALIEVRIDPEALTPKMSLTQIRDQALAQGT

SEQ ID NO: 20558 - protein, 400 aa, Rhizobium sp. NGR234
MNFESRRAGSIKSSPSMAVSLAAKAMRAKGESVVDLSLGEPDFETPDFIVEAAIAAMRGGKTRYTGPDGTEELRAAIVAKFKRENRLDYAMDEISIGNGAKQILFNAFLGTLEAGDEVIVPAPYWVSYTDIVILHGGVPRIIACGVEDDFKLTPERLEHAITPKTRWVLFNSPSNPTGAIYTSAELAALGEVLERHPHVLVMSDEIYEHIVADDVPFTSFANACPQVRERTLIINGVSKAYAMTGWRLGYAAGPKSLTRVLNKMQSQSTTCPSSISQAAAAAALNGPQNFVAEAVAEYKARGELVTRGFSAIPGLEVRAPDGAFYLFPKCAGYIGKTAPDGTVIENDTALASFLLTAGKVATVPGAAFGVEPYIRLSFATSRENLHIAIERIGEALAKLR

SEQ ID NO: 20559 - protein, 401 aa, Rhizobium sp. NGR234
MREPPSRQARRAGAMHAPVRERRHHPDFNMLDSQGWKALEAEAKLSGKGWGREKQWALEMGLPGSESLTDKSIPTFARGELPHFAGINTFLKAPYVENVRDVGKYDAAVLGIPFDSGTTYRPGTRFGPQGIRRISALYTPYNYEMGVDLREQMTLCDAGDVFTIPANLEKSFDQITRGVSHVFSSGALPIMLGGDHSIGFPCVRGIAECTSKRIGIIHFDRHIDIQQKDLDERMHTTPWYWATNLPNVSPKNLVQLGIGGWQVPRDGVKVARERGTNVLTIDDIEKLGPEKTAEIALELAWKDADAVYISFDVDSIDCGFVPGTGWPEPGGFLPREALKILGLVAAEGLCGLEVVEVSPPYDTSDITALFGVRVVVEALGSMLAHGKLGSHKHLIDKPVSF

SEQ ID NO: 20560 - protein, 524 aa, Rhizobium sp. NGR234
MKIATPSEVFGGEARVAMTPDSALHLQKLGYECLIETGAGKLAGYSDDAYRAAGVKVVEDPSALYAAGDVIAKVRPPEPSEVAHLLPGQTLISFFYPAQNNELLELARSNGANIIAMDMVPRISRAQKMDALSSMANIAGYRAVIEAGSNFGRFFTGQVTAAGKVPPAKVLIIGAGVAGLAAIGTATSLGAVTYAFDVRPEVAEQIESMGAEFVYLDFPDQQQDGAATGGYAAPSSPEFREKQLAKFREMAPEIDIVITTALIPGRAAPKLWLADMVAAMKPGSVVVDLAAERGGNCDLTVPDQKVVSANGVTVIGYTDFPSRMAAQASTLYATNVRHMVSDLTPAKDGVIVHNMDDDVIRGATVTKDGEITYPPPPPKIQAIAAQKPREKVKELTPEEKRAAEVAAFKAQTKTQGILLFVATALLLVVGAVAPASFMGHFVVFVLSCFVGFQVIWNVSHSLHTPLMAVTNAVSGIVILGALLQIGSGNWLVVTLAALSVLVATINIVGGFLVTRRMLAMFQKS

SEQ ID NO: 20561 - protein, 327 aa, Rhizobium sp. NGR234
MARVFISWPGYSPRDEDTGARLIAAGHELVLRPKRGNRTADELATLLEDCDAAIVSTDPFTREVLAGDRNLKVIARVGVGTDSIDHDAAKEFGVGISVTPGMNAETVADQTLAMILGLMRRVVTQDQAVKAGRWDRVGEATPTELYRKTVGLIGAGIIGKAVIRRLLGFGVRVLYFDAMVEKVHGAERCGSLDQLLGSSDIVSLHAPLLADTRELMNAARIALMPKGSYLINTSRGGLVQQPAVFAALRSGHLAGAALDVFEVEPPGAEALADVPNLIASAHIGGISTESIARMTRSATTSVLSVLNGEIPDTVINPDALRERLAGA

SEQ ID NO: 20562 - protein, 325 aa, Rhizobium sp. NGR234
MASNSYETGRLNLPFVGICTFGKNPYQPDWDAIDADVAILGAPFDCGTQWRAGTRFGPRAIREASTLFSFGHRGAYDHEDDITYLPSGEVSIVDIGDADIVHTDTMKSHANIEFGVRKILAAGALPVVLGGDHSVNIPCVNAFDEDCARKGPIHIVQIDAHLDFVDERHGVRYGHGNPMRRAAEKPYVSGLSQLGIRNVSSTAKEGYEDARKMGSDILSVRQIRVLGTDAVVERVPAGARYYVTIDIDGFDPSIAPGTGTPSHGGFIYYEVLEILAALAKRGTVVGIDLVEVAPDYDHTGGTSILAAQVLMNLIGRVMHAKAKQR

SEQ ID NO: 20563 - protein, 359 aa, Rhizobium sp. NGR234
MLHRRIHMTTYNIALIGFGGVNRALAELIATKNPLWERDLGFRLNIVAVSDLYLGSVISPNGLDAKTLVEANFAKGGFGQLSGGSAEADNETIIKTAPADLIVEATFTNPKDGEPAVSHCRWALQSGKHVVTTNKGPVAIAAQELKAVAHANGVHFEYEGSVMSGTPVIRMAERTLAGAEVKGFEGILNGTSNFVLGRMEGGLDFATAVKEAQILGYAEADPTADVEGFDVRLKVVILANELLGASLKPEEVTCKGISKLSPSDIENAAAANSRWKLVGSAVRNEDGTVTGSVSPKQLPFEHPLAGVNGATNAVSLNTELLGSVTITGPGAGRIETAYALLSDIIAIHNAQATAKREAA

SEQ ID NO: 20564 - protein, 347 aa, Rhizobium sp. NGR234
MGKSVHIRQADREIAVADERTILEAALEQGIAYPHGCRSGRCGSCKSRLITGEVDLLPHTPFALTPEERAIGLILACRAQPKTDATVAWLGREEDRADHSVETFQAQVISLDDATHDIKRVRIMPESGLPLSFSAGQYAQLSFPGAPTRDYSMANRPGERELEFHIRRIPNGAASERVASTLAVGDEVTVRGPFGSAFLRQRHTGPILAIAGGSGMAPMKAIVDTALNQGFRQPIHLYFGVREERDLYLVDHFRTLCQHHPNLSFIPVLSQIQQCAGYRTGMVTRAIAEDLQDLDGWQAYMAGPPAMTDSATPILLECGLRPENLHVDVFFTPEAPAEPEQELEDVK

SEQ ID NO: 20565 - protein, 69 aa, Rhizobium sp. NGR234
MASGTVKWFNSTKGFGFIAPDDGSPDVFVHISAVERAGLSTLKEGQKVSFEATQDRRSGKTSADNLRAL

SEQ ID NO: 20566 - protein, 606 aa, Rhizobium sp. NGR234
MNARDRQQRAVDSETITGILRRVIAENGRDHIRGYAFAIACLIVVAATTGFTAWIMETVINEAFANRRADIVLVICVAIFGAFVLRGLATYGQAVALSKIGNNIVARYQRRLYAHLMALSVGYFHEHRSAQLAAKISQNVSGIRNVLNMTVTSIARDFLTLVGLVGVMFSKDWLLSLIVFFVAPPLFLGLRYISKRLRLATREAVEVNSRVLGAMQETIPGITIVKAFTMENELRRKVETIIDRAENRANRIARLSERTAPMTETFAGLAISSVLAYAAFRTIYSNIPPGAFFAFVTALLMAYDPARRLARLQVSLERAAVNARMIYEILDTVPHQRDRPDATELKLGEATVELRDVRFAYGNGEEILKGVSFRAEGGKTTALVGPSGAGKSTIISLIPRFYDPAAGEILIDGQDIAGVTKQSLRNGLAYVSQQPYLFEGSIRDNIRYGRPDATDAEIEEAARLAYAHDFILAQPEGYDTPVGEHGVTLSGGQRQRLSIARALVRNAPILLLDEATSALDTESEAAVQKALEQAMSGRTVIVIAHRLSTVVNADKIVVMKDGTVVEEGSHEELARRTDGLYARLHKLQVTVSETTAGAPAYRSEIT

SEQ ID NO: 20567 - protein, 298 aa, Rhizobium sp. NGR234
MSNITDNNPPGTKKGRSPMIKTITIAASLAVAALAAMPAQAQQPSSKLDEVLARGHLILGTGSTNAPWHFKSAEDKLQGFDVDMGRIIAKALFGDPDKIEYVNQSSDARIPNITTDKVDLTCQFMTVTGERAQQIAFTIPYYREGVGLMMKADGKYADYAALKAAGSSVTISVLQNVYAEDMVHAALPEATVDQYESVDLIYQALESGRADAAATDQSSLAWYMTQNPGRYKDAGYGWNPQTYACGVKRGDQDWLNFVNTALHEAMTGVEFDFYAKSFKTWFGKDLTPPQIGFPVEYK

SEQ ID NO: 20568 - protein, 653 aa, Rhizobium sp. NGR234
MCGIAGLIDYAQRGRDDVAQILTRMTDALAHRGPDASATWLDRDGRVGLGHRRLSIIDLSPTGAQPMHSSSGRYSIVFNGEVYGFLRLRAALEEQGARFRGHSDTEVLLEAIETYGLAGALQRCNGMFAFALYDSATRQIIFARDRIGKKPLYIGVSKRGVAFGSELKSIRAHPSFRSVEVDPEASTLFLRYGYVPTPYSIYRGIFKLPHGSWLSLSVDTPPASASAALGGVKSYWDAFEAAERGYAERIECPDEALDALDAELKRAVSERLVSDVPVGALLSSGVDSSLVSAVMQEVSTSRVKTYTVRFLEEQYNEADLASGIARQLGTDHTEITAEPDTALRVVTELPDVYDEPFADPSQIPTLLVSKLARRTVTVALSGDGGDEFFGGYKRYRQMLAFDRLARKTPAVALRAARHAPHWALEFAAAAARHARPSSLQDEVTGKRLRRLAELLEIEDPDARYLDFRSLWSHPAEVVFGGAEPPTAMTAKRIPACLGAVDRMMYSDMVDYLPDDILVKMDRASMAVGLEMRAPLLDYRFVELAWRAPRALCFAEAPGKPALRALLSRRLPEQFINLSKRGFGVPVNAWLRGPLRAWAEEMLSPSRLQRDGIFRADPIVSRWKAHLAGRRDWGPQLWAVLMFNLWHDRWMRSG

SEQ ID NO: 20569 - protein, 150 aa, Rhizobium sp. NGR234
MRKLVAGKLHGIRVTEANLNYHGSITLDPDHCEAAGILPMEFVEIWNKNSGSRLSTYVILGERGSRCCILNGAAARTCQPGDQVIICNSVYLDERRITDLKPTVLTFDDDNHIRNRLTYSVELDERAKYTFSILDEEDRRQPIPLPVAGT

SEQ ID NO: 20570 - protein, 318 aa, Rhizobium sp. NGR234
MSEVTTLAAQPSKYDRLIAAAQAETPAVTIVAHPCDETSLRGALEAAEMGLVKPVLVGPEAKIRYVAAEHRLEIGGREIVDVPHSHAAAAKAVALIREGRGELLMKGSLHTDELMHEVAASATGLRTDRRISHVFVMDVPGHAETLFITDAAINIFPDLEAKRDIVQNAIDLWVTIGLGEPRVAIVSAVETVTAKIPSTIEAAALCKMAERGQITGGLIDGPLAFDNAVDPEAARIKGITSPVAGHAQIIVVPDLEAGNMLAKNLTFLSHADAAGIVLGARVPIVLTSRADSVRTRLASCAVAALYAARRRAAQVAAV

SEQ ID NO: 20571 - protein, 394 aa, Rhizobium sp. NGR234
MDALLVVNAGSSSLKFQVFGIVAAGLARQVRGQIGGIGTRPRLQAKGAEGTVLVDQSYAAEAVRDLPAAIAAAREWLLTLDGLELRAIGHRVVHGGPDYAQPVLIDATVLDRLASYQDLAPLHQPNNLAPIRLAMEINPDVPQVACFDTAFHRGHAEHTDCYALPRTFYDQGIRRYGFHGLSYEYIAERLREIAPGAAGGKVIVAHLGSGASMCALSDGRSIESTMGFTALDGLPMGTRPGQLDPGVVLYLISEKGMSADAVSDLLYHDAGLKGLSGISNDMRELLASDDPRAAFAIAHFVHRCMLNAGMLAAALGGLDAFVFTAGVGENSAPIRARIAEGLAWLGAELDPTANDAGGPLISTATSRVALHVIPTDEELMIARHTLALISTHHA

SEQ ID NO: 20572 - protein, 432 aa, Rhizobium sp. NGR234
MRMTKTSIGGLTRRSLLKTTASAAMIGAAKTLFPSGAFAQGAGPETAKAVLGFIALTDSAPLVIAKEKGFFDKYGMTEVEVVKQASWGTTRDNLVLGSAGAGIDGAHILTPMPYLISTGKVTQNNQPLPMVILARLNLDAQGISVGATYADLKVGLDASTLKEAFAKKKASGQAAKVAMTFPGGTHDLWLRYWLAAAGIDPDKDVETIVVPPPQMVANMKVGTMDCFCVGEPWNEQLVNQKIGYSALTTGEIWAKHPEKSFAMRADWVEKNPRAAKALVMAVQEAAQWCDDMANKEELAKIVGKRSWFNVPPKDIVDRLKGEYDYGNGKVVENSPHFMKFWRDQASYPFQSHDAWFLTENIRWGKLAPDTDINGLIAKVNREEIWREAAKDLGVADIPASTSRGPETFFDGKVFDPANPEAYLKSLAISRIA

SEQ ID NO: 20573 - protein, 382 aa, Rhizobium sp. NGR234
MSVSVYIARESSPDEPRVAGSPETVKKILSFGLEVVVEAGAGRCSRIPDAEFEKAGARIGSAADAKTADVILKVRRPIAGEIAAYKPGALVIAIMDPYGNAEAIAAMANAGVTAFAMELMPRITRAQSMDVLSSQANLAGYQAVIDAAHEYDRALPMMMTAAGTVPAAKVFVMGAGVAGLQAIATARRLGAVVSATDVRPAAKEQVASLGAKFIAVEDEEFKAAETAGGYAKEMSKEYQAKQAALVADHISKQDIVITTALIPGRPAPRLVTREMLHSMKPGSVVVDLAVERGGNVEGAEAGKVTEVAGVKVVGHLNVPGRIAASASLLYAKNLVTFLETMVSKEEKRLAVNMEDELVKATALTYGGAVVHPAFGGTNEGEK

SEQ ID NO: 20574 - protein, 1536 aa, Rhizobium sp. NGR234
MDRVQRRIAAILAADVVGYSRLMGKDEEATLAILKAHREIVDTLIAEHSGRIFGSAGDSVVAEFASPVEAVRCATEIQLALDRQNKEMPEQSRMRLRIGINLGDVVIDGDNLMGDGVNVAARLETLAPPGGICISEAIHTQVRDRLSLDFLDMGEYKVKNIVRPVRVYRVPLASEERIRSPFRGLDAFDFEHAELFFGRARAIATCTERLEQLAASGRAFLLIYGMSGSGKSSLLRAGLLPAITKAGATPGIALWRRCVIRPSQGPSAVASLAAGLLRKEALPELAEEKSAAELADLLRSAPERAVALVRAALGRAANAAGIAPSQCRLALAVDQLEELFTTEAEPASRALLVRLLMAFAGSGLVWVIGTIRSDFYHRCSDVPGFSVLKDGLGSYELLPPTSAEIAQMIREPARSAGLRFEESADHGRLDDVLQGAATADPGSLPLLQFMLDALYEAGRDRRLLTFAAYRALGGLEGAIARRADEVIDGLPLEIEEALPVVLRGLSTVRLGDETVAARPAPLADLASSPAQATLAEALIAARLLVSDEDAEGHAIIRVAHEALLSRWPRARDIVNANRTFLETRARVQADAHRWLLDNRNPDLLLPAGKRLAEAEELLQSRREEVDGQVISYVDASMLAHEVRLEKERQAERARIETEEATKRERLEHEAARQRLEAEAATRLARRTRIGAAVALVLAVGAAAGAVVGLRGQSEAIRQAERAEGNAREAKAAEMQARAAEAQAREAKDQALRNQSLSLAFLSHTTETAGDTEAAILLALEALPKDMAAPSRPYLPEAEAALYQALLQHRQTAVFRHDDGVTDAAFSPTGDRIVTSSYDKTTRIWNVEDSFQIAILKGHEGPVERASFSPDGSRVATAGRDGTARIWDAASGGQLYLLPQPGNVNTAMFNAAGTRLLTGSDMRAPAVWDTQTGKKVAAAEGDWTTSAMFSPDGLSFAAGYGEERLVRIWSAEDGRPIREIYNRSWPDEVIFSPDGSKLVANAWRTLTWNAVPRLWDVPSGSEVATFGDHASDTQGTTFSHDGRLIATVSLDGTARLWDGVSGKERGVLGRETAGLKRDQAGVPGPEIDKEMNCAFSPDDKLLATASLGNLVRLWDVESDSEFAVIAGHRGLVEHVAFSPDGTRLLTASHDETARLWDIDGVLTTSMRHRRPPTFAAFSPDGTRVITGGGDDTANIWDVASGREVVRLEPNSGFIGDATFSPDGHLVATASSYGRIVLWDAKSGHEALRLNSGKAAVVNLQFSPGSDLIASASDDGAARLWNTSTGVQIAVLTTGGNLRKVLFSPDGELVLTALKDYTARLWKRDGTEVRVLAGHEKRITAAAFSPNGRLVATSSLDGTARVWSIEDGSVVATMRRPGEALTDVAFSPDSKSVVTASRDGSARIWDVADGAEQAALRGHKGFVREATFSPSGLYVVTASPQDGTVRLWSASSGREIAILTGLETVGNVEPASTLAVFNSEGTRMAGVFGDKVARIIRVFPTPQDMIDYARTVVPRELTPCERQRFFLPVEGDIGECPN

SEQ ID NO: 20575 - protein, 69 aa, Rhizobium sp. NGR234
MSSGTVKWFNSTKGFGFIQPDDGSTDVFVHISAVERAGLRSLVEGQKVTYDIVRDNRSGKSSADNLRAA

SEQ ID NO: 20576 - protein, 670 aa, Rhizobium sp. NGR234
MQVNACSAHSGYTFSAVAGRESDFHMCGFGGYFGSIRDGRALLESMTAAIAHRGPDGQGIFTVPEAGLGHVRLSIVGLGDGQQPMPDASGELTIAFNGEIFNYVELRDELRAKGRRFRTASDTEVILHLYDEMGEDCVSLLNGDFAFAIWDARRCRMMLARDRMGVRPLFYTAQGGTFYFASEVKALLQVPGVSAEIDPIALDQIFTLWAPIAPRTPFRNILELEPANVMIVDQRGVTTRPYWQLQYPDRDQPSGYTHEGSAAEELRALLADATRIRMRADVPVGAYLSGGLDSSIVSALAAGMTPQGLRTFSVTFDSAEHDESAFQLEMAAALGTQHSAIACRAGDIAKVFPDVIRFTERPIIRTAPAPLYQLSGLVREAGLKVVLTGEGADEVFAGYDIFKEARVRRFCGRQPGSSIRPHLFRKLYPYLPGLKQQSPEYLAAFFGAGDAPLDDPLFSHRPRLKGTAATKLFFSGDLRAELKDYDAAAELIGRLPQDFRRWHPLHQAQYLESRFLLPGYILSSQGDRMAMAHGIEGRFPFLDHRLVEFAAKLPPEMKLKGLTEKHILREATKDLLPPAIGRRVKQPYRAPDSHSFTGPGELDYVRGALSEDAVAEGGLFNAKAVTKLYEKCRSRPASGFRDNAAFVGILSTQLWLQTFAGTRIRKAEAA

SEQ ID NO: 20577 - protein, 294 aa, Rhizobium sp. NGR234
MASIGFIGLGIMGTPMARHLQDAGHTIITSKFAIPPRQELLDHGLQFVETPKALAETVDIVILMLPDTPEVKDVLFGENGVSLGLGKGKLVIDMSSISPIETKEFARKIRQTGAEYIDAPVSGGEVGAKNATLSIMAGGTPGSFERALPLFKLMGKNITLVGDCGDGQVTKVANQIIVALTIEAVSEALVFASKAGADPARVREALMGGFASSRILEVHGERMIKRTFEPGFRISLHQKDLNLALQGAKSLGISLPNTAATQELFNNCAANGDSGLDHSGLVRALERMANHEVA

SEQ ID NO: 20578 - protein, 344 aa, Rhizobium sp. NGR234
MTKYKLEYIWLDGYTPVPNLRGKTQIKEFDAFPTLEQLPLWGFDGSSTNQAEGRSSDCVLKPVAVYPDPVRTNGVLVMCEVMMPDGKTPHPSNSRATILDDEGAWFGFEQEYFFYKNGRPLGFPEQGYPAPQGPYYTGVGYSNVGDVARKIVEEHLDICLAAGINHEGINAEVAKGQWEFQVFGKGSKRAADEVWMARYLLQRLTEKYGIDVEYHCKPLGDTDWNGSGMHCNFSTAYMREVGGKDYFEALMAAFDKNLMEHIEVYGPDNHLRLTGKHETAPWNKFSYGVADRGASIRVPHSFVNNGYKGYLEDRRPNSQGDPYQIASRVLKTIASVPAAVSKVA

SEQ ID NO: 20579 - protein, 400 aa, Rhizobium sp. NGR234
MRDAYICDYIRTPIGRFGGSLSAVRADDLGAIPLRALMERNASVDWEAVDDLIFGCANQAGEDNRNVARMSLLLAGLPVAVPGTTINRLCGSGMDAVIAAARAIKAGEAELMIAGGVESMSRAPFVLPKADSAFSRHAEIHDTTIGWRFVNPLMKAQYGVDSMPETGENVAEDFKVSREAQDAFAVRSQAKAAAAQANGRLAREIVAVTIPQKKGEAVVVDRDEHPRATTIEALAKLKAPFRAGGSVTAGNASGVNDGAAALIIASEEAARKHGLRPIARILGGATAGVPPRIMGIGPLPASQKLMARLGITQDQFDVIELNEAFASQGLAVLRELGIADDDPRVNRNGGAIALGHPLAMSGARITGTAALELAETGGRYSLSTMCIGVGQGIAVALERV

SEQ ID NO: 20580 - protein, 261 aa, Rhizobium sp. NGR234
MLSRRLFVAMTAMAAAIGFGSIAQADALGDITARGTIRVAVPQDFPPFGSVGPDMAPVGYDIDMANLIAEKLGVKVELVPVTSANRIPYLQTNKVDLVISSLGKNPDREKVIDFTAAYAPFYNGVFAPADFVAAKPEELAGKTIGVTRGAVEDLELTKIAPADTVIKRYEDNNGTISAFLSGQVEAVATGNVVAAAILAKNPPKRPELKFLIKNSPCYIGLSKEQPALLEKVNGIIAAAKTDGSLNAIAQKWLGTGLPAEL

SEQ ID NO: 20581 - protein, 323 aa, Rhizobium sp. NGR234
MSRDGVSELTKPHILQVGPYPEWDEVPLNEAFTVHRYFDAADKARFLAEVGPSVKGIATRGELGATRAMIEACSGLEVISVYGVGFDAVDLAACRERGIRVTNTPDVLTNDVADLGVAMMLCLSRGMIGAESWVKDGSWAAKGLYPLKRRVWGRRAGVLGLGRIGYEVAKRLKGFDLEIAYSDVEAKPYASEWEYIADPVALAERSDFLFVTLAASVATRHIVGREVIAALGAEGMLINISRASNIDEEALLEALENRTLGSAALDVFEGEPALNPRFLALDNVLLQPHHASGTIETRKAMGQLVRDNLAAHFAGKPLPTPVL

SEQ ID NO: 20582 - protein, 267 aa, Rhizobium sp. NGR234
MTISKFMRTMVAAVGIAAAGLASAVEAQAATLNDIISRGTVRIGVLTGAPPMGMVDEQGNPTGYDVDVANLIAGYLSLPGELVPLTPPARIPALQTGKVDFLVATLAPTGERAKTVMFTQPYSAFNMDIISGPDQKFAKLADLEGKRVAVNRGSSQETALRKAAVPGLEIVVYEDDSTSAQALIAGQVDAVALPSTVGEAIIKQRPDAGLQVGFTFFQQGNSMATRMEDFEIRQWLNTAIYLMKISGDLDKIATKWTGRPMPTLPTF

SEQ ID NO: 20583 - protein, 323 aa, Rhizobium sp. NGR234
MSKQTLATLVAGLAILILLPLTQSNYGVFVLCSWLVYSISAMGLNLTLGYAGQVSLAQASFMGIGAYVTALMTMAGVPWPAAMIAAMVLCFVIGFLLGYPALRVQHHFLAFITLAFNALVVLVLRNEEWLTGGTYGIVGIPRPEVLGLPTQTPLAFYFFVLALFVLMAVALYGIIRSPWGRTFKALRENPIRANSLGVDIRKTTLLAFAIGSSYGGLAGSLLAQLTQFIDPHSFGLTISLKVLLMVIVGGAGFFFGPILGALLIVLAPEFLRFTEGYYLMIYATLVIVLMVFCPTGLLGLVERARAALKLRQNPNATTWEAGR

SEQ ID NO: 20584 - protein, 502 aa, Rhizobium sp. NGR234
MTANIDMSALAVFIFFFVLVTAMGFFASRWRRAESLDHLDEWGLGGRKFGTWITWFLVGGDFYTAYTVIAVPALVYAIGAYGFFALPYTIIVYPLVFAVMPLLWKAAKERGYVTAGDVVRGTYGSRALELAVASTGVIATMPYIALQLIGMEVAIKALGLTGEMPIVLAFLVLALYTYSSGLRAPALIAFVKDIMIYIVVLAAIIVVPSKLGGYSAVFSAADAAFEAKGKGGILLDPAQLVPYVTLALGSALAAFMYPHTLTGIFASSGANTIRKNAVLLPAYTLLLGLLALLGYMGHAAGLQLQSNNDVVPTLFKTLFPGWFAGFAFSAIAIGALVPAAVMSIGAANLFTRNFWKVWVNPDVTAAGEAQVAKITSMLVKVGALVAILLLPTQFALDLQLLGGLWILQTLPALVFGLYTSWFRAPALLAGWAAGFIGGSALVWSDGLKPLHALAFDGVTVSVYTGLLALALNVTVAVVVNLVVPAKDSADDDLTVAEADSRG

SEQ ID NO: 20585 - protein, 493 aa, Rhizobium sp. NGR234
MTVMQKPRPEDATAVFDKRSWLESHEADYHKALGNRQVQMIAIGGAIGTGLFLGAGARLQAAGPSLAIVYLVCGFFSFLILRALGELVLHRPSSGSFVSYAREFLGEKASFVAGWMYFLNWAMTGIVDITAVALYMHYWDVFADLPQWVSALGALLIVGSMNLVGVKWFAEMEFWFALIKVGAILIFLAVGTFFLGTGMEVAGGAAGLHLIGENGGLFPNGLLPALVLVQGVVFAFAGVELVGTAAGECSDAKTILPRAINSVIWRIALFYVGSVVLLVCLLPWTAYKAGESPFVTFFGALGIPAIGTVMNVVVLTAALSSLNSGLYSTGRVLRSLAQGGSAPASLARMNAQAVPHVGILVTLAVYVFGVLLNYLVPSHVFEIVLNVASLGILSTWGFIVVCQMAFRRAVARGEVEDVSFKMPGAPVTSWLTLAFLFGVLVLMALDYPNGTYTVASIPVVALALWGGWNRVSKHRQTETPATQPDIVLAQQSQ

SEQ ID NO: 20586 - protein, 353 aa, Rhizobium sp. NGR234
MSAFKNLAFWNDAEVLECVTRTPEAPDVVTFSFQSPSGALFNHDPGQFVTLELPLPGGPLYRTYTISSSPSRPTALTITVKAQRDSVGTRWMLDNLRKGMRIRAIGPAGKFSIVNHPAEKYLFISAGSGITPMVAMTTWLYDSGREPDIVFINCARRPSEIILRDRMELMASRIVGIDLKWVVEEGDPFRPWTGYRGMFNQIMLGLMAQDYLDREVFCCGPEPFMRAVREALAALGYDMSRYHQESFQAEPEHAEDVPEDVVPDALNQAEIEFALSGVTAKCNETDTILAAAKAAGLVIPSGCSMGICGTCKVRKTEGQVHMVHNGGITEEDVEEGYILACCSKPLGRISVEV

SEQ ID NO: 20587 - protein, 411 aa, Rhizobium sp. NGR234
MLQAGGHWRNWVGNQSCIVRHRGAPESEAELAEMVREATSAGLNVRCAGSGHSFTPVALTSGLHLTLSGMLGVANIDQARKRVSVSAGTTINQLGKALKSNGLSLINQGDIDSQALAGALTTGTHGTGAALGNMASQIVGMRLVQPDGSILVVDEMTPDLLEAARVSVGMLGVISEITLQVMDSYNLHEKLWRCDFDECMEQHDELAAKHRHFGFFWCPVPESRHCYCLPDTSSVSTTEKTADVCEMKVIDITDRPPTEGTFERIAYSSEIYPIEYVPNFHELEYAVPVAHGKEAVKAVRKLMLEKHPTCIYPIEYRFTAGDSGWISPFYEQDSITLSVSGEPGTDYWEYLKDVDTILRQYGSRPHWGKLHFLGAEDVTALYPRSADFRALRAKVDPEGRFLNDHLRQLFA

SEQ ID NO: 20588 - protein, 761 aa, Rhizobium sp. NGR234
MPATDKTDRTMTSVTAQEALDFHSQGRPGKLEISPTKPMATQRDLSLAYSPGVAVPVKAIAEDPATAYDYTARGNMVAVISNGTAILGLGNLGALASKPVMEGKSVLFKRFADVDSIDLEVDTENVDEFINCVRFLGPSFGGINLEDIKAPDCFIIEQRLREVMDIPVFHDDQHGTAIIAAAGLINALALTGRDFKTTKLVCNGAGAAAIACIELIKAMGFNPENIILCDTKGVIFQGRTEGMNQWKSAHAVKTDRRTLAEAVEGSDVFFGLSAKGALSPEMVRSMAARPIIFAMANPDPEITPEEVAQIRDDAIVATGRSDYPNQVNNVLGFPYIFRGALDVRASTINDAMKIAAAEALASLAKEDVPDDVAAAYQGNRPRFGPQYIIPVPFDPRLISAIPMAVAKAAMETGVAQKPIADLNAYGQQLSARRDPIASTLQRIFERVRRQPKRIVFAEGEEVQMMRSAIAYANQQLGTAILLGREEQMRETAEREGIDLDRPGIQIVNARLSKRVSAYTDFLYARLQRKGYLFRDVQRLINNDRNHFAASMVALGDADGMVTGLTRNYSTALEDVRRCIDAKPGHRVIGVSIALCRGRTVLVADTAVHDMPSAEELADIAEEAAGLAKRLGYMPRVAMLAYSTFGHPSGERSERVREAVKILDRRRVDFEYDGEMAADVALNHRVLEQYPFCRLSGTANVLVMPAFHSASISTKMLQELGGSTVIGPLLVGFDKSVQITSMSAKDSDIVNLAAIAAYNAGT

SEQ ID NO: 20589 - protein, 592 aa, Rhizobium sp. NGR234
MMENNRNYFVAIALSVLILVAWQYFYVNPRMDKDRIAAEKAQQTQQVQPQQGGQQPAPGQALPGGAVPGESRDQAVAKSARVAIDTPALSGSINLTGARFDDLKLKGYHETVDPKSPVITLFSPAETADGYFTEIGYIGNDASGSVPGPQTVWTLSGGEKLTPATPVTLTYTNDKGITFARTISIDENYMFQVVDSIKNDGSAPVSLSSYGRVTRFNKPTTPSIYVLHEGFIGVAGGSLQEVGYSKIEENLPVEPGKTTGGWHGITDKYWAAAIVPPQETPFDIRFSHFTDGRPRFQSDYKGDAVTVAPGQSAEVKNLVFAGAKEVQVVDTYTTAYAIPKFEKLIDWGWFWFITQPMFKMMDFFFRLFGNFGVAILVTTIVVKLIFFPLANKQYASMANMKKVQPKMEELKKKFGDDRMGLQQAMMQLYKDEKINPLAGCWPILIQIPVFFALYKVIYITIEMRHAPFFGWIRDLSAPDPTTIVNLFGLLPFDGPAFLHLGIWPIIMGVTMFLQMRMNPTPPDPTQAMLFTWMPLVFTFMLASFPAGLVIYWAWNNTLSITQQSIIMKRQGVKIELFDNLKGLFTKRPKPAE

SEQ ID NO: 20590 - protein, 388 aa, Rhizobium sp. NGR234
MTIMTSLSPRALSAPESGIVEVVNYARGRDGLIPLWVGEGDLPTPDFISRAAAQGLMGGETFYTWQRGIPPLREALVRYYQRRFQKTLAPENFYVTGSGMQAIKLSIEAIASPGDEIVLLTPAWPNFAAAADLSGVRPVSVPLRFENGKWQLDLDRLEAAIGKKTRALFINTPSNPTGWTATQDDLKAILSLARKHGLWIIADEIYALYYYLGGRAPSFLDIMAEDDRILFVNSFSKNWAMTGWRVGWIVAPPAVGQVLENLIQYSTSGVAQFMQRGAVVALDEGDGFVDDNVAKARRNRDMLCDALIATNRVETLKPDGALYAFLKIDGVTDARRASMDIVDETGVGLAPGTAFGEGGSLFMRACFLRDPAQIAEAADRLRTYILGR

SEQ ID NO: 20591 - protein, 396 aa, Rhizobium sp. NGR234
MRYASITSRLADLGSGKWSLHIRARQLKASGTDLIELTIGEPDLPPDRALLDECQRAMYAGRYRYSNGRGEPALVAALADKYRRRRADVTAENILCFPGTQTGLFAVMLGLAEAGDGVLVGDPLYATYEGVIRSTGAHPVLVPLKPHHGFHMQAEDLERALTPDCRVLLLNTPHNPTGAVLTAAEIAAIGDIARRHDLWIVCDEVYEELVFEAVFASPFDKPDLAERTVVVSSISKSHAAPGFRSGWAVGPAEFTERLLPVSETMLFGQQPFIADMTAYALSHEIDTASQMREAYKRRAGRIAVALARTPGISVLPPEAGMFALIDVAGTGLSGEAFAWALLEEEGVAVMPGSSFGSQARDFLRVSLTVADELIDEACRRIAALAERHTSRKERRA

SEQ ID NO: 20592 - protein, 537 aa, Rhizobium sp. NGR234
MSVETKTVGEVLVDLLEANGVEVVFGIPGVHTVELYRGLAASKIRHVTPRHEQGAGFMADGYARVSGKPGVALVITGPGLTNTITAMAQARQDSIPMLVISGVNRRDSLGHGRGLLHELPDQQGMMKTLALYSHTLINPADLPLVVDRAFAVLLSGRPGPVHIEIPTDVMAERIESRGTKPAAATRPRSDGETLQRAAILCAEASRPVILCGGGALTAEAEVRGLAEQIGAPVVTTVNARGMLAGHPLRVPASPSLKAVRALLRDADLVLALGTEMGQTDYDLYADGGFPMLRNLIRTDIDAAQLARGPQAALSVLSGARAATAGILGFLPGHTAARDGASRADATRKAALKELTPKMRAEVGIIDLIYKALPDCTIVGDSTQAVYAGNLYCDAPRQRAWFNSATGYGSLGYAPPAAVGAAVADRARPVVCLVGDGGFQFSLAEIGSAVDAGARVIFLVWNNDGYREIESHMVEAGVTPEGVKPSAPDFLLTAGAYGVPAERLAKIGDLPRALADAASRSGPSLIEIHQEKTAGVGG

SEQ ID NO: 20593 - protein, 336 aa, Rhizobium sp. NGR234
MGLRHVKGEGHSPSAILDSIGRTLTTASNGIKALAEHLATDESFAQSLVEAVELVGDGHGRVVVSGVGKSGHIGRKIAATLASTGTSAYFVHPTEASHGDLGMVTSDDVLILLSWSGETAELANMLTYAKRFKVPIVSISSNRDSILARNSEIALVLPKVPEACPHGLAPTTSAMLQLAVGDALAIALLERRGFSAEDFKTFHPGGKLGAQLRLVHELAHVADQMPLLVVGRPMSEAVIEMSAKGFGVVGIVDEGGVLVGVITDGDLRRHMAGDLLGQPVEEVMSCHPKVIQADVLASAAMEFMQEHKVTVLFLVDETGMPEGILHIHDLLRAGVA

SEQ ID NO: 20594 - protein, 450 aa, Rhizobium sp. NGR234
MACQQGCGRGCRLYARGSDACLDRDQRPGPPDRRGKRIRHPFAGLSAGALFGGTRGGRHAVRRLVFALHAGSPAGQRRSSVAGGMTMEMARSFHHFDELHPWIDRQHLLECTSVVAETADVMTFTFRSDRPAWFRYLPGQFVTLELPTGEEPVMRTYTLSSTPSRPLSVAVTVKAQSNSIGTRWMFDNLKPGMVLKALGPLGDFSFVRHPGEKYLFISAGSGITPMMSMTRWMADCAPATDVTFVSCARQPEDLLFKSELEILARQMPHLNLGFLVEGHEARHGWHGLRGRIDATKLPLLAPDVLERTVFCCGPEPFMRGVRDMLKGAGFDMARYHQESFQPAAAPAAEELAIRAGPATGAGAEAARVTFTMSGKDVSAVPGQTILQTARANGVRIGAACEGGICGTCRVLKIAGDVAMNHNGGILDDEIDEGYILACCSRPLGDVQIEA

SEQ ID NO: 20595 - protein, 532 aa, Rhizobium sp. NGR234
MTQPMQTPITDPRDVAAVKMTDIKKSYGGVHALKGVSLTIRPGTIHALIGENGAGKSTLLKILQGVVIPTEGSIEVFGEHLTAVSPENSRRLGIGMIFQDLSLIPTLTIAQNIFLNREPRRMSLLVDERREIEDAAKIIGELNLNVDPRTRVLELSPGQAQLTEIAKAISQKARVLILDEPTSALSAQEVDILFKMLRKLTADGTAIIYVSHRMTEIMTIADEITILRDGQNVTSGNIADFTLDTIVQNMVGKRVTGFEYKPHEIDRGTQPALKVRSLSGKHGKPSDVSFDLYRGEVLGIAGLMGAGRTELARVLFGVDAKADGTVELDGKVLEFRSPAEAIEAGIVLVPESRHDQGLVIEHTVGHNLSLPQLAQLASGPFLDRRREHDLSSELISRLRIKTPDADNKVRNLSGGNQQKIVIAKWLATDPSVVILDEPTAGVDIGSKAEIVELIRSIASGGKSVIVISSEPAELLATSDRILVLSNGRLAREISRSEIDAWATTEGDESQSSMIRVELGLQVAIQKASQNVQ

SEQ ID NO: 20596 - protein, 593 aa, Rhizobium sp. NGR234
MSGRSTTWTASIIPARQARADRRRTGGTAASASGNWSRARQTLKQYGVSTFAPSRCRRAGNRDISCREAAVRIGALRERYPEEARVALTPESAVQLRKLGHNCLIEAGAGSRSGISDDAYRSVGVEVVPDARALIAASDVVVKVRSPEGDEAKSLNDGQTLISFLWPAQNPDLLETFRDKNITAVAMDMVPRISRAQKMDALSSMANIAGYRAIIEAGNQFGRFFTGQVTAAGKVQPAKVLVVGAGVAGLAAIGTAVSLGAIVHAFDVRPEVAEQIESMGANFVFLEFEANQDGAATGGYAAPSSPEFREKQLAKFRALAPEIDIVITTALIPGRPAPKLWLEDMVAMMKPGSVIVDLAAERGGNCDLTVPDQRIVSPNGVVIIGYTDFPSRMAAQASILYSTNIRHMLADLTPNKDGVINHNMEDDVIRGATVTKGGEITYPPPPPRIQAIAPAKPKEKVREPTAEEMRAAEAAAFRKQTTSQVGLLVIGALLLALIGSYVPSEFMAHIVVFALACFIGFSVIWNVSHSLHTPLMAVTNAISGIVVIGALLQIGSGNWLVVILAALSVLVATINIVGGFMVTRRMLAMFQRS

SEQ ID NO: 20597 - protein, 309 aa, Rhizobium sp. NGR234
MTDKEQDSGAGHTATRSGFVALIGATNAGKSTLVNHLVGAKVSIVSHKVQTTRAIIRGIAIHDNAQIVFMDTPGIFKPRRRLDRAMVTTAWGGAKDADQIVLLIDSERGLRGDAEAILEALKDVPQPKILVLNKIDRVRPEDLLKLAAAANEVVSFERTFMISALNGSGCKDLMDYLATALPEGPWYYPEDQISDLPMRQLAAEITREKLFLRLHQELPYASHVETEKWEERKDGSVRIEQVIYVERDSQKKIALGKGGEAIKAISTAARKEISEILEQPVHLFLFVKVRENWGDDPERFREMGLDFPK

SEQ ID NO: 20598 - protein, 231 aa, Rhizobium sp. NGR234
MKIDRSVVRSLPLFDRMTDADLDKLLGHATAKRVPPGDAVFEQGQTATSFFLLLHGRLKVTQVTEDGQQIIVRVVHPGDLFGFAKALQRSDYPGTATAVSESVALSWPTDLWPQFVEQNPRLAISTMQTIGQRLEEAHTRIREMSTQEVERRVAHAVLRLSRQAGKQEKGGIRIDFPISRQDIAEMTGTTLHTVSRILSAWEAKGLVEGGRQKLIICDLPGLAQLAEGGRD

SEQ ID NO: 20599 - protein, 318 aa, Rhizobium sp. NGR234
MAPKTIDHAVTTRSLHSAATDPTHAGVLSFMRRKYTKQLKGVDAVVWGIPFDAATSNRPGARFGPQAIRRASAIFDNDPQYPFQRDLFADMATVDYGDCLLDYGNHAKTPATIEREATRILKSGAYLLTLGGDHFVTYPILKAHAALHGPLALVQFDAHQDTWPDEKGRIDHGSFVGRAAREGLIDAERSIQIGIRTHAPDDCGIRIVYGYEVEEMRAEEIADTIVRHVGSRSAYLTFDIDCLDPAYAPGTGTPVAGGPSSAKILSVLRKLGALHIAGSDVVEVAPAYDHADLTAIAGSTIAMYMLGLRAEWLAERRG

SEQ ID NO: 20600 - protein, 557 aa, Rhizobium sp. NGR234
MYRYDEFDHAFVSARVEQFRDQVQRRLSGELAEDAFKPLRLMNGVYLQLHAYMLRVAIPYGTLSSRQMRMLAHIARKYDRGYGHFTTRQNIQYNWPRLSDTPDILNDLASVEMHALQTSGNCIRNVTADHFAGAAADEVADPRPYAEILRQWSSVHPEFSFLPRKFKIAVTGAERDRAAIQVHDIGLHLKKDENGKLGFAVYVGGGQGRTPMIAKKIRDFLPEEDLLSYTTAIMRVYNLHGRRDNKYKARIKILVHETGAEELARQVEVEFATLKDTELKLPDADIQAIASYFAPPELPNRAEGWGNLARWKKADEAFAQWVHQNVQPHKHPDYGMVTISLKPIGGIPGDATDSQMDLVADIAEEYAFDEIRVSHEQNLILPHVALADLEPVYRALVASGLATANAGLITDIIACPGLDYCALANARSIPVAQEISSRFGSFERQAEIGELKIKISGCINACGHHHVGHIGLLGVEKKGAELYQITLGGSGDENTSIGEIIGRGFEPEKVTDAVETIVDTYLGLRRDKSETFLEAYRRVGPQPFKDALYGGGAQEAA

SEQ ID NO: 20601 - protein, 192 aa, Rhizobium sp. NGR234
MADRTSSKGVIENDGLGNDALDLVEITGVIKWFDVAKGFGFIVPDNGMQDVLLHVTCLRRDGYQTVLEGARVVALIQKRERGYQAFRILSMDQSTAVHPSQLPPVRTHVQVTPTSGLERVLVKWFNRTKGFGFLTRGEGTEDIFVHMETLRRFGLTELRPGQVVLCRFGDGEKGLMAAEIHPDGPTPTNRSH

SEQ ID NO: 20602 - protein, 372 aa, Rhizobium sp. NGR234
MRVGCPKEIKNHEYRVGLTPGSVREYVAHGHEVIVETKAGTGIGADDDAYRAAGARIVPTAKDVFEKSDMVVKVKEPQPSEWAQLRDGQILYTYLHLAPDPEQTKGLLNSGVTAVAYETVTDERGGLPLLAPMSEVAGRLAIQAGATSLQKANGGRGILLGGVPGVLPAKVAIIGGGVVGLHSAKMAVGLGADVSIIDRSIPRLRQLDDIFNGRVHTRYSTIDALEEEVFSADLVIGAVLIPGAAAPKLVTREMLSGMKKGAVIVDVAIDQGGCFETSHATTHSEPTYEVDGIVHYCVANMPGAVPITSAHALNNATLYYGLQLADRGLKAIAEDRHLRAGLNVHRGRVTNAPVAEALGYDSYAPESVLNVA

SEQ ID NO: 20603 - protein, 388 aa, Rhizobium sp. NGR234
MPESRIYMDWNATAPLLSEARDAFLSALDAVGNPSSVHGEGRAVRGLIESARRDVAALCGAQSASVIFTSGATEAANMVLTPDFRMGRTPLKLGKLYVSAIEHPAVREGGRFARENVCEVPVTGDGVVDCAALEALLSAHDRQSGLPMVAVMLANNETGIVQPIADVSAIVRAHGGLLVVDAVQAAGRLPLSVESLGADFLIVSSHKIGGPKGAGALVARGEVIMPQPLIRGGGQEKGHRSGTENAPALVGFGAAARMAADNLEARTVAIAVLRDRLEAQMIESAPDVVIHGLNALRIANTSFFTLPGLKAETGQIAFDLEGVALSAGSACSSGKVGQSHVLTAMGYDPRQGALRLSIGASTTQAEIERCAAVFAKVAARRRSTGQAA

SEQ ID NO: 20604 - protein, 251 aa, Rhizobium sp. NGR234
MLEIKNLHARIAEDGTEIIRGLDLTVKAGEVAAIMGPNGSGKSTLSYILSGREDYEVTEGDILYNGESILELDASERAAKGIFLAFQYPVEIPGVATMQFLKVAMNEQRKYRGEDELTTPDFMRRVKEAAAELKIAPEMLRRPLNVGFSGGEKKRAEILQMALLEPKLCVLDETDSGLDIDALKIVADGVNALRSPDRAVVVITHYQRLLDYIVPDTVHVLYKGQVVKSGDKTLAHELEAKGYADIIEAAA

SEQ ID NO: 20605 - protein, 111 aa, Rhizobium sp. NGR234
MSGIHDFIDNEVKTNDVVLFMKGTPQFPQCGFSGQVVQILDYIGVDYKGINVLADADLRQGIKDYSNWPTIPQLYVKGEFVGGCDIVREMFQAGELQEHLEGQGISVKGAA

SEQ ID NO: 20606 - protein, 770 aa, Rhizobium sp. NGR234
MTTGDKAKPQSTPASGDIDQQALFFHRYPRPGKLEIQPTKPLGNQRDLALAYSPGVAAPCLAIKDDPESAADFTARSNLVAVVSNGTAVLGLGNIGPLASKPVMEGKAVLFKKFAGIDVFDIEIDAPTVERMVDVVSALEPTFGGINLEDIKAPECFEVERQLREKMEIPVFHDDQHGTAIIVAAAVLNGLELAGKDITKAKIVASGAGAAALACLNLLVTLGAKRENIWVHDLEGLVYKGREVLMDEWKAVYAQDSANRVLADSIGGADVFLGLSAAGVLKPELLAQMAEKPLIMALANPTPEIMPEVARAARPDAMICTGRSDFPNQVNNVLCFPHIFRGALDCGARTINEEMKMAAVRAIAGLAREEPSDVAARAYSGETPVFGPDYLIPSPFDQRLILRIAPAVAKAAAESGVATRPIQDFDAYLDKLNRFVFRSGFIMKPVFAAAKNAPKNRVIFAEGEDERVLRAAQVLLEEGTAKPILIGRPQIIETRLRRYGLRIRPDVDFEVVNPEGDPRYRDYVDEYFALVGRLGVIPEAARTIVRTNTTVIGALAVKRGEADALICGVEGRYSRHLRDVSQIIGKKPGVLDFSALSLLISQRGATFFTDTYVSYNPSAEEIAQTTVMAAGEIRRFGITPHAALVSHSNFGSRESESAAKMRAALKLVRELAPDLEVDGEMHGDAAISETLRERVMPNSTLKGEANLLVFPNLDAANITLGVVKTMTDSLHVGPILLGSALPAHILSPSVTSRGVVNMAALAVVEASHPA

SEQ ID NO: 20607 - protein, 289 aa, Rhizobium sp. NGR234
MAKVAFIGLGVMGYPMAGHLKSRGGHEVTVYNRTFAKAERWAAEFGGRAAATPAEAAKDQDFVFACVGNDDDLRSVTTGKDGAFETIAPGTIFIDNTTASAEVARELYAAAGAKGAHFIDAPVSGGQAGAENGVLTVMCGGDAEAFDKAKPVIEAYARMVGLMGPAGAGQLTKMINQICIAGLVQGLAEGIHFGKKAGLDIKNVIDVISKGAAGSWQMENRHKTMNAGKYDFGFAVDWMRKDLDIVLAEARRNGAKLPVTALVDQFYAEVQALGGSRWDTSSLLARLEK

SEQ ID NO: 20608 - protein, 70 aa, Rhizobium sp. NGR234
MATKGIVKFFNQDKGFGFITPDGGAKDVFVHISAVQAAGLATLKDGQQVSFDTEPDRMGKGPKAVNLQAL

SEQ ID NO: 20609 - protein, 565 aa, Rhizobium sp. NGR234
MSWRIPRLPLLAGLDGYETSALRSDVSAGLAIAAVGLPSAIAYPAIAGLPPETGLYASITPLVAYALFGPSHKLIVGPDAATMTVLAAVLAAIFATPGVSTDRVTVAALLALAVGALCLAARAVRLGVLATFLSRPILTGFFAGISLSILIGQIERFTGVDIEADGLVAPVLELLREAVSIHWPSLVLAVGCFALLQVARAFNSPVPGPVIVVVLSVLLSFLFDFEARGIAIVGNIPEGLPSLMVPRMGDFPFDTLLVGAAAIFLVSFGSGVIAARSFGALGGYQVDPNRELSGFGAANIAAGLFGTFPVTASDSRTAVNFSVGGRSQIASLVAAATLMAVLLFLGGILRILPIPALGAILAATALSLIDLAALKHIWRVSRMEFIFALIAMWGPIGLGVLNGVIIAIAATLVYILRKGMYPRDALLGRIPGRDGFYKLHREAAARPVPGFGACMIQGSLLFFNTDYVRDRLLSVAGALPPGTVWLVIDASAIPQIDSTATAMVEEVQEELRKRGIGLGLAELHTEARAMLDRAGVINKIGSAMVFESIEDALTAFATRSDRAAE

SEQ ID NO: 20610 - protein, 592 aa, Rhizobium sp. NGR234
MSGTENQMTGAEIVLQALKDNGVEHIFGYPGGAVLPIYDEIFQQEEIQHILVRHEQGAGHMAEGYARSTGKVGVMLVTSGPGATNAVTPLQDALMDSIPLVCISGQVPTPLIGSDAFQECDTVGITRPCTKHNWLVKNVNDLARIIHEAFRVAQSGRPGPVVVDIPKDIQFATGTYTPPSAVPTQKSYQPKTQGDLKKIEEAIALMKTARQPIIYSGGGVINSGPQAAHFLRELVDLTGFPITSTLMGLGAYPASGKNWLGMLGMHGTYEANMAMHDCDVMICIGARFDDRITGRLNAFSPNSKKIHIDIDPSSINKNVRVDVPIVGDVGTVLEDMIRLWRAAAKTLDKARLDGWWGAVAKWRARNSLAYTPNDDVIMPQYAIQRLYELSKDRDTYITTEVGQHQMWAAQFFGFEQPNRWMTSGGLGTMGYGFPAAIGVQVAHPESLVIDIAGDASIQMCIQEMSCAVQYGLPVKIFILNNQYMGMVRQWQQLLHGNRLSHSYTEAMPDFVKLAEAYGGVGIRCEKPGELDDAIRRMIDTPAPVIFDCRVANLANCFPMIPSGKAHNEMLLPDEATDEAVANAIDAKGRQLV

SEQ ID NO: 20611 - protein, 400 aa, Rhizobium sp. NGR234
MAFLADALSRVKPSATIAVSQKARELKAKGRDVIGLGAGEPDFDTPDNIKKAAIDAINRGETKYTPVSGIPELREAIAKKFKRENNLDYTAAQTIVGTGGKQILFNAFMATLNPGDEVVIPAPYWVSYPEMVALCGGTPVFVSTKQENNFKLKAEDLDKAITPKTKWFVFNSPSNPSGAAYSHDELKALTDVLMKHPHVWVLTDDMYEHLTYGDFKFATPVEVEPGLYDRTLTMNGVSKAYAMTGWRIGYAAGPLALIKAMDMIQGQQTSGATSIAQWAAVEALNGAQDFIARNKEIFQGRRDLVVSMLNQAKGIACPTPEGAFYVYPSCAGLIGKTAPSGKVIETDEDFVSELLEAEGVAVVHGSAFGLGPNFRISYATSEELLEEACRRIQRFCGACK

SEQ ID NO: 20612 - protein, 71 aa, Rhizobium sp. NGR234
MAETGTVKFFNTDKGFGFIKPENGGADIFVHISAVQASGLNGLSENQKVSFDTEPDRRGKGPKAVNLQIVG

SEQ ID NO: 20613 - protein, 335 aa, Rhizobium sp. NGR234
MAQGICADNPGLDRTVAAPAQGGPSMKVFAGNSNRLLAEAICNYLNLPLGKATVRRFADQEIFVEIGENVRGEDVFIVQSTSFPTNDHLMELLIMIDAVRRSSARRITAVLPYFGYARQDRKPGPRTPISAKLVANLITEAGADRVLTLDLHAGQIQGFFDIPTDNLYAVPILARDVKEHYDLKNVTVVSPDVGGVVRARALAKRLDCLLAIVDKRRDRPGESEVMNVIGDVHGKDCILIDDIVDSGGTLCNAAEALLKNGATSVTAYITHGVLSGGACARVTSSMLKELVITDSIQPTTAVQSAHNIRVISTAGLIGEAISRTSQEESVSSLFD

SEQ ID NO: 20614 - protein, 210 aa, Rhizobium sp. NGR234
MNHPLFSADEFRRRALKQTGGPIETAWRDHGDFLLNPGIVPYVESLHLKDAAVLVPVVDDGEDASVIFTQRTSHLRKHSGQVAFPGGAVDPEDHSIEVAALREAQEEIGLDPRFVETIGRLPHYMAMSGFRITPVLAVVQPGFELVPNPEEVESVFEVPLSFLMDPRNHGRGSRHWEGAERHFYRMPYGERNIWGITAGIVRMLYERLYA

SEQ ID NO: 20615 - protein, 461 aa, Rhizobium sp. NGR234
MANVASTTASAGSELTARALREAVFSGLITLGLFVLFVGLKSDQNIRNELILTQRWGLLAIFVIVAMVGRFLMVAYAQPWLAQRKAAKAAAPDVAKEETFFSRNFSKIAILALVLYPPVIIALVGVQGSLKWVDNFGVQILIYVMLAWGLNIVVGLAGLLDLGYVAFYAVGAYSYALLSSYFGLSFWVLLPVAGILAACWGVVLGFPVLRLRGDYLAIVTLAFGEIIRLVLINWTEVTKGTFGVSGIAKATLFGIKFDASKDGFAALMGLPLSSAYYKIFLFYLILGLALLTAFVTIRLRRMPVGRAWEALREDEIACRSLGINTTTTKLTAFATGAMFGGFAGSFFAVRQGFVSPESFVFLESAVILAIVVLGGMGSLTGIFVAAVVMIGGTEILRELTFLKMIFGPNFTPELYRMLIFGLAMVVVMVWKPRGFVGSREPTAFLRERKAVSGSFTKEGHG

SEQ ID NO: 20616 - protein, 264 aa, Rhizobium sp. NGR234
MTIQTKLKAMFTAALMLGAATGMARADAVDDIKAAGQINVGIFSDFPPFSSASADMSIKGYDVDVAQQIADALGVRLNLVSVTGQNRIPYLNDKRVDILMSVGYSKERAEVIDFAAAYAPYYIAVIGPAELKVAGKEDLADKTIAVNRGTLEDTSLTEAAPASASIQRFDNYNAVIQAFISGQTQLMVVGNDVGAQVLARQEALKPEQKFQLLTSPSHIGLNKNEERLKQSVNDTVAKMLADGKLNESSQAWLKTPLNPDNLKD

SEQ ID NO: 20617 - protein, 351 aa, Rhizobium sp. NGR234
MAWDEKKLGELKAKYGESHGGELFDPTFRKVADKIFTKSGTRLAPYSGIPTFLTAPYMPVDADNPDFGNLQVAIVGIPMDLGVTNRPGSRFGPRALRAIERIGPYNHVLGCAPVHDLRVADIGDVPFRSRYRLELSHEDIEKRLNQIVDAGVVPLSVGGDHSMTHPILKAVGKKQPVGMIHIDAHCDTGGAYDLTKFHHGGPFRNAVLDGVLDPTRVIQIGIRGSAEYLWEFSYESGMTVIHAEEVSGLGIPAIIEKAKKIVGDGPTYLSFDIDSLDPSFAPGTGTPEVGGLTTREVLELIRGLKGVNLVGGDVVEVAPQYDATTNTAHAGAQVLFEILSLMVFSPAITGK

SEQ ID NO: 20618 - protein, 358 aa, Rhizobium sp. NGR234
MARFHPLQVTEVRRETRDAVVITLQPREEDRAAFDFTQGQYLTFRRRFDGEELRRSYSICAGKDEGVLKVGIKRVDGGCFSTWINEELKPGETLEAMPPMGAFFTPIEPEVAKHYLGFAGGSGITPILSIIKTTLAREPRAQFTLVYANRHVSSIMFREELEDLKNLHLGRFAALYVLESEAQDIDLFTGRIDAEKCEALFRSWIDLKSVDTVFICGPEPMMLAIAAALRAHGLRDEQIKFELFASSQPGLARRKVVSADSADRRATCEATVTLDGTTRNFSFPKEGQSLLEAALENRMDAPYACKAGVCSTCRAKVIEGEVEMETNHALEDYEVEQGYVLTCQCYPLSDRIVVSYDQ

SEQ ID NO: 20619 - protein, 520 aa, Rhizobium sp. NGR234
MQQSRPSGIDPAVFWPAMFIILGFVGWGTIFPDNLSSISKVVLDTIIDDFGWGFVVSSAGFLIFALFLAVSRLGKIRLGQDDERPEFRTASWICMMFSVGMGIGLMFWGVAEPIYHFASPPHGQAAPKSLEAALVAMKYSYFHWALHPWAIYAVVGLAIAYFTFRKGKPNLISAAFTPILGEAASGPIGKAIDVLALIATLFGTATSLGLGAQQINSGMDFLWGTGVSNGIALTIIGVMTVLFILSAVSGVGKGIQFLSNMNMIVAVLLLAFLLCIGPTIFIFNTFAESLGFYLSDIVNMSFRTAAFSDGKWLGSWTIFYWAWWVSWAPFVGVFIARISRGRTIREFVIGVLLIPSGVTFIWFTIMGGTALHSELFGAGGIVDAVNNQGAAVSLFALLAQYPFAWLTSLIAIFLVAIFFISGADAGSVVMGMLSSRGTLEPKPGVVVLWGVLAGASASVLLVMGGLQGLQTASIIAAAPFLLVMVGLCVSLWHALLDELEEGRSSRRAPASATAADAAGP

SEQ ID NO: 20620 - protein, 368 aa, Rhizobium sp. NGR234
MTMMLTGTTPTPLPLDQMKPWNSARQMLVCTSVTDEAPDVKTFTFAVEGGGWFNYMPGQFITVELRAKGGDLHRTYTVSSSPSRPYAIAITIKAQPTSIGTRWMFENVRSGSRVRAYGPSGHFTLSRNPGKKYLFISAGSGITPMMSMLRWLSDCAPDIDVVFINSARRPEEIIFREELELLAKRMPNLSLGFLPEARSVASPWAGLMGRIDRHKLSMLTPDFMGREIFCCGPDPFMRAVSAIVRAEGFDMGHYHQESFGATSIAETVHKQAREIVLDGKPTGVTVSFLGSNEEQVCEPGKTILETARAAGVRIPAACESGICGTCKVLKRSGEVVMHHNGGISDQEINAGYVLACCSRPTTPVEIEA

SEQ ID NO: 20621 - protein, 424 aa, Rhizobium sp. NGR234
MARIVMKFGGTSVADLNRIHNVARHVKREVDAGHEVAVVVSAMSGKTNELVGWVENMPKVAGSNAPFYDAREYDAVVASGEQVTSGLLAIALQSMGINARSWQGWQLPIKTDNAHGAARILDIDGADIIRRMGEGQVAVVAGFQGLGPDNRMATLGRGGSDTSAVAIAAAVKADRCDIYTDVDGVYTTDPRIEPKARRLKKIAFEEMLEMASLGAKVLQVRSVELAMVHKVRTFVRSSFEDPDAPGMGDLLNPPGTLICDEDEIVEQEVVTGIAYAKDEAQISLRRLADRPGVSAAIFGPLAEAHINVDMIVQNISEDGSKTDMTFTVPSGDVNKALKVLSDNKEKIGYDVVQSESGLVKVSVIGIGMRSHAGVAASAFRALAEKGINIKAITTSEIKISILIDGPYAELAVRTLHSAYGLDKS

SEQ ID NO: 20622 - protein, 531 aa, Rhizobium sp. NGR234
MAPRVLVSDELSETAVQIFRDRGVEVDFQPKLGKDKEKLAEIIGNYDGLAIRSATKVTEKLIAEATNLKVVGRAGIGVDNVDIPAASRRGIIVMNTPFGNSITTAEHAIALMFAVARQLPAADNSTQAGKWEKSKFMGVEITGKVLGVIGAGNIGSIVCARAIGLKMHVLAYDPFLSKERAEEMGVVKVELDELLAQADFITLHVPLTDKTRNILSAEALAKTKPGVRIVNCARGGLVDEKALADALKSGHVAGAGFDVFEVEPATESPLFGLPNVVCTPHLGASTTEAQENVALQVAEQMADYLVKGAVSNAINMPSITAEEAPILKPVIRLADVLGAFVGQVTESAIKEIEILYDGSTATMNTKALTSAVLAGLIRPQVADVNMVSAPIMIKEKGIILSEVKRDKTGVFDGYIKLTVKTANQTRSVAGTVFSDGKPRFIQIKGINLDADVGNHMVYLTNTDVPGMIGFIGTTLGDANVNIANFQLGREKQGGDAIALLYVDGPVSEAVLDKLRANPAVRQAKPLVFNVD

SEQ ID NO: 20623 - protein, 645 aa, Rhizobium sp. NGR234
MNPNFRNFALWAIIALLLIALFSMFQQPTERTGSREIPFSQFLKDVDASRVKEVVITGSKVIGSYTESGATFQTYAPAVDTALTERLEAKDVTVTVRPETDGSSGFLSYIGTLLPMLLILGVWLFFMRQMQGGSRGAMGFGKSKAKLLTEAHGRVTFDDVAGVDEAKQDLEEIVEFLRDPQKFQRLGGRIPRGVLLVGPPGTGKTLLARSVAGEANVPFFTISGSDFVEMFVGVGASRVRDMFEQAKKNAPCIIFIDEIDAVGRHRGAGLGGGNDEREQTLNQLLVEMDGFEANEGIILIAATNRPDVLDPALLRPGRFDRQVVVPNPDINGRERILKVHVRNVPLAPNVDLKVLARGTPGFSGADLMNLVNEAALMAARRNKRLVTMQEFEDAKDKIMMGAERRSSAMTEAEKKLTAYHEAGHAIVALNVPSADPLHKATIIPRGRALGMVMQLPEGDRYSMSYKWMISRLAIMMGGRVAEELTFGKENITSGASSDIEQATKLARAMVTQWGFSDQLGQVAYGENQQEVFLGHSVAQQKNVSEATAQKIDNEIRRLIDDAYEAARSILTEKHHEFVALAEGLLEYETLTGDEIKALIRGEKPARDLGDDTPPHRGSAVPSAGTKKEVGNKGEEPEGGFEPQPQ

SEQ ID NO: 20624 - protein, 600 aa, Rhizobium sp. NGR234
MPRQENQARERKSVRPLAAVLPYVRRYRRFAIGAAIALTVAAVTTLTLPLAVRRMIDHGFSNSDSAFINTYFTMLMVLAIVLALASAARYYFVISLGERIVADLRRDVFARVTGLSASFFDVNQSGEIVSRLTADTTQIKSAVGATASVALRNLILCLGAIGMMVYTSPKLSSLVIAAIPLIVFPLVGFGRSVRRRSREAQDTLAAASAYAGEAIGATRTVQAFNGEESANRRFGAAVEEAYGAARAAIRARSALTAFAITMVFGSVVAVLWFGARDVLNGTLSAGTLSQFLLYSVFAAGSLGALSEVWGELSQAAGAAERLNELLSEVPQIRAPEHPVAMAVPARGAIAFDDVHFAYPARPDYKSLKGLTLAVQPGETVAIVGPSGAGKSTVFSMLLRYYDPISGAVLIDGVDIRSVDPKDLRDRIAIVPQDVTIFAASVHDNIAFSAPEASREAVRAAAIAAQADEFIAKLDRGYDTLVGERGVTLSGGQRQRIAIARAILRNAPILLLDEATSALDAESETLVQKALDGLMRERTTLVIAHRLATVLKADRILVMDHGRIVEEGTHASLIRHGGLYAKLARLQFDHGAEGLFVASQL

SEQ ID NO: 20625 - protein, 514 aa, Rhizobium sp. NGR234
MTSHILVIDDDPVQRRLLTNMIERLGHVAHLADNGRSGLELLERKGGMINVILLDLLMPEMNGHGFLEALAERGIDTPVIVQTGQGGIETVVQAMQAGAFDFLVKPVSPERLSIAIGNALKMASRDGRVKTARRPRGGAIGFDDIVSASPAMIRVLDLARRAAQSNIPVVLEGESGVGKEMVARAIQAASDRASKPFVTVNCGAIPHNLVESILFGHEKGAFTGATEKHSGKFVDADGGTLFLDEIGDLPLEVQVKLLRAVQQGEIETVGARQPQRVNVRLISATNKDLINEVREGRFREDLYYRLNVFPITIPALRRRKEDIPVLVRAFVERFTAEQRLNQPVTVSSGAMALLTAYDWPGNIRQLENAIFRAVVLAEGGELTVKDFPQIATQIPGYVVADRSGFSWGEAGPERRPPAGATATVLPSRPDIPERSEPFGPVPEGRSENAIASVDEGGEVRKLAEVEEELIRFALKFYRGQMSQVARKLGIGRSTLYRKLKDYGIDPDNPVREAA

SEQ ID NO: 20626 - protein, 382 aa, Rhizobium sp. NGR234
MSQIVFITRESDPSEQRVAGSVESVKKLKSLGFDVVVEAGAGLGSRVPDAEFEKAGARIGSAADAQGADVILKVRRPTEQEIGGYRSGAIVIAIMDPYGNDAAIAAMAAAGLTAFAMELMPRITRAQSMDVLSSQANLAGYQAVIDAAHEYDRALPMMMTAAGTVPAAKIFVMGAGVAGLQAIATARRLGAMVSATDVRPAAKEQVASLGAKFIAVEDEEFKAAETAGGYAKEMSRDYQVKQAALVAEHIAKQDIVITTALIPGRPAPRLVTRAMLDAMKPGSVVVDLAVERGGNVEGAEAGKVVDLGGVKVVGHLNVPGRIAASASLLYAKNLVTFLETMVSKETKALAVNMEDELAKATALTHGGAVVHPAFGGANGGDK

SEQ ID NO: 20627 - protein, 320 aa, Rhizobium sp. NGR234
MSRPRILVPGKINPRILERLPEMFDTVRIERADASLVTADMADVAGIAVSGRLPPELMDAFPRLEIVGNFGVGYDGVDVARAAARGVVVTNTPDVLTEEVADTAIGLLLNTVRQLPQAEQWLRQGRWVRDGAFPLSPLSLRNRKVGLFGLGRIGLAIARRLEAFSVPIAYHTRSRREELPFAYYPSLVGLAEAVDTLIVIVPGTSSTAKAINADVLAALGPEGVVINVGRGSTLDETALVAALQSGVIAGAGLDVFENEPHVPEALLALPNVSLLPHVASASVATRNAMADLVVDNLKAWFSTGKALTPVPETPFERESR

SEQ ID NO: 20628 - protein, 393 aa, Rhizobium sp. NGR234
MSNRDPVVIVSAARTPMGAFQGGLKDLTAPELGAIALKAALDRAGLDAVDEVMMGNVLPAGLGQNPARQAALGAGLGQQTPSTTVSKVCGSGMKALMLGHDALISGSASVVGVGGMESMTNAPYLLPKARGGFRLGHGEVKDHMFLDGLEDAYSGRLMGTYAEDTAQHYQFSRADQDAFALRSLERALKAAEDKSFADEIVAITDGGKRGTANLDRDEQPTKADPAKIPKLKPAFRDGGSVTAANSSSISDGAAALVLMRASEAERRGLTPLAIVAGHAGHAQEPAWFTTAPIGAIDKLIEKLGWEKGSVGLYEINEAFAIVAMAAIRDLGLSDDIVNIHGGACALGHPIGASGARIVVTLLHAMRANGVKRGIASLCIGGGEATAVGLELME

SEQ ID NO: 20629 - protein, 232 aa, Rhizobium sp. NGR234
MAERVLIVDDDTRLSAMLADYLSGNGYTVKTAATATAGLTDLGRRAPDAVILDVMLPDLDGFETCRRIRAVSDVPILMLTAKGEETDRIVGLELGADDYLPKPFNPRELLARLKAILRRRNGSATVSRTFRFGRLEIDPGSRSVRIDGRVCALTSYQFDLLVALAENAGRTLSREQLMDAVKGEELEAFDRSIDVHVSRIRAAIESDPRHPRRIITVRGAGYVFARFQDDER

SEQ ID NO: 20630 - protein, 307 aa, Rhizobium sp. NGR234
MKSITLIGAPIEEGSGRRGAAMGPTALRIAGIDTVLSELGHTVHDEGDLRPLPARDLPNHAGANNLQMVAAFARALNDTVHDTARKGHVPIILGGDHALSMGSVSGMARYAHEVGRPLFVLWLDAHADFNSPSTSPSGNMHGMPVAFFCGEAEFTPILAADRPLVDPKRVYQVGIRSVDSREREEIAEHGVNVYDMRAVDEIGMAHIMRQILDDVRAADGLLHVSLDVDFMDPEFAPGVGTTVPGGATFREAHLIMEMLCDSGLVSSLDVVELNPFLDDRGKSARILVELTASLFGRRILDRPTRSA

SEQ ID NO: 20631 - protein, 475 aa, Rhizobium sp. NGR234
MSSFNLSLSLRRVGATAAALLAPVVAFAQEAAPAAAEAVAATPVPDKGDTTWMLLSTILVLLMTVPGLALFYGGLVRAKNMLSVLMQVLMITAVVMIIWVTYGYSLAFTDGGSLNSFIGGFSKMFLAGVDTTTLAESFSKGVFIPEYVFVVFQMTFACITPALIVGAFAERIKFSAVMLFVILWVTLVYFPIAHMVWFWGGPSAYTAPTGLIFSFGAIDFAGGTVVHINAGIAGLVGAIMLGKRTGYKREIMAPHSMTLTMVGASLLWVGWFGFNAGSNLEANAYAALAMINTFLATAAAIVSWAVVETLVRGKASMLGAASGAVAGLVAVTPAAGFAGPMGAIVLGLAVSPVCYFFVDVVKNKFHYDDSLDVFGIHGVGGILGAIATGILVNPALGGAGIVDYSTADFAAGYAGTATQVWAQLKGVLVTVVWSGIGSAILFKVVDAIVGLRVTVEAEREGLDLSSHGEAAYHAS

SEQ ID NO: 20632 - protein, 123 aa, Rhizobium sp. NGR234
MFAVIKTGGKQYRVAADDVITIEKLEGVAGDKIEFTEILMVGVGADATIGAPFVEGAVVSAEVVDQGRAKKVIAFKKRRRQNSKRSRGHRQHQTVVRILDIAAAGGKAKKASKKTEAAAEAAN

SEQ ID NO: 20633 - protein, 336 aa, Rhizobium sp. NGR234
MKFLDETKVYIRSGDGGAGAVSFHREKFIEFGGPDGGDGGRGGDVWVEAVNGLNTLIDFRYQQHFKGKTGVHGMGRNRTGAKGADVTLKVPVGTQIFEEDNETLIVDMVAEGQRYRLAAGGNGGFGNAHFKSSTNQAPNWANPGLEGEEKTIWLRLKLIADAGLVGLPNAGKSTFLAACTRARPKIANYPFTTLHPNLGVATVDGREFIIADIPGLIEGAHEGVGIGDRFLGHVERTRVLLHLVSAQEEDVAKAYTTVRHELDAYGGGLEDKPQIVALSQVDVLDDDELKAKSKALAKACGSTPLIISAVTNRGMTEALRALRDVISAAKAGEEQA

SEQ ID NO: 20634 - protein, 525 aa, Rhizobium sp. NGR234
MPKATSSVWTTMPSPVPTTTKRAAFLPCASARLMERVMSGPGVAASSRLAAAKARSVGRLGTNSMAFSRSVILGDTAGHALLPADSCIRRWFRLYRFKFWLKCRRFCTAASPPRKARTDIMASHKDVKKVVLAYSGGLDTSIILKWLQTELGAEVVTFTADLGQGEELEPARKKAEMLGIKEIYIEDVREEFVRDFVFPMFRANAVYEGVYLLGTSIARPLISKHLIDIARKTGADAIAHGATGKGNDQVRFELSAYALNPDIKIIAPWRDWSFKSRTDLLEFAEKHQIPVAKDKKGEAPFSVDANLLHSSSEGKVLEDPAQEAPEYVHMRTISPEAAPDQATVIKIGFERGDAVSINGVRLSPATLLAKLNDYGRDNGIGRLDLVENRFVGMKSRGVYETPGGTILLAAHRAIESITLDRGAAHLKDELMPRYAELIYYGFWFSPEREMLQAAIDRSQEHVEGEVTLKLYKGNVMVIGRESDKSLYSDKLVTFEDDQGAYDQKDAAGFIKLNALRLRTLAARNR

SEQ ID NO: 20635 - protein, 393 aa, Rhizobium sp. NGR234
MSNPSIVIASAARTAVGSFNGAFGNTPAHELGATVIKAVLERAGVDAAEVDEVILGQVLPAGEGQNPARQAAIKAGVPQEKTAWGMNQLCGSGLRAVALGMQQIATGDASIIVAGGMESMSMAPHCAHLRGGVKMGDYKMIDTMIKDGLTDAFYGYHMGTTAENVARKWQLTREEQDEFALRSQNKAEAAQKAGRFADEIVPFIVKTRKGDVTVDQDEYIRHGATLESIAKLRPAFDKEGTVTAGNASGLNDGAAATLLMTEAEAAKRGIQPLARIVSWATAGVDPQIMGTGPIPASRKALEKAGWPIGDVELVEANEAFAAQACAVNKDLGWDPSIVNVNGGAIAIGHPIGASGARVLNTLLFEMKRRGVSKGLATLCIGGGMGVAMCVERL

SEQ ID NO: 20636 - protein, 473 aa, Rhizobium sp. NGR234
MMDEQHIDALAKLLGDKGVVTRPEDKEAYETGARYDRGRAAAVLRPTTTAEVSAAVSYCVRNGIALIPQAGNTGLVSGSTPDVSGSEAVLSLDRLTRQFELDLDNRSVRVDAGFRLSDLNRTLEEHDLFFPIDLGADPRIGGMVATNTGGSRFLKYGDVRRNTLGLKVVLADEAGTVLDLDCDLRKNNTGVDWKQIFIGTSGAFGIVTECVLNLERLPKQVATAFLVPAGGAQVLPLLNAMEERLGAYLSAFEGMSKNAIAAAFTHVPSLKNPFQGGHIPDYVILAEISRSSAPRAEEQPLDAVLETALAEIWELEEAPLADAFVGPPHETWALRHALSEGVKHLGKLIAFDVSFRRGDIMAFCDHMKAEMPEKFPGVTVCDFGHIGDGGVHFNLVVAKDSPLLTDPSFEQRLREWVFTVAVEQYRGSFSAEHAIGRRNQAYYDFYTPEKLKEMAAGLKTVTSPGKLGSVRFG

SEQ ID NO: 20637 - protein, 410 aa, Rhizobium sp. NGR234
MTINTTVREAGFLPASRIASIGVSEILKIGARASAMKRDGKPVIILGAGEPDFDTPDHIKQAAWEAIQRGETKYTALDGSPDLKKAIREKFQRENDLAYELDEITVGTGAKQILFNAMMATINPGDEVIIPTPYWTSYSDIVQICEGRPVLIACDASSGFRLTAEKLEAAITPKTRWVLLNSPSNPSGAAYSAADYRPLLDVLLRHPHVWLLVDDMYEHIVYDDFRFVTPAQLEPRLKARTLTVNGVSKAYAMTGWRIGYAGGPRPLIKAMAVVQSQATSCPSSVSQAASVAALNGPQDFLKERTASFKRRRDLVVNGLNAIDGLDCRVPEGAFYTFSGCAGMLGKVTPDGKRIETDTDFCAYLLDDAHVAVVPGSAFGLSPYFRISYATSETELKEALQRIASACTRLS

SEQ ID NO: 20638 - protein, 429 aa, Rhizobium sp. NGR234
MRAGRTLPHPAPEPDCSRSQSNIEENPMSTFVPASRVSRIKVSPSTAAAARARELKAAGRDIVDMTVGEPDFDTPDNVKAAAHAAIDRGETKYTPVNGTPALRKAIIGDFERRLGLSYADNEICVGGGAKQILFLALMASVEYDAEVIIPAPYWVSYPDMVIANDGKPVIVQCPQEQGFKLTPEALEAAITPKTLWLVLNAPSNPTGAAYSRAELEALGQVLLRHPQVFVLSDDIYDQVWFRDEPMTTLVAAVPELKGRVLLTNGVSKSYAMTGWRIGYGAGPAPLVAAINKLQSQMSSCPSSVSQAAAAHALSSDQSFVAESVKVYKERRDYACARLNAVPGLSCLVPDGAFYLFPNCAGVMGRKTPEGKTIETDLDFILYLLDGVGVAALQGSAYGLSPYFRLSIATSMEAITEACDRIERAVAALK

SEQ ID NO: 20639 - protein, 601 aa, Rhizobium sp. NGR234
MNARDRQQRAVDSETITGILRRVIAENGRDHIRGYAFAIACLIVVAATTGFTAWIMETVINEAFANRRADIVLVICVAIFGAFVLRGLATYGQAVALSKIGNNIVARYQRRLYAHLMALSVGYFHEHRSAQLAAKVSQNVSGIRDVLNMTVTSIARDFLTLVGLVGVMFSKDWLLSLIVFFVAPPLLLGLRYISKRLRLATREAVEVNSRVLGAMQETIQGITIVKAFTMENELRRKVETIIDRAENRANRIARLSERTAPMTETFAGLAISSVLAYAAFRTIYSNIPPGAFFAFVTALLMAYDPARRLARLQVSLERAAVNARMIYEILDTVPHQRDRPDATELKLGEATVELRDVRFAYGNGEEILKGVSFRAEGGKTTALVGPSGAGKSTIISLIPRFYDPAAGQILIDGQDIAGVTKQSLRNGLAYVSQQPYLFEGSIRDNIRYGRPDATDAEIEEAARLAYAHDFILAQPEGYDTPVGEHGVTLSGGQRQRLSIARALVRNAPILLLDEATSALDTESEAAVQKALEQAMSGRTVIVIAHRLSTVVNADKIVVMKDGTVVEEGSHEELARRTDGLYARLHNLQGGSADLPDEAKIL

SEQ ID NO: 20640 - protein, 334 aa, Rhizobium sp. NGR234
MTSKKKPTVYITRKLPDVVETRMRELFDAELNIDDTPRSQPELVAAVKRVDVLVPTVTDRIDAALIEQAGPQLKLIAAFSNGVDNIDVDTAARKGITVTNTPNVLTEDTADMTMALILAVPRRLAEGAQVLTDRKGEWAGWSPTWMLGRRIAGKRIGIVGMGRIGTAVARRARAFGLSIHYHNRHRVKRETEEMLEATYWDSLDQMLARVDIVSVNCPSTPATYHLLSARRLALMRPDSYIVNTARGDVIDETAMIKCLREGKIAGAGLDVFENEPAVNPKLIKLAGEGKVVLLPHMSSATLEGRIDMGEKVVINIRTFFDGHRPPDRVLPGRD

SEQ ID NO: 20641 - protein, 641 aa, Rhizobium sp. NGR234
MAKVIGIDLGTTNSCVSVMDGKDAKVIENAEGARTTPSMVAFSDDGERLVGQPAKRQAVTNPENTLFAIKRLIGRTFEDPTTQKDKGMVPYKIVKADNGDAWVEAHGKSYSPSQISAMILQKMKETAESYLGEKVEKAVITVPAYFNDAQRQATKDAGKIAGLDVLRIINEPTAAALAYGLDKKEGKTIAVYDLGGGTFDISVLEIGDGVFEVKSTNGDTFLGGEDFDMRLVEYLAAEFKKEQGIDLKNDKLALQRLKEAAEKAKIELSSSQQTEINLPFITADASGPKHLTMKLSRAKFESLVEDLIQKTIAPCKAALKDAGVSAAEIDEVVLVGGMTRMPKVQETVKQLFGKEPHKGVNPDEVVAMGAAIQAGVLQGDVKDVLLLDVTPLSLGIETLGGVFTRLIERNTTIPTKKSQVFSTADDNQSAVTIRVSQGEREMAADNKLLGQFDLVGIPPAPRGMPQIEVTFDIDANGIVQVSAKDKGTGKEHQIRIQASGGLSDADIEKMVKDAEANAEADKKRRESVEAKNQAESLIHSSEKSLKEYGDKVSETDRKAISDAIAALKTAVEASEPDAEGIKAKSNTLMEVSMKLGQAIYEAQQAEAAHADAAADAKRDGDDVVDADYEEVKDEDDRKRSA

SEQ ID NO: 20642 - protein, 375 aa, Populus tremula x Populus alba
MGRAPCCEKNGLKRGPWTPDEDQKLIGYIQKHGYGNWRTLPKNAELQRCGKSCRLRWTNYLRPDIKRGRFSFEEEETIIQLHGILGNKWSAIAARLPGRTDNEIKNYWNTHIRKRLLRMGIDPVTHSPRLDLLDLSSILNSPLYDSSRMNMSRILGVQPLGDPELLRLATSLLSSQRDQTQDFAIPNGHQENHLSSPQVHQNQNQSIIHQANQFQPAGQEMPACTALTTTPCVTFSNEAQQMDPNGDQYHLSTITTFSSPNSQVSTHDQWQSNRMGSNLSEDYYVPAVSSYNSADNCRGTDLVDPSSEASTFISNNSNQTFGFASVLSTPSSSPAPLNSNSTYINCSSTEDERDSYCSNFLKFEIPDILDVSNFM

SEQ ID NO: 20643 - protein, 563 aa, uncultured crenarchaeote
MCGIVGILSKKERNVAPLIGKMLSCMKNRGPDGMGLSTENQIVYSDTFDNPLFSQVEGHDVLGHSRLAIVGGSCGQQPFVSCDKKLILEHNGEIYNYKEIRKNLSAHHTFTTSTDSEVIVHLLEDHYQNTKGDLIEAIRRTVTQLDGIYVLAIREQSTGDIVLVRDGIGVRQIYYGESSDFIAFASERKALWKIAMSDQIKRLLPGYALVISRKEGSSNFKTTLFPISVNTKKSICEKYSILYTDIDSAVNAYGDTLVESMRKRVSDFKKIGIVFSGGIDSVIVAYLAKQMAPEVICYTSGIKGSSDILNSLEIAEKLDLKLEIEQMTESDVESTIPKIISIIEDDNMGQVEVAIPIYGAVKLAHEQGIRVMLTGQGADELFGGYSWYSKIVKKHGYEKIQGYLIEDIKLLYKETLEREDKITMSQSIELREPFLDTNLIDTVLRIDPRLNIQNNGNNYDNLGKRVHRKLAEKLGIPKEIAYRIKEAAQHGSGIHNTLNTLAMKNGFTESKVNSSYLDKLKKRELIGSSQRYGHLFEKEQIWSLEPHIQMYLENISKNILPRN

SEQ ID NO: 20644 - protein, 226 aa, Arabidopsis thaliana
MEKRGGGSSGGSGSSAEAEVRKGPWTMEEDLILINYIANHGDGVWNSLAKSAGLKRTGKSCRLRWLNYLRPDVRRGNITPEEQLIIMELHAKWGNRWSKIAKHLPGRTDNEIKNFCRTRIQKYIKQSDVTTTSSVGSHHSSEINDQAASTSSHNVFCTQDQAMETYSPTPTSYQHTNMEFNYGNYSAAAVTATVDYPVPMTVDDQTGENYWGMDDIWSSMHLLNGN

SEQ ID NO: 20645 - protein, 908 aa, Saccharomyces cerevisiae
MNDQTQFTERALTILTLAQKLASDHQHPQLQPIHILAAFIETPEDGSVPYLQNLIEKGRYDYDLFKKVVNRNLVRIPQQQPAPAEITPSYALGKVLQDAAKIQKQQKDSFIAQDHILFALFNDSSIQQIFKEAQVDIEAIKQQALELRGNTRIDSRGADTNTPLEYLSKYAIDMTEQARQGKLDPVIGREEEIRSTIRVLARRIKSNPCLIGEPGIGKTAIIEGVAQRIIDDDVPIILQGAKLFSLDLAALTAGAKYKGDFEERFKGVLKEIEESKTLIVLFIDEIHMLMGNGKDDAANILKPALSRGQLKVIGATTNNEYRSIVEKDGAFERRFQKIEVAEPSVRQTVAILRGLQPKYEIHHGVRILDSALVTAAQLAKRYLPYRRLPDSALDLVDISCAGVAVARDSKPEELDSKEQSIAIDSSRDKSSRERVECRLHTKRKLKLARQKEASLQEELEPLRQRYNEEKHGHEELTQAKKKLDELENKALVAERRYDTRTAADLRYFAIPDIKKQIEKLEDQVAEEERRAGANSMIQNVVDSDTISETAARLTGIPVKKLSESENEKLIHMERDLSSEVVGQMDAIKAVSNAVRLSRSGLANPRQPASFLFLGLSGSGKTELAKKVAGFLFNDEDMMIRVDCSELSEKYAVSKLLGTTAGYVGYDEGGFLTNQLQYKPYSVLLFDEVEKAHPDVLTVMLQMLDDGRITSGQGKTIDCSNCIVIMTSNLGAEFINSQQGSKIQESTKNLVMGAVRQHFRPEFLNRISSIVIFNKLSRKAIHKIVDIRLKEIEERFEQNDKHYKLNLTQEAKDFLAKYGYSDDMGARPLNRLIQNEILNKLALRILKNEIKDKETVNVVLKKGKSRDENVPEEAEECLEVLPNHEATIGADTLGDDDNEDSMEIDDDLD

SEQ ID NO: 20646 - protein, 246 aa, Arabidopsis thaliana
RPWGKWAAEIRDPRKGSREWLGTFDTAEEAARAYDAAARRIRGTKAKVNFPEEKNPSVVSQKRPSAKTNNLQKSVAKPNKSVTLVQQPTHLSQQYCNNSFDNSFGDMSFMEEKPQMYNNQFGLTNSFDAGGNNGYQYFSSDQGSNSFDCSEFGWSDHGPKTPEISSMLVNNNEASFVEETNAAKKLKPNSDESDDLMAYLDNALWDTPLEVEAMLGADAGAVTQEEENPVELWSLDEINFMLEGDF

SEQ ID NO: 20647 - protein, 213 aa, Arabidopsis thaliana
MAKMGLKPDPATTNQTHNNAKEIRYRGVRKRPWGRYAAEIRDPGKKTRVWLGTFDTAEEAARAYDTAARDFRGAKAKTNFPTFLELSDQKVPTGFARSPSQSSTLDCASPPTLVVPSATAGNVPPQLELSLGGGGGGSCYQIPMSRPVYFLDLMGIGNVGRGQPPPVTSAFRSPVVHVATKMACGAQSDSDSSSVVDFEGGMEKRSQTVRSRS

SEQ ID NO: 20648 - protein, 317 aa, Arabidopsis thaliana
RSNFFDFDAEFEADFQGFKDDSSIDCDDDFDVGDVFADVKPFVFTSTPKPAVSAAAEGSVFGKKVTGLDGDAEKSANRKRKNQYRGIRQRPWGKWAAEIRDPREGARIWLGTFKTAEEAARAYDAAARRIRGSKAKVNFPEENMKANSQKRSVKANLQKPVAKPNPNPSPALVQNSNISFENMCFMEEKHQVSNNNNNQFGMTNSVDAGCNGYQYFSSDQGSNSFDCSEFGWSDQAPITPDISSAVINNNNSALFFEEANPAKKLKSMDFETPYNNTEWDASLDFLNEDAVTTQDNGANPMDLWSIDEIHSMIGGVF

SEQ ID NO: 20649 - protein, 430 aa, Arabidopsis thaliana
MAQILAASPTCQMRVPKHSSVIASSSKLWSSVVLKQKKQSNNKVRGFRVLALQSDNMSLNSDEILLNLSDSTYKDRIIAEYIWVGGSGMDMRSKARTLPGPVTDPSQLPKWNYDGSSTGQAPGEDSEVILYPQAIFKDPFRRGNNILVMCDAYTPAGEPIPTNKRHAAAKVFSNPDVAAEVPWYGIEQEYTLLQKDVKWPVGWPIGGYPGPQGPYYCGIGADKSFGRDVVDSHYKACLYAGINISGINGEVMPGQWEFQVGPAVGISAADEIWVARYILERITEIAGVVVSFDPKPIPGDWNGAGAHCNYSTKSMREEGGYEIIKKAIDKLGLRHKEHIAAYGEGNERRLTGHHETADINTFLWGVANRGASIRVGRDTEKEGKGYFEDRRPASNMDPYIVTSMIAETTILWNPTLEAEALAAQKLSLNV

SEQ ID NO: 20650 - protein, 430 aa, Arabidopsis thaliana
MAQILAASPTCQMRVPKHSSVIASSSKLWSSVVLKQKKQSNNKVRGFRVLALQSDNMSLLADEVLLNISDNPEKDRIIAEYIWVGGSGMDMRSKARTLPGPVTDPSKLPKWNYDGSSTGQAPGQDSEVILYPQAIFKDPFRRGNNILVMCDAYTPAGEPIPTNKRHAAAEIFANPDVIAEVPWYGIEQEYTLLQKDVNWPLGWPIGGFPGPQGPYYCSIGADKSFGRDIVDAHYKASLYAGINISGINGEVMPGQWEFQVGPSVGISAADEIWIARYILERITEIAGVVVSFDPKPIPGDWNGAGAHTNYSTKSMREEGGYEIIKKAIEKLGLRHKEHISAYGEGNERRLTGHHETADINTFLWGVANRGASIRVGRDTEKEGKGYFEDRRPASNMDPYVVTSMIAETTLLWNPTLEAEALAAQKLSLNV

SEQ ID NO: 20651 - protein, 430 aa, Arabidopsis thaliana
MAQILAASPTCQMRVPKHSSVIASSSKLWSSVVLKQKKQSNNKVRGFRVLALQSDNSTLLSDEVLLNLTDATGKDRIIAEYIWIGGSGMDIRSKARTLPGPVTDPSKLPKWNYDGSSTGQAAGEDSEVILYPQAIFKDPFRKGNNILVMCDAYTPAGDPIPTNKRHNAAKIFSHPDVAKEEPWYGIEQEYTLMQKDVNWPIGWPVGGYPGPQGPYYCGVGADKAIGRDIVDAHYKACLYAGIGISGINGEVMPGQWEFQVGPVEGISSGDQVWVARYLLERITEISGVIVSFDPKPVPGDWNGAGAHCNYSTKTMRNDGGLEVIKKAIGKLQLKHKEHIAAYGEGNERRLTGKHETADINTFSWGVANRGASVRVGRDTEKEGKGYFEDRRPASNMDPYVVTSMIAETTILGEPTLEAEALAAQKLSLNV

SEQ ID NO: 20652 - protein, 306 aa, Vitis vinifera
MDVNGRGGSSTVLSEEEMDLRRGPWTVEEDLTLVNYIATQGEGRWNSLARCAGLKRTGKSCRLRWLNYLRPDVRRGNITLEEQLLILELHSRWGNRWSKIAQHLPGRTDNEIKNYWRTRVQKHAKQLKCDVNSKQFKDTMRYLWMPRLVERIQAAAAATSGSSPAAVAAHQFSGSCDIVAGSAAVPQMAAGGADFYGGQVSTGYTPENSSTAASSDSFGAQVSPVSDLTEIYNFPVSDNQNPDFFQTDQVGYTDSLISPSGYFNQGLDFQSMEPNTQWYEGGDTATADNLWNVEDIWSVQTQFTNI

SEQ ID NO: 20653 - protein, 642 aa, Fragaria x ananassa
GDEVIEAHARRSSESLPRRNSESVAPPRRNSLGDANFSMHSIKEVPEKKQKKPRRRSFMGIMKKSQTQSQLDDDTFDEFGASEDVRDDSDNDERPMSLDDKVRKKEMRKGMDLATTLERIEKNFVITDPRLPDNPIIFASDSFLELTEYSREEILGRNCRFLQGPETDPATVKKIREAIDNQTEVTVQLINYTKSGKKFWNVFHLQPMRDHKGEVQYFIGVQLDGSQHIEPLQNSIPEVAAKESEKLVKETAVNVDEAARELPDANMKPEDLWMNHSKVVHPKPHRKDSPPWIAIQKILDSGEQIGLKHFKPIKPLGSGDTGSVHLVQLCGTDQYFAMKAMDKNIMLNRNKVHRACAEREILDMLDHPFLPALYASFQTKTHVCLITDYYPGGELFLLLDSQPTKVLKEDSVRFYVAEVVVALEYLHCQGIIYRDLKPENVLLQSNGHVTLTDFDLSCLTSCKPQLLLPTINEKKRHHKRQHDPIFMAEPMRASNSFVGTEEYIAPEIITGAGHSSAVDWWALGILIYEMLYGYTPFRGKTRQKTFANILHKDLKFPGSIPASLQAKQLMYRLLHRDPKNRLGSLEGANEIKRHPFFRGVNWALVRCMNPPKLDSPLFGTTEAEKGAKLVDPEMQDLQTNIF

SEQ ID NO: 20654 - protein, 205 aa, uncultured Bradyrhizobium sp.
TQIKEFASFPTLEQLPLWGFDGSSTQQAEGHSSDCVLKPVAVFPDAARTNGVLVMCEVMMPDGKTPHPSNKRATILDDAGAWFGFEQEYFFYKDGRPLGFPASGYPAPQGPYYTGVGYSNVGDVARKIVEEHLDLCLAAGINHEGINAEVAKGQWEFQIFGKGSKKAADEMWMARYLMLRLTEKYGIDIEFHCKPLGDTDWNGSG

SEQ ID NO: 20655 - protein, 205 aa, uncultured Bradyrhizobium sp.
TQIKEFASFPTLEQLPLWGFDGSSTQQAEGHSSDCVLKPVAVFPDGARTNGVLVMCEVMMPDGKTPHPSNKRATILDDSGAWFGFEQEYFFYKDGRPLGFPTAGYPALQGPYYTGVGYSNVGDVARKIVEEHLDLCLAAGINHEGINAEVAKGQWEFQIFGKGSKTAADQMWMARYLMLRLTEKYGIDIEFHCKPLGDTDWNGSG

SEQ ID NO: 20656 - protein, 205 aa, uncultured Bradyrhizobium sp.
TQIKEFASFPTLEQLPLWGFDGSSTQQAEGHSSDCVLKPVAVFPDGARTNGVLVMCEVMMPDGKTPHPSNKRATILDDSGAWFGFEQEYFFYKDGRPLGFPTAGYPAPQGPYYTGVGYSNVGDVARKIVEEHLDLCLAAGINHEGINAEVAKGQWEFQIFGMGSKTAADQMWMARYLMLRLTEKYGIDIEFHCKPLGDTDWNGSG

SEQ ID NO: 20657 - protein, 417 aa, Dimocarpus longan
NVPYYKDFVAKASADSHTLTVSVGPDSLADITNATMNGLEVMKISNEAGSLDGLSSVESLIPHTPTEKDHIAIIIGAVVGAVVVVVLIGVCYCCLVKRKLKTTHQGNSWLPLPLYGNSQTMTKMSTTSQKSGTGSCISLASSSLGRFFMSQEILDATNKFDESLFLGVGGFGRVYKGTLEDGTKVAVKRGNPRSEQGLAEFRTEIEMLSKLRHRHLVSLIGYCDERSEMILVYEYMANGPLRSHLYGTDLSPLSWKQRLEICIGAARGLHYLHTGAAQSIVHRDVKTTNILLDENFVAKVADFGLSKTGPALDQTHVSTAVKGNFGYLDPEYFRRQQLTEKSDVYSFGVVLMEVLCTRPALNPVLPREQVNIAEWAMTWQKKGMLDQIMDSNLSGKVNPASLKKFGETAEKCLAEHG

SEQ ID NO: 20658 - protein, 348 aa, Brassica nigra
MLKQESNWAQACDTCRSAACTVYCRADSAYLCTSCDAQIHAANRLASRHERVRVCESCERAPAAFFCKADAASLCTACDSQIHSANPLARRHQRVPILPISGCVATNHHSSETTEPENIVVVGQEEEDEAEAASWLLPSSVKNCGDNNNNTENNRFSVGEEYLDLVDYSSSIDKRFTGQTNQYQQDYNVPQRSYVADGVVPLQVGVSKGHMHHEQHNFQFGFTNVSSEAHQISNGSPIHMVSLVPESVTSDATVSHQRSPKAGTEELPEAPVQMLSPMERKARVLRYREKKKTRKFEKRIRYASRKEYAEKRPRIKGRFAKRNEVDADQAFPTVVMFDTGYGIVPSFS

SEQ ID NO: 20659 - protein, 348 aa, Brassica nigra
  misc_feature (321)..(321): Xaa can be any naturally occurring amino acid
  unsure (1)..(348): unsure at all Xaa locations
MLKQESNWAQACDTCRSAACTVYCRADSAYLCTSCDAQIHAANRLASRHERVRVCESCERAPAAFFCKADAASLCTACDSQIHSANPLARRHQRVPILPISGCVATNHHSSETTEPENIVVVGQEEEDEAEAASWLLPSSVKNCGDNNNNTENNRFSVGEEYLDLVDYSSSIDKRFTGQTNQYQQDYNVPQRSYVADGVVPLQVGVSKGHMHHEQHNFQFGFTNVSSEAHQISNGSPIHMVSLVPESVTSDATVSHQRSPKAGTEELPEAPVQMLSPMERKARVLRYREKKKTRKFEKRIRYASRKEYAEKRPRIKGRFAXRNEVDADQAFPTVVMFDTGYGIVPSFS

SEQ ID NO: 20660 - protein, 348 aa, Brassica nigra
MLKQESNWAQACDTCRSAACTVYCRADSAYLCTSCDAQIHAANRLASRHERVRVCESCERAPAAFFCKADAASLCTACDSQIHSANPLARRHQRVPILPISGCVATNHHSSETTEPENIVVVGQEEEDEAEAASWLLPSSVKNCGDNNNNTENNRFSVGEEYLDLVDYSSSIDKRFTGQTNQYQQDYNVPQRSYVADGVVPLQVGVSKGHMHHEQHNFQFGFTNVSSEAHQISNGSPIHMVSLVPESVTSDATVSHQRSPKAGTEELPEAPVQMLSPMERKARVLRYREKKKTRKFEKRIRYASRKEYAEKRPRIKGRFAKRNEVDADQAFPTVVMFDTRYGIVPSFS

SEQ ID NO: 20661 - protein, 348 aa, Brassica nigra
MLKQESNWAQACDTCRSAACTVYCRADSAYLCTSCDAQIHAANRLASRHERVRVCESCERAPAVFFCQADAASLCTACDSQIHSANPLARRHQRVPILPISGCVATNHHSSETTEPENIVVVGQEEEDEAEAASWLLPSSVKNCGDNNNNTENNRFSVGEEYLDLVDYSSSIDKRFTGQTNQYQQDYNVPQRSYVADGVVPLQVGVSKGHMHHEQHNFQFGFTNVSSEAHQISNGSPIHMVSLVPESVTSDATVSHQRSPKAGTEELPEAPVQMLSPMERKARVLRYREKKKTRKFEKRIRYASRKEYAEKRPRIKGRFAKRNEVDADQAFPTVVMFDTGYGIVPSFS

SEQ ID NO: 20662 - protein, 342 aa, Brassica nigra
MLKQESNWAQACDTCRSAACTVYCRADSAYLCTSCDAQIHAANRLASRHERVRVCESCERAPAAFFCKADAASLCTACDSQIHSANPLARRHQRVPILPISGCVATNHHSSETTEPENIVVVGQEEEDEAEAASWLLPSSVKNCGDNNNNTENNRFSVGEEYLDLVDYSSSIDKRFTGQTNQYQQDYNVPQRSYVADGVVPLQVGVANGHMHHEKHNFQFGFTNVSSEASPIHMVSLVPESVTSDATVSHPRSPKAGTEELPEAPVQMLSPMERKARVLRYREKKKTRKFEKRIRYASRKEYAEKRPRIKGRFAKRNEVDADHALSTMVMFDTGYGIVPSFS

SEQ ID NO: 20663 - protein, 342 aa, Brassica nigra
MLKQESNWAQACDTCRSAACTVYCRADSAYLCTSCDAQIHAANRLASRHERVRVCESCERAPAAFFCKADAASLCTACDSQIHSANPLARRHQRVPILPISGCVATNHHSSETTEPENIVVVGQEEEDEAEAASWLLPSSVKNCGDNNNNTENNRFSVGEEYLDLVDYSSIIDKRFTGQTNQYQQDYNVPQRSYVADGVVPLQVGVANGHMHHEKHNFQFGFTNVSSEASPIHMVSLVPESVTSDATVSHPRSPKAGTEELPEAPVQMLSPMERKARVLRYREKKKTRKFEKRIRYASRKEYAEKRPRIKGRFAKRNEVDADHALSTMVMFDTGYGIVPSFS

SEQ ID NO: 20664 - protein, 345 aa, Brassica nigra
MLKQESNWAQACDTCRSAACTVYCRADSAYLCTSCDAQIHAANRLASRHERVRVCESCERAPAAFFCKADAASLCTACDSQIHSANPLARRHQRVPILPISGCVATNHSSETTEPENIVVVGQEEEDEAEAASWLLPSSVKNCGDNNNNNNNNSENNRFSVGEEYLDLVDYSSSIDKRFTGQSNQYQQDYNVPQRSYVADGVVPLQVGVANGHMHHEQHNFQFGFTNVSSEASPIHMVSLVPESVTSDATVSHPRSPKAGTEELPEAPVQMLSPMERKARVLRYREKKKTRKFEKRIRYASRKEYAEKRPRIKGRFAKRNEVDADHALSTMVVFDTGYGIVPSFS

SEQ ID NO: 20665 - protein, 345 aa, Brassica nigra
MLKQESNWAQACDTCRSAACTVYCRADSAYLCTSCDAQIHAANRLASRHERVRVCESCERAPAAFFCKADAASLCTACDSQIHSANPLARRHQRVPILPISGCVATNHSSKTTEPENIVVVGQEEEDEAEAASWLLPSSVKNCGDNNNNNNNNSENNRFSVGEEYLDLVDYSSSIDKRFTGQSNQYQQDYNVPQRSYVADGVVPLQVGVANGHMHHEQHNFQFGFTNVSSEASPIHMVSLVPESVTSDATVSHPRSPKAGTEELPEAPVQMLSPMERKARVLRYREKKKTRKFEKRIRYASRKEYAEKRPRIKGRFAKRNEVDADHALSTMVVFDTGYGIVPSFS

SEQ ID NO: 20666 - protein, 345 aa, Brassica nigra
MLKQESNWAQACDTCRSAACTVYCRADSAYLCTSCDAQIHAANRLASRHERVRVCESCERAPAAFFCKADAASLCTACDSQIHSANPLARRHQRVPILPISGCVATNHSSKTTEPENIVVVGQEEEDEAEAASWLLPSSVKNCGDNNNNNNNNSENNRFSVGEEYLDLVDYSSSIDKRFTGQSNQYQQDYNVPQRSYVADGVVPLQVGVANGHMHHEQHNFQFGFTNVSSEASPIHMVSLVPESVTSDATVSHPRSPKAGTEELPEAPVQMLSPMERKARVLRYREKKKTRKFEKRIRYASRKEYAEKRPRIKGRFAKRNEVDADQALSTMVVFDTGYGIVPSFS

SEQ ID NO: 20667 - protein, 342 aa, Brassica nigra
  misc_feature (15)..(15): Xaa can be any naturally occurring amino acid
  misc_feature (31)..(31): Xaa can be any naturally occurring amino acid
  misc_feature (40)..(40): Xaa can be any naturally occurring amino acid
  misc_feature (113)..(113): Xaa can be any naturally occurring amino acid
  misc_feature (315)..(315): Xaa can be any naturally occurring amino acid
  unsure (1)..(342): unsure at all Xaa locations
MLKQESNWAQACDTXRSAACTVYCRADSAYXCTSCDAQIXAANRLASRHERVRVCESCERAPAAFFCKADAASLCTACDSQIHSANPLARRHQRVPILPISGCVATNHHSSEXTEPENIVVVGQEEEDEAEAASWLLPSSVKNCGDNNNNTENNRFSVGEEYLDLVDYSSSIDKRFTGQTNQYQQDYNVPQRSYVADGVVPLQVGVANGHMHHEKHNFQFGFTNVSSEASPIHMVSLVPESVTSDATVSHPRSPKAGTEELPEAPVQMLSPMERKARVLRYREKKKTRKFEKRIRYASRKEYAEKRPRIKGRFAXRNEVDADHALSTMVMFDTGYGIVPSFS

SEQ ID NO: 20668 - protein, 345 aa, Brassica nigra
MLKQESNWAQACDTCRSAACTVYCRADSAYLCTSCDAQIHAANRLASRHERVRVCESCERAPAAFFCKADAASLCTACDSQIHSANPLARRHQRVPILPISGCVATNHHSSETTEPENIVVVGQEEEDEAEAASWLLPSSVKNCGDNNNNNNNSENNRFSVGEEYLDLVDYSSSMDKRFTGQSNQYQQDYNVPQRSYVADGVVPLQVGVANGHMHHEQHNFQFGFTNVSSEASPIHMVSLVPESVTSDATVSHPRSPKAGTEELPEAPVQMLSPMERKARVLRYREKKKTRKFEKRIRYASRKEYAEKRPRIKGRFAKRNEVDADHALSTMVVFDTGYGIVPSFS

SEQ ID NO: 20669 - protein, 348 aa, Brassica nigra
MLKQESNWAQACDTCRSAACTVYCRADSAYLCTSCDAQIHAANRLASRHERVRVCESCERAPAAFFCKADAASLCTACDSQIHSANPLARRHQRVPILPISGCVATNHHSSETTEPENIVVVGQEEEDEAEAASWLLPSSVKNCGDNNNNNNNNNISENNRFSVGEEYLDLVDYSSSIDKRFTGQTNQYQQDYNVPQRSYVADGVVPLQVGVANGHMHHEKHNFQFGFTNVSSEASPIHMVSLVPESVTSDATVSHPRSPKAGTEELPEAPVQMLSPMERKARVLRYREKKKTRKFEKRIRYASRKEYAEKRPRIKGRFAKRNEVDADHALSTMVMVDTGYGIVPSFS

SEQ ID NO: 20670 - protein, 342 aa, Brassica nigra
  misc_feature (177)..(177): Xaa can be any naturally occurring amino acid
  unsure (1)..(342): unsure at all Xaa locations
MLKQESNWAQACDTCRSAACTVYCRADSAYLCTSCDAQIHAANRLASRHERVRVCESCERAPAAFFCKADAASLCTACDSQIHSANPLARRHQRVPILPISGCVATNHHSSETTEPENIVVVGQEEEDEAEAASWLLPSSVKNCGDNNNNTENNRFSVGEEYLDLVDYSSSIDKRFXGQTNQYQQDYNVPQRSYVADGVVPLQVGVANGHMHHEKHNFQFGFTNVSSEASPIHMVSLVPESVTSDATVSHPRSPKAGTEELPEAPVQMLSPMERKARVLRYREKKKTRKFEKRIRYASRKEYAEKRPRIKGRFAKRNEVDADHALSTMVMFDTGYGIVPSFS

SEQ ID NO: 20671 - protein, 344 aa, Brassica nigra
MLKQESNWAQACDTCRSAACTVYCRADSAYLCTSCDAQIHAANRLASRHERVRVCESCERAPAAFFCKADAASLCTACDSQIHSANPLARRHQRVPILPISGCVATNHHSSETTEPENIVVVGQEEEDEAEAASWLLPSSVKNCGDHNNNNNSENNRFSVGEEYLDLVDYSSSMDKRFTGQSIQYQQDYNVPQRSYVADGVVPLQVGVANGHMHHKKHNFQFGFTNVSSEASPIHMVSLVPESVTSDATVSHPRSPKAGTEELPEAPVQMLSPMERKARVLRYREKKKTRKFEKRIRYASRKEYAEKRPRIKGRFAKRNEVDADHALSTMVVFDTGYGIVPSFS

SEQ ID NO: 20672 - protein, 342 aa, Brassica nigra
MLKQESNWAQACDTCRSAACTVYCRADSAYLCTSCDAQIHAANRLASRHERVRVCESCERAPAAFFCKADAASLCTACDSQIHSANPLARRHQRVPILPISGCVATNHHSSETTEPENIVVVGQEEEDEAEAASWLLPSSVKNCGDNNNNTENNRFSVGEEYLDLVDYSSSIDKRFTGQTNQYQQDYNVPQRSYVADGVVPLQVGVANGHMHHEKHNFQFGFTNVSSEASPIHMVSLVPESVTSDATVSHPRSPKAGTEELPEAPVQMLSPMERKARVLRYREKKKTRKFEKRIRYASRKEYAEKRPRIKGRFAKRNEVDANHALSTMVMSDTGYGIVPSFS

SEQ ID NO: 20673 - protein, 345 aa, Brassica nigra
  misc_feature (344)..(344): Xaa can be any naturally occurring amino acid
  unsure (1)..(345): unsure at all Xaa locations
MLKQESNWAQACDTCRSAACTVYCRADSAYLCTSCDAQIHAANRLASRHERVRVCESCERAPAAFFCKADAASLCTACDSQIHSANPLARRHQRVPILPISGCVATNHSSKTTEPENIVVVGQEEEDEAEAASWLLPSSVKNCGDNNNNNNNNSENNRFSVGEEYLDLVDYSSSIDKRFTGQSNQYQQDYNVPQRSYVADGVVPLQVGVANGHMHHEQHNFQFGFTNVSSEASPIHMVSLVPESVTSDATVSHPRSPKAGTEELPEAPVQMLSPMERKARVLRYREKKKTRKFEKRIRYASRKEYAEKRPRIKGRFAKRNEVDADHALSTMVVFDTGYGIVPSXS

SEQ ID NO: 20674 - protein, 345 aa, Brassica nigra
MLKQESNWAQACDTCRSAACTVYCRADSAYLCTSCDAQIHAANRLASRHERVRVCESCERAPAAFFCKADAASLCTACDSQIHSANPLARRHQRVPILPISGCVATNHSSKTTEPENIVVVGQEEEDEAEAASWLLPSSVKNCGDNNNNNNNNSENNRFSVGEEYLDLVDYSSSIDKRFTGQSNQYQQDYNVPQRSYVADGVVPLQVGVANGHMHHEQHNFQFGFTNVSSEASPIHMVSLVPESVTSDATVSHPRSPKAGTEELPEAPVQMLSPMERKARVLRYREKKKTRKFEKRIRYASRKEYAEKRPRIKGRFAKRNEVDADHALSTMVMFDTGYGIVPSFS

SEQ ID NO: 20675 - protein, 345 aa, Brassica nigra
MLKQESNWAQACDTCRSAACTVYCRADSAYLCTSCDAQIHAANRLASRHERVRVCESCERAPAAFFCKADAASLCTACDSQIHSANPLARRHQRVPILPISGCVATNHSSKTTEPENIVVVGQEEEDEAEAASWLLPSSVKNCGDNNNNNNNNSENNRFSVGEEYLDLVDYSSSIDKRFTGLSNQYQQDYNVPQRSYVADGVVPLQVGVANGHMHHEQHNFQFGFTNVSSEASPIHMVSLVPESVTSDATVSHPRSPKAGTEELPEAPVQMLSPMERKARVLRYREKKKTRKFEKRIRYASRKEYAEKRPRIKGRFAKRNEVDADHALSTMVVFDTGYGIVPSFS

SEQ ID NO: 20676 - protein, 567 aa, Zymomonas mobilis
SYTVGTYLAERLVQIGLKHHFAVAGDYNLVLLDNLLLNKNMEQVYCCNELNCGFSAEGYARAKGAAAAVVTYSVGALSAFDAIGGAYAENLPVILISGAPNNNDHAAGHVLHHALGKTDYHYQLEMAKNITAAAEAIYTPEEAPAKIDHVIKTALREKKPVYLEIACNIASMPCAAPGPASALFNDEASDEASLNAAVEETLKFIANRDKVAVLVGSKLRAAGAEEAAVKFADALGGAVATMAAAKSFFPEENPHYIGTSWGEVSYPGVEKTMKEADAVIALAPVFNDYSTTGWTDIPDPKKLVLAEPRSVVVNGIRFPSVHLKDYLTRLAQKVSKKTGALDFFKSLNAGELKKAAPADPSAPLVNAEIARQVEALLTPNTTVIAETGDSWFNAQRMKLPNGARVEYEMQWGHIGWSVPAAFGYAVGAPERRNILMVGDGSFQLTAQEVAQMVRLKLPVIIFLINNYGYTIEVMIHDGPYNNIKNWDYAGLMEVFNGNGGYDSGAGKGLKAKTGGELAEAIKVALANTDGPTLIECFIGREDCTEELVKWGKRVAAANSRKPVNKLL

SEQ ID NO: 20677 - protein, 433 aa, Acinetobacter sp. ADP1
MKPVRLAILGLGTVGGGALKLLQENAAEIKRRTGREIQITHVGTRRSRPDLELEGIQQSDDLMHIVRQPDVDVVVEVMGGIHPAYEVIMEAIKHGKQVVTANKALLAEHGNELFKAAEDNAVQVAYEAAVAGGIPIIKVIREGLAANRIEWLAGIINGTGNFILTEMRDKGRAFTDVLKEAQELGYAEADPTFDVEGIDAAHKLTILASCAFGIPLQFDKVYTEGISKITAQDVKYAEELGFRIKHLGIARRVENGIELRVHPTLIPEEELIANVNGVKNAVLVQAHAVGPTLYYGAGAGAGPTASAVVADIVDIVRDISYTEDGAGTIPQLAFEALTDVPILKREEMTTGYYLRVDAEDQTGVLADITTILSRAGISIDAIMQQSRLKDLIPIVILTDPVVESKMDEALAKIQALPAIHGEIVRIRLESLDS

SEQ ID NO: 20678 - protein, 294 aa, Allium cepa
MDQYEKVEKIGEGTYGVVYKARDRLTNETIALKKIRLEQEDEGVPSTAIREISLLKEMQHANIVRLQDVVHSEKRIYLVFEYLDLDLKKHMDSCPDFAKDSRLAKTFLYQLLRGIAYCHSHRVLHRDLKPQNLLIDRRTNSLKLADFGLARAFGIPVRTFTHEVVTLWYRAPEILLGARQYSTPVDIWSVGCIFAEMVNQRPLFPGDSEIDELFKIFRIMGTPNEDTWPGVTSLPDFKSAFPKWPAKDLATIVPKLDSAGIDLLYKMLHLEPSKRITARKALEHEYFRDLGTIP

SEQ ID NO: 20679 - protein, 321 aa, Pseudomonas putida KT2440
MDQAASNDQAMTRDSLYGTAAESTYAGVVSFSRRRYSRDLRGVDVVVSGVPFDTATSNRPGARFGPRAIRAASVQQAWARHWPWAFDPFDHLAVIDYGDCPFDSGTPQSVPDSIEAHAEHILQAGCAMLTLGGDHFISYPLLKAHARRHGPLALIHFDAHSDTWPDEAGKRIDHGTMFWHAAREGLVDPAHSVQIGLRTTNDDSQGFAILDARQVHRQGTEAVIAAIRQRVGERPVYLTFDIDCLDPAYAPGTGTPVCGGLSTVQALEILGGLRGINLVGMDLVEVAPAYDHADITALAGATLAMEMLCLYAARHKVDNGQ

SEQ ID NO: 20680 - protein, 494 aa, Medicago truncatula
MAASPAYQAHLPTSPEWLNKGDNAWQMTAATLVGLQSMPGLVILYASIVKKKWAVNSAFMALYAFAAVLICWVLVAYRMAFGDELLPFWGKGAPALGQKFLVARAKVPASTHYYKNGVDIETPMEEPFFPMASLVYFQFTFAAITMILLAGSVLGRMNIKAWMAFVPLWLIFSYTVGAFSLWGGGFLYHWGVIDYSGGYVIHLSSGIAGFTAAYWVGPRIKSDRERFPPNNVLLMLAGAGLLWMGWSGFNGGAPYAANVASSIAVLNTNICAATSLLVWTSLDVVFFGKPSVIGAVQGMMTGLVCITPGAGLVQSWAAIVMGILSGSIPWVSMMILHKKSSLLQKVDDTLGVFHTHAVAGLLGGLLTGLFAEPALCRLLLPVTNSRGAFYGGSGGMQLLKQLVAAMFVIGWNIVSTTIILLVIQLFIPLRMPDEQLEIGDDAAHGEEAYALWGDGEKYDPTRHGSLNTGNTGVSPYVNGARRCDYKFMSHNLQV

SEQ ID NO: 20681 - protein, 1160 aa, Saccharum hybrid cultivar
GLFHGKPFVGASIGYFSFIFLLTGRALTVLLSPPIVVYSPRVLPVYVYDAHADSAKNVSYAFLILYGIALATEVWGVIASLIMNPPFVGAGVSATTLVIAFSFAVSRPCLTLKMMEDAVHFLSKDTVVQAMSRSANKTRNAISGTYSAPQRSASSAALLVGDPALTLDRAGNFVLPRADVMKLRDRLRNEEIAAGSFLCGVKDCLVICPQSLSNVDYRRNMCAHARILALEEAIDTEWVYMWDKFGGYLLLLLGLTAKAEQIQDEVRLRLFLDSIGLSDLSAKEIKKWMPEDRRQFELIQESYIRKEMEEEALMQRREEEGKGRERRRALLEREERKWKELEISLLSSIPNTGSRDAAAMAAAVRAVGGDSALEDSFARDRVSSIANHIRKAQLTRRAEQTGIPGTVCILDDEPRSTGRHCGELDLCLCQSQKVTLSIAVMVQPVSGPVCLFGSEFQKKVCWEILVAGSEQGMEAGQVGLRLVTKGERMTTVAKEWKNGASSIADGRWHLVTVTLDADLSEATSFIDGSYDGYQNGLPLPTDNGIWEPGTDIWVGARPPTDLDAFGRSDSEGSDSKMQIMDAFLWGRCLSEDEVTVLHTAMSPAEYGFFDLAPGDAWHGSYSARVDDWESEDAYEVYDQGDVEWDGQYSSGRKRPVHDAVAIDIDSFARRPRKPRFETRDEVNQRMLSVERAVRDALVAKGERNFTDQEFPPEDRSLFVDPMNPPLKLQVVSEWMRPSDIAKEISISSQPCLFSGSVNSSDVCQGRLGDCWFLSAVAVLTEMSRISEVIITPEYNDEGIYTVRFCIQGEWVAVLVDDWIPCESPGKPAFATSRKQNELWVSILEKAYAKLHGSYEALEGGLVQDALVDLTGGAGEEIDMRSPQAQLDLASGRLWSQLLHFKQEGFLLGAGSPSGSDAHISSSGIVQGHAYSILQVREVDGHKLIQIRNPWANEVEWNGPWADSSPEWDRRMKHKLMHVPQAKKGVFWMSWQDFEIHFRSIYVCRVYPPEMRYSVHGQWRGYNAGGCQDYDSWHQNPQYRLRVTGRDALYPVHVFITLTQGVGFSRKTNGFRNYQCSHDSSMFYIGMRILKTQGCRAAYNIYMHESAGGTDYVNSREISCELVLDPYPKGYTIVPTTIHPGEEAPFVLSVFSKASIKLEAV

SEQ ID NO: 20682 - protein, 449 aa, Vibrio vulnificus YJ016
MSALNVAKFGGTSVANFEAMSRCSAIIENNPETRLVVSSACSGVTNLLVELANGVQSQERRAELLAQLAEIHDAILNQLEDATEAAAEVYAILDTITSLAEAASIQASNKLTDHLVACGELMSTHILAQLMRERGVNAVRFDIREVLRTDDNFGRAEPDVAKIAELAQEKLLPLCRDYVVVTQGFIGSDEEGNTTTLGRGGSDYSAALIAEGVKASGLEIWTDVPGIYTTDPRIAAKAAPIPEISFAEASEMANFGAKILHPSTLVPALRHDIPVFVGSSKEPEKGGTWIRHEAQSSPLFRALALRCNQTMVTLRSAKMFHAYGFLAKVFEILAKHKISVDLITTSEISVSLTLDKTDTSGGAPEVPQAAREELEELCTVEVEHNLCLVALIGNHMETKGYAKEVFSTLGDFNLRMICYGASDHNLCFLVDAHDSKSVIQKLHQDLFER

SEQ ID NO: 20683 - protein, 399 aa, Bordetella pertussis
MAQIVLFENIHPSARAVFSAAGYTDIVAHAAALPSGELREALRGAEVVGIRSRTHLDADLLAANPDLRVVGCFCIGTNQVDLDAAMMRGVPVFNAPFSNTRSVAELVLGETILLLRRIPEKNARVHLGHWDKSAAGAYEARGKTLGIVGYGNIGSQISTLAEAIGMRVVFFDVEAKLPLGNARAAGSLAELLEQADVVTLHVPGGKSTQNIVNADTLARMKRGAILINASRGTVVDIQALHDALASGHLAGAALDVFPTEPKSADEPLASPLIGMPNVVLTPHIGGSTQESQENIGREVAEKLVRFLQAGTTKSAVNFPELSYQAPVGGSRIIHVHRNAPGALGALDNLMAQHGLNIVSQSLQTKGQIGYAVTDVDGEVSDTVLADLRSHPVTVRCEKL

SEQ ID NO: 20684 - protein, 406 aa, Bordetella pertussis
MRVIIAGCGIGGAALAVALEKFKIDHVVLEQAPRLEEVGAGVQLSPNGVAVLQHLGVHEALSKVAFEPRELLYRDWQSGQVLMRNPLMPTIKEHFGAPYYHAHRADLLGVLTERLDPAKLRLGSRIVDIDQDARQVTATLADGTRVQGDILVGADGIHSLVRGRFFQADQPQASGCIAWRGIVDADAARHLDISPSAHLWLGPERSAVIYYVSGGRKINWICIGSRPGDRKESWSATTTVDEVLREYAGWNELVTGLIRLTDKPFVTALYDRAPLDSWINGRIALLGDSAHAMLPYHAQGAVQSMEDAWVLARTLQQSGGDIPPALERYQSLRKDRTARVQAQSQLAEKRFHMSDPEQVARRNQKFLHYDAQYQGTFLPQQEWLFGYDADKAALGTDDAWRALRAW

SEQ ID NO: 20685 - protein, 451 aa, Vibrio cholerae O1 biovar eltor str. N16961
MSTFNVAKFGGTSVANFEAMSRCSAIIENNPQTRLVVSSACSGVTNLLVELANGVASTERRQAILQQLADIHYVIIDQLADPTRVEKEVKAVLDSVASAAEAASFQSSKKLTDHLVACGELISTYILTQLMRERGVDAVRFDIREVLRTDDHYGRAEPQLKEIAQLAKEKLVPLCEQYVVVTQGFIGSDAQGNTTTLGRGGSDYSAALIAEAVQASGLEIWTDVPGIYSTDPRIAPKAAPIPEISFSEASEMANFGAKILHPSTLLPAVRHGIPVFVGSSKEPEKGGTWIRKQVESAPLYRALALRCNQTMVTLRSAQMFHAYGFLAKVFEILAKHKISVDLITTSEISVSLTLDKTDTSGGAPELPEAVRAELEELCTVEVEYNLCLIALIGNKMKESRGYAKQVFSVLEDYNLRMICYGASAHNLCFLLHESVSKQAVQKLHKELFEQE

SEQ ID NO: 20686 - protein, 200 aa, Bradyrhizobium japonicum
YTPTPNLRGKTQIKEFASFPTLEQLPLWGFDGSSTQQAEGHSSDCVLKPVAVFPDAARTNGVLVMCEVMMPDGKTPHASNKRATILDDAGAWFGFEQEYFFYKDGRPLGFPSSGYPAPQGPYYTGVGFSNVGDVARKIVEEHLDLCLAAGINHEGINAEVAKGQWEFQIFGKGSKKAADEMWMARYLMLRLTEKYGIDIE

SEQ ID NO: 20687 - protein, 200 aa, Bradyrhizobium elkanii
YTPTPSLRGKTQIKEFASFPTLEQLPLWGFDGSSTQQAEGHSSDCVLKPVACYPDAARENGVLVMCEVMMPDGKTPHPSNKRATILDDDGAWFGFEQEYFFYKDGRPLGFPEEGYPAPQGPYYTGVGYKNVGSVARKIVEEHLNLCLAAGINHEGINAEVAKGQWEFQIFGKGSKTAADQMWMARYLMLRLTESYGIDIE

SEQ ID NO: 20688 - protein, 200 aa, Bradyrhizobium canariense
YTPTPNLRGKTQIKEFASFPTLEQLPLWGFDGSSTQQAEGHSSDCVLKPVAVFPDGARTNGVLVMCEVMMPDGKTPHPTNKRATILDDSGAWFGFEQEYFFYKDGRPLGFPASGYPAPQGPYYTGVGFSNVGDVARKIVEEHLDLCLAAGINHEGINAEVAKGQWEFQIFGKGSKKAADEMWMARYLMLRLTEKYGIDIE

SEQ ID NO: 20689 - protein, 200 aa, Bradyrhizobium japonicum
YTPTPNLRGKTQIKEFASFPTLEQLPLWGFDGSSTQQAEGHSSDCVLKPVAVFPDAARTNGVLVMCEVMMPDGKTPHASNKRATILDDAGAWFGFEQEYFFYKDGRPLGFPASGYPAPQGPYYTGVGFSNVGDVARKIVEEHLDLCLAAGINHEGINAEVAKGQWEFQIFGKGSKKAADEMWMARYLMLRLTEKYGIDIE

SEQ ID NO: 20690 - protein, 200 aa, Bradyrhizobium liaoningense
YTPTPNLRGKTQIKEFASFPTLEQLPLWGFDGSSTQQAEGHSSDCVLKPVAVFPDGARTNGVLVMCEVMMPDGKTPHPSNKRATILDDAGAWFGFEQEYFFYKDGRPLGFPEYGYPAPQGPYYTGVGYKFVGDVARKIVEEHLDLCLAAGINHEGINAEVAKGQWEFQIFGKGSKKAADEMWMARYLMLRLTEKYGIDIE

SEQ ID NO: 20691 - protein, 200 aa, Bradyrhizobium yuanmingense
YTPTPNLRGKTQIKEFASFPTLEQLPLWGFDGSSTQQAEGHSSDCVLKPVAVFPDGARTNGVLVMCEVMMPDGKTPHASNKRATILDDAGAWFGFEQEYFFYKDGRPLGFPTSGYPAPQGPYYTGVGFSNVGDVARKIVEEHLDLCLAAGINHEGINAEVAKGQWEFQIFGKGSKTAADQMWMARYLMLRLTEKYGIDIE

SEQ ID NO: 20692 - protein, 526 aa, Brassica napus
MEVLLKLPTSDSLLKDKVLGSAQILEASRGDDDHQELESAKAEMSEVKEENEKLKGMLERIESDYKSLKLRFFDIVQQEPSNNLTRDQNVNGLQKATTDLSSFDQEHELVSLSLGRRSSSPSDNTSKKEDKEVNADEELTKAGLALGFSNGSLSSQENSSGETWPSGKVTGKRSSPAPASGGDVEGEAGQQNNVKRARVCVRARCDTPTMNDGCQWRKYGQKIAKGNPCPRAYYRCTVAPGCPVRKQVQRCADDMSILITTYEGTHSHPLPLSATTMASTTSAAASMLLSGSSSSSSSAAEMIGNNLYDNSRFINNKSFYSPTLHSPLHPTVTLDLTTPQHSSSSSLPSLNFNKYSNSFQNFPSTSLNFSSNPSLSSSTTLSIPTVWGSGYSSYNPYPYNNVQFGTSNQGKTVQNSMSLTETLTKALTSDPSFQTVIAAAISSMVGSNGEKQIVNPISNNVQQTATTNNIKGCGSYFSSLLMSNIVANNQTGASLDQPPSQPPLSMFKNSSSSSSTTSFVNKEEKS

SEQ ID NO: 20693 - protein, 494 aa, Arabidopsis thaliana
MGRLVEAIIASILLSLCFTITKSAPKSALITNLPGFNGTFPSKHYAGYVAIDKHRNKNLWYYFVESERNASVDPVVLWLNGGPGCSSMDGFVYEHGPFNFEPKKKNSHLLHLNPYSWSKVSNIIYLDSPVGVGFSYSNDNADYTTDDTKTASDTHTFLLEWFKMFPEFQSNPFFISGESYAGIYVPTLAAEVVKGHKNVTKPVINFKGYLVGNGVTDEVFDGNALVPFTHGMGLISDELYEETKLVCNGTYYTGGQSGVSKECAGKLKTVSDTVNLLNLYNILEPCYHGTSLSALDIEFLPKSLLTLGKTEKPMAVRKRMFGRAWPLGAVVRPGIVPSWSQLLAGFGVPCIDDTVATKWLNDPAVRKAVHAKEEKAIGNWELCSSNLEYRHDTGSMIEYHRNLTLSGFRALIFSGDHDMCVPYTGSEAWTKAMGYKVVDEWRPWMSNNQVAGFTQGYANNLTFLTIKGAGHTVPEYKPRESLDFYSRFLAGEKI

SEQ ID NO: 20694 - protein, 178 aa, Pseudomonas fluorescens SBW25
MLKLLILDRDGVINYDSDAYIKSVAEWIPLPGSIEAIAQLSKAGWTVAIATNQSGIARGYYDIATLDAMHARLRTLVAEQGGEVGLVVYCPHGPDEGCDCRKPKPGMLKTIAEHYKVPLAGIWFVGDSLGDLEAAKAVDSQPVLVKTGKGEKTQAKNLPVGTLIFDDLAAVAAELINN

SEQ ID NO: 20695 - protein, 522 aa, Pseudomonas fluorescens SBW25
MPRPNRHTLFPFLSWLPRQTRASVGRDAIVGLSGAVLALPQSIAYALIAGLPPEYGLYAAIIPVLIACLWGSSWHLICGPTAAISIVLYASVSPLAVPGSQDYITLMLLLTFLAGVFQWLLGMLRFGALVNFVSHSVVLGFTLGAAVVIALGQLPNLLGLDLPSQATAINSLLALIHHSGEWDHASLALGLGTLLVGALLKYLVPRWPTLLIALALGSLVAWLWPAMFGHVALVSSFIGKLPPFSPLPMDLDMILRLLPSAVAVGMLGLVTSLSIARSLSARSQQLLDANQEVRAQGLSNIVGGFFSGYLSAGSFTRSGLSYEAGACSPLAGVFSALWVALFALFGAALIAHIPIPSMAASILLICWGLVDHRGIRALFRVSRAEFVVMGLTCVATLLLELQTAIYAGVLASLFFYLKRTSQPRVQQWRDGDEDVLRVGGSIFFGASHYLQVRLQRLQGERVVIEAQQINFIDYSGVEMLHQEARRLKGLGRSLTLRRARPQVVEELRKLEGADQCPIHFQD

SEQ ID NO: 20696 - protein, 373 aa, Pseudomonas fluorescens SBW25
MHIGVPLETQTGETRVAATPETIKKLIGQGHKVTVQSGAGLKASVVDNAYEAAGATIGSANDAFGAELILKVVAPSDSELALIKSGTVLVGMLNPFSNETIAKLAERGITAFALEAAPRTSRAQSLDVLSSQANIAGYKAVLLAAHHYPRFMPMLMTAAGTVKAARVLILGAGVAGLQAIATAKRLGAVIEASDVRPAVKEQIESLGAKFVDVPYETDEERECAVGVGGYARPMPTSWMQRQALAVHERAKQADIVITTALIPGRKAPTLLSAETVAQMKPGSVVIDLAAAQGGNCPLTVADQVVVENGVIICGPTNLAGAVAADASALYARNLLDFLKLVFTKEGQFEINLEDDIVAACLMCRDGQVIRKNA

SEQ ID NO: 20697 - protein, 284 aa, Pseudomonas fluorescens SBW25
MKKLLLPLLAVALLAGCDKKAEEPTKPTAAAVSYIDKIKARDKLIVGVFTDKPPFGFVNEAGRYVGFDTDIGRRFAKDLLGDENKVEFVAVEPASRIPFLQSDKVDLILANMTVTPERKEAVDFTNPNLKVAVQALVPQDSSVKSLDDLATRTTIVTTGTTADIWLTKHHPDWKLLKFEKNSESLQALSAGRGDAYAQDNLVLFSWAKQNPGYRVLEEKLGDEAPIAPAVKKGNVELRDWVNAELAKLGEEKFLLKLYDQYVRKELSDDTQPESVIVEGGKWQG

SEQ ID NO: 20698 - protein, 264 aa, Pseudomonas fluorescens SBW25
MTISVFRRTLLVGTLGLALGAGLLGQAVAGEQLGNIKKAGEIKIGLEGTYPPFSFVDESGKLSGFEVELSEALAKELGVKVKLQATPWDGILAALESKRLDAVVNQVTISEERKKKYDFSKPYTVSGIQALVLKKNVDTIKTADDLAGKKVGVGLGTNYEQWLKDNQPKAIIKTYNDDPTKFQDLRIGRIDAILIDRLAALEYAKKAPDTAAAGDAFSRQEAGIALRKGEPELLAAVNQALDKLRADGTLKKLSEKYFNADVTQ

SEQ ID NO: 20699 - protein, 666 aa, Pseudomonas fluorescens SBW25
MSASSTPASGMVRMNAPVFYFAATFILLFGITVIAIPQQAGAWLLAAQNWAANTVGWYYMLAMTLYLVFVVVTALSGYGKIKLGADHDEPEFSYLSWAGMLFAAGISITLFFFCVSEPLTHLVQPPQGAPLNADAARQAMQVLFLHWGLHGWGVFAFVGMALAYFAYRHNLPLALRSALYPLIGKRINGPIGYAVDGFGIIATVFGLGADMGFGVLHLNSGLDYLFGIAHTQWIQVGLITLMMGAAILVAVAGVDKGVRVMSDINMLLACALLLFVLFAGPTQHLLNTLIQNIGDYLGALPTKSFDVYAYDKPSDWLGGWTVFYWAWWIAWSPFVGLFIARISRGRTIREFVFGVLLIPLGFTLAWMSIFGNSAIDQVLNHGMAALGQSAIDDPSMSLYLLLETYPWSKTVIAVTVFISFVFFVTSADSGTVVLSTLSSKGGNADEDGPKWLRVFWGAMTALVTSALLFAGSIDSLKSAVVLTSLPFSMILLLMMWGLHKAFHLESQKQIAQLHSLAPISAARKGRGGWRQRLSQAVHFPSRDEVYRFLEATVRPAIEEVTAVFVEKGLNVVTQPDPANDSVSLEIGHGEEHPFVYQVQMRGYFTPSFARGGMGSKELNNRRYYRAEVHLSEGSQDYDLVGYTKEQIINDILDQYERHLQFLHLVR

SEQ ID NO: 20700 - protein, 469 aa, Pseudomonas fluorescens SBW25
MQQQEKGLKRGLSARHIRFMALGSAIGTGLFYGSASAIQMAGPAVLLAYLIGGAAVFMVMRALGEMAVHNPVAGSFGQYASTYLGPMAGFILGWTYAFEMIIVCLADVTAFGIYMGFWFPDVARWVWVLGIVFLIGGLNLCNVKVFGEMEFWLSLLKVGAIVAMILGGFGIMLFGIHSAGDTQASGLSNLWAHGGFMPNGIGGLIASFAVVMFAFGGIEIIGITAGEAKDPQRVIPKAINAVPLRILLFYVLTLFVLMAIYPWPQIGSQGSPFVQIFSNLGIGSAATILNIVVISAAVSAINSDIFGAGRMMYGLAQQGQAPKGFAQLSKHGVPWMTVVVMGAALLGGVVLNYLIPENVFLLIASIATFATVWVWLMILFTQVAMRRSMTQEQVAELKFPVPFWPYAPAAAIVFMLFVFGVLGYFPDTQAALLVGAVWIVLLVVAYLLWVKPAAGQAAKVHYDPALSHR

SEQ ID NO: 20701 - protein, 1481 aa, Pseudomonas fluorescens SBW25
MKAGLYQPDEFKDNCGFGLIAHMQGEPSHTLLQTAIEALTCMTHRGGINADGKTGDGCGLLIQKPDLFLRAVAKEHFAADLPKQYAVGMVFFNQDPVKAEAARENMNREILAAGLQLVGWRKVPIDTSVLGRLALERLPQIEQVFIAGDGLSDQDMAIKLFTSRRRSSVSNAADTEHYICSFSHKTIIYKGLMMPADLTAFYPDLSDERLQTAICVFHQRFSTNTLPKWPLAQPFRFLAHNGEINTITGNRNWAVARRTKFANDLMDLEELGPLVNRVGSDSSSMDNMLELMVTGGIDLFRGVRMIIPPAWQNVETMDPDLRAFYEYNSMHMEPWDGPAGVVMTDGRYAVCLLDRNGLRPARWVTTTNGFITLASEIGVWNYQPEDVIAKGRVGPGQILAVDTETGQILDTDAIDNRLKSRHPYKQWLRKNALRIQATMEDNDHGSAFYDVDQLKQYMKMYQVTFEERDQVLRPLGEQGYEAVGSMGDDTPMAVLSQRVRTPYDYFRQQFAQVTNPPIDPLREAIVMSLEVCLGAERNIFQESPEHASRVILSSPVISPAKWRSLMTLERPGFDRQIIDLNYDESLGLEAAVRNVADQAEEAVRAGRTQIVLTDRHIAPGKLPIHASLATGAVHHRLTEKGLRCDSNILVETATARDPHHFAVLIGFGASAVYPFLAYEVLGDLIRTGEVLGDLYEVFKNYRKGITKGLLKILSKMGISTVTSYRGAQLFEAIGLSEEVCDLSFRGVPSRIKGARFVDIEAEQKALAAEAWSARKPIQQGGLLKFVHGGEYHAYNPDVVSTLQAAVQQGDYAKFKEYTALVDNRPVSMIRDLFKVKTLDTPLAISEIEPLESILKRFDSAGISLGALSPEAHEALAEAMNRLGARSNSGEGGEDPARYGTIKSSKIKQVATGRFGVTPEYLVNAEVLQIKVAQGAKPGEGGQLPGGKVNGLIAKLRYAVPGVTLISPPPHHDIYSIEDLSQLIFDLKQVNPQALVSVKLVAEAGVGTIAAGVAKAYADLITISGYDGGTGASPLTSIKYAGAPWELGLAETHQTLRGNDLRGKVRVQTDGGLKTGLDVIKAAILGAESFGFGTAPMIALGCKYLRICHLNNCATGVATQNEKLRKDHYIGTVDMVVNFFTYVAEETREWLAKLGVRSLEELIGRTDLLDILEGQTAKQHHLDLTPLLGSDHIPADKPQFCQVDRNPPFDKGLLAEKMVDMAGSSINDASGGEFALDICNCDRSIGARISGEIARKHGNQGMAKAPITFRFKGTAGQSFGVWNAGGLHMYLEGDANDYVGKGMTGGKLVIVPPKGSVYKTQDSAIIGNTCLYGATGGKLFAAGTAGERFAVRNSGAHTVVEGTGDHCCEYMTGGFVAVLGKTGYNFGSGMTGGFAYVLDQDNTFVDKVNHELVEIQRISGEAMESYRNHLQHVLDEYVEETGSEWGRNLAENLDDYLRRFWLVKPKAANLKSLLSSIRANPQ

SEQ ID NO: 20702 - protein, 494 aa, Pseudomonas fluorescens SBW25
MSVSNPTLITFVIYIAAMVLIGFMAYRSTNNLSDYILGGRSLGSVVTALSAGASDMSGWLLMGLPGAIYMSGLSESWIAIGLIVGAYLNWLFVAGRLRVQTEHNGDALTLPDYFSSRFEDKSGLLRIISAVVILVFFTIYCASGIVAGARLFESTFGMSYETALWAGAAATIAYTFVGGFLAVSWTDTVQATLMIFALILTPIIVLLATGGVDTTFLAIEAKNPDNFNMLKNTTFIGIISLMGWGLGYFGQPHILARFMAADSVKSIANARRISMTWMILCLGGTVAVGFFGIAYFSAHPEVAGPVTENHERVFIELAKLLFNPWIAGVLLSAILAAVMSTLSCQLLVCSSALTEDFYKTFLRKNASQVELVWVGRLMVLLVALIAIAMAANPNNRVLGLVSYAWAGFGAAFGPVVLISVIWKHMTRNGALAGILVGAITVIVWKHFELLGLYEIIPGFIFASLAIYFVSKMGAPTAGMVERFDAAEKDYNLNK

SEQ ID NO: 20703 - protein, 601 aa, Pseudomonas fluorescens SBW25
MTDSSPSASPSSLKIYFRLLSYVKPYAGLFALSIVGFLIFASTQPMLGYILKYFVDGLSNPEAVLFPSVPFLRDLQLLQAVPLLIILIAAWQGLGSFLGNYLLAKVSLGLVHDLRVQLFNNLLTLPNRYFDNHNSGHLISRITFNVTMVTGAATDAIKVVIREGMTVIFLFASLLYMNWRLTLVMIAILPLIAVMVSTASKKFRKQSKKIQVAMGDVTHVASETIQGYRVVRSFGGEVYEEKRFLKASQSNTDKQLRMTRTGAIYTPALQLVIYTAMAVLMFLVLYLRGDASAGDMVAYITLAGLLPKPIRQLSEVSSTIQKGVAGAESIFEQLDEDVEIDNGTVERDKVSGRLDVRNLNFTYPGTERHVLKDISFTAEPGQMIALVGRSGSGKSTLASLIPRFYHHASGEILLDGVEIEDYKLLNLRKHIAQVTQHVTLFSDTVTNNIAYGDLAGAPRADVEAAAADANAKDFIDQLPKGFDTQVGENGVLLSGGQRQRLAIARALLKNAPLLILDEATSALDTESERHIQAALDKVMQGRTTLVIAHRLSTIEKADLILVMDDGRIVERGTHSELLAQNGYYARLHAMGLDAPVSADIT

SEQ ID NO: 20704 - protein, 425 aa, Pseudomonas fluorescens SBW25
MSAAKPIDIKKSVVDTVLAGLISLIVFGPIVGVVLDGYSFNLEPARVGLLVAIVMVGRFAMSLFLQTPKGLKILQGFETSGSGVHVLAPDYKSRLRWIIPALIVIAIVFPIFANKYLLTVVILGLIYVLLGLGLNIVVGLAGLLDLGYVAFYAIGAYGLALGYQYLGLGFWTVLPLAAIAAALAGCILGFPVLRMHGDYLAIVTLGFGEIIRLVLNNWLSFTGGPNGMPVPSPTFLGLEFGKRAKDGGIPFHEFFGIDYNPNIKFLFIYIVLFLVVLAVLYIKHRLTRMPVGRAWEALREDEIACRSMGLNHVLVKLSAFTIGASTAGLAGVFFASYQGFVNPSSFTFFESALILAIVVLGGMGSTVGVVIAAFVLTVAPELLRSFSEYRVLLFGVLMVVMMIWRPRGLIRISRTGVTPRKGVAP

SEQ ID NO: 20705 - protein, 448 aa, Pseudomonas fluorescens SBW25
MPPDKAGIIPRLYLQTGSPVNPTPAVNTLRPSACPGLLRIVQALDGGICRIKLAGGSITAAQARAVAGAAQAYAGGVIEATNRANLQIRGIGAEEDALIARLLAADLGPRNAAGDDVRNLMLSPSAGIDPQMLFDTRPLADEILATLQTHPRFHQLSAKFAVQLDGGEALAMLEHHHDLWLSAFVRNGETLLAFGLAGCPGLDAPLAAVPLEQGHALVVAVLEAFLDLATPEHTRMRHLPVDNLLSRLHLKLLPVDGFNRPPSGALLHLGTYPQAQKNQSYVAAIAPLGRLDSAMLTGVAQLASEYGDGTLRFTPWQGVLLPNVEKPHAVTERLAQLGFLCSADQPLARMTACTGSSGCGKGLADTKADAQQLAALDPGVDVHVSGCPRSCAAAHVAPVTLLAVSPGHYDLYFRDAAHPGFGRLHARTLSIEATGALLRARPRSNTDD

SEQ ID NO: 20706 - protein, 313 aa, Pseudomonas fluorescens SBW25
MSKMMVFTGNANPDLARRVVRQLHIPLGDISVGKFSDGEITAEINENVRGKDVFIIQPTCAPTNDNLMELVVMADAFRRSSATRITAVIPYFGYARQDRRPRSARVAISAKVVADMLTVVGIDRVLTVDLHADQIQGFFDIPVDNIYGSPVLVDDIEDQRFENLMIVSPDIGGVVRARAVAKSLGVDLGIIDKRREKANHSEVMHIIGDVEGRTCILVDDMVDTAGTLCHAAKALKEHGAAKVFAYCTHPVLSGRAIENIENSMLDELVVTNTIPLSAAAQACSRIRQLDIAPVVAEAVRRISNEESISAMFR

SEQ ID NO: 20707 - protein, 699 aa, Pseudomonas fluorescens SBW25
MQTFFIAPTDFGVGLTSISLGLVRTLERAGLKVGFFKPIAQPHPGDTGPERSTELVARTHGLKPPQPLGLAHVERMLGDGQLDELLEEIITLYQQAAVGKDVLIVEGMVPTRNASYAARVNLHLAKSLDAEVILVSAPENEVLTELSGRVELQAQLFGGPKDPKVLGVILNKVRTEESMEAFSARLKEHSPLLRSGDFRLLGCIPYQPELNAPRTRDVADLMGAQILNAGDYETRRMTKIIICARTMRNTVELLKPGVLVVTPGDRDDIILAVSLAAINGVPLAGLLLTSDTLPDPRIMDLCRGAFQAGLPVLSVSTGSYDTANQLNSLNKEIPIDDRERAEIITDFVASHLDARWLHQRCGTPREMRLSPAVFRYQLIQRAQAANKRIVLPEGSEPLTVQAAAICQARGIARCVLLAKPADVEAVARAQGIELPEGLEILDPDLIRQRYVEPMVALRKSKSLNAPMAEQQLEDTVVIATMMLALDEVDGLVSGVIHSTANTIRPALQLIKTAPGCTLVSSVFFMLFPEQVLVYGDCVMNPHPSAAELAEIALQSADSAAAFGITPRVAMISYSSGDSASGEEVEKVREATLLAHEQQSSLLIDGPLQYDAAANETVARQLAPNSLVAGKATVFVFPDLNTGNTTHKAVQRSADCVSLGPMLQGLRKPVNDLPRGAQVDDIVYTIALTAIQAANRPMDI

SEQ ID NO: 20708 - protein, 854 aa, Pseudomonas fluorescens SBW25
MRIDRLTSKLQLALSDSQSLAVGLDHPAIEPAHLMQALLEQQGGSIKPLLMQVGFDVNSLRKELSKELDQLPKIQNPTGDVNMSQDLARLLNQADRLAQQKGDQFISSELVLLAAMDENSKLGKLLLGQGVSKKALENAINNLRGGDAVNDPNHEESRQALDKYTVDLTKRAEEGKLDPVIGRDDEIRRTIQVLQRRTKNNPVLIGEPGVGKTAIAEGLAQRIINGEVPDGLKGKRLLSLDMGSLIAGAKFRGEFEERLKSLLNELSKQEGQIILFIDELHTMVGAGKGEGSMDAGNMLKPALARGELHCVGATTLNEYRQYIEKDAALERRFQKVLVEEPSEEDTIAILRGLKERYEVHHKVAITDGAIIAAAKLSHRYITDRQLPDKAIDLIDEAASRIRMEIDSKPEVLDRLDRRLIQLKVESQALKKEEDDAAKKRLEKLQEEIVRLEREYSDLEEIWTSEKAEVQGSAQIQQKIEQSRQELEAARRKGDLNRMAELQYGVIPDLERSLQMVDQHGKSENQLLRSKVTEEEIAEVVSKWTGIPVSKMLEGERDKLLKMESLLHQRVIGQEEAVVAVSNAVRRSRAGLSDPNRPSGSFMFLGPTGVGKTELCKALAEFLFDTEEAMVRIDMSEFMEKHSVARLIGAPPGYVGYEEGGYLTEAVRRKPYSVILLDEVEKAHPDVFNILLQVLEDGRLTDSHGRTVDFRNTVIVMTSNLGSAQIQELVGDREAQRAAVMDALTTHFRPEFINRVDEVVIFEPLARDQIAGITEIQLGRLRGRLTERELSLDLSQEALDKLIAVGYDPVYGARPLKRAIQRWIENPLAQLILSGSFMPGTSVTATVENDEIVFH

SEQ ID NO: 20709 - protein, 324 aa, Pseudomonas fluorescens SBW25
MSQSSDLIQSAQRTIRLELEAVEGLLAHIDADFVRACEMILASKGRVVVVGMGKSGHVGNKIAATLASTGTTAFFVHPAEASHGDMGMITKDDIILALSNSGSTNEIVTLLPLIKRLGIQMISITGNPESTLAKAAEVNLNVHVDHEACPLNLAPTSSTTAALVMGDALAVALLEARGFTAEDFAFSHPGGALGRRLLLKVENVMHSGDELPHVQRGTLLKDALMEMTRKGLGMTVILEADGRLAGVFTDGDLRRTLDRTIDIHTASIDAVMTPHGKTARPEMLAAEALKIMEDHKIGALVVVDGDDRPIGALNMHDLLRAGVM

SEQ ID NO: 20710 - protein, 324 aa, Pseudomonas fluorescens SBW25
MKKTVLAFSRVTPEMIERLQQDFEVIAPNPKLGDINAQFNEALPHAHGLIGVGRKLGREQLQGASKLEVVSSVSVGYDNYDVAYFNERGIMLTNTPDVLTESTADLAFALLMSSARRVAELDAWTKAGQWKASVGAPLFGCDVHGKTLGIVGMGNIGAAVARRGRLGFNMPILYSGNSRKPALEQELGAQLRSLDELLAEADFVCLVVPLSDKTRHLISTRELGLMKSSAILINISRGPVVDEPALIDALQSQRIRGAGLDVYEQEPLAESPLFQLSNAVTLPHIGSATHETREAMANRALDNLRSALLGQRPQDLVNPQVWKG

SEQ ID NO: 20711 - protein, 343 aa, Pseudomonas fluorescens SBW25
MKVLKSTLAIVSAAAVLGVSGFAQAGATLDAVQKKGFVQCGVSDGLPGFSVPDASGKILGIDADVCRAVAAAVFGDATKVKFSQLNAKERFTALQSGEVDILSRNTTMTSSRDAGMGLKFPGFITYYDGIGFLVNNKLGVKSAKELDGATICIQAGTTTELNVSDYFRGNNLKYTPITFDTSDESAKSLESGRCDVLTSDKSQLFAQRSKLAAPKDYVVLPETISKEPLGPVVRNGDDEWLAIVRWVGYAMLNAEEAGITSKNVEAEAKSTKNPDVARLLGADGEYGKDLKVKKDWVVQIVKQVGNYGEVFERNLGKSTPLEIDRGLNALWNNGGIQYAPPVR

SEQ ID NO: 20712 - protein, 302 aa, Pseudomonas fluorescens SBW25
MAMTDSTATRCGYVAIVGRPNVGKSTLLNHILGQKLAITSRKPQTTRHNMLGIKTEGTVQAVYVDTPGMHKGGEKALNRYMNKTASAALKDVDVVIFVVDRTKWTDEDQMVLERVQYVTGPLIVALNKTDRIEDKAELMPHLTWLQEQLPNAQIMPISAQHGHNLEALERVIAGYLPENEHFFPEDQITDRSSRFLAAELVREKIMRQMGAELPYQITVEIEEFKQQGKTLHIHALILVERDGQKKIIIGDKGERIKRIGTEARKDMELLFDSKIMLNLWVKVKGGWSDDERALRSLGYGDL

SEQ ID NO: 20713 - protein, 469 aa, Pseudomonas fluorescens SBW25
MPVGNSLPHGETAQGGPLKRELGERHIRLMALGACIGVGLFLGSAKAIEMAGPAIMLSYIIGGLAILVIMRALGEMAVHNPVAGSFSRYAQDYLGPLAGFLTGWNYWFLWLVTCVAEITAVAVYMGVWFPDTPRWIWALAALISMGTINLIAVKAFGEFEFWFALIKIVTIIAMVIGGVGIIAFGFGNDGVALGISNLWAHGGFMPNGVTGVLMSLQMVMFAYLGVEMIGLTAGEAKNPQKTIPSAIGSVFWRILLFYVGALFVILSIYPWNEIGTQGSPFVMTFERLGIKTAAGIINFVVITAALSSCNGGIFSTGRMLYSLAQNGQAPATFGTTSSNGVPRKALLLSIFALLLGVLLNYLVPEKVFVWVTSIATFGAIWTWAMILLAQLRFRRGLSPAERDGLKYRMWLYPLSSYLALAFLVLVVGLMAYFPDTRVALYVGPAFLVMLTVLFYVFKLQPTQATVPAR

SEQ ID NO: 20714 - protein, 112 aa, Pseudomonas fluorescens SBW25
MDIIETIKEQIANNTILLYMKGAPNAPQCGFSAKASQAIMACGEKFAYVDILQNPEIRANLPKYANWPTFPQLWVAGELVGGSDIIVEMAADGSLQTLVKEAAANAAAKTNA

SEQ ID NO: 20715 - protein, 405 aa, Pseudomonas fluorescens SBW25
MADVNKVVLAYSGGLDTSVILKWLQDTYNCEVVTFTADLGQGEEVEPARAKAQAMGVKEIYIDDLREEFVRDFVFPMFRANTVYEGEYLLGTSIARPLIAKRLIEIANETGADAISHGATGKGNDQVRFELGAYALKPGVKVIAPWREWDLLSREKLMDYAEKHAIPIERHGKKKSPYSMDANLLHISYEGGVLEDTWTEHEEDMWKWTVSPENAPDKPQYLELTYRNGDIVALDGVEMTPATVLATLNRIGGEHGIGRLDIVENRYVGMKSRGCYETPGGTIMLRAHRAIESITLDREVAHLKDELMPKYASLIYTGYWWSPERLMLQQMIDASQAHVNGVVRLKLYKGNVIVTGRKSDDSLFDANIATFEEDGGAYNQADAAGFIKLNALRMRIAANKGRSLF

SEQ ID NO: 20716 - protein, 69 aa, Pseudomonas fluorescens SBW25
MATRETGNVKWFNDAKGYGFIQREDGKDVFVHYRAIRGEGHRSLAEGQQVEYAVVTGEKGLQAEDVVGL

SEQ ID NO: 20717 - protein, 417 aa, Pseudomonas fluorescens SBW25
MSRYLKSAFFSALLVWAVAFPVLGLKLSIVGINLEVHGTGPVTLTIIALCSVLMFLRVLFTQQVGALFKSNRGPLVSPKVSQFLTLPRTQRYIIIGLIVAALIWPFFGSRGAVDIATLILIYVLLGLGLNIVVGLAGLLDLGYVGFYAVGAYTYALLSHYLGWSFWICLPLAGMAAATFGFLLGFPVLRLRGDYLAIVTLGFGEIIRLFLRNLTDITGGPNGISSIPKPTFFGLSFDRTAAEGMQTFHEYFGIDYNPVSKVVFLYLVALLLALAALFVINRLLRMPIGRAWEALREDEIACRALGLNPTIIKLSAFTLGAAFAGFAGSFFAARQGLVTPESFTFIESAIILAIVVLGGMGSQLGVILAAIVMILLPEMMREFSEYRMLMFGAMMVLMMIWRPQGLLPMQRPHMELRK

SEQ ID NO: 20718 - protein, 399 aa, Pseudomonas fluorescens SBW25
MRDVFICDAIRTPIGRFGGGLSSVRADDLAALPIKALIERNPSVDWNAVDEVFLGCANQAGEDNRNVARMALLLAGLPDSVPGVTLNRLCASGMDAIGTAFRAIASGEMELAIAGGVESMSRAPFVMGKADAAFSRNMKLEDTTIGWRFINPLMKEQYGVDAMPQTADNVADDYKVSRADQDAFALRSQQRTAAAQAAGFFAEEIVPVRVAHKKGETVVEHDEHPRDTTLEALAKLKPVNGPDKTVTAGNASGVNDGAAALILASAEAVKKHGLTARARVLGMASAGVAPRVMGIGPVPAVRKLVERLGLAVTDFDVIELNEAFASQGLAVLRELGIADDAPQVNPNGGAIALGHPLGMSGARLVLTALHQLEKTGGRKGLATMCVGVGQGLALAIERI

SEQ ID NO: 20719 - protein, 541 aa, Pseudomonas fluorescens SBW25
MATCGEVLVNLLEGYGVDQVFGIPGVHTVELYRGLARSSIRHVTPRHEQGAGFMADGYARTRGKPGVCFIITGPGMTNITTAMGQAYADSIPMLVISSVQSRSQLGGGRGKLHELPNQGAMMAGVAAFSHTLMSAAELPGVLARAFALFQAGRPRPVHIEIPLDVLVENADALLGSEPVSVARAGAAPSAVKQMSQLLAAAKRPLILAGGGAIDAAPALTQLAEALGAPVALTINAKGLLPARHPLLIGSTQTLVATRALVAEADVVLAIGTELAETDYDVTFAGGFEIPGALLRIDIDPDQTVRNYPPQVALVADAQIAAEALVNALSSQPLPPRNSAWGAERVARLWAELDPAWDAATRAQTLFLDTVLDTLPNAVLVGDSTQPVYSGNLTLNLDHPRRWFNSSTGYGTLGYALPAAIGAWLGRGDGQPVVCLIGDGGLQFTLPELASAVEARTPIIVLLWNNHGYEEIKKYMLNRAIEPVGVDIYTPDFIGVAKALGCAAESIQGIEQLRTALRNAADRQGPTLIEIDQGQWMREVAQ

SEQ ID NO: 20720 - protein, 596 aa, Pseudomonas fluorescens SBW25
MMPSMFSVRQRRAIRLASRFIAPYRWHALGALLALIVTAGITLSMGQGIRLLVDQGFMTQSPHLLNQSIGLFMVLVLGLAVGTFARFYLVSWIGERVVADIRRQVFNHLIYLHPGFYENNRSSEIQSRLTTDTTLLQSVIGSSLSLFLRNALMVIGGIVLLFVTNPKLTSIVVVALPLVLAPILIFGRRVRSLSRQSQDRIADVGSYVSETLGQIKTVQAYNHQVQDEQRFAVTVEDAFTTARKRITQRAWLITLVIMLVLGAVGVMLWVGGMDVISGRISGGELAAFVFYSLIVGSAVGTLSEVLGELQRAAGAAERIGELLQSSNDIQAPADGTVQLPERVSGRMELQDLRFSYPSRPDSYAIDGLNLTINPGETLALVGPSGAGKSTIFDLLLRFYDPQQGRILLEGHPLTELDPMDLRRHFALVSQSPALFFGSVEENIRYGNPTATTEQVEAAARIAHAHDFILQMPDGYQTHLGDGGMGLSGGQRQRLAIARALLVDAPILLLDEATSALDAQSEHLIQQALPQLMQGRTTLVIAHRLATVKNADRIAVMDQGKLVAVGTHQQLIASNPLYARLAALQFSDGAEGAESED

SEQ ID NO: 20721 - protein, 391 aa, Pseudomonas fluorescens SBW25
MSLNPRDVVIVDFGRTPMGRSKGGMHRNTRAEDMSAHLISKLLERNVKVDPNEVEDVIWGCVNQTLEQGWNIARMASLMTQIPHTAAGQTVSRLCGSSMSALHTAAQAIMTGNGDVFVVGGVEHMGHVSMMHGVDPNPHMSLYAAKASGMMGLTAEMLGKMHGITREAQDAFGLRSHQLAHKATVEGKFKDEIIPMNGYDENGFLKLFDYDETIRPDTTLESLAALKPAFNPKGGTVTAGTSSQITDGASCMIVMSAQRAQDLGIQPLAVIRSMAVAGVDPAIMGYGPVPATQKALKRAGLTISDIDFFELNEAFAAQALPVLKDLKVLDKMNEKVNLHGGAIALGHPFGCSGARISGTLLNVMKQNGGNLGVATMCIGLGQGISTVFERI

SEQ ID NO: 20722 - protein, 557 aa, Pseudomonas fluorescens SBW25
MTQETGGFAAFNLNPNILAAVIATGYEEPSAIQQQSIPIIMAGQDMIGQAQTGTGKTAAFALPILHCIDPAKREPQALILAPTRELALQVATAFETYAKQMPGVTVVAVYGGAPMGPQLKAIRNGAQIVVATPGRLCDHLRRDEKVLSTVNHLVLDEADEMLKLGFMDDLEVIFKALPPTRQTVLFSATLPQSIRAIAERHLRDPQHVKIQTKTQTVTAIEQAHLLVHADQKTSAVLSLLEVEDFDALIMFVRTKQATLDLASALEAKGYKAAALNGDIAQNQRERVIDSLKDGRLDIVVATDVAARGLDVPRITHVFNVDMPYDPESYVHRIGRTGRAGREGRALLLVTPRERRMLQVIERVTGQKVAEVRLPDAQAVLDARIKKLTNSLAPLVADAESTHGDLLDRLTADIGCTPRALAAALLRKATNGQALTLAAIEKERPLVPNNAPRGDRPERTGDRPDRGDRERRAPVPLAEGRARCRTALGARDGIAAKNLLGAILNEGGLAREAIGRIQVRDSFSLVELPEDGLEKLLTKLKDTRVAGKQLKLRRYRED

SEQ ID NO: 20723 - protein, 403 aa, Pseudomonas fluorescens SBW25
MQVSKSNKLANVCYDIRGPVLKHAKRLEEEGHRILKLNIGNPAPFGFEAPDEILQDVIRNLPTAQGYSDSKGLFSARKAVMQYYQQKQVEGVGIEDIYLGNGVSELIVMSMQALLNNGDEVLVPAPDYPLWTAAVTLAGGHPVHYLCDEGADWFPDLADIKAKITPNTKALVIINPNNPTGAVYSKEVLLGMLELARQHNLVVFSDEIYDKILYDDAVHICTGSLAPDLLCLTFNGLSKSYRVAGFRSGWIAISGPKHNAQSYIEGIDMLANMRLCANVPSQHAIQTALGGYQSINDLILPQGRLLEQRNRTWELLNAIPGVSCVKPMGALYAFPRIDPKVCPILNDEKFVLDLLLSEKLLVVQGTAFNWPWPDHFRVVTLPRVDDLDMAIGRIGNFLKSYRQ

SEQ ID NO: 20724 - protein, 402 aa, Pseudomonas fluorescens SBW25
MENLQSAVDTLVHSSNTLFILIGAVMVLAMHAGFAFLEVGTVRQKNQVNALSKILSDFAISTLAYFFIGYWISYGVSFMQPAAVISADHGYGLVKFFFLLTFAAAIPAIISGGIAERARFAPQLCATALIVAFIYPFFEGMVWNGNFGLQVWLLARFGASFHDFAGSVVVHAMGGWLALAAVLLLGPRNGRYREGRLVAFAPSSIPFLALGSWILIVGWFGFNVMSAQTLNGVSGLVAVNSLMAMVGGTVAALIIGRNDPGFLHNGPLAGLVAICAGSDLMHPVGALVTGAVAGGLFVWCFIAAQDRWKIDDVLGVWPLHGLCGVWGGIACGIFGQTALGGLGGVSLVSQLIGTALGVIVALVGGLLVYGVIKRVTGLRLSQEEEYYGADLSIHKIGAVSQD

SEQ ID NO: 20725 - protein, 296 aa, Pseudomonas fluorescens SBW25
MAKIGFIGTGIMGQPMAANLQKAGHQLFLSEHHGKAPQALLDAGAVALANPQQVAQEAEFIIVMVPDTPQVDDVLFRKDGVAAGLSPNKVVIDMSSISPTATKAFAAKINETGAQYLDAPVSGGEVGAKAGTLSIMIGGEPQTFERALPLFQAMGKNITLVGGNGDGQTAKVANQIIVALNIQAVAEALLFAAKNGADPAKVREALMGGFASSKILEVHGERMIKGTFDPGFRINLHQKDLNLALAGAKELGINLPNTAGTQQVFSTCTAIGGGNWDHSALIKGLEHMANFSIRDK

SEQ ID NO: 20726 - protein, 546 aa, Pseudomonas fluorescens SBW25
MLRCPLSNTKNSLQGEWLYMKYPLRPLVFWPTFLILLAAVIASYVDLNAFLAVSKQLNNLILKNFSWLFSAGSFAMVVLTAIVYFSALGKVRIGGEDAQPLLSKWRWFMVALCTTLAVGVLFWTTAEPLYHLYGPPTSLPIEAGSSAAKSFAMSTMFLHWTITPYAIYLVPSLVFALVFYNRRSNFSIGAMLEPLLGAARVKRYAGLIDTLAMFALVAGMASSLGTGALTLAGGMAQYIGGETTPLRLAIIITIIVITFVASAASGLQRGIVMLSSFNTWIMLALGLFVLLCGPTLYMFSLGVESLGVYLDTFFSRSLFTGAASGDTWPHSWTVFYWSVWFAWAPVSALFLGKIGRGYTVREFIHINMLYPALFTAVWICIFSGTSLYFDALGDGSLNRVLNEQGVEHVLYQMFQQLPASGLMIAFLLFVAFISFVTAADSSTDVIANLCSKGVTADSDLDGNPLLKIIWGLIIGSVSWVMVAFVGVDGVKMLSNLGGLPGMILVLLASTSLIFWLKNPALLDVKNLRPTTEPELRGASPVAAFAR

SEQ ID NO: 20727 - protein, 386 aa, Pseudomonas fluorescens SBW25
MNKRPLYFDYAATTPVDERVIQVMVECLGFNANFGNPASSSHAFGQAARQTVEQARRQVAELVGAQPEQIVWTSGATESNNLAIKGVAQARGVAGGHIITSQIEHKATLDTARQLQEAGVAVTYLVPDADGLISVEAVSEALREDTFLVSLMLVNNELGTLNDIPAIGARVREHGALLHVDAAQGAGKVAIDLAQWPVDLMSFSAHKLYGPKGIGALYVGPRAQQKVLAQIHGGGHEGGLRSGTLATHQIAGMGTAFALAAASFAEEKAVIVALRQRLLDQLESIAGVRLNGSATQRIPHTLSLTFSEGEFNAAALSAGIAFSATSACNSASNTPSHVLLALGHDARSAGRTIRLSLGRFTTEQDIDQAVQLIKATLASAPAFWAV

SEQ ID NO: 20728 - protein, 393 aa, Pseudomonas fluorescens SBW25
MQDVVIVAATRTAVGSFQGSLATIPAPELGAAVIRRLLEQTGLDPAEVDEVILGQVLTAGSGQNPARQASILAGLPHAVPSLTLNKVCGSGLKALHLGAQAIRCGDADVIIAGGMENMSLAPYVLPAARTGLRMGHAKMIDSMITDGLWDAFNDYHMGITAENLVDKYGISREAQDAFAAASQQKAVAAIEAGRFADEITPILIPQRKGDPVAFAVDEQPRAGTTAESLAKLKPAFKKDGSVTAGNASSLNDGAAAVLLMSADKAKALGLPVLARIASYANAGVDPAIMGIGPVSATRRCLDKAGWSLGDLDLIEANEAFAAQSLAVGKELEWDTDKVNVNGGAIAIGHPIGASGCRVLVTLLHEMIKRDAKKGLATLCIGGGQGVALALERS

SEQ ID NO: 20729 - protein, 403 aa, Pseudomonas fluorescens SBW25
MTLSLSKRVQRVSLSANAAAKSRATELRDAGHDILDLTTGEPDFDTPEHIKRAACAAIAGGATKYTPTPGVKALRLAVQRKLQRENRLDYSLASIVIANGAKQIIFNAFAATLDDGDEVLVPTPYWPSFPDSVRFNGGEPVFIACGLEQGCKLTATQLEQHIGERTRWLILNGPGNPSGAVYSAAELQALAEVLRRHPQVLVLLDELYEHIRFDGQPAQSLLNVAPDLHARCLLVGGVSKTYAMTGWRIGFGAGPQVLTNAMAVVQSQSTSGASSVGQAAALAAFEGGLDFLPEQVAAYQLRRDLLVRTLRDVDGLEVLEPQGGFFVFIRCAGLLGHYRPDGARLDSDADVVAYLLEQGVAGVAGSAYGLSPWFRLSIATATDSVVEAGRRIARACANLRGAA

SEQ ID NO: 20730 - protein, 325 aa, Pseudomonas fluorescens SBW25
MTRTLLLTGPELTPEAMAHAASHGVRVIPTTPYAPADELTAIIAREQPDAIIVRQGKLTRAMIDASPALKIIAKHGVGYDTIDIAAAAERRIPVTIALGANAQSVAEHALALMFSVARQTALLDARMRDGHWDKATSVGIELSGKTLGLVGLGAIGRILMDLVTPLRMTVKVFDPYLSSLPDLPNVERAEDFDALLASCDIISLHCPLTEQNRNLFGAAQFKRMRPRSILINTARGELIDTEALVQALSTGQIAGAGLDTFNPEPPPADSALWGLPTLVATPHVGANTAEARDRVGLLALQQIIDFWDGNALEPRAVVNRQLFAD

SEQ ID NO: 20731 - protein, 309 aa, Pseudomonas fluorescens SBW25
MSAALNVQVSAARMLTPVVREFTLTPATGSLPGFSPGSHVQVHLPLAEGTVRNAYSLTSDPAHPQHYRIAVRLQDASRGGSQYLHRQVQVGDTLQISPPANLFAPHGTARLHILIAAGIGITPFMAYIAAMEQQQADFELHYLFRRGLSDVYLDELQHRLGPRLHAYERRPDLNPILGNRPLGSHVYTCGPQPLLEAVEQHATRLGWPLKRVHSEAFKGAQPGQPFDLHLLRSGRRLRVEAEQSLLEALEQAGLQVPNLCRGGVCGQCITRHQGGAIEHRDSFLSPAEQADFLMPCVSRGSGPCVSLDL

SEQ ID NO: 20732 - protein, 634 aa, Pseudomonas fluorescens SBW25
MCGYIGVFAKQPRAFNPNLFDAALRAIHHRGPDSSSQWFDPKGQAAFGYVRLGLVGLGNGTQPIVADEGDLVMMVNGEFYDYQRIRTELEDYGCRFKTSSDSEIAMHLYRRHGVRGLKQLRGEFSILIFDRLRKKLFAVRDRVGVKPLYYTEHEGAWYFASEIKALLAAGVPAEWDHEAYANRGFILRDRTVFNNIRSVKPGCWIIADESGLQTEQYWDWDFPDAQATEQRSEAEMIDSLRHTIEESVRLRLHADVPVGVCLSGGLDSSAMLGIATELTGQPLQAFHLSFEGEQAYDERQYAEIAARHNRAHLNVLSVNSADMADNFENALWHAEMPFANAHSVAKYLLCKYVQNQGMRAVLTGEGADEVFGGYPHYRRDMVLYNHENQDPTAIAELARRLHASEDRYLPGGKNDVKWVQDELGHGVSWLQTQSALFGPLAQLYSDDFRERFSNTDAYREFYDRLSPRALNGWEPVNRSLYMVAKSSLPNVVLTSLGDRMEMAGSLEGRPPLLDHQVIEAACRLPVNMKVRGATEKYALREAMRPYVPQAVLDRKKQYFRAPPASESPQSKLYEMINDVLSGPALSNVPFFEPRKVRALLATLPSLSPAQRASADNLLMEIAGLCLMQKRFALN

SEQ ID NO: 20733 - protein, 282 aa, Pseudomonas fluorescens SBW25
MHHRPSVFKACVFLFAASASLASVVQAADSKLDDVLKRGHLIVGTGSTNAPWHFQGADGKLQGFDIDIGRIVAKGLFNDPSKVEFVVQSSDARIPNLLTDKVDMSCQFITVTASRAQQVAFTLPYYREGVGLLLPNNSKYKEIEDLQAAGDGVTVAVLQNVYAEELVHQALPKAKVDQYDSVDLMYQAVNSGRADAAATDQSSVKYLMVQNPGRYRSPAYAWSPQTYACAVKRGDQDWLNFVNTALHEAMTGVEFPTYKASFKQWFGVDLPEPAIGFPVEFK

SEQ ID NO: 20734 - protein, 751 aa, Pseudomonas fluorescens SBW25
MYKDLKFPVLIVHRDIKADTVAGDRVRGIARELEQEGFSIFSAVDYAEGRLVASTHHGLACMLIAAEGAGENTHLLQNMVELIRLARLRAPNLPIFALGEQVTLENAPADAMSELNQLRGILYLFEDTVPFLARQVARAARTYLDGLLPPFFKALVQHTADSNYSWHTPGHGGGVAYRKSPVGQAFHQFFGENTLRSDLSVSVPELGSLLDHTGPLAEAEARAARNFGADHTFFVINGTSTANKIVWHSMVGRDDLVLVDRNCHKSVLHSIIMTGAIPLYLCPERNELGIIGPIPLSEFSPESIRAKIDASPLTRGRAPKVKMAVVTNSTYDGLCYNAELIKQQLGNSVEVLHFDEAWYAYAAFHEFFAGRYGMGTSRTPDSPLVFTTHSTHKLLAAFSQASMIHVQDGGARQLDRDRFNEAFMMHISTSPQYSIIASLDVASAMMEGPAGRSLLQEMFDEALSFRRALANLRQHIAAEDWWFTIWQPPSVAGIDRVVTADWLLHPQADWHGFGEVAEDYVLLDPIKVTLVMPGLNAGGALSDCGIPAAVVSKFLWERGLVVEKTGLYSFLVLFSMGITKGKWSTLLTELLEFKRSYDANVSLASCLPSVFAQGPTRYQGLGLRDLCDQLHSCYRSNATAKHLKRMYTVLPEIAMKPADAYDQLVRGEVEAVSIDALPGRIAAVMLVPYPPGIPLIMPGERFTESTRSIIDYLAFARTFDSSFPGFVADVHGLQHEDDGSGRCYTVDCIKG

SEQ ID NO: 20735 - protein, 552 aa, Pseudomonas fluorescens SBW25
MYVYDEYDQRIIEDRVKQFRDQTRRYLAGELSEEEFRPLRLQNGLYVQRFAPMLRVAVPYGQLTSRQTRMMAKIARDFDKGYAHISTRQNVQFNWPALEDVPDILAELATVQMHAIQTSGNCLRNVTTDQFAGVAADELIDPRPWCEIVRQWTTFHPEFAYLPRKFKIAINGSTSDRAAIEVHDIGLEPVHNAAGELGFRVLVGGGLGRTPVVGAFINEFLPWQDLLSYLDAILRVYNRYGRRDNKYKARIKILVKALTPEVFAQKVDAEMEHLRGGQTTLTEAEVHRVAKHFVDPEYKALSNQDAELAALDKEHPGFARWRTRNTLAHKKPGYVAVTLSLKPTGVAPGDITDKQLDAVADLAERYSFGQLRTSHEQNIILADVEQSQLFTLWGELREGGFATPNIGLLTDIICCPGGDFCSLANAKSIPIAESIQRRFDDLDYLFDIGELDLNISGCMNACGHHHVGHIGILGVDKKGEEFYQVSLGGSASRDASLGKILGPSFAQEAMPEVIGKLIDVYIEQRTEDERFIDTYQRIGIDLFKERVYAANH

SEQ ID NO: 20736 - protein, 449 aa, Pseudomonas fluorescens SBW25
MDDSTFDQLEAALSAAPGNVALLTLLLGASLERGEHARGLKLLPADLEQWPEAAALKLAAAQLLLADGQAQKALPLIEGADPAARLLKARALAALERLKEAQVEYRAAVDANPALEDMALWRRLNVSVVDFPGAEGRPRLRVISNDDTDQSEVVRLLVPENETLTFDDIGGLDELKKTIHKKIILPYQKPGLFQRFRKKVGGGVLLYGPPGCGKTMLARATAGECKATFFNVAISDVLDMYIGESERKLHALFEQARAQAPAVMFFDEVEALGGKRANTRESTSSKLVSQFLSEMDGFTNDNHGVLILAATNVPWSVDSAFRRPGRFDRVLFVPPPDRPAREAMLKAMMKGRPMADDIDFAFLAKNTSGFSGADLSELVETAADEAIEASIESGAEQSICDRHFKHALKEVRATTLEWLTTARNYARYANEGNQYDEVLAFLDKHGKGR

SEQ ID NO: 20737 - protein, 325 aa, Pseudomonas fluorescens SBW25
MKKSVVLYKKLSAPLMARLHEQAEVTLIEALDDTGLAKLRDALPYAHGLLGASLRLDAQLLDLAPQLEAIASVSVGVDNYAIDYLTARGILLSNTPDVLTETTADTGFALILATARRVVELADMVRAGQWSKNIGPAHFGSDVHGKTLGIIGMGRIGEALAQRGHFGFGMPVIYHSHSPKPAVEARFGAQYRSLNDLLQQADFVCLTLPLTAQTEKLIGADEFARMGPETIFINISRGKVVDEAALVEALQQRTIRAAGLDVFEKEPLDHDSPLLRLNNVVATPHIGSATHETREAMATCAVDNLLQALAGEKPKNLVNPGAWEQ

SEQ ID NO: 20738 - protein, 397 aa, Pseudomonas fluorescens SBW25
MLSTVQAKLLIVDDLPENLLALEALIKREDRQVFKALSADEALSLLLEHEFAMAILDVQMPGMNGFELAELMRGTEKTKNIPIVFVSAAGRELNYAFKGYESGAVDFLHKPLDIHAVKSKVNVFVDLYRQSKAMKQQVEALERSRREQELLLTRLQATQAELEQAVRMRDDFMSIVAHEVRTPLNGLILETQLRKMHLARDNAAAFALDKMHAMVDRDERQIQSLIRLIEDMLDVSRIRTGKLSIRPARFDLAQLVSNLVENFAPQVAAAESSMQLIVDGPVEGNWDEFRIEQVVTNLLTNALRYGAKSPVEVRVYSEHGEARVEVRDHGIGISEDNQKRIFQQFERVSASQVAAGLGLGLFISEQIVAAHGGTIEVESQIGEGALFRVCLPLEQSA

SEQ ID NO: 20739 - protein, 394 aa, Pseudomonas fluorescens SBW25
MTDPIVIVSAVRTPMGGFQGDLKSLTAPQLGSAAIRAAVERAGIATDAVDEVLFGCVLPAGLGQAPARQAALGAGLDKATRCTTLNKMCGSGMEAAILAHDSLLAGSVDVVIAGGMESMSNAPYLLDRARNGYRMGHGKVLDHMFLDGLEDAYDKGRLMGTFAEDCALHNSFSREAQDAFAIASLTRAQEAITHGSFAAEIVPVQVTVGKEQKTIQHDEQPPKAKLDKIGSLKPAFREGGTVTAANSSSISDGAAALVLMRQSEAQQRGLKPLAVIHGHAAFADEPGLFPVAPVGAIRKLMTKTGWNLDEVDLFEINEAFAVVSLVTMSKLEIPHAKVNVHGGACALGHPIGASGARILVTLLSALRQRGLKRGVAAICIGGGEATAMAVECLY

SEQ ID NO: 20740 - protein, 454 aa, Pseudomonas fluorescens SBW25
MSTSPTPNSVLKPTLSVFDVVAITVSAVTPASSVFVIAPFAIQQAGSGVFLAFVMAGLLALMFAFCYAELGRAHNSAGGEYVYAKRVFGGMAGYATFLTVLVMLLFIPPVLATGAATYLNNALGTRFDSQTVALVIVVCSYALGILNIKLNAWITGTCLLLEIAALLVIVVIGFGNPVQPASVLFQPQIVENGVLHLAPWALVIGAVGIGLFSYNGYGPAVLLAEDMKCGGKGVHKAVLWSLGLVVIIELVPITALLIGAPSLSAMISSPDPIGYLLSSHGNETLSRLVSAGIFLSVFNAIVAIVIQIGRVVFSSGRDALWTPSINTLFTRIHPRWDSPWLATLFLAIPSALLSFSSNLADLTSFSVLLIMLVYLMVALSALMSRVLLRDREHPYRMPLWPLPAVLAVLGAGYLLVTLVAAASVRDIMIIIGLLALSVILYCISGRSSPVFQKL

SEQ ID NO: 20741 - protein, 400 aa, Pseudomonas fluorescens SBW25
MQLLGNLLKAVKPSPTLVITRKAAELRRNGADIISLSTGEPDFPTPDHINAAAKAAIDAGQTRYTDVDGTPELKAAIVRKFQRENGITYAKDEISVGTGGKQVLINALQATLNPGDEVIIPAPYWVSYPDMVRLAGGTPVEIRCAAHQHFKITAEQLQQAITPRTKWLILNSPSNPTGAGYSAAELDRLGAVLLEHPQVYVLTDDMYEHLSYDGWVFSTLASQVPALHGRVLTVNGVSKAYSMTGWRIGYAGGPKPLIAAMATIQSQTTSNPCAISQAAAVAALDGPIDFLAERNEVFRQRRDLCLDAFNTTPGLVCRRPEGAFYLFPSCSGLYGRKTPAGAVLTNDVDVCQYLLEAAQVAVVPGSAFGLEGYFRISFATSTVLLEQACARIKAACKQLA

SEQ ID NO: 20742 - protein, 316 aa, Pseudomonas fluorescens SBW25
MIDVVVVSRNTEAQDICSYELASVDGQPLPTFSAGAHIDVHLPDGVIRQYSLCNHPEERHRYLIGVLNDPASRGGSRSLHEQVHEGTHLQISEPRNLFPLAHEARRSLLFAGGIGITPILCMAERLAHAGADFELHYCARAAERAAFVQRLKDSSFAERVFLHFDEQPHTALNAAEVLAAPADDVHLYVCGPGGFMQHVLDSAREQGWQEDCLHREYFSATPMDSSLDGGFSVKLGSSGQVFEIPADKTVVQVLESHGIEIAVSCEQGICGTCLTRVLEGIPEHRDLFMTEQEQALNDQFTPCCSRSKTPLLVLDI

SEQ ID NO: 20743 - protein, 541 aa, Pseudomonas fluorescens SBW25
MSGQGKFKKQLSLMDLTFIGLGAIFGSGWLFAASHVSAIAGPAGIISWLIGGFAVLLLGIVYCELGAALPRAGGVVRYPVYSHGPLLGYLMGSITLIAFSSLVAIEVVASRQYAAAWFPELTKAGSSDPTTLGWLVQFALLCLFFILNYRSVKTFAIANNLVSVFKFIVPLLVIGMLFTFFKPANFQVQGFAPFGLSGIEMAVSAGGVIFAYLGLTPIISVASEVKNPQRTIPIALILSVLLSTAIYVLLQTAFLGGVPTEMLADGWAGISKQLALPYRDIALALGVGWLAYLVVADAVISPSGCGNIYMNATPRVVYGWAQTGTFFKIFTRIDEKSGIPRPALWLTFGLSVFWTLPFPSWEALINVVSAALILSYAVAPVTVAALRRNAPQMARPFRVKGMAVLGPLSFIIAALIVYWSGWSTVSWLLGLQILMFGVYLLCARWVPTAHLNLKQQVRSSAWLIGFYAVTLLLSKLGSFGGIGVLAHPFDTLVVAVCALGIYYWGAATGVPAHLVRLEHEADESEAVDEPLGRAPLTPATH

SEQ ID NO: 20744 - protein, 317 aa, Pseudomonas fluorescens SBW25
MSVQIAVIDDWQNVASGVVDWSVLAAVGQVHFLHDYPADTATMIERLQGFEVICVMRERSTFDKALLQGLPALKLLVTGGMRNAAIDIPAAKALGIQVCGTDSYKHAAPELTWALIMASTRDLVAEAHSLRAGHWQIGLGGDLYGKTLGILGLGSIGQKVAQFAQVFGMRVIAWSENLTPERAAESGVTWVSKQALFEQADILTVHLVLSDRTRGLVDAQALGWMKPSARLVNTARGPIVDEQALVQALESGRLAGAALDVYAQEPLPADHPFRRLPTVLATPHVGYVSEQNYRQFYAQMIEDIQAWANGAPIRTLG

SEQ ID NO: 20745 - protein, 317 aa, Pseudomonas fluorescens SBW25
MTATVLVLVETINEYLPIIESNDFHVILAPTPAERTAAIKAHGSQIKAVLTRGPLGLYAEEIAALPLLEIICVIGAGYEHVDLQAASNRGIVVTNGAGVNAPSVADHAMALLLSLVRGIPQTDAAVRRHEWPKVMRPSLGGKQLGILGLGAVGLEIAKRASLGFGMEVSYHNRQPRDDVDYTYCATAVELARTSDFLILATPGGASTRHLIDRHALDALGPNGYLVNIGRGSVVVTADLVAALEQRRIGGAALDVFDDEPKVPDALKKLGNTVLTSHVAGLSPEAAHDTVQRVADNLVEHFAGRPVLTPVALPPATK

SEQ ID NO: 20746 - protein, 329 aa, Pseudomonas fluorescens SBW25
MRVIFFSSQTYDRDSFLGEPLPPGLALQFQPARLNLDTVALAEHHEVVCAFINDDLSAPVLELLAKGGTRLIALRSAGYNHVDLTAAKRLGLTVVRVPAYSPHAVAEHAVALILALNRRLHRAYNRTRDGDFSLHGLTGFDLVGKTVGVVGTGQIGATFAKIMAGFGCQLLAYDPFPNPQVEALGARYVTLPELLAQAQIISLHCPLTADSKHVINARSLAQMQPGAMLINTGRGGLVDTPALIEALKDGQLGYLGLDVYEEEAQLFFEDRSDLPLQDDVLARLLTFPTVIITAHQAFLTREALAAIAGTTLANIVAWAEGRAQNLVEG

SEQ ID NO: 20747 - protein, 91 aa, Pseudomonas fluorescens SBW25
MSGVKISGKVKWFNNAKGYGFIIEDGKSEDLFAHFSAIIMDGYKTLKAGQAVSFEIIQGPKGLHAVNIDTVKEVIASPAARASEAEKKQTA

SEQ ID NO: 20748 - protein, 566 aa, Pseudomonas fluorescens SBW25
MSKPTVDPTSNAKAGPAVPVNFLRPIIQADLDSGKHTQIVTRFPPEPNGYLHIGHAKSICVNFGLAQEFGGVTHLRFDDTNPAKEDQEYIDAIESDIKWLGFEWSGEVRYASKYFDQLFDWAVELIKAGKAYVDDLTPEQAKEYRGTLTEPGKNSPFRDRSVEENLDLFNRMRDGEFPDGARVLRAKIDMASPNMNLRDPIMYRIRHAHHHQTGDKWCIYPNYDFTHGQSDAIEGITHSICTLEFESHRPLYEWFLDSLPVPAHPRQYEFSRLNLNYTITSKRKLKQLVDEKHVHGWDDPRMSTLSGFRRRGYTPASIRNFCDMVGTNRSDGVVDFGMLEFSIRQDLDANAPRAMCVLRPLKVVITNYPEDKVDHLELPRHPQNEALGVRKLPFAREIYIDRDDYMEEPPKGYKRLEPNGEVRLRGSYVIRADEAIKDADGNIVELRCSYDPETLGKNPEGRKVKGVIHWVPAAASVECEVRLYDRLFRSPNPEKAEDSASFLDNINPDSLQVLTGCRAEPSLGDAQPEDRFQFEREGYFCADIKDSKPGHPVFNRTVTLRDSWGQ

SEQ ID NO: 20749 - protein, 249 aa, Pseudomonas fluorescens SBW25
MSILLETKDLELAYGAFHAVNGVNLKVEAGTIHTIIGPNGAGKTSLFHCLTGERQATAGAIHFDGKNLMRKPAHGRVGLGMARSFQLTSLFQNLSVRENLRLAAQGRDGARALNFWRRVDSKREHLEMADQVLERLQLSARADTLAGELSHGQQRVLEVGMSICSKPKLLMLDEPTSGMGIDDIPIMTQLISDLGRDHTVLLIEHNMSIVMSISQRITVMSHGQILVEGTPEFVRADERVRTAYLGEAA

SEQ ID NO: 20750 - protein, 402 aa, Pseudomonas fluorescens SBW25
MTASRIAARVQRIKPSPSSAASDRANELRRQGQSIINLVVGEPDFDTPPHIRQAASAAIERGETRYTQNAGTPELRQAIVDKLARENALTYTPQQILVTSGAKSAIFNAFAATLGTGDEVLIPAPYWVSYPDMVLACEGEPVTLACPEHNGFKLTPEQLRGAITPRTRWLLLNSPSNPTGASYSRSELRALADVLLDCPHVLLMTDDIYEHIRFDGLDNPHILAIEPALSERSLVVNGVSKTYAMTGWRIGYAAGPADLIGAMATLQSQSTSNACSISQAAAVEALNGDQSFVKQSVQVYQQRRDRCLELLNAIPGLSCRKPDGAFYLYVNCGGLLGKTTPEGKVLDSDGEVVMYLLESQGVAVVAGTAYGLAPFFRMSIATAITTLDQGCARIAAAVAALR

SEQ ID NO: 20751 - protein, 70 aa, Pseudomonas fluorescens SBW25
MSNRQTGTVKWFNDEKGFGFITPQGGGDDLFVHFKAIESDGFKSLKEGQTVSFVAEKGQKGMQAAQVRGE

SEQ ID NO: 20752 - protein, 401 aa, Pseudomonas fluorescens SBW25
MKHFLSDRVLGIAPSPSIAANALVTELRAQGRDIVNFTVGEPDFDTPAHILAAAGQAMHSGDTHYTPTTGTLALRQAICLKLQRDNDLAYGLDEVVAGCGGKHIIYHALAATLNRGDEVIVHTPYWVSYPDIARLNDATPVIIPGDESLGFKLSPDALEQAITPRTKWVILNSPNNPSGAVYSEADLQALAQVLRRHPHVLIMADEIYEHFVYGEARHVPLTRLAPDLKPRTLIVNGASKGYAMTGWRLGFGAGPTWLIAAIAKLLSQTTTCPSSLSQAAAVAAFAGDQAPIAAMREEYQQRRARMLTLLAGIPGVSCTPPDGAFYVFANVSALMGKLTPQGDRLDSDTQLVDYLLRDYGLATVSGAAYGMSPYVRLSFASSLEVIEEGCRRLKDACRDLR

SEQ ID NO: 20753 - protein, 394 aa, Pseudomonas fluorescens SBW25
MREVVIVDSVRTGLAKSFRGKFNQTRPDDMAAHCVNALLARNGIDPATVEDCIVGAGSNEGAQGYNIGRNVAVLSQLGTGTAGMTLNRFCSSGLQAIAIAANQIASGCSDIIVAGGVESISLTLKSVNTDNLINPLLKEQVPGLYFPMGQTAEIVARRYNVSREEQDLYALQSQQRTAQAQADGLFNDEIVPMAVKYKVEDKNTGEVQVLDGVVDRDDCNRPDTTLASLQGLKPVFAEDGSVTAGNSSQLSDGASMTLVMSLEKALALGLKPKAFFRGFTVAGCEPDEMGIGPVFSVPKLLKAKGLQVADIDLWELNEAFASQCLYARNRLEIDNARYNVNGGSISIGHPFGMTGSRQVGHLVRELQRRNLRYGIVTMCVGGGMGATGLFEAVR

SEQ ID NO: 20754 - protein, 590 aa, Pseudomonas fluorescens SBW25
MCGLAGELRFDAQPADLAAIERITHHLAPRGPDAWGFHAQGPVALGHRRLKIMDLSDGSAQPMVDAQLGLSLAFNGAIYNFPELREELEALGYAFYSGGDTEVLLKGYHAWGEALLPKLNGMFAFAIWERDAQRLFIARDRLGVKPLYLSRTGQRMRFASALPALLKGGDINPILDPVALNHYLNFHAVVPAPRTLLAGIEKLPPASWMRIDANGKTEQKTWWTLPYGPHDDERNLSLEDWTDRVLDSTREAVAIRQRAAVDVGVLLSGGVDSSMLVGLLREVGVQDLSTFSIGFEDAGGERGDEFQYSDLIAKHYGTRHHQLRIAESEIIEQLPAAFRAMSEPMVSHDCIAFYLLSREVAKHCKVVQSGQGADELFAGYHWYPQVDGAADPYAAYRDAFFDRSYDDYAATVAPKWLTANDAAGDFVREHFAMPGADAAVDKALRLDSTVMLVDDPVKRVDNMTMAWGLEARTPFLDYRLVELSARVPGKFKLPDGGKQVLKEAARRVIPSEVIDRKKGYFPVPGLKHLQGDTLNWVRELLLDPSQDRGLFNPAMLDRLLTDPQGQLTPLRGSKLWQLAALNLWLSEQGI

SEQ ID NO: 20755 - protein, 458 aa, Pseudomonas fluorescens SBW25
MAIKVLLVEDDRALREALADTLLLAGHDYRAVGSAEDALEAVEQESFSLVVSDVNMPGMDGHQLLSLLRARQPQLPVLLMTAHGAVERAVDAMRQGAADYLVKPFEPKALIELVARHALGVIPASDGEGPIAFEPASAQLLELAARVARSDSTVLISGESGTGKEVLARYIHQQSTRAKQPFIAINCAAIPDNMLEATLFGHEKGSFTGAIAAQAGKFEQADGGTILLDEISEMPLGLQAKLLRVLQEREVERVGARKPIQLDIRVVATTNRDLAGEVAAGRFREDLFYRLSVFPLAWRPLRERPADIIPLAERLLNNHVKKMKHAQARLSAEAQACLISYPWPGNVRELDNAIQRALILQQGGLIQPQDFCLAMGSGAAPLPTLAPAPIVAETETAGALGDDLRRREFQMIIDTLRSERGRRKEAAERLGISPRTLRYKLAQMRDAGMDVEAYLFAT

SEQ ID NO: 20756 - protein, 316 aa, Pseudomonas fluorescens SBW25
MDKIFHQPLGGNEMPRFAGIATMMRLPHLQTAKGLDAAFIGVPLDIGTSLRAGTRFGPREIRAESVMIRPYNMATGAAPFDSLSVADIGDVAINTFNLLDAVRIIEEAYDEILEHNVVPMTLGGDHTITLPILRAIHKKHGKVGLVHIDAHADVNDHMFGEKIAHGTTFRRAVEEGLLDCDRVVQIGLRAQGYTAEDFNWSRKQGFRVVQAEECWHHSLAPLMAEVREKVGGGPVYLSFDIDGIDPAWAPGTGTPEIGGLTTIQAIEIIRGCQGLDLIGCDLVEVSPPYDTTGNTSLLGANLLYEMLCVLPGVAHR

SEQ ID NO: 20757 - protein, 399 aa, Pseudomonas fluorescens SBW25
MNDPLAWVNGSDAPEKSSLDLGFMALSDCASMVVAATQGFAQPYGLTLNLKRQSSWANLRDKLVSGELDAAHSLYGLIYAVHLGIGGVAPTDMAVLMGLNQNGQSINLSHGLQQQGVITPEALDRHVHQSRTKLTFAQTFPTGTHAMWLYYWLASQGIHPLQDVDSVVVPPPQMLAHLQAGRIDGFCVGEPWCASAVKQNQGFTLATTQTIWPDHPEKVLGCTQAFVEQYPNTARVLVMAILEASRFIEASSENRRSTAQLLSGREYLDAPLDCIEPRLLGAYDDGLGNRWQDPHALRFFAGGDVNLPYLSDGMWFMTQFRRWGLLREDPDYLGVARQVQQLGLYRQAAEALGITTKDQDMRSSQLIDGKIWDGSDPASYARSFRLHALADHTHRQALR

SEQ ID NO: 20758 - protein, 413 aa, Pseudomonas fluorescens SBW25
MALIVQKFGGTSVGSVERIEQVADKVKKFRDAGDDLVVVLSAMSGETNRLIDLAKAISGDQQPLPRELDVIVSTGEQVTIALLAMALNKRGVPAVSYTGSQVRILTDSAHTKARILQIDDQKIRTDLKAGRVVVVAGFQGVDEQGNITTLGRGGSDTTGVALAAALKADECQIYTDVDGVYTTDPRVVSVAQRLDKITFEEMLEMASLGSKVLQIRAVEFAGKYNVPLRVLHSFKEGPGTLITIDEEESMEQPIISGIAFNRDEAKLTIRGVPDTPGVAFKILGPISGANIEVDMIVQNVSHDNTTDFTFTVHRNEYDAAERILQNTAKEIGAREVVGDTKIAKVSIVGVGMRSHAGVASRMFEALAKESINIQMISTSEIKVSVVIEEKYLELAVRALHTAFELDAPARQGE

SEQ ID NO: 20759 - protein, 473 aa, Pseudomonas fluorescens SBW25
MSGPHSSSGELKRGLKNRHIQLIALGGAIGTGLFLGSAGVLKSAGPSMILGYAICGFIAFMIMRQLGEMIVEEPVAGSFSHFAHKYWGGFAGFLSGWNCWILYILVGMSELTAVGKYVHYWWPEIPTWVSAAAFFVLINLINLANVKVFGEAEFWFAIIKVVAIVGMIALGSYLLVSGTGGPQASVSNLWDHGGFFPHGVGGLVMAMAIIMFSFGGLEMLGFTAAEADQPRTVIPKAINQVIYRILIFYIGALVVLLSLTPWDSLLATLNASGDAYSGSPFVQVFSMLGSNTAAHILNFVVLTAALSVYNSGTYCNSRMLLGMAEQGDAPKALAKIDKRGVPVRAILASAAITLVAVLMNYLIPQHALELLMSLVVATLVINWAMISFSHFKFRQHMNRTGQVPLFKALWYPYGNYVCLAFVVFILVIMLMIPGIQVSVYAIPVWVVFMAGCYGLKNKRSADAALTTASEALK

SEQ ID NO: 20760 - protein, 70 aa, Pseudomonas fluorescens SBW25
MSTRQSGTVKWFNDEKGFGFITPESGPDLFVHFRAIQGNGFKSLKEGQKVTFVAVQGQKGMQADEVIAEA

SEQ ID NO: 20761 - protein, 73 aa, Pseudomonas fluorescens SBW25
MTNRDTGTVKWFNTSKGFGFISRDSGDDIFVHFRAIRGEGHRVLVEGQRVEFSVMNRDKGLQAEDVIAALPRR

SEQ ID NO: 20762 - protein, 441 aa, Pseudomonas fluorescens SBW25
MLNAVIVVDDEASIRTAVEQWLSLSGFEVQLFSRADECLARLPKDFPGVILSDVRMPGLSGLELLAEVQRRDADLPVILLTGHGDVPMAVEAMRDGAYDFLEKPFSPDALLNSLRRALDKRGLILENRRLHQQADHRAQLESTLLGVSRGLQTLRRQVLDLASLPVNVLIRGETGSGKELVARCLHDFGPRAKKPFVALNCAAIPEQLFEAELFGHESGAFTGAQGKRIGKLEYAHGGTLFLDEIESMPLAQQVKLLRVLQEQKLERLGSNHSIHVDLRIIAATKPDLLEEARAGRFREDLAYRLNVAQLRLPPLRERREDIPLLFDHFTHSAADRLGRTVEPLSGAQLGRLLSHDWPGNVRELANVAERQVLGLGDPEPEGVEAGQSLAAQQEAFEAHCLKAALTRHKGDIKAVLAELQLPRRTLNEKMQRHGLVREMFL

SEQ ID NO: 20763 - protein, 200 aa, Pseudomonas fluorescens SBW25
MLDELLRRVSNHTPHTLETDGRFPEAAVLVPITRSDEPELILTLRASGLSTHGGEVAFPGGRRDPEDPDLIFTALREAEEEIGLPPGLVEVIGPLSPLISLHGIRVTPYVGVIPDYVEYLANDAEIAAVFSVPLDFFRQDPREHTHRIDYQGRSWYVPSYRFGEYKIWGLTAIMIVELINLLYDDAQISLHQPPKSFINT

SEQ ID NO: 20764 - protein, 382 aa, Pseudomonas fluorescens SBW25
MITSKLPNVGTTIFTTMSQLAAETGALNLSQGFPDFNGPQGLLDAVGKHIALGHNQYAPMTGLPVLRQQVAAKIARSYGATVNADSEVTITPGATEAIFCAIQAVIRHGDEVIVFDPCYDSYEPSVELAGGRCVHVQLSLDGFALNFEKIQAALSPRTRMIILNTPHNPTGALISRAELDLLAALIRDRDIYLVSDEVYEHLVFDGVPHVSVLAHEELYQRAFVVSSFGKTYHVTGWKTGYVVAPPALTAELRKVHQYVNFCGVTPLQYALADFMAEHPEHVEELPAFYQAKRDLFCDLLAPSRFSFTRVTGTYFQLVDYSQIRPDLDDVAMSLWMTREHGVATIPVSVFYQNPPQGQRLVRLCFAKREETLQQAAEKLCVI

SEQ ID NO: 20765 - protein, 404 aa, Pseudomonas fluorescens SBW25
MKLPIYLDYSATTPVDPRVAQKMSECLLVDGNFGNPASRSHVFGWKAEEAVENARRQVADLVNADPREIVWTSGATESDNLAIKGAAHFYATKGKHLITTKIEHKAVLDTMRQLEREGFEVTYLEPTTDGIVTPAMIEAALREDTILVSVIHVNNEIGTINDIAAIGELTRSKGILLHVDAAQSTGKVDIDLSKLKVDLMSFSAHKTYGPKGIGALYVSRKPRVRIEATMHGGGHERGMRSGTLATHQIVGMGEAFRVAKEDMAAENVRIKALSDRFYKQVENLEELYINGSMTARVPHNLNLSFNYVEGESLIMALKDLAVSSGSACTSASLEPSYVLRALGRNDELAHSSIRFTFGRFTTEEQVDYAAQKVCEAVNKLRVLSPLWDMYKDGVDISKIEWAAH

SEQ ID NO: 20766 - protein, 342 aa, Pseudomonas fluorescens SBW25
MNPFKTTLAAIGATAALGLASTAQAGVTLDAIQKKGFIQCGVSDGLPGFGVPDSNGKMTGIDVDVCHAVAAAVFGDASKVKFTQLTAKERFTALQSGEIDMISRNTTWTSSRDSGMGLVFTGVTYYDGIGFLVNNKLGVTGAKQLDGATVCIQAGTTTELNVSDYFRTNGMKYTPITFDTADESAKGLEAGRCDVLTTDQSGLYAQRIKMAHPDEFVVLPEVISKEPLGPLVRKGDDEWFSIVKWTLFAMLNAEEMGITSQNVEEQAKTTKNPDIARLLGADGEYGKDLKLRKDWVVQIVKQVGNYGEVFERNIGQGSVLKIKRGLNALWNNGGIQYAPPVR

SEQ ID NO: 20767 - protein, 393 aa, Pseudomonas fluorescens SBW25
MLSAQDRAIVKSTVPLLESGGEALITHFYRMMLSEYPEVRPLFNQAHQASGDQPRALANGVLMYARHIDQLDQLGDLVAKIINKHVALQILPEHYPIVGACLLRAISEVLGSEIATPEVMNAWGAAYGQLADILIGAEAAIYEEKAQAPGGWRGARPFTLVKRVEESAEITSFYFAPVDNGPVLAAAPGQYTGMKLVLEGEEVRRNYSLSALTDAGQYRVSVKREAGGRVSNYLHDQLHVGATIDLFPPSGEFTLAASDKPLVLISGGVGITPTLPMLEAALATERPVHFIHCARNGAVHAFRDWVDALAAQHPQLKRYYCYAEDDGVSPAADNVGLLSQEQLAAWLPEQRDIDAYFLGPKGFMAAIKRHLKALGVPEKQSRYEFFGPAAALE

SEQ ID NO: 20768 - protein, 407 aa, Pseudomonas fluorescens SBW25
MKFVDEVSIRVKAGDGGNGCMSFRREKFIENGGPNGGDGGDGGSIYMMADENLNTLVDYRYTRHFDAERGSNGGSTDCTGKKGEDLVLRVPVGTTIIDSATQEVIGDLTKAGQKLMVVQGGWHGLGNTRFKSSTNRAPRQTTPGKPGEQRDLKLEMKVLADVGLLGLPNAGKSTFIRSVSAAKPKVADYPFTTLVPNLGVVSVDRWKSFVIADIPGLIEGASDGAGLGIRFLKHLSRTRLLLHLVDMAPLDDTSAPDAAEVIVSELTKFSPALAERDRWLVLNKCDQILEEEHEERVKEIVDRLEWTGPVYVISAIAKEGTERLTRDIMRYLEDRADRLAADPVFKAELAELDQQIEDEARAQLQALDDQRALRRSGVKSVHDIGDDDWDEEDVDDEDGPEIIYVRD

SEQ ID NO: 20769 - protein, 468 aa, Pseudomonas fluorescens SBW25
MTTPDKGFAEITHRELGLRRQLTSGQMSMIAIGGAIGTGLFMGSAYAIGYAGPSVLVSYAIGALITLLLMGCLAEMTVAHSTSGSFGAYAEFYISPLAGFLVRYAYWAAIVLAVGAEVTAVAMYMKYWFANVPEWVWIVSFSSVLILLNAISVKTFGNFEYWFSAIKISAIVGFILLAVYVVFGSGNPDYGVQNYTAHDGFFPHGLSGMWIAVIVSIFSYLSVEMIAVAAGEAADPEQAVKKAFRATLVRLVVFYLLTLALMLAIVPWNQAGQTQSPFVTVMQTIGIPGATGVMNFVILIAALSAMNSQLYITTRMMFSLSRAGFAPKSMGALSKSGIPLNALLLSSSGIALATLLNVVYPESSFTLMMAISMFGAIFTWFMIFLTHLCFRRYRRRHGGPKLSFQLRLFPYSTLLGLVLMGAVMVTTYFTEAFKMTLVFGVPFLLILSAVYYGFFRKGRAKASNKALA

SEQ ID NO: 20770 - protein, 335 aa, Pseudomonas fluorescens SBW25
MNHKVAFSFADGKTLFFPVGANEILLDAALRNGIKIPLDCREGVCGTCQGRCESGDYSQDYVDEEALSSLDLQQRKMLSCQTRVKSDATFYFDFDSSLCNAPGPVQVRGTVSAVQQVSTSTAILQVQLDQALDFLPGQYARLSVPGTDSWRSYSFANLAGNQLQFLVRLLPDGVMSNYLRERCQVGDELLMEAPLGAFYLRHVTKPLVLVAGGTGLSALLGMLDELAANGCDQPVHLYYGVRGAEDLCEAARIQAYASSIADFRYTEVLSAPSADWPGKRGYLTEHFHLAELRDRSADMYLCGPPPMVESVQQWLADQVLDGVQLYYEKFTQSNI

SEQ ID NO: 20771 - protein, 574 aa, Pseudomonas fluorescens SBW25
MELLSGGEMLVRFLRDEGVDYIYGYPGGALLHVYDALFKEPAVTHILVRHEQAATHMADGYARATGKAGVVLVTSGPGATNAITGIATAYMDSIPMVIISGQVASTMVGTDAFQETDMIGISRPIVKHSFMIKHASEIPEVMKKAFYLAQSGRPGPVVVDIPKDMTNPAEKFEYIFPKKAKLRSYSPAVRGHSGQIRKAAEMLLAAKRPVLYSGGGVILGGGSAPLTELAKLLNLPVTNTLMGLGAFPGTDRQFVGMLGMHGSYTANLAMHHADVILAVGARFDDRVINGASKFCPNAKIIHIDIDPASISKTIKADVPIVGPVESVLTEMVAALKDIGETPNKESVASWWKQIDEWRGDRGLFPYDKGDGSIIKPQTVIETLCEVTKGDAFVTSDVGQHQMFAAQYYKFDKPNRWINSGGLGTMGFGFPAAMGVKLSFPDTDVACVTGEGSIQMNIQELSTCLQYGLPVKIVCLNNGVLGMVRQWQDMSYNSRHSHSYMESLPDFVKLVEAYGHVGIRITDLKDLKPKMEEAFAMKDRLVFIDIQVDTSEHVYPMQIKDGSMRDMWLNKTERT

SEQ ID NO: 20772 - protein, 390 aa, Pseudomonas fluorescens SBW25
MAQPYSARSRAIEPFHVMALLARANELQAAGHDVIHLEIGEPDFTTAEPIIQAGQAALANGKTRYTAARGLPELREAISGFYQQRYGLNVDPERILITPGGSGALLLASSLLVDPGKHWLLADPGYPCNRHFLRLVEGAAQLVPVGPEVRYQLTADLVAKHWNQDSVGALVASPANPTGTILTRDELAGLSAAIKARNGHLVVDEIYHGLTYGTDAASVLEVDDEAFVLNSFSKYFGMTGWRLGWLVAPPAAVGELEKLAQNLYISAPSMAQHAALACFTPQTLSILEERRAEFGRRRDFLLPALRELGFGIAVEPEGAFYLYADISAFGGDAFAFCRHFLETEHVAFTPGLDFGRFKAGHHVRFAYTQNLDRLQEAVERIARGLRSWQG

SEQ ID NO: 20773 - protein, 638 aa, Pseudomonas fluorescens SBW25
MGKIIGIDLGTTNSCVSVMENGKAKVIENAEGARTTPSIIAYANDGEILVGQSAKRQAVTNPHNTLYAVKRLIGRKFDEEVVQKDIKMVPYKIAKADNGDAWVEVNGNKMSAPQISAEVLKKMKKTAEDYLGETVTEAVITVPAYFNDSQRQATKDAGRIAGLDVKRIINEPTAAALAYGMDKAKGDHTVIVYDLGGGTFDVSVIEIAEVDGEHQFEVLATNGDTFLGGEDFDIRLIDYLVDEFKKESGMNLKGDPLAMQRLKEAAEKAKIELSSSMSTDVNLPYITADATGPKHLNVKISRAKLEALVEDLVQRTIEPCRIALKDAGIDVGSINDVILVGGQTRMPLVQQKVTEFFGKEARKDVNPDEAVAMGAAIQGAVLAGDVKDVLLLDVSPLTLGIETMGGVMTALIEKNTTIPTKKSQVFSTADDNQGAVTIHVLQGERKQAAQNKSLGKFDLAEIPPAPRGVPQIEVTFDIDANGILHVGAKDKATGKEQKITIKANSGLSDEEIQQMIRDAEANADADAKFAELAGARNQGDALVHSTRKMVADAGDKVTAEEKAAIEAAVVALEAAVKGDDKAAIEAKIEELSKVSAPVAQKMYAEQGQPADGAAQQAEPEAKHDDVVDAEFEEVKDQK

SEQ ID NO: 20774 - protein, 444 aa, Pseudomonas fluorescens SBW25
MTFATLGLIEPLLRALETLGYQTPTPVQAQAIPAVLAGRDLMAAAQTGTGKTAGFAVPLLQLLTTEGPKVAANSARALILCPTRELAEQVHASVAEYAQHLPLTTYAVYGGVSINPQMMKLRKGVDILVATPGRLIDLFRQNALKLNQLQTLVLDEADRMLDLGFSEELANIYRMLPKKRQTLLFSATFSDEIRLLAGQMLNDPLTIEVSPRNVAANTVKQWVVPVDKKRKPELFVHLMRKGRWKQVLVFAKTRNGVDALVDKLQGLGINADGIHGDKPQATRQRALDRFKSSEVQILVATDVAARGLDIEDLPLVVNFDLPIVAEDYIHRIGRTGRAGNTGEAISLVCADEVNMLSAIEMLTRQTLTRKMEPDFEPEHRVPDTDASGQVVKKPKKPKKPKTSGGGGKRNLGKWVDSGDAAPVEPSIKPVRKVPVFNTGPRKKK

SEQ ID NO: 20775 - protein, 477 aa, Pseudomonas fluorescens SBW25
MPSEPTSSSVDFEKVDSQYFQQRELKKGAAGWVLLVGLGVAYVISGDYAGWNFGLAQGGWGGMFLATLLMATMYLCMCFSLAELSSMIPTAGGGYGFARSAFGPWGGFLTGTAILIEYAIAPAAIAVFIGAYCESLFGIGGWMIYLAFYIIFIGIHIFGVGEALKLMFVITAVAAIALGVFLVAMVPHFNVANLLDIPVSEAKGASTFLPFGYVGVWAAIPYAIWFFLAVEGVPLAAEETKNPKRDLPRGLIGAIVVLTSFALLILVIAPGGAGTYALIKSGNPLVEALALAYGGSTWMGSFVNLVGLAGLIASFFSIIYAYSRQIFALSRAGYLPRKLSQTNKSKAPVLALVIPGIIGFGLSLTGQGDLLILVAVFGATISYVLMMAAHITLRIRRPKMDRPYRTPGGIFTSGIALVLACVAVVAGFLVDPRVVIGAAIIYGVLIAYFAFYSRHHLVAGTPEEEFAAIQAAEAALH

SEQ ID NO: 20776 - protein, 567 aa, Pseudomonas fluorescens SBW25
MSIPSSTLSKTNRHPADGKKPITIFGPDFPFAFDDWIEHPAGLGSIPVANHGAEVAIVGAGIAGLVAAYELMKLGLKPVVYEASKMGGRLRSQAFEGAEGIIAELGGMRFPVSSTAFYHYVDKLGLETKPFPNPLTPASGSTVIDLEGQTHYAQKLSDLPVLFQEVADAWADALEAGSQFGDIQQAIRDRDVPRLKELWNTLVPLWDDRTFYDFVATSEAFAKLSFHHREVFGQVGFGTGGWDSDFPNSMLEIFRVVMTNCDDHQHLVVGGVAQVPMGIWRHVPEQCAHWPAGTSLSSLHRGAPRAGVKRIAHAADGRFAVTDNYGDTREYAAVLTTCQSWLLTTQIECDETLFSQKMWMALDRTRYMQSSKTFVMVDRPFWKDKDPETGRDLMSMTLTDRLTRGTYLFDNGDDKPGVICLSYSWMSDALKMLPQPIDKRVKLALDALNKIYPKVDIKARIIGDPITVSWEADPHFLGAFKGALPGHYRYNQRMYAHFMQKDMPAEQRGIFIAGDDVSWTPAWVEGAVQTSLNAVWGIMTHFGGSTHPENPGPGDVFDEIGPIALAD

SEQ ID NO: 20777 - protein, 605 aa, Pseudomonas fluorescens SBW25
MSAIPSRSKGAARLLTNDVTALIPDFPFHYAKFLNSAVSNGKPLAGVSTRQQGTQVLIVGAGVAGLVAAYEAMRMGLHPVVVEASDRIGGRFYSYVAGDPQDSANSVICEMGAMRFPVSGKALMHYFDKVGMTANSADFPNPGSAATPSTVVDYQQRQVYYEGKNLPPEYEDIESKLFDVFLEQDPIKFLEMETAMSGDNPDLAKIKTLWNAILDKGWDNLSFFAAMVEEAGWSREDIDLFGQIGFGTGGWNTDYPNCFLEVLRVLYTGLDTNHKLMYDGSSELPTRLWNRAPDALGDPMAYWPAGTTVQGLTAQVIAQPFNQEVRQIIRRPDGEFDVWMFDHNRGSERQYTFAAVVYTPHKRVLDKFRFMDGVARFDQMNSLLSIKEWEAVTYTHYMQSAKIFAQTQRPFWTDVGADRQYKMSVTLSDRITRGTYLLDYAASQGPYKGSGMFLSYTWNDDSIKFLGDRAAPLPSHVAVCSTLLDSVYAHHQLNLAAEFGMTDPFVEINWEEQPFFLSAFKMNLPGQYEYQRLLFSQFMNGVFDGSPDGFILAGDDVSFTGGWGEGAVTTALNAVNNLAVKFGGGTFIENRGPIDDWQVLKPKAL

SEQ ID NO: 20778 - protein, 366 aa, Pseudomonas fluorescens SBW25
MSSNFLNPVTTQTWANGRHIVRCVKVIQETWDVRTFCFMADQPILFFFKPGQFVTLELEIEGQPIMRSYTISSSPSVPYSFSVTIKRVPGGKVSNWLHDTLHEGQELAVHGPVGLFNAIDYPSPKVLYLSGGVGITPVMSMARWFYDTNANVDMTFIHSARSPKDIIYHRELEHMASRIDNFSLHLICEKHGLGEPWAGYRGYLNHKMLELMVPDFLEREVFCCGPTPYMNAVKRLLEVAGFDMARYHEESFGATPPEARADAVEQAEQAADAPEIDLADLHQVEFIASGKSIRVAPGETVHAAAAKLGLLIPKACGMGICGTCKVMKLGGEVEMDHNGGITEEDEAEGYILSCCSVPKGDVRIEF

SEQ ID NO: 20779 - protein, 663 aa, Pseudomonas fluorescens SBW25
MSSASLIKTPPEKVRVNGWVFYTSTALILLLTAILIIAPQEAGRMLGVAQAWLSKSFGWYYMVVIAAYLVFVVGLAFSSYGKLKLGSKDDTPDFSYGAWAGMLFSSGIGISLLYFGASEPLDHYFNPPEGAAASNGAARQALQLTFLHWGLHGWAIYALVGLAVAYFAYRHNQPLALRSALYPLVGERWVKGAAGHAVDGFGMFVTLLGLVTNLGIGSMQVSSGLENLFGMQHSNTNLLIVIIVMSTVATIAAVSGVENGIRRLSNLNIVLFSGLLIFVLLFGPTLHLLNGLVQNTGDYLNGIILKTFDLYVYEGDADKTERWMGLWTLFYWAWWISWAPFVGMFIARISRGRTVRELVAGVLLIPLGFTLAWLSIFGNSALDLVLNHGAVELGKTALEQPSMAIYQLLEHYPASKIVIGVSIFVGFVLFLTPADSGAVMMANLSCKGGNVDEDAPHWLRIFWSAVITLVTIGLLFAGNFEAMQTMVVLAGLPFSVVLIFFMFGLHKAMRQDVAIEQEQAQLAERGRRGFSERLTALDLQPSQGTVQRFMDKHVTPALEEAAVALRDQGLEVQTLLGKSKRCIGVRIEMEEGNPFVYEVSLDAYSSAPSDVPEEERTRYYRAEVYLHNGPQEYDLMGFTQEQITRDVLDQFESHRQLLGRVYS

SEQ ID NO: 20780 - protein, 628 aa, Pseudomonas fluorescens SBW25
MSFASLGLSEALVRAIEAAGYTEPTPVQQRAIPAVLQGRDLMVAAQTGTGKTGGFALPILERLFPNGHPDKSQRHGPRQPRVLVLTPTRELAAQVHDSFKLYARDLKFVSACIFGGVGMNPQVQAMSRGVDVLVACPGRLLDLCGQGSVDLSHVEILVLDEADRMLDMGFVHDVKKVLARLPAKRQNLLFSATFSQDITALAGKLLHNPERIEVTPPNTTVERIEQRVFRLAASHKRALLAHLITAGAWEQVLVFTRTKHGANRLAEYLDKHGLTAVAIHGNKSQNARTKALADFKAGSVRILVATDIAARGLDIDQLPHVVNFELPNVDEDYVHRIGRTGRAGRSGEAISLVAPDEEKLLKSIERMTKQKIADGDLMGFDASAVEAEKPEVRERPDVRNPRNPRGPKGDGPNGGGGGGGRRDKGKDKGGKEKAPTNGRGERPAREQKPREGTPAREQRQPSQPPRAAADRAPDEFLDDDVDNFGNRVDYVPQAKPAQGRGRRPGAPAQGAGAGAPRGGQPQGARQNGPRNSSGGTTGTPPAKRSGPRNGAPRDGQARREDSRSNNRRPARDDQPRLSEPAVQNPRGGPAPKIIHKESKADRFPTPEQLDQLPGRPRGEKPALLTRNR

SEQ ID NO: 20781 - protein, 261 aa, Pseudomonas fluorescens SBW25
MTKRYSALLTALFASLMLSQAPAQANGLDDIVARGTLKVAVPQDFPPFGSVGPDMKPRGLDIDTAKLLADQLKVKLELTPVNSTNRIPFLTTGKVDLVISSLGKNPEREKVIDFSKAYAPFYLAVFGPPDAAISSVDDLKGKTISVTRGAIEDIELTAVAPKEATIKRFEDNNSTIAAYLAGQVDLIASGNVVMVAISERNPKRVPALKVKLKDSPVYVGVNKNEPALLEKVNQILVAAKADGSLEKNAMQWLKEPLPADL

SEQ ID NO: 20782 - protein, 887 aa, Pseudomonas fluorescens SBW25
MGEISRAALFGKLNSVAYKAIEAATVFCKLRGNPYVELAHWFHQLLQLQDSDLHRIIRQFNVEPARLARDLTEALDRLPRGSTSITDLSSHVEEAVERGWVYGSLMFGESQVRTGYLVLGILKTPSLRHALLGLSSEFDKIKAEALSERFDEYVGDSPENALSASDGFNAGAVPGEASGAMAPSAMGKQEALKRFTVDLTEQARSGKLDPIVGRDEEIRQLVDILMRRRQNNPILTGEAGVGKTAVVEGFALRIVAGDVPPALKDVELRSLDVGLLQAGASMKGEFEQRLRQVIEDVQASPKPIILFIDEAHTLVGAGGAAGTGDAANLLKPALARGTLRTVAATTWAEYKKHIEKDPALTRRFQVVQVAEPSEDKALLMMRGVASTMEKHHQVQILDEALEASVKLSHRYIPARQLPDKSVSLLDTACARVAISLHAVPAEVDDSRRRIEALETELQIIAREHAIGIAIGARQTNSEALLSAERERLATLESRWAEEKALVDELLATRATLREKAGAVDSGDDALREQLVDLQQRLSALQGETPLILPTVDYQAVASVVADWTGIPVGRMARNELETVLNLDQHLKKRIIGQDHALQMIAKRIQTSRAGLDNPSKPIGVFMLAGTSGVGKTETALALAEAMYGGEQNVITINMSEFQEAHTVSTLKGAPPGYIGYGEGGVLTEAVRRKPYSVVLLDEVEKAHPDVHEIFFQVFDKGVMEDGEGRVIDFKNTLILLTTNAGTELISQVCKDPANIPEPEEIAKALRQPLLEIFPPALLGRLVTIPYYPLSDEMLKAITRLQLGRIKKRVETTHKVAFDYDDAVVDLIVSRCTETESGGRMIDTILTNSLLPDMSREFLTRMLEGKAMAGVRISSRDNELHYDFSDAD

SEQ ID NO: 20783 - protein, 219 aa, Aquilegia formosa
MEKTSSSGLKKGKWSEEEDDLLKKCIEKYGEGNWQKVPLRTGLNRCRKSCRLRWCNYLNPKAKRGEFSWDEIDLIIKMQKLLGNRWSLIAARLQGRTSNDIKNLWTSHISKSLRKNQGEQTETVTPKIKAIKPKPLTFSQNSAWRRLTEKAIQREELHSNSSLDFQKEPSTSCWDGIIFSEEDILGWTDELGMKSFVNELTKPEKTEMCLDYLNIWEWC

SEQ ID NO: 20784 - protein, 234 aa, Aquilegia formosa
MRNSNVRKGAWNQDEDLLLKRCIEKYGEGNWHQVPMRAGLNRCRKSCRLRWLNYLHPNIKRGGFKEDEIDLIMKLHKLLGNRWSLIAGRLPGRTANDIKNYWNSHLSKKMEFCHKEYQPSIMPKTEVIRPHPRTFNANLVRSRGKFILKNQQPQQQKQKQKQQQLEQEQYDAVVPTEAELSTWWNDLANDLNISVPNAKEVIPTNSTVENREAMNPFEKTIFDDIAWDDFLATF

SEQ ID NO: 20785 - protein, 737 aa, Chlorella sp. NC64A
MSSRGSAAHLRKKVGKYYLGRTIGEGTYAKVKYGQHSDTGEAVAIKVLDKEALVRSGMVEQIKREISILKQIRHPHIVNLLEVMSSRDKIFMVMELVTGGELFDKVVAEGPMKEPAARRMFSQLLDAVGHCHKQGIFHRDLKPENVLLSSNGTVKLSDFGLGVLPNPGGSEDLLRTTCGTPNYVAPEVLAKKGYRGGPADVWSLGVVLYVMVAGCLPFDEDDLVALFGKISKAEYEVPPWLSKDAVHLLGCMLNPDPDARLTIEQMWAHPWMRSGLVRRSVAGWQTLPPETQADIFAPNRRVSQLVGSPGSTRKMNAFELIKAGLDISSLFEAREDVMMRHTRFSSRAPLATILAGIENAAVAVGGRVMQQGDARLRLYIPNPKGKMQVLVEVTEVLPGTHMVDLQKVQGNTAEFHKWYSDLCEVLSTIISKKQPGAAGDVGAAAAARRRQHRESNGQLRTNAFQLISGCFNMGALFEEECVSQHVQFSSRRPPGEILEALEGAAQDLGGSMHRLGDRRAVLTMPVGGGRSMKLQAHLFEVLAGIHVCQIAKDAGSSMDFMRCYGQLAARLQPIMMKRNAFPTATRAAALLSTTSSMGDSERQAIDDLPPASPSDISEAGMGSGVSLMSQRPAEAGLWGQGFSGRSTSRASLISVPEEPEPAEHSLHAEQFARSSGDTRSSGSTPAGGSPLAGGSPKAWQPLPPLEESSPGKAAQQATPGNGSMEGRAANGSSRRSS

SEQ ID NO: 20786 - protein, 447 aa, Selaginella moellendorffii
MGLKNVSPPRKSASPSRIGKFELGRTLGEGTFAKVRFARNVETGEHVAVKVLDKEKILKHRMVEQIKREISTMKMVKHPNIVQLHEVLASKTKIYLVLEFVEGGELFGKIVKHGRLKESYARRYFQQLINAVDYCHSLGVYHRDLKPENLLLDSNGNLKVSDFGLSALPQQFRADGLLHTTCGTPNYVAPEVISNKGYDGAPADLWSCGVILYVLMAGFLPFEDSNIMNLYRKIFRAEFKVPSWFSPGVRKLLAQLLHPNPKKRITIPQILENEWFKKDYKPAKLHHEEDVVVGDVESVFNESGEHTGAGSSTKPGLINAFELISMSSGLDLSGLFEKQQEPVKQETRFTSMHSAKEIISKIEETAKPLGLDVQQKQNFKMKLRKSSSLGKSFLSISTEVFEVSPELYMVELRKSEGDTLEYRTFYKSLSSSLKDIIWSSDDDLLAT

SEQ ID NO: 20787 - protein, 445 aa, Selaginella moellendorffii
MGTPSGIQTRVGKYELGKTVGEGTFAKVRRATNLETGEQVAIKILDKEKVMRHKMVEQLKREISTMKLVKHPNIVQLHEVLASKTKVYIVLEYVTGGELFNKIVKQVRMKEEDARRYFQQLINAVDYCHSRGVYHRDLKPENLLLDTNGNLKISDFGLSALPQHLRPDGLLHTTCGTPNYVAPEVINNKGYDGATADLWSCGVILYVLMAGFLPFDESNLMNLYKKIFRADFKYPKWFSSGAKNLISRILHPNPKSRIKIPEILENEWFKTDYKPAKFLEEDAAHLKDIEDVFNEEHLVKEEKRELKRQESKPVLMNAFELLSMSSGLDLSGLFEKQKPVKRESRFASVCPANQIISKIEEAARPLGFDVRKQDYKMKLLGSKSGRKGQLSVATEVFEVAPSLFMVEMRKAGGDTLEYTAFHKDLYVGLEDIVWKNELEVERGER

SEQ ID NO: 20788 - protein, 442 aa, Selaginella moellendorffii
MPMPSVRTRVGKYELGRTLGEGTFAKVKFAKNTKTGQGVAIKILDRDRVLKHKMVEQIKREISTMKLVRHPNIVQINEVMASKSKIYIVLELVTGGELFDKIVHQGRLKEDEARKYFQQLINAVDYCHSRGVYHRDLKPENLLLDSNGNLKISDFGLSALPQQLRADGLLHTTCGTPNYVSPEVINDKGYDGAKADLWSCGVILFVLMAGYLPFDEPNLMNLYKKIYNAEFTFPAWFSTGAKKLIHRILNPNPQTRITVPEILENEWFKKGYVPAKFEEEEHVNLSDIDAVFNASSEDHLVTEKKEAKPNPMNAFELISTSQGLDLSALFEEKQAPVKRETRFTSSKAPKEILQKLEDTAKPLGFNIDKRDYKMKMRGEKSGRKGHLSVSTEVFEVAPSLFMVELRKASGDTLEYHKFYNNLSQGINEIMWKSNETHSKMHK

SEQ ID NO: 20789 - protein, 432 aa, Selaginella moellendorffii
MSYRRTRVGKYELGRTLGEGTFAKVKYARNLETNESVAIKILDKEKILKHKMVDQIKREISTMKLVRHPNVIQLFEVIGSKTKIYMVMEYVTGGEMFDKIAREGKQDERKARIYFQQLIDAVDYCHSRGVCHRDLKPENLLLDSDGNLKISDFGLSALPQQCRSDGLLHTTCGTPNYVAPEVISDKGYDGFKADIWSCGIVLYVLLAGYLPFDEPNLVALYKKMHRADFTFPHWFSRGSRKLVQKILDPNPKSRISISRIMDNEWFQVEHKPMTLGKEQSPNLDDIDAVFNGSEAHLVAEKEEPQPVTMNAFEIISMSRGFNLSGLFEHREVERESRFTSKHPAKEIVRTIEETARPLGFNIQKRNYKMTLQGSKRGRKGHLSVCTEVFEVAPSFYVVELRKSGGDTLEYHKAIFHQSFTTGLKDIIWKDQT

SEQ ID NO: 20790 - protein, 457 aa, Selaginella moellendorffii
MVMRKVGKYEIGRTIGEGTFAKVKFAQNTETGESVAMKVLNKETILKHKMVDQIKREISIMKLVRHPNVVRLHEVLASRTKIYIILEFVTGGELFDKIVDQGRLTEIESRKYFQQLIDAVDYCHSKGVYHRDLKASLSTRAFLPENLLLDSQGNLKISDFGLSALPQQEDGLLHTTCGTPNYVAPEVLDNNGYDGAAADIWSCGVILYVLMAGFLPFDEVDLVTLYRKIHEAEFLCPSWFSPGARSLISRILDPNPQTRIQMFGIRKDDWFKRNYVPVRLADDEDGTLDDIEAVFDDSEDQFVKEQRDINEGPSMMNAFELITLSQGLNLSALFDRRQDLVKRQTRFISKCPAKELLARMEDTAKSMGYKVYKRGYKMRFEGLTAGRTGQLAVAVEVFEVAPSLYMVEVRKAVGDTLEYHKFYKSFCTNLRDTIWKSAGSSPPHNSTPYKDRVLKLV

SEQ ID NO: 20791 - protein, 497 aa, Ipomoea batatas
MREVKDSEIKLFGKKIALPENGRVVLFDGAGEYAESCENDCVSDRDRCSDDSKLNGSAGKGGADVDEIDTQKPEDDDKELLSEEFSEEKDQDQDMDELESTKNESESDNNVKTPPADEDSPSPKTSKTENDQTETNNSQQKTLKKPDKILPCPRCNSMDTKFCYYNNYNVNQPRHFCKSCQRYWTAGGTMRNVPVGAGRRKNKNSASHCRHITITEALQAARIDAPNGFHHPTYKPNGTVLSFGPESPLCESMASLLNLADKKVPNGMRNGFYKHEQGNSPNKVGENGDDCSSVSSVTTTSSAAGGKYPPQEAVMPNINGFPTPVPCLPGVPWPFPWNAAVPLPAICPPGFPMPFCPAPYWNCAVPGPWSLPWLAPPSPTANQKTSSSSPNSPLGKHSREGELLTPNNPEAKESSEQKRSGNSVLVPKTLRIDDPDEAAKSSIWSTLGIKYDSISRGGLFKALQPKSDEKNHTATPPSALQANPAALSRSLSFQESA

SEQ ID NO: 20792 - protein, 200 aa, Bradyrhizobium sp. ORS285
TQIKEFSSFPTLEQLPLWGFDGSSTMQAEGHSSDCVLKPVAVYPDAARTNGVLVMCEVMMPDGKTPHPSNARATILDDPDAWFGFEQEYFFYKDGRPLGFPEYGYPAPQGPYYTGVGFKNVGDVARKMVEEHLDLCLAAGINHEGINAEVAKGQWEFQVFGKGSRTAADQMWMARYLMLRLTEKYGIDIEFHCKPLGDTE

SEQ ID NO: 20793 - protein, 200 aa, Bradyrhizobium sp. ORS301
TQIKEFASFPTLEQLPLWGFDGSSTQQAEGHSSDCVLKPVACYPDGARENGVLVMCEVMMPDGKTPHSSNKRATILDDEGAWFGFEQEYFFYKDGRPLGFPEQGYPAPQGPYYTGVGYKNVGSVARKIVEEHLNLCLHAGINHEGINAEVAKGQWEFQIFGKGSKTAADQMWMARYLMLRLTESYGIDIEFHCKPLGDTE

SEQ ID NO: 20794 - protein, 200 aa, Bradyrhizobium sp. ORS304
TQIKEFASFPTLEQLPLWGFDGSSTQQAEGHSSDCVLKPVAVFPDGARTNGVLVMCEVMMPDGKTPHPSNKRATILDDAGAWFGFEQEYFFYKDGRPLGFPAAGYPAPQGPYYTGVGFSNVGDVARKIVEEHLDLCLAAGINHEGINAEVAKGQWEFQIFGKGSKTAADQMWMARYLMLRLTEKYGIDIEFHCKPLGDTE

SEQ ID NO: 20795 - protein, 200 aa, Bradyrhizobium sp. ORS309
TQIKEFASFPTLEQLPLWGFDGSSTQQAEGHSSDCVLKPVACYPDGARENGVLVMCEVMMPDGKTPHPSNKRATILDDDGAWFGFEQEYFFYKDGRPLGFPESGYPAPQGPYYTGVGYKNVGSVARKIVEEHLNLCLAAGINHEGINAEVAKGQWEFQIFGKGSKTAADQMWMARYLMLRLTESYGIDIEFHCKPLGDTE

SEQ ID NO: 20796 - protein, 565 aa, Musa acuminata AAA Group
PTVSTLCTTSSSRSKLLLSCVAFSSLFLLLLTLSNVSKPVPYHHRLHVHSHLQDATGHCDGTLYPDLCASTLSTIPDLHSKSLPEVICATINASEGAVIKSAKNCTKYLHHHNYTLDTRQRYALTDCLDLFSQTLDELLDATSDLTANPGSHVDHVQTLLSAAITNQYTCLDGFAYVGKDGGYRSVIEQPLYHVSHLVSNSLAMMKKIQRQKPPHPRREALEGYGEVAEGFPVWVSGKDRRLLQAAANTTTPNLIVAKDGSGNFTTISDAVAAAPSKSETRFVIYIKAGAYLENVEVGKSKTNLMFMGDGIGKTVVKASRNVVDGWTTFRSATVAIVGNGFLMRDMTIENSAGPSKHQAVALRVGADLSAFYRCSFVGYQDTLYAHSLRQFYRECDVYGTIDFIFGNAGVVLQNCNLYARKPLSNQKNIFTAQGREDPNQNTGISIQNCKVAAASDLAPVQSNFSTYLGRPWKAYSRTVYMQSLLDSLINPAGWLEWDGDFALSTLYYGEYMNRGPGSSTANRVKWPGYRVINSSAEASMFTVESFIEGDQWLGSTSVPFTAGLN

SEQ ID NO: 20797 - protein, 631 aa, Thellungiella halophila
MGSIDEERSLLEVEESLLQEEVNLYAEDGSIDINGNPPLKQKTGNWKACPFIFGKITLFVSTVILMIPLVLSLTSKTSVCFGEANECCERLAYYGIAKNLITYFTNELHETNVSAARHVMTWQGTCYITPLIGALIADAYWGRYWTIACFSAIYFTGMVALTLSASVPGLKPAECIGSICPPATMAQQVVLFSGLYLIALGTGGIKPCVSSFGADQFDQTDPSERVRKASFFNWFYFSINIGAFVSSTLLVWVQENCGWELGFMIPTVFMGLATLSFFFGTPLYRFQRPRGSPITRACQVLVASYRKSNLKVLEEDQKVLFETTDKNSSVAAMRKIQHTDGYKKIFALLISHFESSIGLCLDKAAIISEDDAKSGTIHDPWKLCTVTQVEEVKILLRLFPIWASGIVFSVLHSQIYTLFVQQGRSMKRTIVSFEIPPATLGMFDTASVLISVPIYDRLIVPFVRRFTGLPKGFTDLQRMGIGLLVSVLSLTVAAIVETMRLRLARDLDLVESGDTVPLTIFLQIPQYFLMGTAGVFFFVGRIQFFYEQSPESMRSLCSAWALLTTTLGNYLSSVIITVVAYLSGKDDGGWIPSDNINKGHLDYFFWLLVCLGCVNIPVFVFFSVKYTHKKV

SEQ ID NO: 20798 - protein, 583 aa, Thellungiella halophila
MGSIEEERPLIEEGLISQEAKLYAQDGSVDLHGNPPLKEKTGNWKACPFILGNECCERLAYYGIAGNLITYLTTKLHQGNVSAATNVTTWQGTCYLTPLIGAVLADAYWGRYWTIACFSGIYFIGMSALTLSASVPALKPAECIGDFCPSATPAQYAMFFSGLYLIALGTGGIKPCVSSFGADQFDDTDSGERVRKASFFNWFYFSINIGALVSSSLLVWIQENRGWGLGFGIPTVFMGLAIASFFFGTPLYRFQKPGGSPITRISQVVVASFRKSSLKVPEDATLLYETQDKNSAIAGSRKIVHTNDCQYLDKAAVISEEESKSGDYSNSWRLCTVTQVEELKILIRMFPIWASGIIFSAVYAQMSTMFVQQGRAMNCKIGSFQLPPAALGTFDTASVIIWVPLYDRFIVPLARRFTGVDKGFTEIQRMGIGLFVSVLSMAAAATVEIIRLHVANDLGLVESGAPVPISVLWQIPQYFILGAAEVFYFIGQLEFFYDQSPDAMRSLCSALALLTNALGNYLSSLILTLVAYFTTMNGQQGWISDNLNSGHLDYFFWLLAGLSLVNMAVYFFSAAKYKQKKAS

SEQ ID NO: 20799 - protein, 67 aa, Magnetospirillum magnetotacticum MS-1
MATGTVKWFNSEKGYGFIAPEDGSADVFAHYSAIQSQGFRTLEENQRVEFDVTQGPKGPQAENIRPV

SEQ ID NO: 20800 - protein, 199 aa, Magnetospirillum magnetotacticum MS-1
MTVTPAPGPVTGARPGAHGGPTPVPVTAYLDHAATTPLSPAARDAFVDELTRTGNPSSLHAAGRAARRTVEEARESVAAALGARPSEVVFTAGGTEADNLAVKGLFWGRRTTDPRRRRIVVSAVEHHAVLDPAFWMAEHAGAEIVLLPVDAEGRVDLAALRAEIAEHADEIALISVMWANNEVGTLQPVPEVVQLAGDP

SEQ ID NO: 20801 - protein, 215 aa, Magnetospirillum magnetotacticum MS-1
NGSGKSTLSYVIAGKEDYEVLDGEILLDGQNILEMAADERAAAGIFLAFQYPLEIPGVGTMTFLKACLNAQRKARGEDELSTPDFIRAVNAAADKLEINKEMLKRALNVGFSGGEKKRMEILQMALLQPKFCVLDETDSGLDIDALRIVSEGVNALRAEGRSFLVITHYQRLLNHIVPDTVHVMSKGQIVKTGGKELALELEASGYAEYRASEAA

SEQ ID NO: 20802 - protein, 142 aa, Magnetospirillum magnetotacticum MS-1
MSDASPTKPVKKVVLAYSGGLDTSIILKWLQTTYGCEVVTFTADLGQGEELEPARKKAELLGIKPENIFIEDLREEFVRDYVFPMFRANAVYEGVYLLGTSIARPLIAKKQIEIAERLGADAVCHGATGKGNDQVRFELGYY

SEQ ID NO: 20803 - protein, 413 aa, Magnetospirillum magnetotacticum MS-1
MPTPLSARTIAVVKATIPALETHGLTITRRMYERLFQNTDIRDLFNQSHHGETGSQPKALALAVLAYARNIDNLGVLTGAVERIAQKHVALNILPEHYSFVADALIGAIQDVLGEAATPEIVEAWGEAYWFLAELLIGREATIYRDLASKSGGWNGWRDFVVESVTPESEIIRSFVLVPADGGPVLRHEPGQYLGFLLDLPGRGVLKRNYSISCAPNDRAYRITVKREAKTEHPAGLVSNWLHDAAIAGTVLKVAAPAGDFFLDRSSNAPVVLVSGGVGLTPMVSMLESITETTPERPTWFVHSALNGRVHALREHVRNLAANRDNLRVRIFYTAPEAQDRVGEAYDIPGPVTAEWLVANTPSEQATYYLCGPKSFLASLANGLVRAGIPAERVRFEFFGPADALLEEPKQAA

SEQ ID NO: 20804 - protein, 69 aa, Magnetospirillum magnetotacticum MS-1
MNTGTVKWFDEIKGYGFIQPDNGGKDVFVHISAVQQAGLRGLAEGQKVTFDIENDRRSGKPAAVNLQTA

SEQ ID NO: 20805 - protein, 183 aa, Magnetospirillum magnetotacticum MS-1
MALAQRIEDRDEGQARAPAIASALRTIETEREGLACLMAAIGNGLGEPFAQAVARIGAARGRVICTGMGKSGHVARKIAATMASTGTPALYVHPAEASHGDLGMIQPDDVVLALSWSGETTELADIIGYTRRYRVGLVAITSNAASTLGREADTCLALPKAKEACPNGLAPTTSTAMQLALGD

SEQ ID NO: 20806 - protein, 241 aa, Magnetospirillum magnetotacticum MS-1
MTAPSRWRAATIRAITPVTPRVKSFRFTPQPSPFEGPHRAGQHVDVRLTAPDGYQAQRSYSIASAPGDPAGLELMIEGLEAGEVSGFFDTVAEVGDEIELRGPLGAFTWGPEEGGPVLLIGGGSGVVPLLAMVRERALHAPEVPMLLIYSVRSGAEAIARAELSARSRDETGFDLTLLLTREGATAGRRIDRVMIDTAIECLGMPRHAFVCGGNGFVGAVADLLVDAGVRPSAIRTERFGG

SEQ ID NO: 20807 - protein, 69 aa, Magnetospirillum magnetotacticum MS-1
MDTGTVKWFNETKGYGFIQPDNGGKDVFVHISAVERAGLRNLVEGQKVSYEVLTDKRSGKDAAGNLQAV

SEQ ID NO: 20808 - protein, 124 aa, Magnetospirillum magnetotacticum MS-1
MFAVIKTGGKQYRVAANDVITVATLEGEAGASVTFGDVLLFADGEATQIGTPLLSGVGVTGEIVQHGRTRKVIAFKKRRRQNSRRRRGHRQDFTVVRITEISAGGKTSKAEPRKTRKAEPAAAE

SEQ ID NO: 20809 - protein, 167 aa, Magnetospirillum magnetotacticum MS-1
MASRGGCRLGTGMQCRTTSVGGNMSSLKRKPLVVVTRRLPDAVETRMRELFDTRLNHDDAPLSQEALAAAIREADVLVPTVTDEINAGLLAQAGPNLRLIANFGNGVDHIDVGAALERGITVTNTPGVLTEDTADMTMALILAVARRIAEGARIIPEDEWTNGRTPN

SEQ ID NO: 20810 - protein, 343 aa, Magnetospirillum magnetotacticum MS-1
MPEGGADDTAGARTERLARFRPASGMETPRFSGLSSFMRLPVIDPRAAPGLIEIGLIGIPFDGTTTNRPGARLGPRAVREASTGTRALNHATGVAPYDLAACADLGDVPVNPVDAAETDRRIEAFYRPLAEGGIVPLSVGGDHFVTYPVLRALGADRPLGLIHIDAHSDTDDAQYGGARLTHGTPFRRAVEAGVLDPRRCVQIGIRGSMDAADERAWALGQGIRIIEMEEVCARGLPEVAAEARAVVGEAPAYLSFDIDALDPAFAPGTGTPEIGGFTTREALHLLRGFRGLDLVGADLVEVAPPLDPAGITALAGAGLAFEILCLLAERVAARHRAAREGEG

SEQ ID NO: 20811 - protein, 69 aa, Magnetospirillum magnetotacticum MS-1
MPNGSVKWFNSTKGFGFIAPDNGGPDVFVHISAVERAGLSGLNDGQKVSFEEERDPRKGKTSAVNLKVL

SEQ ID NO: 20812 - protein, 280 aa, Magnetospirillum magnetotacticum MS-1
MELDTAMGEPALKLAPEEILLSVNNIEVVYDDVILVLRGVSLDVPKGKIVTLLGPNGAGKSTTLKAISGLLGTEDGEVTRGTITFMGEEIANRAPEEIVRRGIFQVMEGRRIIEDMTVIENLRLGAFTRKDGGAAIRDDIEKVFHYFPRLKERTGLAGYLSGGEQQMLAIGRAMMARPKMILLDEPSMGLSPLLVKEVFAIIETLCADTGITMLLVEQNARMALKIAQFGYIMESGKIVLDGPKDDLVNNEDVKEFYLGGDKERKSFKNLKSYKRRKRWL

SEQ ID NO: 20813 - protein, 418 aa, Magnetospirillum magnetotacticum MS-1
MTALGKTTRPILPRAPGAPVYLDYQATTPCDPRVVEAMLPWFTEKFGNPHSRNHRYGWEAEEAVEKAREQVADIIGADAKEVIFTSGATESNNLAIKGVAHFYKEKKNHIVTVVTEHKCVLDTCRYLEQEGFSVTYLPVKTDGLIDMAELEAAITDQTVIVSVMAVNNEIGVIQPLAEIGALCRKKGAFFHTDCAQAVGKIPLDVNAMNIDLMSISGHKLYGPKGIGALYVRRRPRVRLVPLITGGGQERGMRSGTLSTPLCVGFGEACAIAKAEMGAENERLMGLRNRLLGGLKQRLPEIYVNGDLDHRIPGNLNISFAFVEGEGLMMGVKDLAVSSGSACTSASLEPSYVLRALGVDVEMAHTSLRFGLGRFTTDEDIDFAIDHIVEAVEHLRAMSPLWDMHLEGVDLKSIEWAEH

SEQ ID NO: 20814 - protein, 224 aa, Magnetospirillum magnetotacticum MS-1
MQGPYSMKFFIDTAEVAEIRELAATGLVDGVTTNPSLIAKSGRKILDVIAEICDIVPGPISAEVAATDFDTMLAEGRKLAALRPNVAVKVPLTLAGLKTCKVLADDGVKVNVTLCFSANQAILAAKAGAAFISPFVGRLDDIGQDGMDLIADIVSIYREYPAFRTEVLAASIRHPMHVTEAARLGAHVVTMPASVLRQMVQHPLTDKGLAAFMADWAKTGQSIL

SEQ ID NO: 20815 - protein, 400 aa, Magnetospirillum magnetotacticum MS-1
MTEALICDYTRTPIGRYAGVLSGVRTDDLAAHPIKALMARHEGLDWSRVDEVAFGCANQAGEDNRNVARMALLLAGLPTSLGGTTLNRLCGSGMDAVGYAARAIMSGEAELMIAGGVESMSRAPFVMNKADSAFSRDARIYDTTIGWRFVNSLMEKAYGTDSMPETAENVAEQFGVSREDQDAFALKSQAKASAAQKNGRFALEISPVTLPARKGDPVVISNDEHPRETTLESLAKLKAPFRAGGSVTAGNASGVNDGAAALLIASPAAAKAFGLTPIARILGMATAGVEPRIMGIGPVPATQKLLARLGLTTADLDVMEFNEAFAAQALACTRQLGLADDDQRVNPNGGAIALGHPLGMSGARIVGTAALQLAQTGGRRALSTMCIGVGQGIAMVIERV

SEQ ID NO: 20816 - protein, 398 aa, Magnetospirillum magnetotacticum MS-1
MLDAYLYDGLRSPIGRHAGGLAPVRPDDLAAEVIRALVARSAFKPEDIEDVILGCTNQAGEDSRNVARHAALLAGLPVEVAGQTVNRLCASGLAAVLDAARSITCGEGDLYLAGGVESMTRAPFVLAKGDSAWSRDAKIFDTTIGARFANPKVVKQFGSHSMPETADNIAHDLGLTREASDSFAAASQAKYARAKAEGFYEGEIHPITIAGRKGDTVVSEDEHPRPQSDLAALAKLKPLFEGGVVTAGNASGINDGACALFIGSRAAGEKAGVKPIARIIAGAAAGVAPRVMGLGPVPAITKALARAKLSLKDLDLIEINEAFAVQVLGCVTQLGVAADDSRLNPNGGAIAIGHPLGCSGARLALTAARQLQRTGGRYAVVSLCIGVGHGLAAVIERV

SEQ ID NO: 20817 - protein, 469 aa, Magnetospirillum magnetotacticum MS-1
MVEMMENRTFAEIKIGDTASLSRTCSMKDVELFGVATGDLNPTHYSAESAEKFAHHRKVVAHSMWGGSLLSALLGNELPGPGTVYRNQDLEFSAAVEVGDTLTVTVTVTEKSAPSDILMDCKGVNQRGETVFSGRARVAAPSEKLVLPRLELNEVSLRRRHHVFEDIIARCHTLAPISVAVCHPCDQVSLEGPVEAAKLGLIDPILIGPEAKIRSVAKEFNLDITGLRIIDTQHSHESAEKAVAMCRSGEAEALMKGSLHTDEMMHEVASRDKGLRTARRISHVFVMDVPTYPRTLLITDAAINIYPTLEDKADILQNAIELAHVLGVELPKVAILSAVETVYPKINSTIEAAALCKMADRGQITGALLDGPLAFDNAISEEAAKIKKINSPVAGRADILLVPDLEAGNMLAKQLSYLADADAAGIVLGARVPIVLTSRADSAKARLASCAVAVLFAHARRAKGTVAAQ

SEQ ID NO: 20818 - protein, 109 aa, Magnetospirillum magnetotacticum MS-1
MNNPVFDRIRQDISENDVVLYMKGTPMFPQCGFSAAVVQVLTNLGVKFKGIDILVDPSLRDGIKQFTNWPTLPQLYVKGEFVGGCDIVREMAESGELKQLMADKGVASA

SEQ ID NO: 20819 - protein, 394 aa, Magnetospirillum magnetotacticum MS-1
MTTDPIVIVGAARTPMGGFQGDFASLAAPQLGAVAIRAAVERAGIKADQVDEVFMGCVLPAGVGQAPARQASLGAGLSRHTGCTTISKVCGSGMKAAMLAHDLLKADTAKVMVAGGMESMSNAPYLLDKARGGYRLGHGKVLDHMFLDGLEDAYDRGRLMGTFAEECASSYKFTREAQDNFALASLSRAKKAIAEGSFAAEIAAVSVVGRKGETLITIDEQPGKALPDKIPTLKPAFAKDGTVTAANSSSISDGAAALVMMRASEAEKRGLKPIATILGHTNFAQEPALFTTAPVGAIKALLDKVGCKAGDVDLWEINEAFAVVTMAAMHDLKLDHDRVNVHGGACALGHPIGASGARIIVTLLAALKTYGMKRGVASLCIGGGEATAMMVELT

SEQ ID NO: 20820 - protein, 608 aa, Magnetospirillum magnetotacticum MS-1
MCGICGYVGAERPGLIQAMIAEIRHRGPDGEGCDSALGIHLGHARLAILDPSHGAQPLTGADGRYTVSYNGEIYNYPDLRRELEALGHRFETTCDTELLPLGFAAWGEGLFARLDGMFAFALRDNADGRLWLVRDQLGIKPLYYSLAGGELAFASSARALTRHPQVSRRLRPDAIQEFLQFRWVRSGRHLFSDVEILPPGGVLRWTEGEARLDRFWTPARRGPARNALPRDWAAEVELVLEDSVRRQLRADVALGIFLSGGVDSAMIGHYAARNAANRLTAFTFSTGDRVDETAQAAAMARDFGFDHRVVSLTASDFADFPQAVACLDNPVGDAVVLPTWKLCREAAREVKVVLTGEGADEMFAGYAHLPILRKLDQLGSVAGVLRLLAPLIRLMPVGLLNHLFDYQASLGRLGRDAAAELLAVAGDSGKMLARASAIMGDAEMAQATTLGPPPPRPKADLSLGGLLLDLTRGWLPEEILHKMDQLSMAHGLEARVPYVTTALYDLLLRCPDQMAMGKTLLRHVASQSGLAAARRRKVAFHLPVETLWRPQLEEMCREYLSPAMIRRHAILNEAFVGRSLSLLKAGEFLASKRLVAMVSLHAWLDAHT

SEQ ID NO: 20821 - protein, 585 aa, Magnetospirillum magnetotacticum MS-1
MCGIAGLMTPGGPPDETVLDKLADALAHRGPDGRGRHVQGNVGLVQNRLSIIDLEGGRQPILDGQGNAIVANGEVYNYLELKSDMAGQAFATGSDCEPPLHLYRHQGPAFARSLRGMYALAIHDGKAEKLILCRDPFGIKPLYLAEGSPGLAFASEPQALLAAGLVKPELDPVALAELLQLQFTTGTRTIFKGIRRLAPGETVVAEEGCVAESRRLPALPAGGPNEGGLDQLLDQLDDTLTESVELHQRSDVPYGMFLSGGIDSSVVLALMARLNPRGILAFTAGFPGTKVHDEREHARDLARAVGARHVEVEFTQSDFWALLPQVAAAMDDPAADYACLPTFKLAQEARKEVKVILSGEGGDELFGGYGRYRHAMRPWPLTKSMRRKGTFDGLDVLRDGILSHWRHGMKLAERVEAMPGRTRLQVAQAVDCADWLPNDLLAKADRCLMANGIEGRVPFLDPVVAAFAFRLPDHLKVRKGLGKWILRRWLETALPASRPFEKKRGFTVPVAEWIAARPEIGHLVAHQPGIEEICHPGKVKRLFKDCTKDTGFACWTLLFYALWHQRHVLGKIPDGDAFSALAERI

SEQ ID NO: 20822 - protein, 328 aa, Magnetospirillum magnetotacticum MS-1
MPNKKPVVVVSRKLPDVIETRMMELFDTRLNVDDHPMSKMELIEAVKIADVLVPTVTDRIDAGVLSQAGPNLKLIANFGTGVDHIDLATARSRGIIVTNTPGVLTEDTADMAMALIMSVPRRIAEGERLIRSGDWKGWSPTFMLGHRIWGKRLGIIGMGRIGQAVARRAKAFGMSIHYHNRKRVHPDIETELEATYWESLDQMLARMDVITVHCPHTPATFHLLSARRLELLPKHAYVVNTARGEIVDENALTRMLIRGDLAGAGLDVFEHEPAVNPKLLALDNVVLLPHLGSATIEGRVDMGEKVLVNIKTFADGHQPPDRVLASMF

SEQ ID NO: 20823 - protein, 330 aa, Magnetospirillum magnetotacticum MS-1
MDQFDRTPLMTADSEALATARRVLATEARALDSLATSLGDAFLKAVTLIEGAPGRVVVTGMGKSGHVARKIAATMASTGCPAFYVHPAEASHGDLGMVTRDDAVVALSNSGETPELSDVIAYTRRFEIPLIGITSRDGSTLAAASDVALVLPPNPEACPMGLAPTTSTTLMLALGDALAVTLLERKGFTAADFQVFHPGGKLGQRLLKVTDLMHGGDGLPLVGTEASMADVLLVMTAKSLGCAGVIDSGGKLAGVLTDGDLRRHMSPDLLTAKAAEVMTASPRTVPPNLLAAEALRQMNERSITSLFVVESDGRPVGVLHVHDCLRAGLA

SEQ ID NO: 20824 - protein, 644 aa, Magnetospirillum magnetotacticum MS-1
MSKVIGIDLGTTNSCVAVMEGKNAKVIENAEGMRTTPSMTAFTESGERLVGQPAKRQAVTNPTSTLFAIKRLIGRRFDDPITKKDMNLVPYHIVAGDNGDAWVEARDAKYSPSQVSAFILQKMKETAEGYLGEKVTQAVITVPAYFNDAQRQATKDAGRIAGLEVLRIINEPTAAALAYGLEKKSAGTIAVYDLGGGTFDVSVLEIGDGVFEVKSTNGDTFLGGEDFDARIMDYLADEFKKEQGIDLRKDRLALQRLKEAAEKAKIELSSSMQTEVNLPFITADASGPKHLNIKLTRSKLEALVEDLVARTVEPCKAALKDAGVKASEIDEVILVGGMTRMPKIQEVVKEFFGREPHKGVNPDEVVAIGAAIQGGVLKGEVKDVLLLDVTPLSLGIETLGGVFTRLIDRNTTIPTRKSQVFSTAEDNQTAVTIRVFQGEREMAADNKVLGQFDLVGIPPAPRGVPQVEVTFDIDANGLVNVSAKDKATGKEQQIRIQASGGLSDTDIEKMVKEAEIHAAEDKKRKELIEARNHADGLIHTTEKSLKEFGDKAGAELTGAIEKEITALKAVMEKDDVEAIKAKTEDLMQASMKLGEAMYKAQEAAGGSEAEAAAGGGAHGGASGGHDDKVVDADFEEVDGDKKGK

SEQ ID NO: 20825 - protein, 180 aa, Magnetospirillum magnetotacticum MS-1
MMKIIRAKLHGIRVTNADLNYHGSITLDPEQCEMAGIYPMEFVDIWNKNSAARISTYVIFGEPGSRCCVLNGAAARTCQKGDELIIAASADISGPEKLYEIKPRILTFLPDNHVDQVLYYDVFQSEKRPYDFRIVDADKHTIESCHTWPNVDITKLRSDLAAKGWSEAEIDAFIASHFSL

SEQ ID NO: 20826 - protein, 578 aa, Magnetospirillum magnetotacticum MS-1
MNDQRNLFVAIAISVAILIGWQYFFPTAKPPVEQAAQQQAAEVKASAPANVPSPATASSPAQVPGTPAAAAQTGASRNEALGKSRRIAIQTPSMHGSIALTGARIDDITLVKYRETPAADSAEIDLMSPAESPEPYWAEFGWVATDANVKVPGPESVWQAQGTGPLTQASPVVLTWDNGEGLRFVRTYTVDENYMFGVTQRVENYGTKAASLHPYALLARTGTPHVAGMYILHEGPLGVFDGTLKEMKYDDLKKEGSARYKTTGGWAGITDKYWLTALVPPAKTEITGRFVHQRLGNADRYQVDYLAPARVIEAGKTEEAGFHLFTGAKQVSLLDGYGEKFGIDRFDLAIDFGWFYFLTKPFFYLLQMLHSALGNMGLAILALTVILKLAMFPLANKSYVAMGKMKKLQPKVQELQARYADDKMRLQQEMMALYKAEKVNPVSGCLPIMVQIPVFFALYKVLFVTIEMRHAPFYGWISDLSAQDPTNIFTLFGLIPWTPPHIMHLGVWPLIMGITMYLQQKLNPQPTDPVQAKMMQFLPLIFTFLLANFASGLVIYWAWSNTLSILQQWVIMKRAEEK

SEQ ID NO: 20827 - protein, 288 aa, Magnetospirillum magnetotacticum MS-1
MKFSSMLVFMSLWLLVVYAPICHWVWMLDEKGGAVGFLAKLGVLDFAGGTVVHINAGIAGLVACLILGPRKGYGTDNMAPHNLSLSIIGASLLWVGWFGFNAGSAVAADGRAGMAMAVTQVGAAAAAVSWMLAEWVLRKKPSALGIISGAVAGLVAITPASGFVDVKGALVIGLVAGVLCYWGATGLKHALKYDDSLDAFGVHGIGGIIGAILTGVFAVEKIGGTAGLLEGNGAQVMTQVYGVLTTLVYTAVVSFILLKAIDMVMGLRVTAEEEREGLDIALHGETVH

SEQ ID NO: 20828 - protein, 582 aa, Magnetospirillum magnetotacticum MS-1
MCGLAALFSYRADAPPPDAAELARMTGAMTRRGPDGEGVWSGAEGRVRLGHRRLSIIELGEPGAQPMIADDGKTAIVFNGEIYNYRALRLRLEQQGVRLRSHSDTEVILEGYRLLGPDILAQLRGMFALAIWDGERGGILAARDGLGIKPLYVADDGRTVRLASQVKALLAGGGIETAPDPAGHAGFFLWGHVPEPHTLYRSIRALKPGTWERWGLDGRRDSGAFFDLGAELRRPRQAPRADLKSALEDSVAHHLVADVPVGVFLSAGRDSTTLAAMAAKLGTGKVKSVTLAFEEFAGTPKDEAPLAELAARHYATEHITRRIPGGDFAACRDQILADMDQPTIDGVNVWFVARAARESGLKVALSGLGGDELFAGYDNFTTIPRIVSVLGPSGAIPGLGRGFRALAGHFVRPKLAGLLELGTTLPDAYLLRRGLFMPWELPQVMDADMARIGLEALAPRLHLKRAAAGLGDDVAAISALEMQFYMRNQLLRDADWAGMAHSLEIRVPLVDTHLLDAVLDLRAAGRTPGKADMAACADPGLPTAILERPKTGFFVPVAQWLGESSLRGWAKRVHAALCEETL

SEQ ID NO: 20829 - protein, 607 aa, Magnetospirillum magnetotacticum MS-1
MVRPHVRTGVVNPLSKQKISFDHSTWVLVRRLFNEGMRPYMGKVTAAVFCMVVGAAANAGYALLMDPVVNKIFTEKRPEFLVPLAAAVLATFAVKSVCNYGEAVFLSKVGLRVIADMQARLFAHLMRLDIAFFHANSTGRILSRLTNDISQMRFAVSDALTGAGKDASSVIFLIGAMFYQDWRLSAWTFFIFPIAILPIRKLGRRMRKVTANTQEHMGQLTTYLEQAVQGIRVVKAYGMEDYEKRKVGALVEMLQDLIYKAARVRSASSPIMELLGGIAITVVILYGGTRVVEGETTPGAFFSFITALMLAYRPIKSLAAMNTNLQEGLAAAARTFSVLDTQPTIFEKDGAPDLVVLEGNVSFEGVFFTYDGAKAVLDGIDLAVPGGKTVALVGPSGAGKSTVLNLLPRFYDVTDGHVLVDGQDVRGVSLASLRSKIALVSQEITLFDDTIRANIAYGRFGATDEEIEAAARSAAAHDFIVSLPEGYDTLVGERGLNLSGGQRQRLAIARAMLKNAPILLLDEATSALDTESERQVQTALELLMRGRTTIVIAHRLSTVVNADLIHVLDKGRVIESGDHNALIARDGTYARLYAMQFAEEATKVTGG

SEQ ID NO: 20830 - protein, 411 aa, Magnetospirillum magnetotacticum MS-1
MKFLDQAKIFVKSGDGGAGCCSFRREKHIEFGGPDGGDGGRGGDVILECVANLNTLIDYRYQQHFKAKIGNHGQGRNKTGGKGDDVVLKVPVGTQVLDEDKETVLADLTAAGQTMVLMRGGDGGFGNMHYKSSTNQAPRRADEGWPGEERWIWLRLKMIADAGLVGLPNAGKSTFLAAVTRARPKIADYPFTTLHPNLGVVTLGEEEFVIADIPGLIEGAHEGAGIGDRFLGHIERCRVLLHLIDGTEDDVAEAYRVVRHELAAYGGGLDEKPEVVALNKCDSLTADDIELKLMELTEACGQEVLPLSGVSGVGLKPILARLFVHIKEAREEEPEVPAASAIFGAGKRGAPTFQQRKRKQEAEDDEFAGGHWGADGEWIWHDSEDGDDDEDYEDEALDDEGDEEEEDDQEE

SEQ ID NO: 20831 - protein, 100 aa, Magnetospirillum magnetotacticum MS-1
MFAVIQTGGKQYKVASGDVIRVEKLAGEAGSEVVLDQVLMVGEKIGAPVVSGASVKATVVAQARGEKIIVFKKRRRQNSRRKNGHRQDLTILRITDISAG

SEQ ID NO: 20832 - protein, 638 aa, Magnetospirillum magnetotacticum MS-1
MCGFAGFLDLTQATPDRERVVRAMAATLLHRGPDDDGAWVDDGAGVALGFRRLAIIDLSPQGHQPMTSHDGRWVISFNGEIYNHEALRARLGEDIGWRGHSDTEVLLQAVSAWGMERALAEFDGMFAFALWDRQDRVLTLARDRFGEKPLYWTQSGGHLLFGSEIKALRAHPAWTGGIDRDALALYMRLGWITAPHTIHSGVFKLEPGHVMRVSEGQISTQAYWSAAECAAGVENGFTGNAEAAADRLEELLRQSVRLRMQADVPVGVFLSGGIDSSITAALMRQLSSEPVHSFTIGFDQSGLDESPHARAVADHLGTIHTEVRISDAEALAQVPRLPLLYDEPFADAAALPTALLAQVTRKSVTVALSGDGADELFGGYGIYRSIPKDWGRLRGLPGGLKSLGALGARQLAEPAEGLAALAGRFAKRRSHPGHRLRREAERLEVQSLAGLLGLHYSRWRGMPALVPGAREAQSLFSAPTPALKDDALATMVLDACGYLPDDLCVKTDRATMGASLEARLPFLALEIAQFAWSLPTGLKIEGETGKAVLRRVLYRHVPRALVDRPKMGFEVPLRRWLNGQLRDWADDLLSEDRLRRQGFLDTALVAQCWREHRSGAKNWQNEIWHALMFQAWLDSVNP

SEQ ID NO: 20833 - protein, 490 aa, Magnetospirillum magnetotacticum MS-1
MKGEVKKVVLAYSGGLDTSIILRWLQDQYSCEVVTFTADLGQGEELEPARAKARLMGIKEENIFIDDLREEFVKDFVFPMFRANALYEGVYLLGTSIARPLISKRQIEIANLVGADAVSHGATGKGNDQVRFEMGYYALKPDIKVIAPWRLWDLNSRTALLDFAEKHQIPIAKDKRGEAPYSTDANLLHISYEGKALEDPWIEPNDDMYTRSVSPENAPDKPTYVEIEFEKGDAVAIDGVRLSPAALLTKLNQLGGANGIGRLDLVENRFVGMKSRGVYETPGGSVLIVAHRAVESLTLDRGEAHLKDELMPRYAELIYNGFWFSPERVAIQTMIDKVSENVSGTVRLKLYKGVASVVGRKSPRSLYRMDYVTFEKDSVYDQRDAQGLHQAERTAHASGQDGARLSNNTYYSANIMRAPPRRGPLFLSDLIYPLYAFHGLLYYWIESTQSAWSKLCLPPPAALPPRPSPSSGGPWCYGVWPWGSSWPGRP

SEQ ID NO: 20834 - protein, 390 aa, Magnetospirillum magnetotacticum MS-1
MTDIVIAAATRTPVGSFNGSLAGLQAAQLGEIVIREALKRAGVEAEAVDEVLLGHILSAGCGQNTARQAAIKAGIPNTATAMAINQLCGSGLRAVALGFQAIKLGDANIIVAGGQESMSNAQHAIYMRGGVKMGDAALVDTMIKDGLTDAFNPIHMGITAENLAEKFQISREEQDAFALASQNKAEAAIKAGKFKDEITPVTITVKREEKLFDTDEFVRMGATLDQIAKPKPAFKKDGTVTAANASGINDGAAALVLMTAKEADKRGITPLARIAGWATAGVDPSTMGYGPVPASQKLLAKLGWKHEDLDLIEANEAFAAQAISVNKGMGWDTSKVNVNGGAIAIGHPIGASGARILVGLLHEMGKRNAKKGLATLCIGGGMGIALCVER

SEQ ID NO: 20835 - protein, 766 aa, Magnetospirillum magnetotacticum MS-1
MASNFHSEVSRNADSKGTDALERDTLLMHSSGRPGKIEVVPTKPLATQRDLSLAYSPGVAFPCLHIARDPSLAYDYTAKGNLVAVISNGTAVLGLGDLGALASKPVMEGKAVLFKRFADVDSIDLEVDTRDVEEFIAAVRYLGPSFGGINLEDIKAPECFIIEQRLRELMPIPVFHDDQHGTAIISAAGLINALDLTGRDISTVKVVVNGAGAAGIACIELAKAMGVRHENVTLCDTKGTIYQGRTEGMNQWKSAHAVPTKARTLAEALEGADVFYGLSVKGAVTPEMVASMAPRPIIFAMANPDPEITPEEVKSVRSDAIVATGRSDYPNQINNVLGFPYIFRGALDVRASTINDSMKIAAARAIAALAREDVPDEVDAAYSGRRLRYGPDYIIPVPFDPRLIASIPPAVAKAAMDSGVARKPIIDMGAYKRELSARLDPASAGMQTITEAVKANPKRVVFAEGEEEKQIRAAVAFANAGLGHPILLGREDRIRETMKNIGLPAAESLDIINSRISPRTKAYTDMLYARLQRRGALYRDVQRLVNQERNIFGSLMVQSGDADAMVTGLTRNYWQAFEEIKKVIDPTPGELLFGMTVFVVKGKLVFMADTTVMETPTPQQLADIAVQTAHKARQMGHEPRVAMISYSNFGNPSNERADRVREAVGILDSRKVDFVYDGEMAADVALDPDLLSHFPFCRLKEPANVLVMPGLYSATIASKLLQKLGGVSVIGPILVGLSKPVQITSMDATANDIVNMAVLASYDAVR

SEQ ID NO: 20836 - protein, 431 aa, Magnetospirillum magnetotacticum MS-1
MTSNSTSTKGISRRSVLASAAVLAAARAALPGGAWAAAGDAPEVKGATFGFIALTDASPLIIAKEKGFFTKYGMPDVQVLKQASWGTTRDNLELGSGGGGIDGAHILTPMPYLMAAGRVTKNNTKVPMNILARLNTNGQCISVSNAYKDLKLTTEARAFGPALAKGRAAGKEIKVAMTFPGGTHDMWLRYWLAANGIDPDKDVSTIVVPPPQMVANMKVGTMEAFCVGEPWNDQLAHQGIGFSAVTTGELWKDHPEKSLAMRGDWVEKNPKAAKAVTMAVMEAAQWCEANIEEMCKIVSGREWFKVPVEDIVARASGFINYGDGRLVEKSPHVMKFWKDFASYPFQSHDLWFLTENQRWGYQPMDLDTKALINQVNREDIWRAAAKDLAIPAAQIPTSTSRGIEKFFDGKSFDPANPTAYLKSLAIKRAAV

SEQ ID NO: 20837 - protein, 310 aa, Magnetospirillum magnetotacticum MS-1
MKILACNSNRPLAEAIAEYLTMSITKAVIRRFSDNEVFVEIHENVRGEDVFVIQSTSYPANDNLMELLVTLDALRRGSARRITAVIPYFGYARQDRKSSPRSPISAKLVANLITTAGADRVVTLDLHSGQIQGFFDIPLDNLYAAPVFTNDIRARYQGDDVMVVSPDVGGVVRARAIASRIDADLAIIDKRREKAGVSEVMNIIGDVRGRRCIMVDDIVDSAGTLCNAAEALMKAGAVSVAAFVTHGVLSGGAVARVTASPLEELVITDSIPATEAVKMARNIRQVTIAPLMAESISRISEERSVSSLFD

SEQ ID NO: 20838 - protein, 631 aa, Magnetospirillum magnetotacticum MS-1
MCGIAGIVADRPVSPGAVEAMTGRLVHRGPDDQGIWRSDDGCAVLGHRRLSILDTSAAGHQPMERDGLVTVFNGEIYNFVEVRAELVGLGEVFHTNSDTEVLLAAYDRWGPECFARFNGMFALAILDRRRKVLVCARDRFGEKPFLFAARPGLFAFASEYKALLAMAEIGRDFDPVPLLRFAHRPATGLDDERATLFPAILQLLPGERLELDLSTLDTRIDRYWTLARDPALGALGMGEAAERFRDLLTDSIRLRLRSDVAVGSCLSGGLDSGSIIMLARRLLGDDAPYHVFTGRFPGTRADEWDYARHTSQAAGAIVHQVEPSAAGLLADLPDFLWANELPVGSASQYAQYCVFRLAKEQGVTVLLDGQGADEILGGYEQYFARYLAGLPGPERGAEEAAIRARYPGALDSPRQALSKALPPRLRHWLAQISGKGSDLLFGLSPDLAEQVAKANAPPVVPQGWSPLAAELMRDSFSTHLPVLLRYGDRNSMAHSREVRLPFCDHRIAEFALSLDPKLLMGEAQTKRLLREAVKGILPEQVRTRWNKQGFLPPQDIWFAQGLIDEAERVIEDPSFARAGYWNVSWWRCAIRRFRAGETHLGWVLWRPLMLESWRRHFLERITAQPGVEALP

SEQ ID NO: 20839 - protein, 182 aa, Magnetospirillum magnetotacticum MS-1
MKRFVLIDRDGTINVEKHYLSDPDQLELYPGVGRAIRRLNMLGLGVAVVTNQSGIARGYFDLERLDQIHNRLYTLLESEGAMVDGLYICPHGPDDDCACRKPLPGMVSQAVAEHHFDPAQSFMIGDKEVDVELGHAVGAVSILVRTGHGPKFVEGTKADYVVDDLPQAVAVIEKLLACASSS

SEQ ID NO: 20840 - protein, 637 aa, Magnetospirillum magnetotacticum MS-1
MCGLAGLFLPRHAALAEADIAAMLRVMRHRGPDGTGIHLSDDRRFQAGFTRLAIIDLATGDQPLVRNGGETVLLGNGEVYNYRELRAELAAKGHTFLTQGDMEAALESFMAKGRDFVHDLNGMYALAILERDDHRLTLVLDRLGIKPLYWARLGNGGILFASEIKALFASGLLRPLVDEVSVAAYLAHGYVPAPATLYKGVSKLPPGSIMSVDASGEVQIERYWRAAAATDLPGDEAGIRAHLVSILDDAVGLQLRSDVPVGAMLSGGLDSGLLVALAARRLDRPLKTYTVRFLGARVDETPLAAQVAERYGTDHTVFELETGSAAQLLPRLVWHADEPLADASLLPNHLINEVIGKETRVVLNGTGGDELFGGYGRYFQLPVEARWLRLPRPLRKAAEAMIGLGNPFLAWQLARAEKFGRDRGGYLHDHCALFPPPMAKLLGCTLPWPIPAQAAFADEYAGPLDSAALYAELNTYLPEDLLTLLDRTTMAHSVEGRVPLLDHRMVEAALAVPPHIRNPGGRQKALERAIAAEYLPDSLLSAPKQGFASPVPAWFESGGLAPLARRLLTSRRALERGWWSREGVERLLAQPGRHAFRLYSLLVLELTVRIHVEGAFAEAPAFGLAEMAEGEDAPCAA

SEQ ID NO: 20841 - protein, 319 aa, Magnetospirillum magnetotacticum MS-1
MKIAVASRSFSKHPVLRAELLERFSDATFNDAGVSLSGEALVAFLDGHDGAITALERLDGPLFDALPRLKLIGKYGVGLDMLDLEAMRSRGVRLGWTGGVNRRSVSELVICMAIALLRHVPKGNLEVRAGGWRQLQGRHLSERTVGIIGCGHIGKDLTLLLKAFGCRVLAHDIRDFSEFYAAHGVEKVGLEDLLAQADVVTLHLPFDATTANILSAERLALMRPDAVLINCARGGLVDEAALKAMLTEGRLAAAGLDVFNGEPPTDRELLNLPNFLATPHIGGSAEEAVLAMGRAAIAGLSQAEIPEAGSEVWRAAGLA

SEQ ID NO: 20842 - protein, 615 aa, Magnetospirillum magnetotacticum MS-1
MCGIAGFVGDGDRDILAAMAGAIAHRGPDGEGLWIDPERAVHLAHRRLAVIDLEGGAQPMWSGDGRIGVVFNGEIYNHRALRRDLESLGHVFASDHSDTEVLIHGWRQWGRDLPGRLNGMFAFAIHDRERGSLFLARDRFGEKPLYVVERPGLFAFASEISALLRHPGVPAEADALAIRKFFAYCLFPAPHTPFKAIAKLPAGHWLELSLSGLTTERGCYWRFAIEPEETGRSETELAEELRALLDASVRDRLESDVPLGIFLSGGIDSSAMLALAARHRPAASLDGFSIGFTEASFDESAFARRMAAEVGCRHHVETCDLDAARRDLPDLLARLDEPSGDPSILPTSLLCRFARRSVTVALSGDGGDELFGGYDPLTALAASRRYRALVPGAVHPAIEALAGLLPPSDANMSLDFKIQRWLRGVGREPSMWLPGWMGALSPSEIDQVFGSRLAPEELYSEAIERWEACASPDPIDRALDYFTAFYLQDGILTKSDRASMQVALEVRAPFLDNDVADFARRLPSRFKVAGGQRKVLLKKAVRGLVPDALIDRPKKGFGIPLARWLRDMDPPTAGTPLLDDAWLRQRWERHRTKRQDCRHGLWCWLALERRFSTVN

SEQ ID NO: 20843 - protein, 380 aa, Magnetospirillum magnetotacticum MS-1
MIPFHDRPFAEYLVEMLRGQGFRRILFLLGYLPDKVTEHFGDGSRFGVEIEYAVSPVEDETGTRLRRVKDRLDDIFVLLYCDNYWPMPFAAMWERYCRLGVEAMVTVYRNRDGYTRDNLRVDDDGLLALYDKSRTAPGLAGVDIGFFILTRAVIDLIPEGGNPSFEKSVYPVLVERRQLAAFETDHRYYSVGSHERLPLTEAFLARNKTVLLDRDGTLNLRMPRAEYVRSWADWQWLPGAREALAELARADYRIILITNQPGLARGALDQAALDAIHGRMIEETQAAGGRIDHIYYCPHNWDEGCDCRKPRPGMLFQAQRDFHLDLSRVTFIGDDDRDGEAAQAAGAPFLQVTESYSLLDAVHDLLAADHSNPVTGKCPD

SEQ ID NO: 20844 - protein, 311 aa, Magnetospirillum magnetotacticum MS-1
MTWQVLISAPYMIPVIDRFRPWFAEHDIEITVADVQERLEEADLLPIIAKYHGIVCGDDRITKTVIDAAANLKVISKWGTGIDSIDSAYAATKGIPTGRTLDAFTQPVADTALGYILSFARNLPWMDKMMKAGIWDKIPGRALNESTIGVVGVGCMGSAVLRRAKPFGARLLGNDIRTIDPAFVAEVGVEMMDLDSLLEQSDFVSVCCDLNPTSYLLFNDERFKRMKAGSVLVNTARGPVVQEEALVRALQSGKIVGCALDVFEHEPLPKTSALLGMDNVMLAPHNSNSSPKAWERIHHSTLKNLLDGLRG

SEQ ID NO: 20845 - protein, 392 aa, Alcaligenes sp. SH-69
MEDIVIVSAARTAVGKFGGSLAKTPATDLGAIVIREAIARAGLSSDQIGEVIMGQVLAAGVGQNPARQASMKAGVAKETPALTINAVCGSGLKAVMLAAQAVAWGDTEIVVAGGQESMSLAPHVLPNSRDGQRMGDWKLVDTMIVDGLWDVYNQYHMGITAENVAKQYGITRDMQDALALACQQKAAAAQDAGKFVDEIVGVSLAQKKGDPILFNTDEYLNRKTNAEALAGLRPAFDKAGSVTAGNASGLNDGAAAVVVMSAKKAAALGLKPLARIAAFGTSGLDPATMGMGPVPASRKALQRAGWNAADVDLFELNEAFAAQACAVNKELAIDPAKVNVNGGAIAIGHPIGASGCRILVTLLHEMQRRDAKKGLAALCIGGGMGVSLAVER

SEQ ID NO: 20846 - protein, 472 aa, Oceanobacillus iheyensis HTE831
MKLDQSYMPFVDHLRNFSSKRPVSFHVPGHKHGAVFPEAARELFGSILSVDVTEIAGMDDLHAPSEIIAEAEKLATDYFNSDHTFFLVGGSTSGNLAMIMAACNPGDEVIVQRNCHKSIMNGLELAGAKPIFIAPEWRDDLQRYTAPTYDSIKQAMLRFPNAKALILTYPDYFGAVFDIQSMIELAHTYHIPVFVDEAHGVHFSSSEMFPQSALQLGADVVVQSAHKMAPAMTMAAYLHIGTSRVEKHRLAYYLQMLQSSSPSYPIMASLDVARFYLAQLSKEKIRGILNSVENVRNIFSGASFWELVPHDDPLKLTFHVKHGYKISEIESMLEYHGIYPELTTENQFLFIHGLAPFVEQDYLKKTIQLIEEELKKSVKHATIEGAKLFTNPIEELALSYQEMKHITSLLVPFAQSEGEIAAEAVIPYPPGIPVILKGERITKAHITKIQLLIQQGVTIQQREEGIRIYRKA

SEQ ID NO: 20847 - protein, 317 aa, Oceanobacillus iheyensis HTE831
MTSSYKDSSLKVFSLNSNPELANEIATHIGTNLGKCTVSKFSDGEVQINLEESVRGCDVYVVQSTCAPVNQHIMELLIMIDALKRASAKSINIVMPYYGYARQDRKARSREPIAAKLVADLIEKAGANRVITLDLHAPQIQGFFDIPIDHLQGVPILSSYFEQKNLDDVIVVSPDHGGVTRARKMADRLKAPIGIIDKRRPKPNVAEIMNIIGNIEGKTAILIDDIIDTAGTITLAANALIENGAKEVYACCTHPVLSGPAIERIDNSKIKELVITDSIPLPDEKFSTKITALSVAPLIGEAIIRVHEMQSVSILFD

SEQ ID NO: 20848 - protein, 675 aa, Oceanobacillus iheyensis HTE831
MSQVFRNALFWLLIFFVIIGVIGVINNQGEEREQYDVEQFISALNNGEIEELVFQPSHGIIRLTGTLTDGETEFVAQVPDNNDLVSQITDTAREQSQLTVMEEEQPSPWLTFLTGIIPFLLIGLFFLFILSQAQGGGGGGRVMNFGKSKAKMYSEDKKKVRFKDVAGADEEKQELVEVVEFLKDPRKFSQVGARIPKGVLLVGPPGTGKTLLARAVAGEAGTPFFSISGSDFVEMFVGVGASRVRDLFENAKKNAPCIIFIDEIDAVGRQRGAGLGGGHDEREQTLNQLLVEMDGFGANEGIIIIAATNRADILDPALLRPGRFDRQIMVDRPDVKGREAVLGVHAQNKPLDANVDLKTIAMRTPGFSGADLENLLNEAALIAARDDRKKLNQLDIDEAIDRVIAGPAKKSRVISQKERNIVAYHESGHTVIGMVLDDADVVHKVTIVPRGQAGGYAVMLPREDRYFMTKPELFDKITGLLGGRVAEEIIFGEVSTGASNDFQRATNIAHKMITEYGMSDKIGPLQFSSGGGGNVFLGRDIQNEQTYSDAIAHEIDKEMQSFINYCYDRAKTILTENKDQLELIAKTLLEVETLDAKQIKSLFEEGILPEPEEETDELKVNINSKEDEDKKGISYEEAKQKLDDEEKSEREEIDSENTSSDETQDDTSEDQNPKN

SEQ ID NO: 20849 - protein, 406 aa, Oceanobacillus iheyensis HTE831
MSNTTVLLDKKTTEIIKATVPVLKEHGEAITKHFYKILLENNPELKNVFNQTNQRKGAQSKALANTVYAAAANIEKLEEILPHVKQIAHKHVSLNIKPEQYPIVGKYLLIAIKEVLGDAATDEIIEAWEKAYFVIADIFISVEKEMYNEKKNQIGGWTGFRDFKVIKKVKESKEITSFYLKPDDNLPITTFIPGQYITIKAQIESEAYVHLRQYSLSTAPGKDYYRISVKREASNQPIGVVSNYLHTSVEVGSVLPISAPAGDFILDERDHRPLVLISGGVGLTPIMSMLESVVEHQPNRNVVFIHAAKSIDHQAMRKRVSEIAKSKEQVKQYVVYSNPTNRTDGDKQGYIDYEWLKEVIPTKDAAFYLCGPKPFMSAINNDLQNMNIAQNDIHMELFGPLEPIAK

SEQ ID NO: 20850 - protein, 369 aa, Oceanobacillus iheyensis HTE831
MSERIFISPAKYVQGKNAIQRIGEYVKDIGNQAIVIADENVWEIAANDVVKNLKEESIEVEEVVFNGEASKAEMERISKIADESNSTVVVGVGGGKTLDTAKAVSDEVKGQTVIVPTTASTDAPTSALSVVYSDDGVFEGYRFYDKNPDLVIVDTKIVAGAPKRFLASGIADALATWVEARSVIENKGKTMAGGITTIAGQAIAEKCEETLFNYAELAYESVKAKAVTPALENVVEANTLLSGLGFESGGLGAAHAIHNGFTALEGEIHHLTHGEKVAFGTLVQLALEERSKEEIERYIKLYIALDLPVTLEDIKLKDATREDIMKVAEAATVDEETIHEAFNVTADDVADAIYAADQYSRSYKEKHQK

SEQ ID NO: 20851 - protein, 256 aa, Oceanobacillus iheyensis HTE831
MKKCRIKEMLETSKVDECNMNILIVEDDKTIATGLEYSLKQEGYDVVVCHKVQEAQRKINNDLDDISLCLFDLSLPDGSGYELCEMVKRKADIPVIFLTVVDDEVNVVMGLDMGADDYITKPFRIRELISRIKTVLRRYEKSKPNKEQLSSVISIGSINIHTLEGKVYKETEEILLTALEYRLLMIFVNHRGQVLSRKQLLQLIWDIAGDFVNDNTLTVYIKRLRKKIEEDAQHPTVIETVRGMGYRMVDTHDKKQ

SEQ ID NO: 20852 - protein, 505 aa, Oceanobacillus iheyensis HTE831
MKKVTNVFYFAVILVGIMVALGAIFPVKFEQISQSVQAWVSSTFGWYYLLLMSVLVAVALFIAVSPYGNIRLGKDSDRPDFSNISWVAMLFAAGIGIGLVFYGASEPLAHFMIDAPLSEPGTAQAFKEALSHSFFHWGIHGWSMYGLVALAIAYFQFRKDEPGLISVTLKPLFGDRMNGGFGKAIDALAIFATVVGVATSLGLGAIQINAGLSHLFDLPVNIGVQATIILIVTVLFIISAWSGLNKGIKTLSNINLILALILFIFVLAVGPTLLIFNMFSESIGLYFQNFIQMSFRSAPLASDNRAWLDIWTIFYWAWWISWAPFVGIFVARISRGRTIRQFIFGVIIVPVLVISAWFTVFGTTAGDMQQQGIVDLTQFPTELVLFNMFDYLPLSTIISLLAIFLLVIFFITSADSATFVLGMQSTGGSLSPPNSVKVALGLSISAVALILLYVGGLSSLQNTVIVAALPFSFVIILMVISLYKALKEDAYIKKRKTSLKKNEEA

SEQ ID NO: 20853 - protein, 577 aa, Oceanobacillus iheyensis HTE831
MEKGQRNNKAFLSLILTANIPKFVLALGLIGSIITTLVGLTIPLLTRELVDGFSLTSLTLNFILLIIGIFVLHALIDGFSTYALAYVGQRVVAYLRESIWQKMIRLPVRYFDQQPSGESVSRVINDTGIVKDLVSQHFPQFISGLISIIGAVTILLIMDWRMTLMMLVAVPVTVIVMIPLGTRMSKVSRKLQDETASFQGDIQQTISEIKLMKSSTAEESEKQKGLKGIGNLLRTGLREAKIFSVIGPFMYMVVMLVIVVIIGYGGIRVEEGTMTTGALVAFLLYLFQITFPITTFAMFFTELQKAKGATGRIVEILDVDIEETHKGIDKNIDKEALQFCDVSFSYENGEEVLKNISFQANPGEMIAFAGPSGGGKTTVFGLIERYYQPDKGEILIGSQPINEVSMLSWRTQLGYVSQESSMMSGTIRDNLTYGLQDADEISDNQLWEVAEMAYADQFIKELPNGLNTEVGERGTKLSGGQRQRINIARAFLRNPKLLLLDEATASLDSQSEQVVQKALQRLMEGRTTLVIAHRLSTIVDADQIIFIEDGQITGKGNHQELIGTHQLYRQFAEQQLT

SEQ ID NO: 20854 - protein, 516 aa, Oceanobacillus iheyensis HTE831
MRSQDKKELDWPVFYISGGFLILFIILSLLSKDKVGEWVNTLFTYSSDWFGAYWQILLLLNFLIGLGLAVSKYGKVRLGKMDKPKYSYFGWVSMILVTLLASGGVFWAAAEPMYHYMDTPPLFGGGEFNYLDGAMAQAFVHWGFLAWAILGTLAVVVMMYVHYHKGYPLKPRGLLYPIFGERIFEKSVVGTLADSFSIIATVAGTLGPLGFLGLQISYGLNHLFGVPNTLVISMLVVLGLVAVAAISAATGVDRGIYHLSNWNVQFTILLALIVFLVGPTTFILDAFIGGTGVHLQNFFTMNLFRGDEGWLSGWTIFFWGWFIGYAPMLIVFISRISRGRTIRELIIAVSVVAPLVTNFWFSVVGGTGIFFENENSGSVSNALTEGGMPAAVMAITDQLPMGIIFGVGFLLVSIIFVATTTDTMSYTVAATLSGHDNPKRWLRVFWAIIFGATTAVILTIGEDSITSIQNSIVITAVPVSFLLLPPLWNAPKIAKKMALEQGLIWQREMNKKVDKD

SEQ ID NO: 20855 - protein, 469 aa, Oceanobacillus iheyensis HTE831
MNDSDKLLKSLGKKETFALAFGAMIGWGWVVTSGLWITEAGALGAIIAFLLGGLLVVFVGLTYAELSSALPFVGGEHVYTYKAMGRVTSFIATWAIILGYVSVIAFEAVALPTVFEYLVPNYSQGYLYTIAGWDVTLTWAGVGIIGSVLVAWINYRGIKLSSIINFILTILILIAGIMLITGSTFSGNMSNMNPLFETGMTGIMTVLMMTSFMFVGFDVIPQAAEEINLPNKKIGQLLILSVVVAVIWYIAIIFGVSRMLTPSEINASNLVTADAVAKAFGNSEMMGNFLVLGGIGGILTSWIGFYVGGSRAIYALAKAGMLPKSLGQLHPKYNTPHKAILLIAVLSTAAPLLGRPALVWLVNAGGLGLVVAWLMVTISFIILRKKAPEMQRPFRLPGGTTIGWIATIMAIGVTILYLPGMPSALIWPYEWLIIGTWIILGFVLYNYSMRKYGKKNTDDYMKKEVNKSA

SEQ ID NO: 20856 - protein, 478 aa, Oceanobacillus iheyensis HTE831
MNWEAVIPLFLLIFIIFLVGMWSSKFVRNTDSFVQEYFLGGRSLGGFILAMTLVTTYGSASSFLSGPGTAYNEGLGWVLLSMTQLATGYFVLMVLGKRFAIVTRKYKAVTIVDFLKERYQSKWVVLLSSFSILIFLFSAMSAQWIGGGRLIQSLTGMSYLSALFIFSAAVLIYVIVGGFRAVAITDGIQGIIMFLGTLILLIAVIVAGGGVPQIMEDLRAENMNLITPFGADGGLTPAFVSSFWILVGVGVIALPQIAVRAMSYKNSRSLHRAIIISTIVVGFIMLNMHLIGVLGRPVMPGIEVGDTVMPLLAQEVLPGWLAGIVLAAPMAAIMTTVNSLLLMVSSTIIKDVYLNYIEKEATDKKVRGLSMGVTALIGVIVIVMSLQPPDLIIWLNLFSMGGLEAAFIWPIVLGLYWNRGNKYGAIASMITGVSSYIIFESFFPQPFGMHSVVTSITIALIAYIIGSLSKQHPVSQMS

SEQ ID NO: 20857 - protein, 65 aa, Oceanobacillus iheyensis HTE831
MTGKVKWFNAEKGFGFIEREDGDDVFVHFSAIQADGFKTLEEGQDVEFEIVEGNRGPQAANVVRL

SEQ ID NO: 20858 - protein, 298 aa, Oceanobacillus iheyensis HTE831
MLSANTTTIGFIGTGVMGKSMAKNLLNAGYSIRIFTRTKSKADDLLNIGAKWDKDIPTLAKQCDVIITMVGYPSDVEEVYLGEQGLIKNCNKGSYLIDMTTSKPSLAEEIFSVSEKHGLHVLDAPVSGGDIGAESGTLAIMTGGERSVYDYVLPIFQVLGENISYQGPAGTGQHTKMSNQIAIASNMIGVCESLLYAKKAGLDPKKVLATISTGAAASFSLSKLGARMLENDFNPGFYVKHFIKDMRIALESSQAFGLDTPGLKLAIDLYEQLSDMGEQDSGTQALIKALAYRSEMTL

SEQ ID NO: 20859 - protein, 516 aa, Oceanobacillus iheyensis HTE831
MKNIKKQNQTIDKPVLFLSGGALLAFVILALINKEMVTDAVNTMFNWSVTYFGSIYQVLMVGTLIIALILGYSKFGKIRLGKLEKPEIGTFKWISIIMCTLLAAGGVFWAAAEPLSHFLTVPPHFTGIEAGTPEAIVPALVTSFVDWGFVSWAILGTLGTIVLMYSHYHRNAPLKPRSLLYPIFGDKIMKKSALGTFVDAFSIVSVAAGTIGPIGFLGLQAGYGLTALFGLPNNLLMQCIIVAVIVLAAGISAATGIHKGIQILSSYNIILAVGLMIGVLILGPALFIFDNYVQSFGMYVQDFLTLNTFRSDGAWLGLWTIFFFAWFIGYGPMMAMFVSRISRGRTIRELVTAVAVIAPVVTTFWFTVVGGTGIFSEMNSPGSVSDALNSAGPPAAMIAIAEQLPFGTIFGFLFLLATIIFVLTTTDSMSLTISMAITGHGDPAKYLRVIWAILMGVVAIVLITLGEDSVGSLQSFIVVTAVPVSLLMLTTFWTAPRVSRELAKEQKIDEKQSYTK

SEQ ID NO: 20860 - protein, 391 aa, Oceanobacillus iheyensis HTE831
MNRGRDAVIVSAVRTAIARQGGALATVPAHVFGAEVIKESVKRAKVDPELIDDVIMGNVLSGGGNIARLAALQADLSLHLPGLTIDRQCGSGINAIVLAQQAIQSGMGDIYVAGGMESMSRAPYLMDRPDKAFSPVPPTIRKSKLSPEHIGDPPMGITAENLAKKYNISREEQDEYALSSQQRMEEAMREGRFKEQIVPISVPLRKEAAIVFDTDEHPRPNSTMEGLKKLPPAFVKEGTVTAGSSSGLNDAASALVIMSREKAEELNLTPLAIVRNAAVAGVDPNVMGIGPVPATQKLLRKANLSLRDIDLIELNEAFAAQVIACDRELAFNRNKLNVNGGAIAHGHPLGATGAILITKMVYELQRIGGNYGLVTACIGGGQGISALIERE

SEQ ID NO: 20861 - protein, 328 aa, Oceanobacillus iheyensis HTE831
MIKNNTQKYIVIGLLMVAILFPLFTQNNYYIHVMTLSFIWMIAVYGLNILAGYTGYLSLAHAGFFAIGAYALGLLTVKAEVGFWLALILAPIITTIIGFGIGLIALRTKEHFFAIYTLCVGYVIYLLIDKWDSLTEGVRGLMGIPLPSDIGPISFESNIAQYYFILIVLLFSIFVIYRIVNSIVGKKLIAIRNSEQLALSLGISTKKNKLLAFVLSTFFAGLAGALYASFIRFLGPDIGSTNITFDLLMYLIVGGIGTLSGPIIGTLLVVWLSQNLQFLQDYRMLIFGPLLALLIIFSPRGIVGMFSSMKQNIQQKRDLRQKQLKKEA

SEQ ID NO: 20862 - protein, 394 aa, Oceanobacillus iheyensis HTE831
MEDPIVIVSAIRTPIGAYGQSLKNISSGFLASHVVKESLRRVNLPADHIDEVILGEVRQSTESSNIARVAALRAGIPEQVTAFTVNRLCASGIQAVTSGVQQILSNQADIVVAGGAESMSRSPIYLRNTRFGGDRTTIVDSNLEAGQQPPEIYGKSLSMGITAENVARKYKISREDQDAFALESQHRAKKAIETGRFKKEIAPIEVKEKKQTSVFAVDEYPRLDTSLEKLASLKPVFEADGTVTAGNACGRNDGASALVIMKESRAKHLGLKPLARIIDWSTAGVSPEMMGIGPVPAVNQLLKRTNKTLQDIDLIELNEAFASQSIAVIRQLGLDYEKVNVNGGAIALGHPVGATGTRIITTLIYELIRRKQQYGIATLCAGGGQGMAILIEQC

SEQ ID NO: 20863 - protein, 284 aa, Oceanobacillus iheyensis HTE831
MDDNGNKESTNQTKETKEIPERQFLFPVQVMQSFSNKGKEHLDTNTPSQLVLALKAGSFMTFGAVFSVLLAIGVDAKGLTYILQGIGFTAGYLMVFMSQSVLFTEVNVLLPTYYLQKSYWIKHKFIKFWAVAYIGNLIGALFVALLIIISNSLTPEFSKELETLISHKMKFADYGWAGWFQVLLSGILANWLIGMATFLTTSARDVVGKILGTALPVILFVAGNFQHSAANMGYFSLGILTSDNYAWYEYILLNLIPASIGNIIGGAIFISLLFLYAFRKEMRS

SEQ ID NO: 20864 - protein, 584 aa, Oceanobacillus iheyensis HTE831
MSSIKQYMEFVKPYKWKIVLTLLIGVMKFGIPLLMPLILKYVIDDIISVEGLSQSEKISQLFWVMGISFVIFLVLRPPIEYIRQYLAQWVGNKILFDIRGKLFDHLQKLSLKFYSQTKTGEIISRVIHDVEQTKNFVITGLMNIWLDLTTILIAIVIMLTMNVQLTLVSIILFPLFGFAVKYFFGRLRKLTRERSQALAEVQGHLHERVQGVPVTRSFALEDYEQEQFDKRNSNFLDKALRHTDWNARTFAVTNTITDLAPLLVIAFAGYQVITGVVTLGTMVAFVGYMERVYSPLRRLINSSTTLVQAIASIDRVFELMNEKYDISDKQDAVDPGRLSGKVEFEHVSFQYDEEELPVLKDVTLQVDKGETIAFVGMSGGGKSTLISLIPRFYDVTNGSVKIDGTDIRDYESRSLRDNIGMVLQDNILFSESIEMNIRMGNPEATDEEVIQAAKAANAHQFIESLPQGYGTMVGERGVKLSGGQKQRIAIARVFLKNPPILIFDEATSALDLESEHLIQETMERLASDRTTFIVAHRLATITHADRIVVVEDGQIIESGSHDQLMKLQGHYYDLYQIQYLEEDN

SEQ ID NO: 20865 - protein, 66 aa, Oceanobacillus iheyensis HTE831
MNTGSVKWFNAEKGFGFIEVEGGDDVFVHFSAIQGEGFKTLEEGQSVSFDIEEGNRGPQAANVVKN

SEQ ID NO: 20866 - protein, 456 aa, Oceanobacillus iheyensis HTE831
MLKKSFLIFTALLLLATPVYAATPTPESLELSVNLIWVMLGAFLVFFMHAGFAMVESGFTRSKNTLNILMKNFLTISVASILFFLVGYGIMFGSSAGSIIGSDGFLLSEISEIDFFVFQAMFVATCATIISGAVAERIKLGSYILIVAAMTTIIYPVVGHWVWQGDGWLTSLGFSDFAGSTVVHLTGAVGAFVVVLILGPRIGKYKGKKVNVIQGHNLPLGALGVFILWLGWFGFNGGSTLAADPSLVPYVIGTTLLSTSAALVSSSLYTKLRFKKVDASLSMNGVLGGLVGITAGAAEISLGGSIIVGLISGVVLVEGIRFLDTKLRIDDPVGAIAVHGICGIWGTLAIGLFSVNTGLFYGNGISQLGIQAIGVLAVVAWVAITAGGFTYVINKISQIRVSEEEEISGLDFAEHGSSAYNFKESLLEGTDNNSSSGLAERLNNNIPIGKTSNQSS

SEQ ID NO: 20867 - protein, 496 aa, Oceanobacillus iheyensis HTE831
MKSVTSVFWYSLALCIIVVLWGSFAPSNLEGFTSNVTTFISDTFGWYYLIIVMLMLIFCVYLIFSKYGKIKLGKENDKPEFSLLSWFAMLFSAGMGMGLVFWTTAEPISHAFTSSPGAELGSEQAINDGLKYSFFHWGVHAWAVYGIVALVLAYFKFYKDTPGLISATLVPLFGRNSMQGPAGKIIDTLAVFATVVGVAATLGFGSAQISGGLSYLFGTPGTFWMQLLILVIATILFICSAWSGIGRGIKYLSNINMGLAFILLLMLFLVGPTLYILNMFTHTLGSYVSDFFDMSLRLAPQDGEQRTWINNWTVFYWAWWISWSPFVGIFIARISKGRTIKEFMLGVLLVPAIVCFIFFAVFGVSALNLEQNGIATISEFALETSTFGVLNEYPLGMIMSIITLFVVAIFFITSADSATFVLGMLSTGGTINPKNAVKIMWGLMQSAVAAIIVYFGGTQGLQNMLIIAALPFSIVIILMGVSFFKSARKDQRHWRK

SEQ ID NO: 20868 - protein, 178 aa, Oceanobacillus iheyensis HTE831
MKMDIQAVFLDRDGTIGGDDKVHYPGDFKLYANSKMDIDYLKKFVQVFSFTNQPGISFGEVNKEDFYNELMGFGFDDVFLCPHHYKEGCNCRKPHPGMLKDAAYKYQLNLNHGVVIGDRWSDMVAASKTNSVRILVKTGAGMSTLHEHFEKLKGIEIDFVAENLTEAVNWIRGRYHLS

SEQ ID NO: 20869 - protein, 383 aa, Oceanobacillus iheyensis HTE831
MEHLLNQQVQNIEISGIRKFFNLVSNEKDIVSLTIGQPDFYTPHAIKQASINAVNNNHTTYTANAGVIELRKAIANYYESRYQIPYHPESEIIVTAGASEAIDITLRTILEPGDEVILPAPIYPGYEPLITLARAKPIHMDTTKTNFKITKSQLEETITEKTKCIIIPSPSNPTGAAYTKKELDEIVSVLKDKKLFILSDEIYSEIIFDQPHVSIASYPEMRDQTIVINGLSKSHSMTGFRIGYALAPHWLSKHMLKVHQYNVSCASSISQYAALEAFNSNDDHLQLIKDTYKSRRDLVYNRLTSMGIDVQLPEGAFYMFPRFPMRNENSFEFGLTLVKQAKVALVPGNSFSQYGEGFMRLSYAYHEDVLNKGLDRIEKFLNQ

SEQ ID NO: 20870 - protein, 582 aa, Oceanobacillus iheyensis HTE831
METFKKLKRFYWPYKKYFIWSILFMLVVTSITVVYPIMLQITIDDVVVQSRYELIPWICGLFLGLMVIKGFSTFSFQYLGDLFGMTSVYKLRESLYDKLQTLAFKYYDNAKTGDIMSRLTADVEGFRFFLSVGFAELLRIISLILISLSIMFYYSVPLALVTMAAMPFLAIVVFQFDKRVHPAFRNVRKSFGQLNTRVQENISGMNTVKSLSREDFEIGRFSNSNDNYRQKYLFTSKLWARFFPMMEFIGNVSAVVLLAYGGYLVINETMNPGELVAFFSLVWYIMGPLMNLGFIINQFSQAKASGERLLEILEAKEDIVEKESAIETTIKGHVEFNDVTLTYIKDDDEALKNISFDAPPGKTIGLIGATGSGKTSITQLITRFYEPEQGEVLLDGRPVSDYKLKTLRSQIGFVLQEPFLFSTTIRENISYGNPEVTEDQIVQAAKMAQAHDFIMELPNGYDTLLGERGMGLSGGQKQRIAIARAICIDPSILILDDATSAVDMQTEFKIQKALREVMKNRTSFIIAHRISSLKHADEILVLEDGEIVERGTHDDLVNNNGPYERIFNIQYQDREEILSAVK

SEQ ID NO: 20871 - protein, 411 aa, Oceanobacillus iheyensis HTE831
MQVMVQKFGGTSVQSSENREHVIRHIREALVQEYKLVVVVSALGRKPDPYATDSLLGLVDFPTNTNSSRELDLLMSCGEVISSVVLSNELQKNHISAVALTGAQAGFVTNEDFNRAKIKEVNPTRILKELETHDVVVVAGFQGQSESGEITTIGRGGSDTSAAALGVALSAERIEIFTDVEGIMTADPRVVKNARPLDVVTYTEICNLAYQGAKVIHPRAVEIAMQGKIPMRIRSTYSEQLGTLVTSSRVHELGMDIPDRMITGIAHISPVTQIKVQTKESAYRVQSEVFKAMAEAGISVDFINISPTGVVYTVPDTLTTKAIEILEMLGFHPEVTKGCAKVSAVGAGMSGVPGVASKIVQALTDSGVQILQSADSHTTIWVLVHNDDLITAVNALHDVFGLSITEELLES

SEQ ID NO: 20872 - protein, 440 aa, Oceanobacillus iheyensis HTE831
MKHFQNFKWHNWSSTSNCSPERMYYPRSIEDVIEIVKAATENQQKIRVVGAGHSFTNLVMTEDWLVSLDYLSGVKEVDHKNHTVTVYGGTRLYDLSKALEKLGYAQENLGDINVQSIAGAISTGTHGTGIQFGSISTQVKEITFVTAGGNLLRLNEENNVEEFKASLISLGMFGIIIEAKIRVVPSPVYRYISNHVYYPTLLNNLETYIQDNQHFEFFMFPYADQVQTKTMNPTNTSPKSIKRHQWNNLIVENYMYQAVSHLCLLYPSLTRSVSRLSAKLVSKSTIDAKSYQLFATPRKVRFLEMEYGIPIEYFHDAIQEIRETIVKNQYKVHFPIECRTVKQDDIWLSPSYKRDSAFIAFHVYKGMEYQTYFRDMEAIMKKYNGRPHWGKLHQQKAKDLCEMYPKWDQFIQLRQQLDPERMFVNRYLDELFYTEEKVKV

SEQ ID NO: 20873 - protein, 66 aa, Oceanobacillus iheyensis HTE831
MENGVVKWFNAEKGYGFIQLEEGNDVFVHYSAIQEEGFKSLEEGQEVSFEIVEGERGPQAANVVKK

SEQ ID NO: 20874 - protein, 394 aa, Oceanobacillus iheyensis HTE831
MELAQRVQTLTPSSTLAITAKAKDLKKQGFDVIGLGAGEPDFNTPEYIMDGAKQAMNNGLTKYTPAGGIAELKLAIIDKFKQDNGLSYNEKQIIVTNGAKHALYTLFQVILNKEDEVIIPSPYWVSYPEQVKLAEGNPIILPAAETNDFKITPTQLEEAITPKTKAVIINSPSNPTGLMYSKEELAALGEVCLKHNIIIVSDEIYEKLIYTSKEHVSIASISDELYNQTIIINGVSKSHAMTGWRIGYAAGNETIIKAMTNLASHSTSNPTSIAQYGALAAYTKDPGDISLEYKKIFAERLDAFYKLIQDIPGMECIKPEGAFYLFPNAKKAAEMNGFATVDEWVAALLEEEKVALVPGSGFGSPDNVRLSYALSIEELTEAANRIHRFVLNHK

SEQ ID NO: 20875 - protein, 127 aa, Oceanobacillus iheyensis HTE831
MYRTMMKSKIHRAVVTEANLNYVGSITIDEAILNQVDILPNEKVQIVNNNNGARLETYVIAGERNSGTICLNGAAARLVQPGDTVIIIAYALLSQEELQSFHPKVAIMDESNRVKQMIEQEPPMTVL

SEQ ID NO: 20876 - protein, 464 aa, Oceanobacillus iheyensis HTE831
MKVAKFGGSSVANAEQIQKVANIIKADPSRKVVVVSAPGKRFKDDVKITDLLIEFAGSHQRKQFEQSEKTLTIIMDRFKEIVDNLNLHTSIIDDIKQTIEEDLNKDLSPNQLLDAIKAIGEDSSAKIVSAYLQHIGIDATYMNPKDAGIYVSNEPGHAQLLPESFPIIKKLRDIDKVVVIPGFFGYAENGELVTFSRGGSDITGSILAAGTKAELYENFTDVDSVYAVNPTIVNNPKEINVLTYKEMRELSYAGFSVFHDEALIPAFREQIPVCIKNTNNPDSPGTMIVSERDARDNCVVGIASDVGFCSLYVSKFLMNREVGFGRKLLNIFEDEDISFEHAPSGIDDMSVIFRDHKFTPEKERIVIDRIKNELHVDTVSIHRDLAVIMVVGEGLVNTIGVAARATSSFSKARVNIEMINQGSSEVSMMFGIHAEDIDKAIQSLYHEFFEVSQKVEEAETKILT

SEQ ID NO: 20877 - protein, 300 aa, Oceanobacillus iheyensis HTE831
METNFKSGFLSIIGRPNVGKSTFMNKVIGQKIAIMSDKAQTTRNKIQGVFTTNDAQMIFIDTPGIHKPKHRLGDFMVQIAEDTLNEVDSILFMINADEGYGRGDQYIIDLLQKVNSPVFLIINKIDLIHPDQLLPLIEKYKSLYDFEEIIPISALEGNNVDHLVDVLKEHLPEGPQYYPEDQVTDHPERFVISELIREKVLHLTKEEVPHSIAVVIENIEKNENEKLLIQATIVTERSSQKGILIGKQGTMLKNIGKQARRDIEALLGSKVYLELWIKVKKDWRNRQNQLHEFGFRSDEY

SEQ ID NO: 20878 - protein, 612 aa, Oceanobacillus iheyensis HTE831
MSKIIGIDLGTTNSCVSVMEGGEAVVIPNPEGNRTSPSVVAFKNGERQVGEVAKRQAITNPNTIQSIKRHMGTDYKVKIEEKEYTPQEVSAIILQYIKSYAEDYIGEKVEKAVITVPAYFNDAERQATKDAGKIAGLEVERIINEPTAAALAYGIDKEDQDQTILVYDLGGGTFDVSILDIGDGTFEVVSTAGDNRLGGDDFDQVIIDHMVQEFKKENAIDLSQDKMATQRLKDAAEKAKKDLSGVTQTQISLPFITAGDAGPLHLEMTMSRAKFDELSSDLVERTMQPTRKALSDASLSKSDIDKVILVGGSTRIPAVQEAIKKELGQDPSKGVNPDEVVALGAAIQGGVLQGDVKDVLLLDVTPLSLGIETMGAVTTKLIERNTTIPTSASQTFSTAADNQTAVDIHVLQGEREMASDNKTLGRFQLTDIPPAPRGMPQIEVSFDIDANGIVNVRAKDLGTNKEQSITIKSSSGLSDDEVDRMVKEAEENADADKQRREEVDLRNEADQLIFTTDKTIKDLDDKVSEEDKQKAESAKDELKQALESGDMEQVKAKKDALEEHVQQLSAKLYEQVQQEAQQASGEQGEESGNQDDDVVDADYSEVDDDDKK

SEQ ID NO: 20879 - protein, 366 aa, Oceanobacillus iheyensis HTE831
MEQLICQGCGAEIQTSEESEVGYAPPSSLNKEIVLCKRCFRLKHYNEIQDVNISDDDFLQMVSSIRDTDGLIVHLIDIFDVDGTLLKSLPRITGANPILLVGNKLDLLPKSTNVNKLKNWLQREASQLGIKVKDIAFISSKKGTGIDSLKQLIETYRGKKDVFIVGTTNVGKSTFINKLIEQSTGEANAITTSYFPGTTLGFIEIPLDERNVLVDTPGIVNKQQMAHYVSDKDLKTITPNKEIKARVYQLQDQQTLFIGGLARLDFLKGEKQSFVCYFSNELSIHRTKLEKADALYEDHLGALLSPPDSESVNNLPEFVGKTFKLNDEKTDIVFPGLGWISVQGKGATVQAHTWKGISITVRKSLI

SEQ ID NO: 20880 - protein, 379 aa, Oceanobacillus iheyensis HTE831
MQPIYLDHAATTPIADEVIQAMMPIYQDVVGNASSVHSFGRKARQHLDGARRVLAQSIAAKEKEIIFTSGGTEADNLALIGTAKANMHKGRHIITTVQEHHATLHTAEELEKQGFTVSYLPVDETGRVNIEDLEQALTNETILVSIMFVNNETGVIQPIEEIGKLLQSHQAYFHTDAVQAYGLLDINVDEMGIDLLTTSAHKINGPKGIGFLYAREGLAMNALSYGGEQERKRRAGTENIPGVVGFQKAVELSMNNRDERLKNYQSYKEILLQTLIENEISFSINGDKDHTIPSIINISFDGINVEAMLTNFDLDGVAASSGSACTAGSVEPSHVLAAMYGAGNPITTNSIRFSFGSMNTVENIQEASMRIVKVVNRLK

SEQ ID NO: 20881 - protein, 426 aa, Oceanobacillus iheyensis HTE831
MFVDQVSVYVKAGDGGNGLVAYRREKYVPKGGPAGGDGGNGSNVVFKVDEGLNTLMEFRYNRHFKGKRGENGMSKTQHGRNADPLVIPVPPGTTVIDEDTGEVIADLTKHEQEAVIVKGGRGGRGNTRFATPRNPAPDMAENGEPGQERNIKVELKLIADVGLVGFPSVGKSTLLSVVSAAKPKIADYHFTTLSPNLGVVDTQDSRSFVLADLPGLIEGASQGIGLGHQFLRHIERTRVILHVIDMAGTEGRDPYEDYKKINQELSDYDEKLMDRPQIIAANKMDMPNAQENLIQFKNELEDDIPVYEISALTKDGLRDLLFAIADKLETIPKYEKELEETDDTVVYRYQKEEDPFHITRDPDGAFVLYGQRIEKLFKMTDFQHDEAVQRFARQLRGMGVDKALREKGAQDGDVVRLLEYEFEFIE

SEQ ID NO: 20882 - protein, 102 aa, Oceanobacillus iheyensis HTE831
MYAIIETGGKQIKVVEGQEIYVEKVTADVNESVTFDKVLFIGGDDVKVGAPLIDGATVTAKVEKHGRQKKIDVHKFKPKKNYHRKQGHRQPYTKLVIDKINA

SEQ ID NO: 20883 - protein, 371 aa, Oceanobacillus iheyensis HTE831
MKIGIPKEIMNNENRVAIAPSGVMSLKDAGHEIYVQTEAGLGSNFTDEQYIQAGAIIVSTAQEAWSKEMIMKVKEPLQEEFMYFKEGQILFTYLHLANEPEVTKALIEKKVIGIAYETVQLQNRSLPLLTPMSEVAGRMATQVGAQFLEKPKGGKGIILSSIPGVKRGKVTIIGGGVVGTNAAKIAIGLGADVTIIDLNPERLRQLDDIFGSSINTLMSNSLNIGEAVKESDLVIGSVLIPGAKAPKLVSEKMVESMTEGSVIVDVAIDQGGNFETSDRITSHDAPTYTKHGVLHYTVANMPGAVPRTSTIGLTNVTVPYALQLANKGYKRACLENEALLRGINTLNGFVTYKAVADAHQLEYRDVISIIG

SEQ ID NO: 20884 - protein, 397 aa, Oceanobacillus iheyensis HTE831
MSNVLAINAGSSSLKFQLIKMPEEQVIAKGLVERIGMPDAIFSVEADGEKDKKVTEIADHSVAVKMLLESLTSTGVIQSFDEIDAVGHRVVHGGEYFSDSVLITDEIIQQIEEISELAPLHNPANLTGIHAFKEILPEIPMVAVFDTAFHQSMPEASYMYSLPREYYEEYGIRKYGFHGTSHKYVSERAADLLGVPLSNLRLISCHIGNGASVTAIKDGESIDTSMGFTPLAGVTMGTRSGNIDPALIPYIMDKTGKTADEVLNVLNKESGMLALSGFSSDLRDIEEKSETDARAELALDVFAGRIHKYIGSYAAKMNGLDAIIFTAGVGENSVTIREKILTGLEFMGIYWDPKLNDVRGKEQFINYPHSPVKVIIIPTNEEAMIAKDTVRLSGLNS

SEQ ID NO: 20885 - protein, 379 aa, Oceanobacillus iheyensis HTE831
MIYLDNSATTQPKEEVIQSFQLASSQFFANPSSIHPLGGRVEKLLRTAKQQAAETLGVRSEEIIFTSGGTEGNNTAIKGIALEHGQRGKHIITTEAEHPSIYDTCTSLENLGYRITFLPVDENGLVSVKQVEEAIEPDTILITMMYVNNEIGAIQPIEAIGTMLKKHPKVFFHVDAVQALGKVPLKLTGSGIDLCTFSGHKIHGLKGTGMLFVEKTTTLFPLMHGGNQEYGVRSGTENVAGAVSFVKALRLVMEQYKQNIQHLTHLNEVLRKGLSELKDIVIHSSSNGAPHIINFSVLGVKPEVMIHTLSEKEIYISTKSACSSKELDESRILIACGKSREEAISGLRVSFSYDNTVAEVELFLKELHNAIKQYKEALG

SEQ ID NO: 20886 - protein, 490 aa, Oceanobacillus iheyensis HTE831
MNTTMIWTGIVIYIVIAIIIALLSRQGKQSNMTSYFLGDRKLGGFVSALSYSATTYSAFMLVGLAGLTYSGGVGALGFELIYLMGVSLVAFFGPRYWLVGKKYGYVTPSQMLGDRYQHRGVAIAVAIANGLFLIPYSAVQLAGIGYLLQGVSNQAITFSTGVIIATLLAIVFSYIAGIRSVAWTDSLQSLFMIIGSTLVVIFLVNKLGGISGFFSQLETHSPEMLTVPGNGFFSFWTFLGLTIPWFFFSISNPQVSQRLFMPASLKSMRQMLIGFMIFGFIYTIVAITWGFTAFILNPGMENADLATPFILSSDAIPSVLAVIVMIGIMAAAISTIDSILLTVSSLFAKDVYGNIRKNSNDQTQLKVGKIVIPIIAILAFLFAELQLNLIAVLSVASSAGLIVVVPAIIGCFFWKKGTAAGVLSSVIIAGLLVCILEIFQLNPLGIASGLWGLSVSTILFIVISLLTKAPKQKADEFIDYIKNEMKRINA

SEQ ID NO: 20887 - protein, 556 aa, Oceanobacillus iheyensis HTE831
MNQNGIDLNAAEAIVKGLRREEVKHIFCVPGESYLPVLNALYDEQDIQVISGRHEGGIAFMAEGYAKATKKPGIVMATRGVGASNLSIGVHTAHQDSTPMVVLLGQVSTKFRGREGFQEVDLESFFRPISKWAVEITDVLRIPEILAKAFRVAKTGRPGPVVISLPEDILYEQGEFTFRAPVSIPRPAPSIKEISMFQHFLQIAKKPLIIAGGGIRFSGAEDALLEFAESFQIPVMTAFRRHDVFPNNNDLYLGHLGLGITSEIREAVDEADVIFAFGTRLSEITTQDYSIITDEKRLVHIDISFETIGNIYSPDLGIVADIKEALLALKTINIDEVKGSGDFIWKEWAENRYTKQKESIKQLYQKQDIQSKIIGYLQQQLNHEFIITNDAGNFAGWLHTYFQFNHKNSYIGPTSGAMGYGVPSAIGAAIASPHKTVIALSGDGGFMMTAQELETAVRYKVGMLSLVFNNQMYGTIRMHQEIHYPKKVIATDLGNISFKSYIQSLGGKGYQVTSFQEFEHVYPIALEHAKHAPVVIEILTDREQISVSKKINDFHT

SEQ ID NO: 20888 - protein, 392 aa, Oceanobacillus iheyensis HTE831
MQSLYKSNIVRNMPPYLFAHIQKKKQKLMEQGSDVIDLGIGAPDLPPPSYIIEELSKHIKNRHLHRYSPYQGIPELRQAVATFYQEKYNVTLDPEEEILILIGSKEGLVHLIQSVINPGDKVILPDPGYPVYKMGVHMTQGRAVYLPLDKNKEYKPNWKMLSEQDKEEAKLLFLNYPNNPTGATAQKETFVKAVQIANKYNICIAHDAAYDHVTFSDYKSPSLLQVDGAKKVGVELGSLSKNFNMTGWRIGYIVGNSSVIQALATLKSNIDTSQFIPVQIAAIKALEQSEDEIRTIHHTMEKRMLKTWKLLKNAGFEVKKTKGTIFLWVKVPKGYTSSSFTEQVLDQAHVIVTPGSAFGEQGEGFFRIALTVPEERLIEAVQRIDSWLNGGK

SEQ ID NO: 20889 - protein, 314 aa, Oceanobacillus iheyensis HTE831
MNILLMVRTPFIEAVPDFVENLNRLGNVTILDTDNGIEKEKLKQAVREVEVIITAVVQIDKEIIDAAPNLKYIMKFGAGYDNIDFKYAREKGIPVTNTPGQNADAVADLAIGLMLATARNIPAKNEELRNGNWELSMGIEIFQKKLGIIGFGAIGQAIAQRATGFQMEVLAYGTFQDQTIADRLNVEFVDLNKLLNESDIVVVSTTLRKDNYQLINAKTLNEIKKDALFINVSRGALVDEDALYEALTNGKIKGAGLDVFVEEPSHHPLLTLPNTTVTPHIGAATNEAIKRTGSVALENVQRLKNDLPLLYVVN

SEQ ID NO: 20890 - protein, 322 aa, Oceanobacillus iheyensis HTE831
MSKPKVFVTRKLSSQFVKEYEEILDIRMWDKEEEPVPEEILRSQAKEVDALFTVLGDRIDETLLAEAKNLKVVANMAVGYDNIDIDAASKHGITVANTPDVLSETTADLGFSLLAATARRITEASTYVKEDNWKQWGPFLLAGTDIHHKTLGIVGMGRIGEALAKRATGFNMKIQYHNRSRKPEAEEKLQASYVSFEELLETSDFVVTVVPFTKETEELFNESAFKKMKASAIFINISRGKVVDETALIDALNHGEIKAAGLDVFYEEPIRADHPLVNMDNVVCLPHIGSASTETRTEMIHLCMKNIVEVTAGRVATTPVNN

SEQ ID NO: 20891 - protein, 261 aa, Oceanobacillus iheyensis HTE831
MSGSVLEIKNLHVSIEDKEILKGVNLTIKGGEFHAIMGPNGTGKSTLASAIMGHPKYEITEGSITLDGEDVLEMEVDERARAGMFLAMQYPSEISGVTTSDFLRSAINAKREEGDEIPLMKFIKELDKDLDYLDIDQSMATRYLNEGFSGGEKKRNEILQLMQLKPEIAILDEIDSGLDIDALKVVSKGINKMRSDEFGCLIITHYQRLLNYITPDFVHVMMQGRVVKSGGPELAKRLEAEGYEWIKEELGIEDETIEQNA

SEQ ID NO: 20892 - protein, 391 aa, Oceanobacillus iheyensis HTE831
MKEAVIVAGARTPVGKANKGSLANVRPDDLAALTIKETLKRAGNYDGNIDDVIIGCATPEAEQGMNMARNVAGLAGLKNDVPGITINRYCSSGLQSIAYGAERIMVGASDAIIAGGAESMSMLPMGGHVLKPNPKLVESAPGYYMGMGHTAEEVANRFNISREDQDAFAVQSHQRAAKALEEGKFDDEIVPVEVSQRLVGQNNKVEEKSFIFDQDEGVRAGTTSEILSKLRPAFHVKGSVTAGNASQMSDGAASVLLMERGKAEAEGLTPLLKFRSFAVAGVEPEIMGVGPVEAIPKALKIAGLELSDIGLFELNEAFASQSLRVIQALDLNMDKVNVNGGAIALGHPLGCTGTKLTLSLMHEMKRRNEQFGVVTMCIGGGMGAAGVFELL

SEQ ID NO: 20893 - protein, 496 aa, Oceanobacillus iheyensis HTE831
MNKHKFLNPVFFVSSIFILILVVIGAISPGRFEAVANKLFNFTTINFAWFYLLAVFVFILFLIWLAFGKYGKLKLGPADSKPEYSFFAWVGMLFSTGFGSSLVFWGVAEPMTHFFSTPFPGLEAQSEEAARVAMGYSFFNWGISQWAVFALVGLVIAYLQFRKDKNGLISTAIEPVVGKNRFTANTVNSLAVIATVMGVATSLGFGIMQMNGGLNSVFGLSNSIWVQIGIAVAMLLVYLISSATGLKKGMKWLSTLNLTLCLALLLFVFIMGPTVFILESFVLGIGDYITNFVQYSLRMTPYTGESWVTEWTVFYWAWAISWSPFVGAFVARVSRGRTIRQFIFGVTAVSPIIACLWIAVFGGTALFSDLNNGTMIAEAVDEDLAVALFETFGTLPLSTIMSLLAIFLIFTFLVTSADSATYILGSMTSKGSLNPALVTKIVWGLLITAIAIVLLLAGGLEALQTAALTSALPFTIIIIILMISFLKIIKKDRSSK

SEQ ID NO: 20894 - protein, 320 aa, Oceanobacillus iheyensis HTE831
MAKNYIYGNTPCFLDGEKVSLQDNSYKNKDVLIYGVPWEGAVTWGDYTGCELGPKAIRLNSERYSGYLPELNDIDVLQHYSFGDLGDVDVVPADSPETMRRIEQFAKEVWKTGKFPIAFGGDHGITYPIVQALSNEVEGKVGIIHLDAHYDNHPDYHGDLYARSTPFHRIYESESVRNQSIVHMGIHGPRNKPETGKYANEVGATTISVREIKQANNQLHDLAKKAYEIASEGTEAVYLSICSDVLDFAFNPGGPVDGNGLTSYELLELILEFSQMGINGMDYVEVYPQQDANDNSSHFVTYAVLYALAGKLIHDKKENL

SEQ ID NO: 20895 - protein, 614 aa, Oceanobacillus iheyensis HTE831
MCGITGFVNWGKTADEQRSVLGKMTDTLSLRGPDDTQLWTKGHTGFGHKRLSVVDLEGGKQPMSKTVNGITYTVCYNGELYNTEDLRKELLKRGYTFSTTSDTEVLLTSYIEWKEACVDHFNGIFAFGIWDEEKEQLFMSRDRLGVKPLFYAEKAKGFIFGSELKAILAHPDISTKVDRTGLSEIFGLGPSRTPGHGLFKDIDELRAAHSLTFSKHGLKVWRYWNMVSNHHTDSEEETAEKVRELFVDAVQRQLVADVPVSTLLSGGLDSSAITAIAANYYKEKGYGPLTTFSIDYQGNEQHFQKSKFQPSSDRAWIEKMVEGFSTDHHDEIIAGQELAILLKEAVEVRDQPGQADIDSSLLWFCREIKQHTTVALSGECADEIFGGYPWFHDPAAAGNNFPWIRSLDSRIDLLHGDWKKKLDLESYVQEQYQSTIAETPRLDGEDKIDAKRRELFYLNMQWFMSQLLDRKDRMSMGASLEVRVPFADHRLVEYVWNIPWDIKMVNGHEKGILRKAMEGILPNEVLYRKKSPYPRTFQPEYTEQVSQWMNRILVDPNARLFEFMKKEKVEAIVKSKGKEFKDPWYGQLMRGPQLIAHLCQIDHWLRQYDVEVVD

SEQ ID NO: 20896 - protein, 573 aa, Oceanobacillus iheyensis HTE831
MKVDANQQMEVKSNLVTGADLFVQALERANVEVVFGYPGGAVLPIYDALHRNQTSFEHVLSRHEQGSIHAAEGYARVSGKPGVVIATSGPGATNLITGITDAMMDSIPLVIFTGQVAKGVIGTDAFQEADVMGITTPITKYNYQVNEIAELPRIVNEAFHIATTGRPGPVVVDIPKNISSTVTVNDYEADFHLPGYQPTITPNPLQITKVNEALKRAEKPVLLAGAGILISDASNELKQFAQHYQLPVVTTLLGLGSYPGKESLSLGMAGMHGTYAANMAIYECDLLINIGARFDDRLTGNIKHFAPNAKIVHIDIDPAEIGKNIETNIPVVADAKRALTALLKNTTEKCDHQNWLHQLKHNQLDFPLWYDRSDQEISPQWLMEQIYELSKGEAVVTTDVGQHQMWAAQYYSFKDPHNWVTSGGLGTMGFGFPAAIGAQMAKPNSLVLAVVGDGGFQMTLQELSILKSQNLPVKVIILNNEALGMVRQWQESFYEERYSHSLFSENPDFVKLAESYGVRGMRVEKEADVPNILSEVFTYDGPVVIDCRVVQKTSVYPMIAPGTGIQEMIGVRR

SEQ ID NO: 20897 - protein, 528 aa, Oceanobacillus iheyensis HTE831
MTFHVLISDPLSEEGLKPLQEAENIEVVINPGWNEQELSDQIDSFDAILVRSQTQVTRALIEKASNLKIIGRAGVGVDNIDLEAATENGVIVVNAPNGNTNSAAEHTMAMIMALSRNIPQAYHALKQKQWDRKRFVGVELKQKTLGIVGLGRIGAEVAARAKGQRMNVIAYDPFFTEEKAEQMGVQYGTLEDVLRAGDFITVHTPLLKETKHLINKDAFDLMKDGVQIVNCARGGIIDEDALYDAIQSGKVAGAALDVFEQEPFTEHKLLTLPEVVATPHLGASTVEAQEVVAIDVSHDVLRFSQGEAVRNPVNMPSVPSEIMYKIEPYFHLAEKLGTFITDLTKEVVSEVKITYAGDLADIEIAPLTRNAVKGLLKRYLGSRINDVNALFLADRKGIEVSESKTSSKKGFTNLITIEVSGKFGTRKVAGTLLNGLGPRLVRVDEYRVDITPEGHMVVIQHRDQPGVIGRMGSTIAKHDINIATMQVDRSDIGGDAIMILTIDRHLADEALNEIESLDEIKSVTAIDL

SEQ ID NO: 20898 - protein, 394 aa, Oceanobacillus iheyensis HTE831
MKEVVIVSAVRTATGSFMGLLSDIPATKLGSIVMKEALHRANVKPEEVEDVIFGNVLQAGLGQGTARQAAIQAGIPEYVPATTINKLCGSGLKSVHLAAQAIQTGDADIVLAGGMENMSQAPYLLEKGRQGFRMGDGKVVDSMIKDGLWCAINDVHMGITAENIADKYQISRKEQDKFAAWSQQKTEKAIEQGAFSDEIVPVKIRKSKSEEFIFNKDEFPRSGVTVEKLANLRPAFKKDGTVTAGNSSGINDGAAALVLMSKEKANALNIKPMATLRGNATAGVDSNFMGIGPVPATNKALKKANISIQEIGLIEANEAFASQALAVQKELNINPDILNIHGGAISLGHPIGASGARILVTLLHAMKMQSTQFGLATLCIGGGMGAASIVELEK

SEQ ID NO: 20899 - protein, 383 aa, Oceanobacillus iheyensis HTE831
MREAVIVEAVRTPVGKRNGSLSEIRAEDLAAMPLKELVTRTGLDSGLIEDVIMGCVTQSGEQAFDIGRQAALIAGYPIEVPGTTIDRQCGSSQQAIHFAAQAILSGDMDIVVAAGIESMSRVPMGSNQQGVKLSKSLTTKYEIINQGLSAERIAKQWNISREEMDVFALESHQKAIEARNNGYFTEQLMSVEITRADGTKVSIDSDEGPRENSSMDKLAGLSSPFEKNGSVTAGNASQISDGAAALLIMSREKAQELGLKPRFRIIARSVIGSDPTLMLTGPVSATKKVLEKANVKLEEIDVFEVNEAFASVPLMWLKETGADPKKMNQDGGAIALGHPLGASGARLMTTMLHTLERTGGRYGLQTMCEGHGMANATIIERLD

SEQ ID NO: 20900 - protein, 530 aa, Oceanobacillus iheyensis HTE831
MSIDKSSKKGLIDYKIFLPALIIIVGISIPLSLYEEESLAILNSIFNGVVDSFSWGYIWYGIILLVAGLYFSFSKYGKVVLGDPMEKPRFTLFEYASILVAMGLGSTIMRTAMIEWGNVAVNPPFGAEAGSDAAILWGSAYSMFLWGFQVFAVFVMAAPAMGYILHVKKRPMMRISEACRILFGDRFTDGIGGIVLDVLFLISILSGAAVTLGLGAPIVTYNLAELLNIELSFGLTLIVTVIWVLLFSISAYLGIEKGIKRLSTLNMYLAGAFALFIMVIGPGVFILNYFTDTVGFLISNYADISLHTNALGSGEATHIESNTIFWFAYNATWAMLHSVFAAKISRGRTIKEMILTYLLAPTMISWIASGVLGGLGVYKYLNGEVAVLDIISNQDPMAAIPAILSSLPLGNLVLIVFIIIAMIFLTTTLDSTTYTIASYAGTENMSKAEPSRNLRIIIAAIITIVALILMRIGGLAPLEVVSGLMGLPIIFIQFLTIYAAKKMMDKDRAWITNVREEDKKYYNKSKGKRL

SEQ ID NO: 20901 - protein, 329 aa, Oceanobacillus iheyensis HTE831
MLEKKVLITDCDHGNVDVESETFKKAEISFDLEQCKTEEDLISKGKGFEVFINQYAPVTRSVIENLPDLKLVVRYGVGVDNVDIAAATEHGVQVCNVPDYGMNEVADQALAMMLNFTRSISRMNSFVRKGVWDYQKSMPLYRHSEQTVGVIGVGRIGSSFAKKVKSLGCRVVAYDPKYLDEKAKKSPDFIDEFLPLNELLEQADVVSIHCPLDKARNLIDEKELQKMKPTAYLINVSRGGIINEQALNKALTNQWIAGAAVDVAENEPLQPESALLEHDNFICTPHMGWYSEQAALELKRKVAEESIRHLNGDQVHYPINFKEEKESIQ

SEQ ID NO: 20902 - protein, 475 aa, Oceanobacillus iheyensis HTE831
MGLEYNNSFLWFVIGYGLIILMMGAFYSKKVTSSEDFILAGKSLGPIVLMGTLLATWVGSGTVTGGPNSIAYSNGLWPAIGYVIPSLIGITILLLISAKIRNYGKYTVSEILEIKYGSFARILSLIIIVLAFVGIVSYQYQGLGFILHVSTGISVETGTIIGAVLIIFLATIGGLMSVAPTDTLSALIIFLGLIIGVPVILGDIGGFDHLVSSVETERLNLFGNLNLLQVMGFYIPVLFLLLGDQNMYQRISASSSDKTTKLGISGWIIGMLISTPLVAVLAFSARYYFPDLDPGMALISTSLVLPTAIGGLLIAAVTSFIVTTGNSYLLSSATNITYDIYGKYINPKATDKQKLVFTRVLIPVLGLIAYLLTTYFPTVLTVQMYAYTVYGAGITPALLGVFLWKRVTKQAGISSMLAGVVSTLIWEFFDTPFNINSSLISIPIAILVLVIVTLLTSKKQELFDYRKDDLIANQK

SEQ ID NO: 20903 - protein, 526 aa, Oceanobacillus iheyensis HTE831
MALVMVFIIWGAFFPANVEHVLGIVDTYISNTFGWFYLLVTTAFVLVALFLIFGPYGKIKLGKPDDKPDYSYFTWFAFLFTAGMGVGLVFYGVTEPVTHYYSPPSAEPETIAAAEESMQYTLFHWGLHPWATYAVLALALAYFKFRHRAPALISSTFAPLFGDRVKGPLGIAIDTLAVFATVFGIATSLGLGATQITAGLSFTFDGIENTLTTNLIVILIVTVLFILSATTGINKGIRYLSWANVVLAIALMLFVFVLGSSVQMIESFTTTIGNYIQNLPSMTLNMNAFTGEREFLNAWTLFYWAWWIGWSPFVGTFIARVSRGRTIREFVIGVTAVPVVFSALWFSIFGVAGLEMDAAQGGIIHQLMNELGNEVALFAFLESQPMAAVVIGVAVLLIASFFITSADSGTFVLSMLTTGGKLNPGIGIKAVWGIILASIAAVLLWSGGLTALQMAMLISAFPFAILMVLMCVSLIKALRSEHGIITIEKRQRQHDPQFREKQQKELKKMREGFKETLPDATEDRDL

SEQ ID NO: 20904 - protein, 319 aa, Oceanobacillus iheyensis HTE831
MVFRVLVPQKIAQEGIRLLEENGASIVVPPSHDEATLVEYVSDVDAIIARTEIYSEKVLENANRLKIIARHGIGVDNIDVKAATKYGIKVTNTPSANINAVAELVLTFMLASTRHLLPIDEAVRAGNFDIRNQLFGYELNGKTVGIIGFGNIGRLIAEKCRLGLGMNIVVFDPYVTAESVEPYVELTESLEDLLRISDVVTLHVPYVRATHHLIHKDSFQIMKKDAILINAARGGVVDEKALVEALMNGEIRGACVDVFEEEPPKQENPLFKLENVIVTPHLGAQTYEAFKKMAIDAANEIISVKNGNAPEHLIHPVTT

SEQ ID NO: 20905 - protein, 324 aa, Oceanobacillus iheyensis HTE831
MKREIILYKSISTDLLEQLKNRFIVHQHQLKSEMDDSFFSDLQRVEGIIGSKLRVDGHLLDQAPHLKIVTNISVGYDNLEIEELTKRGIMATNTPDVLTDTVADTVFGLLLATSRRICELDQYVKLGRWDENIGEHLFGVDVHHKTLGIIGMGRIGLAVAERAHYGFKMKIVYHNRSTHSYAEKNINATYASLEELLTVSDFVLVMAPLVPETVKLIGEKEFDLMKETAIFLNGSRGELVDELALIHALQSKKIWGAGLDVYEQEPISKESLLLQLKNVVTLPHIGSATRETRYKMAKLAVDNLMKGFTGEVPPSLINPDVLTD

SEQ ID NO: 20906 - protein, 213 aa, Oceanobacillus iheyensis HTE831
MKFFIDTANIDDIRAANSLGILAGVTTNPSLVAKEGVSFHDRLREITKEVSGSVSAEVISEDAEGMIEEGKELAAIAPNITVKVPMTLEGLKAVKVFSELNIKTNVTLIFNANQALLAARAGATYVSPFLGRLDDIGQDGMTLISAIAEIFDRHSVSTEIIAASIRHPLHVTDAALNGAHIATIPYKVLEQLVKHPLTDQGIQKFLDDWNSQK

SEQ ID NO: 20907 - protein, 396 aa, Oceanobacillus iheyensis HTE831
MRKSVIVSGARTPFGKFGGALRPLKATELGGIAIKEAMERANIANDVVDEVIMGTVLQGGQGQIPSRQAARIAGLPWETRSETINKVCASGMRSVTLADQLIRLGEEEIIVAGGMESMSNAPYFLPDARWGNRMGDKSVVDMMVHDGLTCTFTGNHMGNYGNSTAEDLEISRKRQDAWAFRSHQKSVEAIESNKFADEIVPVEIPNRKGDPIIVDTDEAPRKDTTIDKLSSLRPAFDKEGSITAGNAPGVNDGAAAFVVMSDEKAAELNKEPLAYILGHAEVAVEAKDFPQTPGIVINKLLEKTGTSKEEIDLYEINEAFAVVALASGQIADIDEEKINVNGGAVALGHPIGASGARIILTLIHELKRRGGGKGIAAICSGSGQGDAILIEVPAEN

SEQ ID NO: 20908 - protein, 324 aa, Oceanobacillus iheyensis HTE831
MGLFEQLAEKVTAADKKIVFPEGLDERILTAASRLAEEGIMTPILIGGTQDVEAKAKDLDVSLKGCEVIDPANYDEFSDMVSAFVERRKGKATEEDAKKILLDGNYFGTMLVYLNKADGLVSGAAHSTADTVRPALQIIKTKEGVKKTSGVFIMVRDEEKYVFADCAINITPDSNDLAEIAVESAKTGALFDVDPKVAMLSFSTKGSAKSPETEKVSEALEIAKEKDPSLVIDGEFQFDAAFVPSVAEKKAPDSVLKGNANVFVFPSLEAGNIGYKIAQRLGGFEAVGPILQGLNRPVNDLSRGCSSEDVYNLALITAAQAVGE

SEQ ID NO: 20909 - protein, 209 aa, Oceanobacillus iheyensis HTE831
MNIQEIFNQLHDRTPSLMGHEHFKESSVIIPLIEIDGETHILFEVRSMQMRSQPGDICFPGGRVDYTDKDPSHCAIRETMEELGLSEQDITEPIPLDYIVNDLGRIIYPFVGRIIHPDKMTPNPAEVDHTFTVPLSFFLETEPKRYKVHLQVKPEDNFPYHLIVGGENYDWRIRHVEELFYHYNDQAIWGLTAKILTHFIELIKTNERS

SEQ ID NO: 20910 - protein, 417 aa, Oceanobacillus iheyensis HTE831
MTKEKIVLAYSGGLDTSVAVKWLQDKYNYDVIAVALDVGEGKDLDFVKKKALDVGAIKSYVIDAKNLFAEEYVLPALQANLLYEGKYPLISALSRPLISKILVDIAEEEGAVAVAHGCTGKGNDQVRFDVSFTALNPNLKIVAPVREWAMSREEEIEYAKSHGIPIPINLDSPYSIDQNLWGRSNECGILEDPWAEAPKDAYDLTIDPVDAPEDPEVIQITFKKGKPVSIDGKEMPLDELILQLNTIAGKHGVGRIDHVENRLVGIKSREIYEAPAATTLIAAHQELEALTLPREVAEFKPTIEQKLAQTVYYGLWYSPLTEALQSFIEKTQEHVSGTVKVKLYKGHAQVIGRESENSLYDFDLATYNKADAFDHDAALGFIKLWGLPTQVHSAVNGPQGKKSIEKVDLEVKEAVKP

SEQ ID NO: 20911 - protein, 376 aa, Oceanobacillus iheyensis HTE831
MIIGVPKEIKNNENRVAMTPAGVVHLINAGHTVQIEKGAGLGSNFADAEYKEAGAELIDSAASVWENADMIMKVKEPLSSEYKYFRKGLILFTYLHLAAAPELTKALVDSEVTAIAYETITVNGTLPLLTPMSEVAGRMATQIGAQYLEKSEGGKGILLGGIPGVSRGKVTVIGGGVVGTHAAKIALGLGAEVTIIDLNPVRLRQLDDIFGSSIQTLMSNPYNIAEAVKDSDLVIGSVLIPGRKAPKLVTDEMIQSMQPGSVLVDVAIDQGGNFETVDHPTTHDEPIYVKHDVLHYAVANIPGAVPRTATVGLTNVTVPYAVQIASKGAVKAIQDNPAILTGVNVMNGKVTYEAVAADLGYDFVSPEDAIKDAELV

SEQ ID NO: 20912 - protein, 377 aa, Oceanobacillus iheyensis HTE831
MSTSIVKGAPGHYRIGADVLEEIPVLLEELSVNRIQVIAGKRSWQAAKPYLPFVLVKQVEANIIFIDGHTTLEKADKIADQLHQHAIDAVIGIGGGTALDITKAAAAKAEVKSVLIPTIAATCAAWTPLSVFYDSNGAFTHYTYFPLATTLVLVEPAIIAHAPIEYLRAGIGDTLAKFYEADALIESFYPNEEVPVPVKVSQFSASICRDVLLEDGKAALDAVRDKQVTPALIRVIEAIIITGGMVGGFGDKAGRIAGAHSLHNGLTEASEAQHFLHGELVAYGILGQLAFEQKEEELLRLLDFYDQWQLPSSLQEIGIDITNTDLVERIIQKAILPQESIHFMNREVTAESLASALQQVEKNNQIYYKEKRGEKTS

SEQ ID NO: 20913 - protein, 573 aa, Oceanobacillus iheyensis HTE831
MFEDRAGKVLVDLLSEWGVDHIYGMPGDSINQLMEELRKEKDKMKFIQVRHEEAGALAAASYAKLTGKLGVCLSIAGPGAIHLLNGLYDAKKDSAPVLVLAGQVPTDQIGTDAFQEINMQRMFEDVAVFNEQVVSEEQLPALVNQAVRTAYAEKGPAVLTIPDDIPAAKIKKHVQKNAAIYEEPEQVPSSTEMEKALELIGNAKKPIILAGTGTKGAKQELEQFSDKIAAPVIVSLPAKGVIDDDHPNCLGNLGMIGTKPAYEAMEDSDLVILIGTSFPYVEFLPEGVSYIQIDNDPLKIGKRYPVNVGIAGDSQKSLTRLNERITRTENRDFLENSQEKMAKWWKEMEEDEQQTSTPIKPQQIIAEVQKIAEDDAVLSVDVGNVTVWAARHFRMKTTQKFLTSSWLATMGCGLPGAIASKMAYSDRQAIALCGDGGFSMNMQDFLTAVKYNLPMVVVVFNNERIGMIKYEQEAKGNLDYKTNLESFNFAQFAENCGGKGYRVENFEDLGPSIRAAASFNKPVIVDVCIEDEPPIPGKLSYEQVTSYSKQTIKKLFEKGKLEVPPIRKGLKRM

SEQ ID NO: 20914 - protein, 572 aa, Oceanobacillus iheyensis HTE831
MLKWFFSYYKPHKRLFIIDFSAAVFVALLELAFPVAVQWFIDRLLPGEDWDAIVTVAILLLVVYIISTYLQYVVAYLGHKLGINIETDMRRDLFYQVQRQSFRFFDNTKTGHIMSRITNDLFDLGELAHHGPEDFFISIMTFIGAFIIMFTINPLLAMIILILVPILIFLITYGNIRMNKAWKKMYGNIADVNARVEDAVSGVRVVQSFTNETFEKERFQNDNEKFRLAKVGAYKVMGIVHSNIYFLMRLMTLSVLVIGAWLTYQGLMTAGELVSFILFVNVLTTPINKITALLELYPKGMAGFKRFTDLMKVNPDVQDKEDAVEVDQLKGNIQFQDVTFGYEESHRAVLNNMNFTVKPGETVAFVGPSGAGKTTISALIPRFYDVTEGSITIDGIDIRDMTKESLRSQIGVVQQDVFLFTGTLRENIAYGKLDATNEEIELAAKRAHMEDFINELPNGYETQVGERGLKLSGGQKQRIAIARMFLKNPPILILDEATSALDTETEMIIQTALNELAESRTTIVIAHRLATIKEADRIMVVTKNGIEEEGSHEDLLQKRGLFAHLHDVQMKK

SEQ ID NO: 20915 - protein, 252 aa, Oceanobacillus iheyensis HTE831
MRKKFGIIVALIALTTLLSGCTEINEPITPNSDGIWNTIFVYPVSWLITNVAGVFNEGYGLAIIIVTLFVRLLLMPLNVKQIKSSKAMQEIQPKLQEIQKKYTSKDANTQQKLQQETMELFQKNGVNPLAGCLPILVQMPIFVAMYHAIMRTPEISTHSFLWFQLGSPDYILPILTGLFTFLQQKLMMSTNTSMNSNPQMKLQMQIMLYVMPIMIGVMAFFFPAALALYWVTGNIFMVFQTLLINKPMMAKK

SEQ ID NO: 20916 - protein, 364 aa, Triticum aestivum
KMQWYAFHKEPAGGTDPENGKKKRLLEIFSGWCDNVIDLLNATEEEAILRRDIYDRPPTINWGKGRVTLLGDSVHAMQPNLGQGGCMAIEDGYQLAVELEKAWEESVKSRTPVDVISSLRSYEKERKLRVAIIHGLARMAAIMATTYRPYLGVGLGPLSFLTKLRIPHPGRVGGRFFIKVGMPLMLSWILGGNSSKLEGRPLSCRLSDKASNQLGRWFQDDDALEQAMGGEWYLFPMSSGGDSALQPIRLIRDEQRTLSIGSKPDPSNSDSSLSFPLPQVSEIHATITCKNKGFYLTDLGSEHGTWFNDNEGRRYRLPPNFPVRFHPSDAIEFGSDKKAMFRVKVLSTLPYDSARGGEEVLQAA

SEQ ID NO: 20917 - protein, 1444 aa, Alternaria alternata
MDAQNGVVHAHKKRRRRRLDRPPISARLLLDDRIKGEVGVLSEDLFNDLFPGSRSRSAAANGDTPDSHRVQHVAITPWLPSSIVASQNTPWTILPVRPADKTENGTARPHSSLQIPASSLALQSFSHLLQNIAPNKTQRRDTPIEVRIYDVVPVGLDTVYVNLDTEALRKLDEVHAKFGGGFITQMNGASRASKSRLEANGTKGKAVDLAAQEEVWRQAVREALQLPTVLHTGDLLPLKLPAHPITHVPPPPAKISASEPVSQGLLLPSTRIVILQSHRSSSKQAVLLPPVKQPATTNGFGDDDETDDTSNDTFYSAAEDNSRNASPPDEESTDNFESELSESDAGDLSDESDDIISLNAPMLPPQSSGVLSSFTSATPRPGNFRTNGIATPGSVYSSFTATTARGPTSKSKVFKAQGLLQSVPDDLVHPKPGSEDDEEARVFVDINTLVKVGCFSGDWVKLEGTEAPSSHPLWGLGAFGRADEEENTNWRPVRVFGLPENMSKKVARYPVQKTSDLDRRSSFSGFSQPASSLHAYLSPILLANLGSPSHLRITPLTPSQSSHLPRSAIQKPRLNSSSLPPSAKEVTLLKVSTPLSSDRLLQPSLFAALKDHFEQKRRIVKSGDLIGVSIDESLGRAVFQTTTEEDVGNDELLARAKPTASDESTSVSSRNPKVVSWFKIGNVSSPTHTSHDGEEVDIWGGAVTVDAASTKMEMNGSEQGKTPAPISNAWQYYLGAKRAPVSSSQKTMALDELPKPYISSLRRRLRELMSVATSPRAIHLGLPPIAVLITSTQRGIGKSTVATKACEDLGLHTFSIDAFDIVTEGGAGGGDVKTEGFLKARAERALTCGAEFTALLVKHVDALNADRMNTALKEILADSRVLIATTTEIDKVPEGIRGLFTHEIEMTAPDEGEREGILRSIVDDAGIRLSPEVDLANVAVKTAALVAGDLVDVVDRALVAKQQRLEALAVSASKSLTPPDTITTRDIELAGGHFSNSLTKADLDTAVDAARKNFADAIGAPKIPNVGWSDVGGLTHVKDAVMETIQLPLSRPELFAKGMKKRSGILFYGPPGTGKTLLAKAIATEFSLNFFSVKGPELLNMYIGESEANVRRVFQRARDARPCAVFFDELDSVAPKRGNQGDSGGVMDRIVSQLLAELDGMSDGGEGVFVIGATNRPDLLDQALLRPGRFDKMLYLGVSDTHEKQQTILEALTRKFTLHPSVSLARVSQGLPFTYTGADMYALCSDAMLKAITRSAKSVDEKVAAYNSTHNPPITIAYFFDHFATEEDTAVMVTEEDFMEAHKELVPSVSADELRHYDRVRKQFEGAGKKEGAETKNGIAAAPLAIEQAFSATTAKGKAKAPVHEDETEMVIRTQNVQLNGNAGASGNGLAGGGVDISGGSAASSGGSSKGKGKAPVNHSQGKSSVDIAEGGFGDATQDDDLYS

SEQ ID NO: 20918 - protein, 488 aa, Caulobacter crescentus CB15
MTKTVLVVDDDPTQRRLIQAVLERDGFAVSHAEGGDAAIAHLTSGAPADVILLDLVMPGLNGQDALKEMRARGFNQPVIVLTASGGVDTVVKAMQAGACDFFIKPASPERITVSIRNALSMGDLKGEVERLTKRAGGKTTFADLIGASPVMTMVKRMGERAAKSGIPVLITGESGVGKELIARAVHGSSDRAGKPFVAVNCGAIPENLVESILFGHEKGSFTGATDKHLGKFKEADAGTLFLDEVGELPLDMQVKLLRALQEGEIDPIGSKRSIKVDVRIVSATNRDLQQAVSGGPFREDLFYRLNVFPIEAPSLRERREDIPALVEAFIRRFNVEEGKRVIGASPETMQLLTSFDWPGNVRQLENTVYRAIVLADAPYLQPFDFPAISGLAAPIEAVSISPSPPPAALLQATHAAMAAAVAEAPVRILDDRGHLRTLEEIERDLIQHAIDVYAGHMSEVARRLGIGRSTLYRKVREQGIEVDMKEAG

SEQ ID NO: 20919 - protein, 66 aa, Streptomyces clavuligerus
MATGTVKWFNAEKGFGFIAQDGGGPDVFVHYSAINATGFRSLEENQVVNFDVTHGEGPQAENVSPA

SEQ ID NO: 20920 - protein, 236 aa, Gossypium hirsutum
MGRGRVELKRIENKINRQVTFAKRRNGLLKKAYELSVLCDAEVALIIFSNRGKLYEFCSSSSMIKILERYQKCNYGAPEPNVSSREAALELSSRQEYLKLKARYDALQRSQRNLLGEDLGPLSSKELESLEKQLDSSLKLIRSTRTQYMLDQLNDLQRKEHLLNEANRTLKQRLVEGYQVNSLQLNPNATEDVGYGRQQVHHQPHGDAFFHPLDCEPTLQIGYQHDPMSVVTAGPV

SEQ ID NO: 20921 - protein, 629 aa, Pavlova lutheri
MAKVVGIDLGTTNSVVAVMEGGKPTVITNSEGGTTTPSVVAYAKNGDLLVGQIAKRQAVINSENTFYSVKRFIGRPSKEVSDELRQTPYKIEDSEGKIRLKCPNLNKNFAAEEISAQVLRKLVNDANKYLGEKVEKAVITVPAYFNDSQRQATKDAGKIAGLEVLRIINEPTAASLAYGLDKKDNETILVFDLGGGTFDVSILEVGDGVFEVLSTSGDTRLGGDDFDEKIVKWLLNEFEKEEKFSLKGDSQALQRLTEAAEKAKIELSSLSQTEINLPFITANENGAKHIEKTLTGEKFESLCSDLFDRCRIPVENALKDAKLKPNQIDEVVLVGGSTRIPAVKKLVKDILGKEPNETVNPDEVVAIGAAIQAGVLSGEVKDILLLDVTPLSLGVETLGGVTTKIIPRNTTVPTKKSEIFSTAVDNQPNVEIHVLQGEREFARDNKSLGTFRLDGILPAPRGIPQIEVTFDIDANGILSVTAQDKGTSKQQSITISGASTLPKEEVEKMVKEAEQNAAADKEKGENIRVKNEADLYCYQAEKQISELPEALVNENQSLIKESKETVEMLKENIKKEDYDKIKENLKKLQEKLMEIGQKAYAKKEPLKDEDSNKAGSQDDFIDADFTESK

SEQ ID NO: 20922 - protein, 155 aa, Ipomoea nil
MDLRLMGFDHPLFHHIMDYAGDDKSSNSSAPSRTFMLDAKAMAATPADVKEYPNSYVFIIDMPGLKSGDIKVQVDGDNVLSISGERKREAEEKEGAKYVRMERRVGKLMRKFVLPENANKEKITAVCQDGVLTVTVENVPPPEPKKPRTIEVKIG

SEQ ID NO: 20923 - protein, 167 aa, Ipomoea nil
MDLRNFGLSNFGLEPQLLSTIQDMLDFADDHDRAGRAPPEQPIRAYVRDAKAMAATPADVKEYPNSYVFIADMPGVKAAEIKVQVEDDNVLVVSGERTEREKDEKDGVKYLRMERRVGKFMRKFVLPENANVEAINAVYQDGVLQVTVEKLPPPEPKKPKTVEVKVA

SEQ ID NO: 20924 - protein, 522 aa, Ceratopteris richardii
MGNCCGTDGFKHERPLPAHPNRQGEDKTGAPKVISHTKLSSCGEQSVNEKYHLGRELGRGEFGITYLCTDRETDEVLACKSISKGKLRTPIDIEDVRREVDIMRHLPKHPNIVTLEGVYEDENAVHLVMELCEGGELFDRIVARGHYSERAAAAVMRTILEVVQVCHRHGVMHRDLKPENFLFANKKENSPLKAIDFGLSIFFKPGEKFTEIVGSPYYMAPEVLKRSYGPEVDIWSAGVILYILLCGSPPFWAETEQLVAQAILRGNVDFNRDPWPNVSENAKALVRQMLEPDPSKRLTAQQVLDHSWLVNARKAPDVPLGDAVCARLKQFSAMNKLKKRALRVIAELLTGEEVEGIRAMFNMMDVERTGSLTFGQLKAGLYKLGSQLPESEIQQLMEAADVNGNGTLDYGEFVAITVHLQRMDNDECLRKAFNFFDLNGDGFIDRSELHEMLEADLGEVGTDIIDDIIQEVDIDKDGRISYDEFASMMRTGTDWRKVSRNFSRERYASLSIKLMQEGSLKL

SEQ ID NO: 20925 - protein, 658 aa, Arabidopsis thaliana
MGIELQNHQSHHEEASPAEEPMSRWLINTPEPPSMWQELIGYIRTNVLAKKKHKRNKTKNSSSNLVYSCLKSAFPILSWGRQYKLNLFKKDLMAGLTLASLCIPQSIGYANLAGPDPEYGLYTSVVPPLIYSTMGTSRELAIGPVAVVSLLLSSMVRDLQDPVTDPIAYRKIVFTVTFFAGAFQAIFGLFRLGFLVDFLSHAALVGFMAGAAIVIGLQQLKGLFGLTHFTNKTDVVSVLSSVFHSLHHPWQPLNFVIGSSFLIFILLARFIGKRNNKLFWIPAMAPLISVVLATLIVYLSNAESRGVKIVKHIKPGFNQLSVNQLQFKSPHLGQIAKIGLISAIIALTEAIAVGRSFATIKGYRLDGNKEMMAMGFMNIAGSLSSCYVATGSFSRTAVNFSAGCETVVSNIVMAITVMISLEVLTRFLYFTPTAILASIILSALPGLIDVSGALHIWKLDKLDFLVLIAAFFGVLFASVEIGLLLAVGISFARIMLSSIRPSIEALGRLSKTDIFGDINQYPMANKTAGLLTLRISSPLLCFANANFIRDRILNSVQEIEGEENEQEVLKENGLQVVILDMSCVMGVDTSGVFALEELHQELASNDIRLVIASPRWRVLHKLKRAKLDEKIKTENIYMTVGEAVDIYVRARSTSHELC

SEQ ID NO: 20926 - protein, 628 aa, Aquifex pyrophilus
MAEKKEKIIGIDLGTTNSVVAVMMGDEAVVIQNQEGSRLTPSVVSWTKEKEVLVGDPAKRRAILDPENTVYESKRFIGRKFEEVKEEAKRVSYKVVPDEKGDAAFDIPNAGKLVRPEEVGAHVLRKLKEAAEAFLGEPVKKAVITVPAYFNERQRQATKDAGKIAGLEVVRILNEPTAAAMAYGLHKKENVRILVYDFGGGTFDVSILEGGDGVIEVKATAGDTHLGGANIDERIMEWLIEEFKKEHGIDLRQDRTVLQRLKEAAEQAKKELSFKMETEINLPFITIDPNTNQPLHLQKKLTRARLEEMINDLIDRTIDIVKQALEDAKLKPSDIDEVVLVGGSTRIPLVQQKIKEFFGKEPHKGLNPDEVVAMGAAIQAGVLAGEVKEIVLVDVTPLSLGVETYGGVMTVLIPRNTPIPVRKCEVFTTAHDYQTEVEIHVLQGERPLAKDNKSLAKFYLTGIPPAPRGVPKIEVCFDIDADGILHVTAKDLGTGKEQSVRVEISSGLTPEEIERIIKEAEEHAEEDRKKKELIEAKNQLDHLVYQLEKTLKEAGDKVPADVKQEAEKVIEEAKKTIETATDINEVKRVTERVLQVSSKLGTTLYGEAGKTEKKDEGGEGEVEAKPVD

SEQ ID NO: 20927 - protein, 256 aa, Brassica oleracea var. botrytis
MGRGKVELKRIENKINRQVTFAKRRNGLLKKAYELSVLCDAEIALLIFSNRGKLYEFCSNPSGMAKMVEKYRKHSYATMDPNQSAKDLQERYQDYLNLKSRVEVLQHSQRHLLGEEIAGIGVDELEQLECQVDTSLRQIRSTKARSMLDQLSDLKSKEEMLLETNRDLKRKLEESDAALNQTLWGASSSAEHSQQQQEGMTSYHANPLSQEVGFFRPLQGNVALQMSHYNPGVPNASNSATTSQNVINGFFPGWMV

SEQ ID NO: 20928 - protein, 250 aa, Brassica oleracea var. botrytis
MGRGRVELKRIENKINRQVTFAKRRNGLLKKAYELSVLCDAEVALIIFSNRGKLYEFCSSSNMIKTLERYQKCSYGSIEVNNKPAKELENSYREYLKLKGRYEGLQRQQRNLLGEDLGPLNSKELEQIERQLDGSLKQVRSIKTQYMLDQLSDLQTKEQMLLETNRALAMKLDDMIGVRSHHMGGGGGGWEGNEHNVSYAHHQAQSQGLFQPLECNPTLQMGYDNPVCSEQITATTQAQAQPGYIPDWML

SEQ ID NO: 20929 - protein, 259 aa, Brassica oleracea var. botrytis
MGRGRVEMKRIENKINRQVTFSKRRNGLLKKAYELSVLCDAEVALIVFSSRGKLYEFGSVGVERTIERYHRCYNCSVTNNRPEESKQNWCQEVAKLKAKYESLVRTNRHLLGEDIGEMGVKQLQALERQLEAALTATRQRKTQVMMEEMEDLRKKERQLGDINKQLKIKFEAGGHAFKSFQDFWPNSAASMAGDPNNSKFPVQPSHPDSVDCNTEPFLQIGLVLVYIRFQQHYYVQGEGSSVPKSNVACETNFVQDWFL

SEQ ID NO: 20930 - protein, 252 aa, Brassica oleracea var. botrytis
MGRGRVEMKRIENKINRQVTFSKRRNGLLKKAYELSVLCDAEVALIVFSSRGKLYEFGSVGVERTIERYHRCYNCSVTNNRPEESKQNWCQEVAKLKAKYESLVRTNRHLLGEDIGEMGVKQLQALERQLEAALTATRQRKTQVMMEEMEDLRKKERQLGDINKQLKIKFEAGGHAFKSFQDFWPNSAASMAGDPNNSKFPVQPSHPDSVDCNTEPFLQIGFQQHYYVQGEGSSVPKSNVACETNFVQDWFL

SEQ ID NO: 20931 - protein, 256 aa, Saussurea medusa
MVRAPCFDKHGIKRGAWSQEEDNKLRAHIQRSGHSNWRQLPKLAGLSRCGKSCRLRWVNYLRPTIKHGNFTKDEKDVVVALHNKLGNKWSAIAARLPGRSDNEIKNYWHTHLKNRAQTDQTVLQTKQDGNAETSKGKGTPKAGCVVRKPNVKSQQEVEILLAVLSSASSSSFSSSTTSDQNESSPPSLSVSDANVTPQCSEEAARSLCIDQFLVEEDSIMLSSDKMYSPLGSVDYFISQDNVMDDVLLWPNLDFYY

SEQ ID NO: 20932 - protein, 424 aa, Corynebacterium glutamicum ATCC 13032
MSSESPRPTFTELGVAVEITDALEALGINRTFAIQEYTLPIALDGHDFIGQARTGMGKTYGFGVPLLDRVFDSADVAETDGTPRALVIVPTRELAVQVGDDLQRAATNLPLKIFTFYGGTPYEEQIDALKVGVDVVVGTPGRLLDLHKRGALSLDKVAILVLDEADEMLDLGFLPDIEKILRALTHQHQTMLFSATMPGAILTLARSFLNKPVHIRAETSDASATHKTTRQVVFQAHKMDKEAITAKILQSKDRGKTIIFARTKRTAAQVAEDLASRGFSVGSVHGDMGQPAREKSLNAFRTGKIDILVATDVAARGIDVDDVTHVINYQTPDDPMTYVHRIGRTGRAGHNGTAVTLVGYDETLKWTVIDNELELGQPNPPQWFSTSPELLETLDIPEGVTERVGPPTKVLGGTAPRPPRRTRK

SEQ ID NO: 20933 - protein, 579 aa, Corynebacterium glutamicum ATCC 13032
MSIKWARFVPGITAMRGYQRSWLKGDVIAGITVAAYLVPQVMAYAVIAGLPAVVGLWGVLAPMALYFFLGTSRNLSVGPESTTALMTAAGVGALVGAAGGPERYAEVAALLAIAVGIVCAVGFIGRLGFLTRLLSRPVLVGYLIGIAVLMIVSQLSKVTQVNVESGQTWQEIISFIKVAGQAHIPTVILAVVVLSLLYLANWLTPKFPSTLMVLLLSAAAVGFFHLDRFGLEVIGEVPRGLPQPSIPSIGDLEIWSLLPYAVGIAIVGFSDNVLTARAFASGKDEVIDSNQELLALGTANLANGFFQGFPVSSSGSRTVLGDTAGARTQVHSLVVVALVIMVLLFAGPVLESFPDAALGALVIYAATQLIDIAEIKRIARFRKSELVITAATAASVVASGVLAGIGVAVTLSILDLIRRITRPYADVLGYTPGMAGMHSLEDYPESTAVEGLVVFRYDSPLFFANADDFSKRAIEAVDEATQPVHWFLLNAEANTEVDLTAVDAMEALRKTLEERGIRFAMARVKQDLRRSLEPAGFIESVGEEYIFATLPTAVKGYSVEFRDRFGNYPEGVPKEILEL

SEQ ID NO: 20934 - protein, 463 aa, Corynebacterium glutamicum ATCC 13032
MAKSNEGLGTGLRTRHLTMMGLGSAIGAGLFLGTGVGIRAAGPAVLLAYIIAGAIVVLVMQMLGEMAAARPASGSFSRYGEDAFGHWAGFSLGWLYWFMLIMVMGAEMTGAAAIMGAWFGVEPWIPSLVCVVFFAVVNLVAVRGFGEFEYWFAFIKVAVIIAFLIIGIALIFGWLPGSTFVGTSNFIGDHGFMPNGISGVAAGLLAVAFAFGGIEIVTIAAAESDKPREAISLAVRAVIWRISVFYLGSVLVITFLMPYESINGADTAAESPFTQILAMANIPGTVGFMEAIIVLALLSAFNAQIYATSRLVFSMANRQDAPRVFSKLSTSHVPTNAVLLSMFFAFVSVGLQYWNPAGLLDFLLNAVGGCLIVVWAMITLSQLKLRKELQANDEISTVRMWAHPWLGILTLVLLAGLVALMLGDAASRSQVYSVAIVYGFLVLLSFVTVNSPLRGGRTPSDLN

SEQ ID NO: 20935 - protein, 438 aa, Corynebacterium glutamicum ATCC 13032
MGADQIAAVSGNSAWMLMSASLVLLMTPALALFYGGMSRQKSVLNMMMMSFGALGVVTVIYLLWGWSMSYGTQSIAGIFANPFEFFGLKDSIVDADGNYIEGAAGYPNIIDIGFQLTFAVISTALISGALAERVKFSTWLIFSGAWVTLVYFPLAHMVWGGGLLGHNVTGFASWLFGSTDGEANIAPIDFAGGTVVHISAGTAALVLAFIVGKRKTFGKAIARPHNLPMVMLGAALLWFGWFGFNGGSAFAADGLAGLAWVNTTAATAAAMLGWLATEKFRDGHATSLGAASGVVAGLVAITPAAGALTPVTSLILGAIGGILACLGVGLKYRFGFDDSLDVVGVHLVAGLWGTVGVGLLATDIGWFSGGGMDGLKLFIVQIVIALVAVVFAGVITALIAFALKATVGWRVDDDVEQQGIDTHEHAESAYDTTGPEIR

SEQ ID NO: 20936 - protein, 339 aa, Sphingopyxis macrogoltabida
MGSARIEILDQGEFQAEEGELLLREALRNRIGFPYDCNSGGCGSCQFELVSGGVEDAWSAAPGLSERARSRGRRLACQSRVTGDCAIKVRLKPEFVPTHPPALHSARYEGCRPLTSDMAEYRFRCDGSADFLPGQYAMLRLPGVSGDRAYSMSNLPNADGLWTFIIKHISGGQGSGVLAEKIRPGDLIGLDGPYGLSFLRPDADHDIVCIGGGSGISPLKSICSAAVRHPPLDNRTIHLFYGARTPSDLPIDRTFREDPQLAERVTVVPAISEASHGTSWSGETGMIHEVLHRWLETVGDAKRFEYYFCGPPPMIDAVRRLLQIDLRVPETQLHADSFV

SEQ ID NO: 20937 - protein, 1526 aa, Bifidobacterium longum DJO10A
MISVTFKAPLDLTVHAPDGMYDPANEHDACGVGMVTTLNKRPERKIVTDAIEVLVNLDHRGAVGAEENTGDGAGILMSMPDEFMRATVPAELPEAGHYAAGIAFLDRDIETSGQQEQAIAKIVREEGLEVLAWRVVPTNPDGLGLQALAAMPGFKTLVVASPDGALAGVDLDRKTFRIRKRVEHEVGVYFASLSARTITYKGMLTTMQLTHFFEDLNDERMKATIAIVHSRFSTNTFPSWPLAQPFRLLAHNGEINTIQGNRNWLSAREGRLSSELLGEFEPLLPITTPGYSDSGTFDECLELLHLAGRSLPHAICMMLPPAWEKNPDLDPDVRAFYEYNNTLIEPWDGPADIVFTDGTQVGALLDRNGFRPGRWQLTDDGYIVLASEAGVLPEIAQEHIVSKGRLEPGEMFLVDTAEGRIIPDEEVKRNLAAQHPYRKWVEGNSVEMSDLPRREHVSHSGQSVQRRQRAFGYTEEDLKLLLTPMANTGKEPLGSMGNDAPMPALSSRSRMLFDYFTQKFAQVTNPPLDWEREEIVTSLESAIGPEPNLLADSELHAKKILIPLPVVNSDEMAQLKRLDKARILGGYYRPYVVKGLYQVAGGGKALEERLDEIFAEIDEAIANGKNFIVLSDRESNHTWGPIPSLLLTSAVQHHLLRRHTRTQISVAVEAGDVREIHHVALLIAYGAACVNPYLAFESVEDLARNGYLKVDADTAVKNLTKALSTGVLKIMSKMGVSTIMSYRGAQLFEAVGLSQEVIDEYFTGTTSRVGGVGLDEIAEEVAIRHRVAYPNQWSASPHRNLRTGGDYKWRRTGEDHLNDPEAIFLLQQSTQRGDYQMFKKYSHHINDTSNRLMTLRGLMKFNTNRKPIDIAEVEPASEIVKRFSTGAMSYGSISQEAHETLAIAMNSIGARSNSGEGGESDDRINDPQRYSRIKQIASARFGVTSDYLVHATDLQIKLAQGAKPGEGGHLPGAKVPPWIAKVRHATPGVELISPPPHHDIYSIEDLKQLINDAKMANPKARIHVKLVSEFGVGTIAAGVAKCHADVVLISGYDGGTGAAPLNAIKHAGTPWEIGLSETQQTLILNGLRSRIVVQCDGELKTGRDVVIAALLGAEEFGFATAALIVEGCVMMRACQKNTCPQGIATQDPELRARFKGKPEYVVNFFMFIAEEVREILAQLGFRTLEEAIGHVECLDQDEAIKRWKSSGIDLSNVLKQAGPVPGTILHQTIEQNHELEKALDNKLIELAQPALEHKEPVRIEMPIRNVNRTVGTMVGYEITRRYGEEGLPDDTIDMTLHGSGGQSIGAFIPRGETMRIYGEVNDYAGKGLSGGRMIVRPEDNVTFDKHSNVIAGNVTGFGATSGQMFVAGRAGERFGVRNGGATFVVEGVGDHGCEYMTGGTVVVLGPTGRNFGAGFSGGNTYVLDLDMKKVNPGAIKSGALLFKSLDAETSKLVYALVKQHAEETGSQFAAALLEDWNETVKRFTHVVPKQFVAMTKAMEEAKTNNVDFNAPGAWEKVYEQVMEGAR

SEQ ID NO: 20938 - protein, 239 aa, Bifidobacterium longum DJO10A
MSLETPNAFADEENILLHTALFKQVSPAEAEELLPHLKRATFDKGDYIFSEGDTDQRMYLLEQGRVKLIRTSSDDRVQLLSIHAPGEVLGEIPVFDPHGGPRTASAVSMSHGTRVVWLEHDALFAWLDEHPRVAIDMLQVMANRQRGNNERISDLVFMDVPARLAKTLLNLGSRFGEPVEQGLKVPHDLTQEELAQLVGSSRETVNKALMDFSNRGWIARDGRSIIIFQPGMLIRRSRR

SEQ ID NO: 20939 - protein, 415 aa, Bifidobacterium longum DJO10A
MADTPNASGEPGELYLDAAATESVSPAVIEAMTPFLTEAYANPASVHQPGKTAARALDAARASFAAALGARPDDVIFTSGGTESDNLAIKGIAMARMRKLGLRPVCGFAEADGKQPANCRPRIIISAIEHPAVAQSAAWLHEWFGFEVVRIPVDAQAHLDLDALERELDGEASERTTMVSTMLANNEVGTVEPVEELVRIAHAHGVPIHVDAVQAAGQIPIRFRDWDVDALSVSGHKFGTPKGLGALLVRGRTPIEPVLSGGGQERGLRSGTQNVAGAVALAIGLNESNARMQAQYRELVASRDMLIDAVRRVAPRADLTGDPERRLPGHASFIFPGVTGEALLVDLDARGIAASSGSACAIGRHEIPATLLAMGLEPSIAKSALRMTFRKPLTREQVERISLAIEESYTDLTRH

SEQ ID NO: 20940 - protein, 486 aa, Bifidobacterium longum DJO10A
MDLFRKKSVDQLVAESTPLKRTMRTFDLTMLGIGAIIGTGIFVLTGKGALTAGPALSVSFLLAAVCCGFAGLCYAEFAAMAPVSGSAYSYAYLAFGELIAFVIGWDLILEYALQAATVSAGWSGYFNKLLEGFGLHLPVELTAAYGTNPDVTTYFNLPGFVIVLIITWVLSIGINQTKRTNDVMVLIKLAIIVLFIVCAVWYVKPSNWQPFSPYGVYTFQPGSTQPYGIVPAASIVFFSFIGFDAVSSSAEETINPNKTLPRGILLSLAVSTVLYVIMTLIMTGVVPYKEFAKYIDAPVAGVILETGMNWLAVIVNLGALIGMTTVMLVQLYGQSRICYAMSRDGLFPKFFGHVHEKYRTPFKGTWFFGLLTAFAGGFININVLFELVNIGTLSAFIIVSAGILWMRKTQPNAPRGFRAPGVPVTPILAIVFCFVLIAGLNWETWVRFAVWFGLGLIVYFGYSRKRSKLGLEQKAGADAKVAATED

SEQ ID NO: 20941 - protein, 626 aa, Bifidobacterium longum DJO10A
MARAVGIDLGTTNSCIATLEGGEPTVIVNAEGARTTPSVVAFSKSGEILVGEVAKRQAVTNVDRTISSVKRHMGSDWTVDIDGKKWTPQEISAQILMKLKRDAEAYLGEPVTDAVITCPAYFNDAQRQATKDAGKIAGLNVLRIINEPTAAALAYGLEKGKEDERILVFDLGGGTFDVSLLEIGKDDDGFSTIQVQATNGDNHLGGDDWDQKIIDWLVSEVKNKYGVDLSKDKIALQRLKEAAEQAKKELSSSTSTSISMQYLAMTPDGTPVHLDETLTRAHFEEMTSDLLGRCRTPFNNVLHDAGISVSDIDHVVLVGGSTRMPAVKELVKELTGGKEANQSVNPDEVVAVGAAVQSGVIKGDRKDVLLIDVTPLSLGIETKGGIMTKLIDRNTAIPTKRSEVFSTAEDNQPSVLIQVYQGEREFARDNKPLGTFELTGIAPAPRGVPQIEVTFDIDANGIVHVSAKDKGTGKEQSMTITGGSGLPKDEIDRMVKEAEAHEAEDKKRKEDAETRNQAEAFAYSTEKLVNDNKDKLSDDIVKEVTDKVNALKEALKGDDTEKVKTAQTELMTAAQKIGQVLYAQQGAEGAAAGADGAGASAGSASGSDDDTVEAEVVDDDDDKDNK

SEQ ID NO: 20942 - protein, 254 aa, Bifidobacterium longum DJO10A
MALIVQKYGGSSVADTESIKRVAKRVVETEKKGNKVAVVVSAMGDTTDDLIDQALSIDSNPPEREMDMLMTAGERISMSLLAMAIHAEGSRAHSFTGQQAGFFTDARYGAAHIKAVRPDRVKNALSLGDIAIVAGFQGINAKGDATTLGRGGSDTSAVALAVALGADICEIYTDVDGIFTADPRIVPSARRIPSIDYESILEMASCGSKVLALRCVEYAQRFNMPLHVRSSFSRRPGTLVVPDGIDPRTLPNLD

SEQ ID NO: 20943 - protein, 430 aa, Bifidobacterium longum DJO10A
MVPIVLIIKGDKNIVTVTRVYIASPEGANGRNVVAYGMLNALTSKYKTMVFRPAVSNHDEFTPILLAASNAGLGVALSTGLDVHKVREDKNTARGDIVGAFNDAMDVSRADAALIVGTDKSHVNDPTSYEFDANVAADLKAGVFLAVCTINRWPHELDETVKLSIEGMEAAGNKVLGIFVTGCEPRHAFSVKETLAKYGLPVWTLPQVPFTDESTKDLALEAFRKNAPTDEVLAALDVDVTAPITPYAFQFGLLGKAKSNKKTIVLPEGEEDRIIKAADYLLEREIVNLIIVGNKDAILARGKELGLNYLDRARFQAMDDENVLKPMVAKLCELRAKKGMTEEQARKQLTDASYFGTMLVVLGYADGLVSGSVTPPPTPCARPCRSSRPSPARSWSPAHSSCASRTMWPCSPTAPSTSTRTPSSFPKSRC

SEQ ID NO: 20944 - protein, 563 aa, Bifidobacterium longum DJO10A
MSDFVDRVTVHVKGGDGGNGSAGIRREKYKPLAGPNGGNGGDGGSVVFVADRNATSLLDYRFMPHRVAGSGTMGLGDNKDGSKGEDLILPVPCGTVVFEARGEQGKAKHPGAQLADLRHEGDRCVVAQGGAGGLGNIALANKTRRAPGFALLGELGEERDVILELKSIADVALVGFPSAGKSSLIAAMSSVKPKIADYPFTTLVPNLGVVIAGDSRYTIADVPGLIPGASEGKGLGLEFLRHIERTEIIAHVIDCATLEPDRDPMSDYHALENELALYADKLELPLGAIPIPERPRIVILNKIDVPEAKELAEFVRPEFEKLGLKVFEISTASHEGLKELNFALSALVHEMREEVANREQAEEEARVVIKPLETKGRRPRRADEGGSALEFTVERRELGNGEVFFEVRGVKPERWVMQTNFDNDEAVGYLADRLAKLGVEDELRRKGAHPGDEVRIGRGARMVEFDWDPTISAGAEMLDGSNLGARGKDLRLEELDPRTHRRSNAERRAQYHEMMDARAAVRDAMMAERKAGHWADPTVDDDRHDETSLFGHGESSEDGETEE

SEQ ID NO: 20945 - protein, 404 aa, Xenorhabdus nematophila
MKLPIYLDYSATTPVDPRVAEKMMNYLTMDGIFGNPASRSHRFGWQAEEAVDIARNQIADLVGADPREIVFTSGATESDNLAIKGAAKFYQKKGKHIITSKTEHKAVLDTCRQLEREGFEITYLAPMNNGMIDLKELEAIMREDTILVSIMHVNNEIGIVQDIVTIGEMCRSRGIVFHVDATQSVGKLPIDLSKMKVDLMSFSAHKLYGPMGIGALYVRRKPRIRIEAQQHGGGHERGMRSGTLPVHQIVGMGEAYRIAKEELESEAERLHGLRLRLWHGIKDIEEVYLNGDLEVGAPHILNVSFNYVEGESLMMSLKDLAVSSGSACTSASLEPSYVLRALGMNDELAHSSIRFSLGRFTTAEEIDYAIKLIHNAIGHLRDLSPLWEMFKQGVDISTIEWSHH

SEQ ID NO: 20946 - protein, 224 aa, Synechococcus sp. WH 7803
MSLANAPAPTSRTLLEVIRDLDGANTELIERNKTIFFPGDPAEKVYLIRRGAVRLSRVYESGEEITVALLRENSLFGVLSLLTGHRSDRFYHSVAFTRVEMVTAPATSVRQAIEADTSVGLLLLQGLSSRILQTETMIETLTHRDMSSRLVSFLLVLCRDFGIPGSQGITIDLRLSHQAIAEAIGSTRVTITRLLGDLRNSGLVEIDRKKITVLDPIALAKRFS

SEQ ID NO: 20947 - protein, 357 aa, Phytophthora infestans
MSQLDRAVYDQYMSLDVSESVTLAEYVWIGGSGQDLRCKTKTLTKPVKSVADLPIWNFDGSSTGQAPGEDSEVLLRPVAIFKDPFRRGQHILVLCDCLKPDMTPIANNTRADAARVMKAAEGEEPWFGIEQEYTLFEKDGVTPYGWPKGGFPGPQGPYYCGAGAHSVFGRIIVDAHYRASLYAGINISGINAEVMPGQWEYQVGPCTGIESGDHLWMSRYILLRVCEDFGVNVSWDPKPIPGDWNGAGCHTNYSTKAMREEGGMAKIIEAIEKMKLKHKEHIAAYGTGNERRLTGRHETASMDTFSYGVANRGASIRIPRVAEAEGKGYFEDRRPASNMDPYVVTGRIIKTTILNEA

SEQ ID NO: 20948 - protein, 310 aa, Phytophthora infestans
MSALTQYKPVATSEKKSGAMSFLLDLAAGGVAGGISKTVVAPIERVKLLLQVQAASTQIKPEDQYKGIVDCFVRVTKEQGVNSLWRGNLANVIRYFPTQALNFAFKDKFKKLFMDGVTKEQFWRFFMGNLASGGAAGATSLLFVYPLDFARTRLGADVGKGKSRMYTGLVNCVSTIYKSDGISGLYQGFGVSVGGIIVYRAAFFGGYDTLRDVALRDPKNAPVWQKWLVAQTVTSLAGMISYPFDTVRRRMMMQAGRKDILYTSTLDCAMKIAKNEGSGAFFKGAGSNILRGTGGAIVLVLYDEFKKMMV

SEQ ID NO: 20949 - protein, 586 aa, Arabidopsis thaliana
MTSFSLTFTSPLLPSSSTKPKRSVLVAAAQTTAPAESTASVDADRLEPRVELKDGFFILKEKFRKGINPQEKVKIEREPMKLFMENGIEELAKKSMEELDSEKSSKDDIDVRLKWLGLFHRRKHQYGKFMMRLKLPNGVTTSAQTRYLASVIRKYGEDGCADVTTRQNWQIRGVVLPDVPEILKGLASVGLTSLQSGMDNVRNPVGNPIAGIDQEEIVDTRPYTNLLSQFITANSQGNPDFTNLPRKWNVCVVGTHDLYEHPHINDLAYMPANKDGRFGFNLLVGGFFSPKRCEEAIPLDAWVPADDVLPLCKAVLEAYRDLGTRGNRQKTRMMWLIDELGVEGFRTEVEKRMPNGKLERGSSEDLVNKQWERRDYFGVNPQKQEGLSFVGLHVPVGRLQADDMDELARLADTYGSGELRLTVEQNIIIPNVETSKTEALLQEPFLKNRFSPEPSILMKGLVACTGSQFCGQAIIETKLRALKVTEEVERLVSVPRPIRMHWTGCPNTCGQVQVADIGFMGCLTRGEEGKPVEGADVYVGGRIGSDSHIGEIYKKGVRVTELVPLVAEILIKEFGAVPREREENED

SEQ ID NO: 20950 - protein, 586 aa, Arabidopsis thaliana
MTSFSLTFTSPLLPSSSTKPKRSVLVAAAQTTAPAESTASVDADRLEPRVELKDGFFILKEKFRKGINPQEKVKIEGEPMKLFMENGIEELAKKSMEELDSEKSSKDDIDVRLKWLGLFHRRKHQYGKFMMRLKLPNGVTTSAQTRYLASVIRKYGEDGCADVTTRQNWQIRGVVLPDVPEILKGLASVGLTSLQSGMDNVRNPVGNPIAGIDPEEIVDTRPYTNLLSQFITANSQGNPDFTNLPRKWNVCVVGTHDLYEHPHINDLAYMPANKDGRFGFNLLVGGFFSPKRCEEAIPLDAWVPADDVLPLCKAVLEAYRDLGTRGNRQKTRMMWLIDELGVEGFRTEVEKRMPNGKLERGSSEDLVNKQWERRDYFGVNPQKQEGLSFVGLHVPVGRLQADDMDELARLADTYGSGELRLTVEQNIIIPNVETSKTEALLQEPFLKNRFSPEPSILMKGLVACTGSQFCGQAIIETKLRALKVTEEVERLVSVPRPIRMHWTGCPNTCGQVQVADIGFMGCLTRGEEGKPVEGADVYVGGRIGSDSHIGEIYKKGVRVTELVPLVAEILIKEFGAVPREREENED

SEQ ID NO: 20951 - protein, 655 aa, Arabidopsis thaliana
MSSLAIEGEEQKLGTVIGIDLGTTYSCVGVYHNKHVEIIANDQGNRITPSWVAFTDTERLIGEAAKNQAAKNPERTIFDPKRLIGRKFDDPDVQRDIKFLPYKVVNKDGKPYIQVKVKGEEKLFSPEEISAMILTKMKETAEAFLGKKIKDAVITVPAYFNDAQRQATKDAGAIAGLNVVRIINEPTGAAIAYGLDKKGGESNILVYDLGGGTFDVSILTIDNGVFEVLSTSGDTHLGGEDFDHRVMDYFIKLVKKKYNKDISKDHKALGKLRRECELAKRSLSNQHQVRVEIESLFDGVDFSEPLTRARFEELNMDLFKKTMEPVKKALKDAGLKKSDIDEIVLVGGSTRIPKVQQMLKDFFDGKEPSKGTNPDEAVAYGAAVQGGVLSGEGGEETQKNLTLLKTDILLLDVAPLSLGIETVGGVMTNIIPRNTVIPTKKSQVFTTYQDQQTTVTINVYEGERSMTKDNRELGKFDLTGILPAPRNQYFRGVPQIEVTFEVDANGILQVKAEDKVAKTSQSITITNDKGRLTEEEIEEMIREAEEFAEEDKIMKEKIDARNKLETYVYNMKSTVADKEKLAKKISDEDKEKMEGVLKEALEWLEENVNAEKEDYDEKLKEVELVCDPVIKSVYEKTEGENEDTMEMITMSYRIV

SEQ ID NO: 20952 - protein, 164 aa, Cleisostoma racemiferum
IENKINRQVTFAKRRNGLLKKAYELSVLCDAEVALIIFSNRGKLYEFCSSTSMLKTLEKYQKCNFGSPESTIISRETQSSQQEYLKLKSRVEALQRSQRNLLGEDLGPLGSKELEQLERQLDSSLKQIRSTRTQFMLDQLADLQRREHMLCEANKALKRRFEES

SEQ ID NO: 20953 - protein, 453 aa, Persea americana
MDNKGGILMQRFELGRLLGQGTFAKVYHARNLKSSQSVAIKVIDKEKVLKVGMIDQIKREISTMRLASHPNVVQLYEVMATKTKIYFVLEYVKGGELFNKVAKGKLKEDVAWKYFQQLVSAVDFCHSRGVYHRDLKPENLLVDENENLKVTDFGLGALAESKRQDGLLHTTCGTPAYVAPEVISRKGYDGAKADIWSCGVILFVLLAGYLPFHDSNLMELYRKVGKAEYKCPNWFPPEVRRLLARILDPNPNTRISIAKIKDNSWFKRGFEAKFAKGETKSKELAPLDTDAAFASSDTGVAARKPELVKPQHLNAFDIISLSAGFDLSGLFEDTNCRKEARFASKQPASAIISKLEDIAKRLRLKVKKKDEGILKLEGSKEGRKGVLSIDAEIFVVNPSFHLVEVKKSSGDTLEYQKLWNQDMRPALTDIVWAWQGDQQQQQESLVCSLGQSL

SEQ ID NO: 20954 - protein, 416 aa, Thauera aromatica
MNAPAEHATIARQHLIDPEVCIRCNTCEEMCPINAITHDARNYVVKFDVCKGCLACISPCPTGAIDSWRNVDGTRSYTIEEQLSWDALPDTTEFDNFEATLGALSGEETPPEVQQITDVATAGQGGPELAPWSASHPYVNLYTPTRPLTATVSGNYQATADDASSDIHHIVLDFGATPFPVLEGQSIGIIPPGTDANGKPHLLRMYSVASPREGERPHHNNLSLTVKRVTEDHDGHPARGIASNYVCDLKKGDKVQVTGPYGSTFLMPNHPGSSLLMICTGTGSAPMRAMTERRRRRMEQKEGGELMLFFGARAPGELPYFGPLKKLPEDFIDINFAFSRVPDEPKRYVQDRIRERADKVFRMLTDDNAFIYICGLKGMEAGVLEAFRDICRAHGTDWEALRPELLAKGRFHVETY

SEQ ID NO: 20955 - protein, 295 aa, Medicago sativa
MGNTNSSHNLLITVTVFAVTVTVFFILYFILRRRRFSPSSSSTVRVSPVTPTSSTSSSVVDSLPIFTFSSIKRRSSTVVSGDCAVCLSKFEQNDLLRLLPLCCHAFHTECIDAWLASNQTCPLCRSSVFVSESEIMKIFRSSSTSSGNNSFRLEIGNISHRREATATDNNNNNNNVAGETDRRTYSVGAFDYFVDEEAEIPVGNTNRRIFSGEKDDAAVLSVEVETPVDSQASLIGEGNWLKDYVDGLTRVMSFRGSGSSRRNDVVAGVGDFDVEANGNGFGEEISEMFRWISGV

SEQ ID NO: 20956 - protein, 706 aa, Fusarium oxysporum
MAPRGFEDEELTISLSSSHVRRPQQQQQQQSQQQQQHASSDAPTPGSRPADAPLKERIKTEQRIGAYKVLRTLGEGSFGKVKLAIHNGTGQQVALKIIARKKLISRDMAGRVEREIEYLQLLRHPHIIKLYTPNEIIMVLEYAGGELFDYIVQHGRMKEPEARRFFQQMLCAVEYCHRHKIVHRDLKPENLLLDENLNVKIADFGLSNIMTDGNFLKTSCGSPNYAAPEVIGGKLYAGPEVDVWSCGVILYVLLVGRLPFDDEHIPSLFAKIAKGTYSIPQWMPAGAANLIKKMLVVNPVHRATIEDIRADPWFTTDLPAYLQLPVEEFFNTGVDPNKAIKKNDIAPNASEKVQERLHNEVTEKISKTMGYGKSDVEEALQAAEPAAIKDAYMIVRENKMMQVNHNPEALLAEPEGSSPMLSMSSARSTTSQATTTPRPYVSKVGILPSSLPAYHKDYMEREKAGSVENSPPKVLINDEPPSNRTDAEKEETARRLRPHSRSQLRMDEANTRPQGMTPINPPKKNKPVRWQFGIRSRNSPWEALLCIHKALHKLGATYIPDEDYESRTAEERAEASGEGSFADSHDNNRGSSSSIDPKKRYNLPADPWHINVRWDTSAIKKKAASVPGTPSSPSTPEGQHHPKEPFVALHMDIQIYEMEHGVYLVDFKCSGYETAHGRLLEEKDVTSPFPFLDMAAKLIMQLAEAD

SEQ ID NO: 20957 - protein, 240 aa, Solanum lycopersicum
MDSSSSSSQFFYSMNSDLNSSDSSYEWSNFNTQSYLPFNVNDSEEMLLFGVLNAAHEETTSETVTSHRVKEEEVTSESEVIEAIPAKEKSYRGVRRRPWGKFAAEIRDSTRNGVRVWLGTFDSAEDAALAYDQAAFSMRGNSAILNFPVETVRDSLRDMKCHVDDDCSPVVALKKRHSMRKRSTNSKKVNSISKVVREVKMENVNNVVVFEDLGADYLEQLLSSSSSDQSSCDATYFSPW

SEQ ID NO: 20958 - protein, 79 aa, Bifidobacterium longum NCC2705
MAQGTVKFFLAKKGFGFIQPDDGGEDVFVHYAEIKDDGSTNKFKMLYEGDRVEYTPASSGKGTQAKDVVKLSSGEARSE

SEQ ID NO: 20959 - protein, 300 aa, Bifidobacterium longum NCC2705
MSIKVGKSFKALIAAGAALVMAASMAACGPSAGTPSEAKSSDTGTSSSANAKARSLDEIKKSGKIKIAVFSDKAPFGYVDKDGKYQGYDVYFAEQLAKDLGVEPEYTSVDPAARVDVLTSNKVDLVLANFTVTDERKEKVDFAKPYMKVALGVVSPESAQITDVSQLDGKTLIIAKGTTAETWFEKNAPNVKLQKYDQYADAYNALLDGRGDAFSTDNTEVLAWAKSNKGFKVGITHLGDDDTIAPAVQKGNTELLNFVNDEIVKLGKDNFFHKDYQETLEPVYGNEVNPDDIVVEGGAV

SEQ ID NO: 20960 - protein, 655 aa, Bifidobacterium longum NCC2705
MALPTPLQAFSGVPKINTAPDKQTIVDGEKMTGAQALIRSLEDLGVEDVFGIPGGAILPVYHEIKDNTKFRFVLMRHEQAAGHAAEGYALATGKVGVCIVTSGPGATNVVTAIADANMDSVPMVVITGQVGVQAIGTDAFQEADIVGITYPVSKHSFLVTRAQDIPRVLSEAYYIANTGRPGPVVVDLTKTAQTGDMYYSWPQRMILPGYNPTTKAHGRVLSDAAKLFSQSYRPVLYVGGGAARSNAGAQVKALADLTGAPVVTTLPARGIIPDSDPKNLGMLGMHGTIAATGAVQRADLLVAIGARFDDRVTGKLDAFAPTARVIHIDIDPAEIGKNRQPDVPIVGDVATVLDDLIPEIQRTQAIQGKPNLAPWWKAIDGWREEYPMTWDEPTDGSLAPQWVIKKLSEMADPSTIWVTGVGQHQMWASQFIDFENQHAWISSGGLGTMGYGLPAAIGASVGSAREFEGKKPVWLIDGDGSFQMTSEELAAAFLDHAPVKIAILNNSVYGMVRQWQTLFYEHHYSQTNLLDGEAHGADGAAALADGDAPLEVPDFIKLAEAYGCVGIRAFTEEEAIAAIEKANQINDRPVLIDFRVWKDAMVWPMVAAGAPNDEVTYKPGIKPLAGGTPAPGTGPDEHATGVFEHETAAATASEH

SEQ ID NO: 20961 - protein, 337 aa, Bifidobacterium longum NCC2705
MSAILEGTPDKRLVLVTGRAYPELAEKVAECLGTEILETTSYDFANGEMYVRFTEPVRGADVFVLQCHSGDINKWIMEQLIMIDALKRASAKSITVVAPFLGYSRQDKKHRGREPITARLIFDLFHAAGADRIMTVDLHAAQEQGFFDGPVDHLTAMPVLLDYVRSTLDLGNTTIVSPDAGRIKVSEQWAAKLGNLPLAFIHKQRDITRPNHAEAHGIIGDVDGRDCVVIDDMVDTAGTICEAVRTLNESGAKSVTLVATHGLLSGPAVERLSHCGAHEIVFMDTVPIPEEKRLPNMTVLSCAPLLAAGIRSVFEEGSVAILLDGLPEDMRPRNIYA

SEQ ID NO: 20962 - protein, 444 aa, Bifidobacterium longum NCC2705
MQKFSNMPLSEVASAAVPAARRVAVPTAKPASLSAEALNIPRSGIRDVFDRVERVPDAISLTVGEPSATAAPHIVAAACEAAQAGRTRYTNVLGVPEYRKAVADYSARVKGLTYDPETEIQAVDGATIGLFLALKAVVGTGDEVIIPSPFFTSYDAEVMLCGGRPVTVALRPEHGMRVNAADIEAAITPRTRAVIINSPGNPTGAVTSAAELARIAEVCKQHNIWAISDEVYHPFVFGETFGETLGGEAAVAPSIAAVPGMKDRTIVVESLSKTYAMTGWRIGYLLAPEAVIEQTGKIAELMHSSVNSLAQYAGVAALAGPQDHVAAMREEYRAKRQIVLDGLAGCPVLRLIEPQGAFYAFVDVRLTGLDSGEFADRLLDEEHVAVVPGEAFGEEGRGFVRLSYAGDAGELREGVARLRAFAERVWNPITGHHTATYHPMEVLA

SEQ ID NO: 20963 - protein, 335 aa, Bifidobacterium longum NCC2705
MNSNEFLLDSGFWGFLYKILTPVEWLQTWIMKIVHDFFVMLGVSPIGVSWVLAIIILVLVVQACIFPLFYKQMKSMRKMQALAPKMQRIQNKYKGKTDQASREAMSRETMKLYQDNDVNPAGSCLPMLIQGPVFMSMFYTLSAIPYIANGKRDALGAFDVATAKQFTQTDVFGIVSVTDNFTSAAASGKAVIGIFVFLMCFCLWFMQYFSMKRNMAAASMNKQTETMQKAMLWLFPVMYIFSGVAMPFAVLVYWLTNNVCNLCRTLWQVYAFPTPGSPAAADKEKRDHRNENARRAKAGLPSLEEEALAKAKEEAERKATQGYQRQQPVRKRKKK

SEQ ID NO: 20964 - protein, 466 aa, Bifidobacterium longum NCC2705
MAAAGTPKDDTGLERKMESRHLTMISLGGVIGTGLFVSSGYAIHQAGPLGAILAYAAGSLLVYCVMVSLGELSVAMPYAGSFHMYAKRFIGPGTAFTIAILYWLNWAVALASEFTAAGLLMQRWFPHSPSWVWSAVFIVVVFALNIMSVRLYGEAEFWFASIKVFAIIAFIVIGLLAIFGAIPIAGHDSAPLLGNFVAGGWFPSGIAPIFSTLLTVVFAFSGTEVVGVAAGETKDPSRAIPKAVHTTVLRLAIFFIGSILVMAALIPWHQAGVDTSPFVLVFQSIGMPFAGDIMNFVVLTAVLSAANSGLYVCSRMVWSLAKERLIPERFARTNFRGVPVWAVLFSMAGSLLALLSSVIAASTVYLVLVAVSGLATLVVWFSVCVCHIRFRREWARDGHSADELGYRAPGFPVLPWLAIVMCIGALVLVVLDDTQRSTLYCMIPFVACCYAAYYALERQRKRENNA

SEQ ID NO: 20965 - protein, 1523 aa, Bifidobacterium longum NCC2705
MTFKAPLDLTVHAPDGMYDPANEHDACGVGMVTTLNKRPERKIVTDAIEVLVNLDHRGAVGAEENTGDGAGILMSMPDEFMRATVPAELPEAGHYAAGIAFLDRDIETSGQQEQAIAKIVREEGLEVLAWRVVPTNPDGLGLQALAAMPGFKTLVVASPDGALAGVDLDRKTFRIRKRVEHEVGVYFASLSARTITYKGMLTTMQLTHFFEDLNDERMKATIAIVHSRFSTNTFPSWPLAQPFRLLAHNGEINTIQGNRNWLSAREGRLSSELLGEFEPLLPITTPGYSDSGTFDECLELLHLAGRSLPHAICMMLPPAWEKNPDLDPDVRAFYEYNNTLIEPWDGPADIVFTDGTQVGALLDRNGFRPGRWQLTDDGYIVLASEAGVLPEIAQEHIVSKGRLEPGEMFLVDTAEGRIIPDEEVKRNLAAQHPYRKWVEGNSVEMSDLPRREHVSHSGQSVQRRQRAFGYTEEDLKLLLTPMANTGKEPLGSMGNDAPMPALSSRSRMLFDYFTQKFAQVTNPPLDWEREEIVTSLESAIGPEPNLLADSELHAKKILIPLPVVNSDEMAQLKRLDKARILGGYYRPYVVKGLYQVAGGGKALEERLDEIFAEIDEAIANGKNFIVLSDRESNHTWGPIPSLLLTSAVQHHLLRRHTRTQISVAVEAGDVREIHHVALLIAYGAACVNPYLAFESVEDLARNGYLKVDADTAVKNLTKALSTGVLKIMSKMGVSTIMSYRGAQLFEAVGLSQEVIDEYFTGTTSRVGGVGLEEIAEEVAIRHRVAYPNQWSASPHRNLRTGGDYKWRRTGEDHLNDPEAIFLLQQSTQRGDYQMFKKYSHHINDTSNRLMTLRGLMKFNTNRKPIDIAEVEPASEIVKRFSTGAMSYGSISQEAHETLAIAMNSIGARSNSGEGGESDDRINDPQRYSRIKQIASARFGVTSDYLVHATDLQIKLAQGAKPGEGGHLPGAKVPPWIAKVRHATPGVELISPPPHHDIYSIEDLKQLINDAKMANPKARIHVKLVSEFGVGTIAAGVAKCHADVVLISGYDGGTGAAPLNAIKHAGTPWEIGLSETQQTLILNGLRSRIVVQCDGELKTGRDVVIAALLGAEEFGFATAALIVEGCVMMRACQKNTCPQGIATQDPELRARFKGKPEYVVNFFMFIAEEVREILAQLGFRTLEEAIGHVECLDQDEAIKRWKSSGIDLSNVLKQAGPVPGTILHQTIEQNHELEKALDNKLIELAQPALEHKEPVRIEMPIRNVNRTVGTMVGYEITRRYGEEGLPDDTIDMTLHGSGGQSIGAFIPRGETMRIYGEVNDYAGKGLSGGRMIVRPEDNVTFDKHSNVIAGNVTGFGATSGQMFVAGRAGERFGVRNGGATFVVEGVGDHGCEYMTGGTVVVLGPTGRNFGAGFSGGNTYVLDLDMKKVNPGAIKSGALLFKSLDAETSKLVYALVKQHAEETGSQFAAALLEDWNETVKRFTHVVPKQFVAMTKAMEEAKANNVDFNAPGAWEKVYEQVMEGAR

SEQ ID NO: 20966 - protein, 387 aa, Bifidobacterium longum NCC2705
MAQNPEATVVFGVLNETSETESRVALTPDIVTRLKRSGVSSLIEAGAGIAADYTDEDYEKAGAKVTSRDEVLAEADALGFVDRPSAETVAKLKAGQWVIGMLGSFTDADYVAALEKAGLVGIAIEKLPRKLSSAQSMDEMTSQNSVMGYKAAITAADAYGSFLPMMTTAAGTIRPAKALVLGAGIAGLQAIGTLKRLGAVVTAYDVRPASQGEVESLGAKFLDLGLDFSKGQGEGGYARALSAEEQAQQQAAVDEKAAGFDIIITTAKVPGRKPPVLLTAAGVKGLKRGAVIVDCAASDLGGNVEGSAVGEQVTEGGVKLIGAPYLASGVATTASNLLSRNVADILVHFVRDGKLGQDLTEELDDALVVAGRAAAPAAAADAEKSEK

SEQ ID NO: 20967 - protein, 354 aa, Bifidobacterium longum NCC2705
MTDQNNSTNDVDDIDVTDASDVAGVAEVDATGETANVTKQDVPYRSGFVAVVGRPNVGKSTLINALIGKQIAIASSRPETTRKAIRGILTADHAQLVLVDTPGIHRPRTLLGQRLNDVVDESLADVDVVAFLLPADQEIGPGDKRILSRLRTDFATKREDGTFKWRIPLIAIVTKIDELGRQQLINKLIEINDFADFSDIVPVSALKHDNLAEVKNVLIEHTPEGPQMYPDDQISEERPEDTIAELVRGAFLETLDDELPHSLAVVVDSIDYPEDNETGQGYDGKAQVNVSIYVERDSQKPIIIGKGASNLTYVKKKLRTPVNRIVGQKAKLDLHVKVAKGWQSDPKQLERLGF

SEQ ID NO: 20968 - protein, 259 aa, Bifidobacterium longum NCC2705
MSTLEIKDLHVHVETKEGIKPILKGATLTVHSGETHAIMGPNGSGKSTLAYTLAGHPKYVVDSGEALLDGKDILKMTPDERAKAGLFLAMQYPVEIPGVSMTNFLRTAKTEIDGEAPGIRQWAKDLSAAMKRLKMDPKFASRSVNEGFSGGEKKRAEVLQLELLKPKFAVLDETDSGLDVDALRIVSEGVNRAKEANQFGILMVTHYTRILKYIKPDIVHVFADGHFVKTGGPELADELEENGYDQYLPEGADSESALA

SEQ ID NO: 20969 - protein, 728 aa, Bifidobacterium longum NCC2705
MPRNNFDDRDDSADFQMNDSAESRPLTFGELGVPGPLVRVLAADDKKTAFPIQADTLPDSLAGRDILGRGRTGSGKTLAFSIPLVTRLGSYDSFGEIAMEEFRKEIKRRKKASLEERRADDFLPHPRGLVLAPTRELANQINDVLMPLAHTFGMNTTTVYGGVKYIHQIRDLKAGADIVVACPGRLEDLLRQQALTLSSVEVVVIDEADEMADMGFLPPVKRLLEQISPDAQHMLFSATLDHGVDEVVNTFLHDPKVHEVDSATAEPDLMTHHVFETTRGDKHELVRMLASGEGRRILFTRTKFQAKKLAKNLTQNGIPAAELHGNLNQNQRDRNLAAFDSGDVRVMVATDVAARGIDVGGVELVVQVEPPADPKSFVHRSGRTARAGKAGDVVTLVLPEQRRETRRLLNQAGIKTKMIEVTHDSPEVLELVGDRAERVDGWSLDKSQPVGNPRKGKNRGAKNAAGDESGRGGKRKHNRNRNRDEQNVAETEFQHENAGGEFVAEGEPQRKHGDKASKKAVKKNRNRAERRAGMSNPEAERRDYLFEHGDDRREERRKGDRRDGYGKNRYDERQDNGRDQHGKNCRNDRYGKGDKFDKRDRAGYGRNDDFGSRRHNAGRDFERSDSRDFERPRKPRRNERSHEDYGFSYDERSHDGRRQSMRNTRQGEGGKRIHRKNENRIVRDERSEGAKRHERRMIAKYGNTEGPNRRHSKKNRHNAPFRMKSGRR

SEQ ID NO: 20970 - protein, 343 aa, Bifidobacterium longum NCC2705
MGDMVSAILEGKPDKNLILVTGRIHPKLAEDVAEQLGIDVLETTAYDFANGEMYVRYTESVRGADVFVLQSHYKPINKAIMEQLIMIDALKRASARSITAVCPLLGYSRQDKKHRGREPISCRLVFDLLKTAGADRIMSVDLHAAQSQGFFDGPVDHLVAMPVLVDYIRDRFQGHLDNVAVVSPDAGRIRVAEQWAQRLGGGPLAFVHKTRDITRPNQAVANRVVGDVAGKDCVLVDDLIDTAGTIAGACHVLQDAGAKSVTVVATHGVLSGPAVERLKNCGAREVVLTDTVPIPEEKRWDGLTVLSIAPLLASAIRAVFEDGSVAELFDTYPEHHGQGFLFA

SEQ ID NO: 20971 - protein, 566 aa, Bifidobacterium longum NCC2705
MLIIKGDKNIVTVTRVYIASPEGANGRNVVAYGMLNALTSKYKTMVFRPAVSNHDEFTPILLAASNAGLGVALSTGLDVHKVREDKNTARGDIVGAFNDAMDVSRADAALIVGTDKSHVNDPTSYEFDANVAADLKAGVFLAVCTINRWPHELDETVKLSIEGMEAAGNKVLGIFVTGCEPRHAFSVKETLAKYGLPVWTLPQVPFTDESTKDLALEAFRKNAPTDEVLAALDVDVTAPITPYAFQFGLLGKAKSNKKTIVLPEGEEDRIIKAADYLLEREIVNLIIVGNKDAILARGKELGLNYLDRARFQAMDDENVLKPMVAKLCELRAKKGMTEEQARKQLTDASYFGTMLVVLGYADGLVSGSVNSTANTVRPALQVIKTKPGQKLVSGAFLMCFKDHVAVFSDCAINLNPDAEQLSEIALQSAETARAFGIDPKVGMLSYSTLGSGKGPDVDMVEEATKLLKEKAPDLPVVGSIQFDAAWSPTVAATKAKGNDVAGHVNVFVFPDLCAGNIGYKAVQRSSGALAIGPVLQGLNKPVNDLSRGALVRDIINTIALTAIEAQ

SEQ ID NO: 20972 - protein, 409 aa, Bifidobacterium longum NCC2705
MAKTVLVINSGSSSIKYQLVDLESGEGLASGLVEKIGEPVDGHYKHEYNGEKHELEEPIHDHEQGLKRVLGFFEEYGPNLSEAGIVAVGHRVVQGGSIFPKPALVTNKTINQVKDLAVLAPLHNGPEAKGAEVMRSLLPDVPQIFVFDSSFFFQLPKAASTYALNKEIADQYHIRRYGAHGTSHEYISSVVPDVIGKPAEGLKQIVLHIGNGASASAEVSGKPVETSMGLTPLEGLMMGGRTGDIDPAVVFHLIRNAHMNVDELDALFNKRSGMMGMTGYGDLREVHRLVSEGNEDAKLALDVYVHRIVSYIGNYTYQMGGCDVITFTAGVGENDDVVRKMVCDKLAPFGVKLDEEKNATRSKEPRIISTPDSSVIIAVIPTNEELAIARKSAAIAEAGTDTYGNTFAK

SEQ ID NO: 20973 - protein, 174 aa, Bifidobacterium longum NCC2705
MLIAAACFSYLRTECYILGFFPTGVDVKVTPSWDTLFVCGILCNVLVCLAVRIGFAARSVSDKVLGILLPIAGFVAMGFEHCVANMFFLPMGLVAKTFGFGADAAGVAALDVSGILYNLSAATLGNILGGPVRGAGLLVPQRQTARKGRWRHRLIDAIHSSPSLVILVLQGGAI

SEQ ID NO: 20974 - protein, 412 aa, Bifidobacterium longum NCC2705
MADNKRIVLAYSGGLDTSVAISYLKERTGKDVVAVSLDVGQGGESLETIKQRALACGAVESYVVDARDEFANEYCMKALKANAMYEGVYPLVSAISRPLISKHLVRAAHQFGADTISHGCTGKGNDQVRFEVSIASIDPTLKAISPIRDLSLTRDVEIAFAKEHKLPITQTEKSPYSIDQNVWGRAIETGFLEDPWNGPTKDCYSYTDDPAFPPVEDEVVIEFKEGVPVKIDGRDVTPLQAIEEMNRRAGAQGVGRIDLIEDRLVGIKSRELYEAPGAVALITAHQELENCCLEREQHRIKRDIDKRWGELVYDAQWFSPATQSLNAFIEDTQKYVSGEIRMVLHGGRAVVTGRRSDSSLYDYKLATYDSGDTFDQKSSNGFIDIYGLPSRVAAARDVKFGNGIEVPKNTVE

SEQ ID NO: 20975 - protein, 478 aa, Bifidobacterium longum NCC2705
MDQLVAESTPLKRTMRTFDLTMLGIGAIIGTGIFVLTGKGALTAGPALSVSFLLAAVCCGFAGLCYAEFAAMAPVSGSAYSYAYLAFGELIAFVIGWDLILEYALQAATVSAGWSGYFNKLLEGFGLHLPVELTAAYGTNPDVTTYFNLPGFVIVLIITWVLSIGINQTKRTNDVMVLIKLAIIVLFIACAVWYVKPSNWQPFSPYGVYTFQPGSTQPYGIVPAASIVFFSFIGFDAVSSSAEETINPNKTLPRGILLSLAVSTVLYIVMTMIMTGVVPYQDFAKYIDAPVAGVILETGMNWLAVIVNLGALIGMTTVMLVQLYGQSRICYAMSRDGLFPKFFGHVHEKYRTPFKGTWFFGLLTAFAGGFININVLFELVNIGTLSAFIIVSAGILWMRKTQPNAPRGFRAPGVPVTPILAIVFCFVLIAGLNWETWVRFAIWFGLGLIVYFGYSRKRSKLGLEQKAGADTKVAATED

SEQ ID NO: 20976 - protein, 239 aa, Bifidobacterium longum NCC2705
MSLETPNAFADEENILLHTALFKQVSPAEAEELLPHLKHATFDKGDYIFSEGDTDQRMYLLEQGRVKLIRTSSDDRVQLLSIHAPGEVLGEIPVFDPHGGPRTASAVSMSHGTRVVWLEHDALFAWLDEHPRVAIDMLQVMASRQRGNNERISDLVFMDVPARLAKTLLNLGSRFGEPVEQGLKVPHDLTQEELAQLVGSSRETVNKALMDFSNRGWIARDGRSIIIFQPGMLIRRSRR

SEQ ID NO: 20977 - protein, 563 aa, Bifidobacterium longum NCC2705
MSDFVDRVTVHVKGGDGGNGSAGIRREKYKPLAGPNGGNGGDGGSVVFVADRNATSLLDYRFMPHRVAGSGTMGLGDNKDGSKGEDLILPVPCGTVVFEARGEQGKAKHPGAQLADLRHEGDRCVVAQGGAGGLGNIALANKTRRAPGFALLGELGEERDVILELKSIADVALVGFPSAGKSSLIAAMSSAKPKIADYPFTTLVPNLGVVIAGDSRYTIADVPGLIPGASEGKGLGLEFLRHIERTEIIAHVIDCATLEPDRDPMSDYHALENELALYADKLELPLGAIPIPERPRIVILNKIDVPEAKELAEFVRPEFEKLGLKVFEISTASHEGLKELNFALSALVHEMREEVANREQAEEEARVVIKPLETKGRRPRRADEGGSALEFTVERRELGNGEVFFEVRGVKPERWVMQTNFDNDEAVGYLADRLAKLGVEDELRRKGAHPGDEVRIGRGARMVEFDWDPTISAGAEMLDGSNLGARGKDLRLEELDPRTHRRSNAERRAQYHEMMDARAAVRDAMMAERKAGHWADPTVDDDRHDETSLFGHGESSEDGETEE

SEQ ID NO: 20978 - protein, 401 aa, Bifidobacterium longum NCC2705
MAQWQTLSDRINTVAPSATLAVDSKAKAMKAAGLDVVGFGAGEPNFPTPANVVKAAADACLDPKNYKYTPTPGLPELREAIAAKMLRDSGYEVNADQVVVTNGGKQAVYESFQILLNDGDEVIIPAPYWTSYPEAVKLAGGVPVEVFAGADVNFEPSLEALEAARTEHTKAIIVNSPNNPTGAVWKPETVEAIGRWAVEHHIWVISDEIYEHLNYDDAHTTYIGAAVPECRGQLLVLNGVAKTYAMPGWRVGWMVAPLEVAKAAAKLQGHMTSNVANISQRAALAAVAGPLDEVHEMRKAFDARRRAIVTALNDIEGVNCPTPTGAFYVFADITALLGKPLGPKGTVSDTSADFAAALLDEAHVAAVPGEAFGAPGYLRFSYALADEDLAEGMRRFKEWAN

SEQ ID NO: 20979 - protein, 415 aa, Bifidobacterium longum NCC2705
MADTPNTSSEAGELYLDAAATEPVSPAVIEAMTPFLTEAYANPASVHQPGKTAARALDAARASFAAALGARPDDVIFTSGGTESDNLAIKGIAMARMRKLGLRPVYGLDETDDKQLASSRPRIIISAIEHPAVAQSAAWLHEWFGFEVVRIPVDAQAHLDLDALERELDGEAGERTTMVSTMLANNEVGTVEPVEELVRIAHAHGVPIHVDAVQAAGQIPIRMRDWDVDALSVSGHKFGTPKGLGALLVRGRTPIEPVLSGGGQERGLRSGTQNVAGAVALAIGLNESNARMQAQYRELVASRDMLIDAVRRVVPRADLTGDPVRRLPGHASFVFPGVTGEALLVDLDARGIAASSGSACAIGRHEIPATLLAMGLEPSVAKSALRMTFRRPLAREQIERVSLALEESYAGLTRH

SEQ ID NO: 20980 - protein, 508 aa, Bifidobacterium longum NCC2705
MQLFRTKSVEQTIAETGEEGRKLKRNLTWWDLSIMGVAVAVGAGIFSVGAQAAAFHAGPAVIISFLIAGIVCGAAVMCYAEFASMIPVAGSAYTFTYTTVGEIMAWIIGWDLILEMLMAGSVISKYWGVYLNDFMRLMGWNANTNLTFGSFHIDIAPIIIVAFFTTLLVFGTKIGARVDGAMTVLKIAIVFFVVIVGFFYVKASNFTPFIPPSQPASTVEGSSAVTGVMTQPLWQFATGMTPSVYGVPGILSGAALVFFAFIGFDVVATASEETKNPHKNVPLGIGVGMLLIIVMYMLVAVVTTGMVSYADLAKQDSPSLATAFELVGADWAAKIISFGIVLGLATVVMVLLLGLTRIVFAMSRDGLLPRGLSKTGKHGTPAALQIVVGAVVALVAAFFDIGVLSDMVNIGTLSAFTLVAISIPIMRKKRPDLPRAFKMPGSPWIPILIAVANFWLMLNLSVLTWIRFVVWLVVGFAIYFGYGYWHARLGKGDLTETLSAETDKAVNG

SEQ ID NO: 20981 - protein, 268 aa, Gossypium raimondii
GAWTKEEDQRLINYIRVHGEGCWRSLPKAAGLLRCGKSCRLRWINYLRPDLKRGNFTEEEDELIIKLHSLLGNKWSLIAGRLPGRTDNEIKNYWNTHIKRKLISRGIDPQTHRPLNQTANTNTVTAPTELDFRNMPTSVSKSSSIKNPSLDFNYNEFQFKSNTDSLEEPNCTASSGMTTDEEQQEQLHKQQQYDPSNGQDLNLELSIGIVSADSSRVSSANSAESKPKVDNNNFQFLEQAMVAKAVCLCWQLGFGTSEICRNCQNSNS

SEQ ID NO: 20982 - protein, 265 aa, Gossypium herbaceum
TKEEDQRLINYIRVHGEGCWRSLPKAAGLLRCGKSCRLRWINYLRPDLKRGNFTEEEDELIIKLHSLLGNKWSLIAGRLPGRTDNEIKNYWNTHIKRKLISRGIDPQTHRPLNQTANTNTVTAPTELDFRNSPTSVSKSSSIKNPSLDFNYNEFQFKSNTDSLEEPNCTASSGMTTDEEQQEQLHKKQQYGPSNGQDINLELSIGIVSADSSRVSSANSAESKPKVDNNNFQFLEQAMVAKAVCLCWQLGFGTSEICRNCQNSNS

SEQ ID NO: 20983 - protein, 263 aa, Gossypioides kirkii
AWTKEEDQRLIDYIRVHGEGCWRSLPKAAGLLRCGKSCRLRWINYLRPDLKRGNFTEEEDELIIKLHSLLGNKWSLIAGRLPGRTDNEIKNYWNTHIKRKLISRGIDPQTHRPLNQTANTNTVTAPTELDFRNTPTSVSKSSSIKNPNFNYNEFQFKSNTDSLEEPNCTASSGMTTDEEQQEQLHKKQQHDPCNGQDLNLELSIGIVSADSSRVSSANSAESKPKLDNNNFQFLEQAMVAKAVCLCWQLGFRTSEICRNCQNS

SEQ ID NO: 20984 - protein, 287 aa, Gossypium hirsutum
MDVYKRGFISETSRNEEEMELRKGPWTEEEDSMLKAHVNIHGEGRWNAVARLSGLRRTGKSCRLRWLNYMRPEIKRGNISLEEQLLILELHSRWGNRWSKIAQHLPGRTDNEIKNYWRTRVQKQAKQLNCDVNSKQFKDAMRYVWIPRLVERIRASSESPSSQPSTTTKTTYNDCISNISSSQMSYANASGSVQVDPSLLPELSGTSSDSLDTQVSSVSDLTDCYNPQSLSNYLHKGLGLEKEGAATWGRDEEFQATEEHGNGLLVGGGESSMDTVWNEENVWFLQQ

SEQ ID NO: 20985 - protein, 287 aa, Gossypium hirsutum
MDVYKRGFISETSRSEEEMELRKGPWTEEEDSMLRAYVNIHGEGRWNAVARLSGLRRTGKSCRLRWLNYMRPEIKRGNISLEEQLLILELHSRWGNRWSKIAQHLPGRTDNEIKNYWRTRVQKQAKQLNCDVNSKQFKDAMRYVWIPRLVERIRASSESPSSQPSTTTNTTYNDRISNISSSQMSYANASGSVQVDPSLLPELSGTSSDSLDTQVSSVSDLTDCYNPQSLSNYLHKGLGLEKEGAATWGRDEEFQATEEHSNGWLVGGGESSMDTVWNEENVWFLQQ

SEQ ID NO: 20986 - protein, 287 aa, Gossypium herbaceum
MDVYKRGFISETSRNEEEMELRKGPWTEEEDSMLKAHVNIHGEGRWNAVARLSGLRRTGKSCRLRWLNYMRPEIKRGNISLEEQLLILELHSRWGNRWSKIAQHLPGRTDNEIKNYWRTRVQKQAKQLNCDVNSKQFKDAMRYVWIPRLVERIRASSESPSSQPSTTTKTTYNDCISNISSSQMSYANASGSVQVDPSLLPELSGTSSDSLDTQVSSVSDLTDCYNPQSLSNYLHKGLGLEKEGAATWGRDEEFQATEEHSNGLLVGGGESSMDTVWNEENVWFLQQ

SEQ ID NO: 20987 - protein, 286 aa, Gossypioides kirkii
MDVYKRGFISETSRSEEEMELRKGPWTEEEDSMLKAYVNIHGEGRWNAVARSSGLRRTGKSCRLRWLNYMRPEIKRGNISLEEQLLILELHSRWGNRWSKIAQHLPGRTDNEIKNYWRTRVQKQAKQLNCDVNSKQFKDTMRYVWIPRLVERIRASSESASGQPSTTTNTTYNDCISNISSSQISYANASGSVQVDPSLLPELSGTSSDSLDTQVSSVSDLTDCFNPQSLSNDLHKGLGLENEGAATWSRDEFQATEEHSNGWLVGGGESSMDTVWNEENVWFLQQ

SEQ ID NO: 20988 - protein, 226 aa, Gossypium raimondii
MRKPCCDKQGTNKGAWSKQEDQKLIDYIRIHGEGCWRSLPKAAGLHRCGKSCRLRWINYLRPDIKRGNFAQDEEDLIIKLHALLGNRWSLIAGRLPGRTDNEVKNYWNSHIKRKLMKMGIDPNNHKLNQYPHHVGPLNPTTTNSMDVACKLRVFSTENDDGVSDAASYLEDETPPTGISNLDLDLTIAFPSSPIKNIIEESQKKTASIVTNNKEEQYTVPTLLLFR

SEQ ID NO: 20989 - protein, 218 aa, Gossypioides kirkii
QGTNKGAWSKQEDQKLIDYIRIHGEGCWRSLPKAAGLHRCGKSCRLRWINYLRPDIKRGNFAQDEEDLIIKLHALLGNRWSLIAGRLPGRTDNEVKNYWNSHIKRKLMKMGIDPNNHKLNQYPHHVVPLNPTTTNSMDVACKLRGCSTDNDDGVSDAASYLEDETPPTGISNLDLDLTIAFPSSPIKNIIKESQQKIASIVTNDEEEQYTAPTLLLFR

SEQ ID NO: 20990 - protein, 340 aa, Burkholderia sp. TH2
MSSYNIALNFEDGVTRFVTCKAGEKVLDAAFRARINLPMDCSDGVCGTCKCRAESGRYDLGDDYIEDALTEDEKETGLVLTCQMVPQSDCVIAVPASSTVCKTEQSRFAATVAKIDQHNDAAVVLELDVDAAAPVFLAGQYINIDVPGSGQYRSYSFSSAPGESKISFLIKKIPGGVMSTWLESAQQGNKVELVGPLGSFYLRTVERPLLFLAGGTGLAPFLSMLEVLARADSQQTVHLIYGVTRDLDLVQVDAIEAYKAKLPNFSYDTVVADADSNHPRKGWVTQHMPAEILNEGDVDVYLCGPPPMVDAVRKYFDDNGMKPNSFHYEKFTPNAAPRTV

SEQ ID NO: 20991 - protein, 510 aa, Corynebacterium efficiens YS-314
MIRSDTEYMNRFIDRVVLHLAAGDGGNGCVSVHREKFKPLGGPDGGNGGHGGDIILEVSPQVHTLLDFHYHPHVKAPRGANGAGDNRSGARGEDLILEVPAGTVVLNSKGETLADLTTVGMKFIAAAGGQGGLGNAALASRARKAPGFALNGEPGEQHDLILELKSMADVGLVGFPSAGKSSLISVMSAAKPKIGDYPFTTLQPNLGVVEVGHQTFIMADVPGLIPGASEGKGLGLDFLRHIERTSVLVHVVDTASMDPGRDPISDIEALEAELAAYQSALDEDTGLGDLDKRPRVVVLNKADVPEALELAEFLKGDIEQQFGWPVFIVSAVAQRGLDPLKYKLLEIVQQARKKRPKEKLAESVIIKPKPVDGRRRREEFEIRKDPDNPGGFLVVGEKPERWILQTDFENDEAVGYLADRLAKLGVEDKLRKAGAQTGSEVTIGGVTFEWEPMTSAVDTAASPRGTDIRLEKNERISAAERKRASQVRRGLIDEFDYGDGEEASRERWEG

SEQ ID NO: 20992 - protein, 321 aa, Lotus japonicus
MDQHGGVATGSHERNELVRVRHGSDHGSKPVKNLNGQICQICGETVGLTANGDIFVACHECAFQLCHPCYEYERNNVSPYCPQCKTRYESHKESSQMEGDDDDDDDEDDVDDLENEVKYGQGNRMKARLQWEEDADLSSSSGHDSQMQNPHLTNGQLMSGENLCATTSGPMGQSKKVQSLPYVDPKQPGLESDEEIRRVPEFGGESAATSASRPDTGSNPGPERVQGAGEGQKKRGRSSADKESKRLKRLLRNRVSAQQARERKKAYLTDLETKVKDLETNNSELKERLSTLQNENQMLRQILKNTTASRRGSNGGTNNAE

SEQ ID NO: 20993 - protein, 250 aa, Brucella suis 1330
MTKDILVLDQLNKSFGPAHIIRGVNLAVRDGERHAVIGPNGAGKSTLFHLISGNFTPSSGSIRFQGEEIGGLTPAAVNRKGLARSFQITNIFPGLTVFENIRLAVMRRYKVQFTFWRPVSSMRKVTAEVESLLEQVRLTARAYTLASQLSYSEQRSLEIGMTLASDPRLIILDEPMAGMSQEETDYTVGLIREITQNRTLMIVEHDMDVVFTLADRISVLVYGEIIATGTPKEIRENARVREAYLGEEAH

SEQ ID NO: 20994 - protein, 467 aa, Brucella suis 1330
MNTISKPSVDLHREEEPHLARNLSNRHLQLIAIGGTIGTGLFMGSGKAVSLAGPSILLIYAITGFMLFFVMRALGEILLSNLQYRSFADFAGDYLGPCAQFFTGWTYWLCWIVTAVAEVVAVSGYVSFWFPHLAPWIPALGLITILLILNLPTVRNFGEIEFWFALIKIITIIGLIITGIYMLMTGFVLPNGTQASIAHLWNHGGFFPNGSLGFIAGFQISVFAFVGIELVGTAAAEAENPMRNLPKAINNIPIRIVLFYIGALFVIITVTPWNQVDPNSSPFVAMFSLAGIGIAAHFINFVVLTSASSSSNSGIYSTSRMVYGLATVGLAPKAFSKLSNRKVPVHALIFSCIFLLSSVVLLYAGQSMIQVFTLVTTISALLFIFIWSIILVSYLQYRRKHPERHEKSTFKMPGRRASVVMVFIFFAFVLWALTQEPDTLAAMKVTPLWFVLLGIAYRVMKLKQKQS

SEQ ID NO: 20995 - protein, 333 aa, Brucella suis 1330
MEKLDITQKLADAEAAITSALRTIKTENAGLVALEEALNNGLSGPFVEAVERIVASRGRLVVTGVGKSGHIGSKLAATFASTGTSAFFVHSGEANHGDLGMIGLEDVILAISWSGETVELKGIVNYSQRFRIPLIAITSRQDSALGRAADVVLLLPKATEACPHGLAPTTSTMMQLAIGDALAIALLEARGFTPSDFKTFHPGGSLGASLIHIRDIMHRGNRLPLVKTGTPMPDAMKVLAQKSFGCVVVTDDAGELAGIVTDGDISRNLSRNLSALAVDDIMTRSPRTIDQNMLASAALKTINENHIGALIVVEANRPIGLVHFHDLLRIGAA

SEQ ID NO: 20996 - protein, 232 aa, Brucella suis 1330
MAAIIDWALVRSLPVFSGMDDAAFEQLMGLAMPRAVPKGSAVFKQGEEARLFYLLVQGRLKVMQVTADGQQLIVRVVNPGEFFGFAMALGREDYPGTPLAVVDCSVIAWSMEMMTAFMASNPALAVNTMQMIGRRLDAAHSRIREISTQEVEQHVAHAVLRLVRETGIQEDTGLRIDFPVSRQDIAELTGTTLHTVSRIVSQWQSKGWVEGGRQSLLVRDLRRLRQIAEGEI

SEQ ID NO: 20997 - protein, 401 aa, Brucella suis 1330
MKKQLVTFNAGSSTVKIGVFECDENAVRKVSKGDIDLTGSPLRFRLRGENGNLDIVLSASGADEITTILGELFDKLAEHIDPSRILAVGHRVVFGGDDFAQAVLIDDDNLEAIERLSIFAPLHQPKSLALIKAVRKIFPHLAQTASFDTAFHQTIPDTVRRFAIPQELHDRGIKRFGFHGLSYKSVIGNFSQRAPELAEGKIIAAHLGSGASLCAMHKRKSLDTSMSFSTLDGIPMATRCGALDPGVLLHLLQQEKMEADALADLLYHRSGLLGLSGLSGDTRDLLESDAPQAHTALDIFALRIAGEICRLASTPNGLDAVIFTAGIGEHQPAIRAAICQRLAWQGVELDPAANDENAFCITSRTSRTAAFVLPTDEEQIIASETFEIIRQMPATARSAFA

SEQ ID NO: 20998 - protein, 396 aa, Brucella suis 1330
MSKSDPIVIVGASRTPMGGFQGDFTNAQATDLGASAIGGALAGAGLAPEAVEEVIMGCVLPAGQGQAPARQASLKAGLPLGTGATTVNKMCGSGMKAAMLAHDLILAGSADVIVAGGMESMTNAPYLLPKARGGYRMGHGQVLDHMFLDGLEDAYDKGRLMGTFAEDCAEAYQFTREAQDAFAISSLTRAQNAIKDGLFAAEITPVKVKSGRAEVEVTIDEQPGKAKLDKIPTLRPAFREGGTVTAANSSSISDGAAALLLMRASEAEKRGLTPHAVITGHATYADKPNLFSTAPIGAIRKLSEKTGWDLKDVDLFEINEAFAVVAMAAMRDLDLPHDKVNIHGGACALGHPIGASGARILVTLLAALETHGLKRGIAGICLGGGEATAMGIERII

SEQ ID NO: 20999 - protein, 412 aa, Brucella suis 1330
MTERLSLSRDRINVLLLEGISQTAVEYFKSSGYTNVTHLPKALDKADLIKAISSAHIIGIRSRTQLTEEIFAAANRLIAVGCFSVGTNQVELKAARKRGIPVFNAPFSNTRSVAELVIGEIIMLMRRIFPRSVSAHAGGWEKTAIGSREVRGKTLGIVGYGNIGSQVGNLAESLGMTVRYYDTSDKLQYGNVKPAASLDELLKTSDVVSLHVPSSKSTSKLITEAKLRKMKKGAFLINNARGSVVDLEALAKVLQEGHLAGAAIDVFPVEPASNGERFSTPLQGLENVILTPHIGGSTEEAQERIGTEVTRKLVEYSDVGSTVGAVNFPQVQLPPRPTGTRFMHVHENRPGILNSLMNVFSHHHINIASQFLQTDGEVGYLVMEADGVGEASDAVLQEIREIPGTIRARLLY

SEQ ID NO: 21000 - protein, 400 aa, Brucella suis 1330
MTEAYICDYIRTPIGRYGGALSSVRADDLGAVPLKALMERNGSVDWEAVDDVIFGSANQAGEDNRNVARMSLLLAGLPVGVSGTTINRLCGSGMDAVITAARAIKAGEAELIVAGGVESMSRAPLVMPKADSAFSRKAEIYDTTIGWRFINPLMKKQYGVDSMPETGENVAEDYNISREDQDAFALRSQDKAAAAQANGRLAREIVSVTIPQRKGDPVIVEKDEHPRATSREALAKLPTPFRQGGTVTAGNASGVNDGAAALVIASEAAIRKYGLKPIARIIGGAAAGVPPRVMGIGPAPATRKLCARIGIAPDAFDVIELNEAFASQGLAVLRQLGIADDDKRVNPNGGAIALGHPLGMSGARIAGTAALELSLNNGKYALATMCIGVGQGIAIALERA

SEQ ID NO: 21001 - protein, 306 aa, Brucella suis 1330
MHCKILGLPVQEGTGRKGCNMGPDSYRAAGIADAIRELGHECTDLGNLAPAAQRPLQHPNHAIKALPYAVAWIEAISEAAYRESAEGFPIFLGGDHLLAAGTVPGIARRAAEKGRKQFVLWLDAHTDFHTLETTTSGNLHGTPVAYYTGQKGFEGYFPKLAAPIDPHNVCMLGIRSVDPAEREAVKKTEVIVYDMRLIDEHGVAALLRRFLERVKAEDGLLHVSLDVDFLDPSIAPAVGTTVPGGATFREAHLIMEMLHDSGLVTSLDLVELNPFLDERGRTAAVMVDLMASLLGRSVMDRPTISY

SEQ ID NO: 21002 - protein, 339 aa, Brucella suis 1330
MKKAVWGALLAAGFALSAQGGAAADTLSTVKERGKVNCGVSQGVAGFSSPDDQGKWTGFDIDFCRAVSAAVFGDPDKVSFIPLSTKERFTALQSGTVDLLSRQTTWTLSRDAGMGIHFVGTAYYDGQGFMIRKDLGVDSALKLDGASICTEQGTTTEQNVADYFGAHNIKYEPVVIDSADGILKAFETGRCDVYTTDASALYAQRLKLAEPDAYMVLPEVISKEPLGPAVRQGDDKWFNIVRWTLFALLEAEELGITQKTVAADLDSRKPDIRRFLGSEGDNGQQLGLEPKWAYNIVASVGNYGEMFERTIGEGSLLKINRGINALWNKGGLMYAPPVK

SEQ ID NO: 21003 - protein, 271 aa, Brucella suis 1330
MNTASGAIPVLHEAGPGTSQTASGIVLSARGLGKSFGGFHAVKNVDLDVEHARVHALIGPNGAGKTTVFNLLTKFLQPTSGEITLLGETITKTDPARVARKGLVRSFQISATFPHLTVLENVKVALQRPNGLATQFWRSLSALDRLDAQAVELLERVGLADARHALAADLSYGRKRALEIATTLALDPKVLLLDEPLAGMGHEDVHTIAALITDVAKDRAVLMVEHNLKVVADIAHHVTVLQRGEILASGDYATVSKDERVRTAYMGTEHE

SEQ ID NO: 21004 - protein, 429 aa, Brucella suis 1330
MAQTLYIPKESDPNETRVAGSAETVKKFIALGFDVVVEKGAGEKSRIPDAEFAAAGARIGTAVDAKTADVILKVRRPGDAELKAYKSGAALFAMLDPYGHEDAVAALARAGISAFTMEFMPRITRAQVMDVLSSQANLAGYQAVIDAAEVYDRAMPMMMTAAGTVPAAKVFVMGAGVAGLQAIATARRLGAVVTATDVRPAAKEQVASLGAKFIAVEDDEFKAAETAGGYAKEMSKDYQAKQAALVADHIAKQDIVITTALIPGRPAPRLVSKEMVASMRPGSVLVDLAVERGGNVEGAVPGEIADVNGVKIVGYLNVPGRIAASASQLYARNLIAFVETLVDKESKVLKIDPEEELVKATLLTHQGRILHPAFAKAETAPAAVTEKAEKPKAAPKAPPKAAAKPAKKAPAKAAKKPSSPKSPVDGGEA

SEQ ID NO: 21005 - protein, 324 aa, Brucella suis 1330
MTKRDTTILVLGNFDDYAVQRLSDEFNVQRMARGDTALLGSDWVKDVKGIASMSKVSADLIDALPNLEIIGNFGVGYDAVDARHAGANNVMVTNTPDVLTEEVADTTIGLLIDTVRELSKAQEFLRRGEWGKQVRYPLSKLSLRGRKVGIFGLGRIGKAVARRIEAFGLPIAYHNRRKAADVAYDYYPSLKELAGAVDTLILVAPGGAETTRAVNTEVLQALGPEGVLINIGRGSVVDEEALAQALKDGTIAAAGLDVFANEPHVPQALLDAPNTVLLPHIGSASVKTRRAMADLVVDNLIAWFDTGTAITPVPETVGVKAVRQ

SEQ ID NO: 21006 - protein, 610 aa, Brucella suis 1330
MENKRNFFITIALSILILALWQVFYLGPKTEAQREQARIEEQQRQAQQAAQNRQASSSTGDTPQMPANPDSIPGQGDTKAAGAPLTRDAAIAQSPRIEIDTPSLRGSINLTGARLDDLYLKKYHETVSDKSPEIELLAPSSLKQGYFVELGFTGNDATGAVPGPNTVWVVEGNNKLTPSTPVTLTYTNDKNLTFKRVISVDDAYMFTVDDTIINNGGSTVSLASYGRVTRFNQPEHASATYVLHEGLIGVMGQDGLQEIKYAKIKDNKDISFKDVIGGWVGITDKYWAATLIPPQDEKFTGRFSHFTNDRPRYQSDLLSAPLTVAPGQSQKIQNRVFAGAKVVNTIQNYETKYHIKQFDLLIDWGWFYFITKPMFYLIDWIYKFTGNFGVAILVVTVLLKALFFPLANKSYKSMARMKLMQPKMTEIREKYADDKMKQQQAMMELYKREKINPLAGCWPVLVQIPVFFALYKVLYVTIEMRHAPFFGWIQDLAAPDPTSIFNLFGLLPYTVPHFLMIGVWPIIMGITMFLQMRMNPTPPDPTQAAIFTWMPIIFTFMLASFPAGLVIYWAWNNTLSIIQQSVIMKRQGVKIELFDNLKGLFRRKPKEANK

SEQ ID NO: 21007 - protein, 244 aa, Brucella suis 1330
MTALLEVRNLTKRFGGLTAVNNVSFTLNKGEILGFIGPNGAGKTTVVGLISGSIYPSSGEVYFKGARIDTVPMYRRAHMGIGRTFQIMKPFPGLSVLDNVAVGAMFGRKEAHHGLTAAREQARANLDFVGLGNAIDKRAEELGGPDRKRLELAKALAMQPELLLCDEVMAGLNLVEIEEVIEVIRKVRDSGVTILVIEHVMKAIKSLSDRLMVLHHGEKIAEGSTDAVLSNPVVIEAYLGKKRA

SEQ ID NO: 21008 - protein, 406 aa, Brucella suis 1330
MSKWKDVKKVVLAYSGGLDTSIILKWLQTELGAEVVTFTADLGQGEELEPARKKAEMLGIKEIFIEDVREEFVRDFVFPMFRANAVYEGVYLLGTSIARPLISKHLIDIAKKTGADAIAHGATGKGNDQVRFELSAYALNPDIKIIAPWRDWSFKSRTQLLEFAEQHQIPVAKDKKGEAPFSVDANLLHSSSEGKVLEDPSQEAPEYVHMRTISPETAPDKATIIKIGFEKGDAVSINGERLSPATLLAKLNDYGRDNGIGRLDLVENRFVGMKSRGVYETPGGTILLAAHRAIESITLDRGAAHLKDELMPRYAELIYYGFWFSPEREMLQAAIDHSQHHVEGEVTLKLYKGNVMVIGRESAKSLYSDKLVTFEDDQGAYDQKDAAGFIKLNALRLRTLAARDRK

SEQ ID NO: 21009 - protein, 626 aa, Brucella suis 1330
MSLPDTIAPALSGALTARGYNTLTAVQNAVLAPETLASDLLVSAQTGSGKTVAFGLAMANTILEDELRFGDAGAPLAMIIAPTRELALQVRRELEWLYADTGARIASCVGGMDIRTERRALERGSHIVVGTPRRLRDHITRNALDMSQLRAIVLDEADEMLDMGFREDLEFILGEAPEDRRTLMFSATVPKPIAQLAKRFQNNALRITVQSETSQHADIDYVAMPVPPHERDHAIINTLLYYDSQNSIIFCSTREAVKHMASRLSNRGFAVVALSGELSQAERNNALQAMRDGRARVCVATDVAARGIDLPNLDLVIHADLPTNPDTLLHRSGRTGRAGRKGTCVLVVPFSRRRSAERLLHMAKLDAQTVPAPSIAAVQAKTNERILNAEVFNQPVEEEYQELLKALAERYTPEQIASAFLNREVASYPAAEEVSDAPVHPVGGKKPRSDRFEKGDRYERGERRERGEPGERFDRNARFDGVWFSVSAGRKHRADPKWLLPLICKAGDVSKRDVGSIKIFDNETRFEIAASKADEFRQSVAERGTGEKSLVIRTAVAGAGGDAAARESRGSFKPRSDKFKEGGFRDGHKSDKPRDFSRGDDFKKDGFKKGGKKPEGGGYSKKRRGE

SEQ ID NO: 21010 - protein, 556 aa, Brucella suis 1330
MYRYDEFDRDFVAARVAQFKDQVARRLSGELTEDQFKPLRLMNGLYLQLHAYMLRVAIPYGTLSSRQLRKLGSIARTYDRGFGHFTTRQNIQYNWPALKDVPQILAELAEVEMHSIQTSGNCIRNVTADHFAGAAADEVTDPRPLAEILRQWSSLHPEFSYLPRKFKIAIVGSEHDRAAIQVHDIGLQLKKNEAGELGLAVYVGGGQGRTPMVAKKIRDFLPIEDMLTYVTAIVRVYNLHGRRDNKFKARIKILVHETGIEQLTREIDAEWEEIRHGELKLPQRDIDVIESYFRMPDLPQRPEGWEILAVAQKADAEFASWVARNVTAHKHPDYAVVTISLKPVGGIPGDASAEQMELVADVAQTCSFDEIRVSHEQNLVLPHVAKADLPAVYDRLQSGGLVTPNAGLITDIIACPGLDYCALANARSIPVAQRISERFADLDRQLEIGDLKIKISGCINACGHHHVGHIGILGVEKKGEELYQITLGGSADENSAIGEITGRGFSSEEVVDAIETIVDTYLGLRESAEETFLAAYRRVGMEPFKRALYGEIRSAA

SEQ ID NO: 21011 - protein, 311 aa, Brucella suis 1330
MNNGTSPAGGETEATQTRSGFVALIGAPNAGKSTLVNQLVGTKVSIVTHKVQTTRALVRGIFIEGPAQIVLVDTPGIFRPKRRLDRAMVTTAWGGAKDADIILVIIDAQGGFNENAEALLESMKDVRQKKVLVLNKVDRVDPPVLLSLAQKANELVPFDRTFMISALNGSGCKDLAKYLAESVPNGPWYYPEDQISDIPMRQLAAEITREKLYLRLHEELPYASTVETERWEERKDGSVRIEQVIYVERESQKKIVLGHKGETVKAIGQAARKEISEILEQTVHLFLFVKVRENWGNDPERYREMGLDFPT

SEQ ID NO: 21012 - protein, 343 aa, Brucella suis 1330
MKKTLMTGVLGAAALFGIASGASADTLSDVKAKGFLQCGVNTGLLGFASPNDKGEWSGFDVDYCRAVASAIFGDPTKVKFTPLNAKERFTALQSGEVDVLIRNTTWTISRDTSLGLDFAGINYYDGQGFMINSKKLAGINSALQLSGASICVQAGTTTELNMADYFRANKMEYNPVVFEKIEEANAAYDSGRCDAYTTDQSSLYGVRLALANPDDHVILPEIISKEPFGLTVRQGDARWADVVRWTHNALLNAEEYGITQANVEEMKKSDNPDIKRLLGAEADTKIGTDLGLDKDWVVKIIKGVGNYGEIFERNIGSGSPLKIARGLNAQWNKGGLQYGIPVR

SEQ ID NO: 21013 - protein, 401 aa, Brucella suis 1330
MTRGNILIAGAGVAGLSAALELAARGWRVQIFEKAQELSEVGAGLQLAPNAMRHLERLGVADRLSGTGVTPKALYLMDGRKARPLLAMQLGDTARNRWHHPYIVCHRADLQSALLDACRNAPGIEINLGAEMTDQRMTGNSITATIKRENSVETVEAAYLVACDGVWSMQRAKAGYSKARFSGHIAWRTTLAADALPASFLGAMPEHKAVSAWLGNKAHFIAYPVKGGNFFNFVAITGGENPGEVWSKTGDHAHLQSIYADWSKPVHEILAATRDWTYWPLFEMADAQFVGPDRTIFLGDASHAVTPFAAQGAAMAIEDAAALAQALDSDDQAAGLKRFDSVRKERIAAVAKRGQLNRFAYHATGIFALGRNMLFAVRSPETFLKDLDWLYGYDAALAVRN

SEQ ID NO: 21014 - protein, 316 aa, Brucella suis 1330
MPSKTIDHAITARSLTSAATDPTHAGVLSFMRRTYSKSLKGAEAVVWGIPFDAAVSNRPGARFGPQAIRRASAIFDNDPQYPFERDLFENLAVIDYGDCLLDYGNHTKTPSTIEREAAKILKSDAFLLTLGGDHFITWPLLKAHAAKYGPLALVQFDAHQDTWFNDGRRIDHGSFVARAVRDGIIDPDLSIQIGIRTHAPEDCGIRIIYGHEVEDMPAAAIADAILKRTNGRKAYLTFDIDCLDPAFAPGTGTPVAGGPSSAKMLSVLRKLTALDFVGADVVEVAPAYDHADITAIAGATIAMYYLGLLGERKERR

SEQ ID NO: 21015 - protein, 251 aa, Brucella suis 1330
MLEIKNLHAKIADTDTEIIRGLNLTVNKGEVAAIMGPNGSGKSTLSYILAGRDDYEVTEGDILYNGESILELDPAERAAKGIFLAFQYPMEIPGVATMEFLKVAMNSQRKARGEPELKIPEFIKRVKDAAGGLNIDMNMLKRPLNVGFSGGEKKRAEILQMQLLEPSLCVLDETDSGLDIDALKIVSEGVNALRSPDRAVIVITHYQRLLEHIVPDSVHVLYKGQVIKSGDKSLALHLEENGYADVIGEAA

SEQ ID NO: 21016 - protein, 482 aa, Brucella suis 1330
MTTFAELGLSPKVIAAVEAAGYTAPTPIQAGAIPPALERKDVLGIAQTGTGKTASFVLPMLTLLEKGRARARMPRTLILEPTRELAAQVEENFVKYGINHRLNVALLIGGVSFEEQERKLERGADVLIATPGRMLDHFERGKLLLTGVEILVIDEADRMLDMGFIPDIERICKLIPFTRQTLFFSATMPPEITKLTEQFLHSPVRIEVAKASSTAKTVTQRLVKSGKKDWDKRAVLRDLIQSEGDSLKNAIIFCNRKKDVSELFRSLTRHEFDAGALHGDMDQRARMAMLSSFKDGKLRLLVASDVAARGLDIPDVSHVFNFDVPIHAEDYVHRIGRTGRAGRSGKAFTIVTSSDTKYLAAIESMIGEKIEWHDGDLSTLAVSEEADEQPRKGRNARGKGKEKPKEKASKPVAAETVDPAGQPQPVIENQHRREAIRSSNEERRGKPQTEQHKRRRDRDDDGPAPVGFGNDIPAFMLIPTGV

SEQ ID NO: 21017 - protein, 291 aa, Brucella suis 1330
MTNVKVAFLGLGVMGYPMAGHLKAKGGHDVTVYNRTAAKAAKWAEQFGGNYAATPADAVKDADFVFACVGNDDDLRSVTIGADGAFSTMKKDAIFIDNTTASAEVARELDKEAQKRGFHFMDAPVSGGQAGAENGVLTVMVGASEPVFERAKPVIEAYARSVGLMGPVGSGQLAKMVNQICIAGLVQGLAEGIHFGKKAGLDIEKLIAVISKGAAGSWQMENRSSTMNQGKYDFGFAVDWMRKDLGICLDEANRNGALLPVTALVDQFYKEVQKIGGGRWDTSSLLARLEQ

SEQ ID NO: 21018 - protein, 774 aa, Brucella suis 1330
MTKKPSSPSTRSDFDEAALFFHRYPKPGKLEIQATKPLGNQRDLALAYSPGVAAPCLAIHDDPATAAEYTARGNLVAVVSNGTAVLGLGNIGALASKPVMEGKAVLFKKFADIDVFDIEIDAHEINRIVDVVSALEPTFGGINLEDIKAPECFEVEEQLRERMNIPVFHDDQHGTAIIVASAVLNGLELAGKKIEEAKIVTSGAGAAALACLNLLVNLGAKRENIWVCDIEGVVYDSRNTLMDRWKEVYAQKTDARTLADVIGGADVFLGLSAAGVLKPELLKQMAEKPLIMALANPKPEIMPEEARAARADAMICTGRSDFPNQVNNVLCFPYIFRGALDVGATVINEEMKLAAVRAIASLAREEPSDVAARAYSGDTPTFGPDYIIPSPFDQRLILRIAPAVAKAAMETGVATRPIEDMEAYLDRLNRFVFRSGLIMKPVFAAARTQGAPMRVIYADGEDERVLRAAQVVIEERIAAPILVGRPQVVETRLRRYGLKIRPGTDFELINPEDDPRYRDYVDLYLSYTGRQGVTPEAARTIVRTNSTAIAALAVMRDEADAMICGLEGRFERHLRVVRQIIGKVPGIRDYSALSLLISQRGALFLTDTYVNAEPDANEIAEMAVLAAREISRFGIEPKAALVSHSNFGSKESASAKKMRQAAAILAEKAPDLESDGEMHGDAALSQTLRDRVFPSSRLKGEANLLVFPNLDAANITLNVVKAVTDALHVGPILLGATRPAHILTPSVTSRGVVNMTALAVVEALQKNASNRRQK

SEQ ID NO: 21019 - protein, 535 aa, Brucella suis 1330
MGRLIFIGFPGLGLVASHLPHRNGPAEEGTRNQFGHDSASRQRVFRRPVVIIKWNYVRQVALARRFKADRECAVPLKEIELTKENTGGFAALGITGVLLKGVEAAGMTEPKPIQTQAIPSQLEGQDILGIAQTGSGKTAAFSLPILQKIIGLGDKRRPKTARALILAPTRELAVQIEQTIRNVSKSAHISTALVLGGVSKLSQIKRIAPGIDVLIATPGRLTDLMCDGLVDLSQTRWLVLDEADRMLDMGFINDVKRIAKATHAERQTALFSATMPKEIASLAERLLRDPVRVEVAPQGTTASEITQVVHPVPTKEKRRLLSAMLTDADMRSVIVFTRTKHGADAVVRHLERDRYDVAAIHGNKSQNARQRALNGFRDGTLRILVATDIAARGIDVPGISHVVNYDLPDEPETYVHRIGRTGRNGASGASITLYDPATEESKLRAVERVTRSKLSIKDAPVKLAPAPVAKGPAPQGQRTEQAESRKAPAHKHRRPAQKAGEQHRAGAHASAGEAAPKPKRPFRRKRRSNGGQRAA

SEQ ID NO: 21020 - protein, 431 aa, Brucella suis 1330
MLNQQTIQNQSDRRSACPGLSRMVMAKDGAIARIKLRLGRLSTQQAFALADIAEHSGARAIELSIRSNVQLRGIAPARWDEVVTALYEAGLGADNPAADDIRNVMVSPTAGIDPGQICDVTGLASDLLAMLQAEKAFHALSPKFSLQVDGGEDCAMISHPGDIWLSATEEGKAYVFGLASSPDRQALGTIAANNVPPFIDALLRCFLRNGAARMKQLTSEREFVKTVRESLPFAIEPAYGWKRKATVAHAHLGQHRQLDSNHYIGAMPLLGRLTPLQLRELARLAQEELRLTPWQGILLPNIAPGETDRIKRALHATGLETSPKSAHARLRACSGATGCASALADTQADGNFLAARLESGSDPVHLTGCAKSCAALAPLPHTLLARSAGRYDLYAQDRFSQNGAGPSRFGQLLASDITLEEAAHILNARHQ

SEQ ID NO: 21021 - protein, 584 aa, Brucella suis 1330
MTGAEMVIQALIDQGVESIFGYPGGAVLPIYDELFQQDQIQHVLVRHEQGAGHAAEGYARSTGKVGVMLVTSGPGATNAVTPLQDALMDSIPLVCISGQVPTTLIGSDAFQECDTIGITRPCTKHNWLVKDVNDLSRVLHEAFHVASTGRPGPVVVDIPKDIQFAKGIYTPPETAPRTSYRPVLDGNAEAISEAVRLLANARKPVIYSGGGVINSGPAASRLLRELVEISNFPITSTLMGLGAYPASGKNWLGMLGMHGTYEANMTMHDCDVMLCVGARFDDRITGRLNAFSPNSKKIHIDIDPSSINKNVRVDVPIIGDVAHVLEDIVRQFRAFDRKPDRQALTEWWGQIDRWRARNSLAYTPNKDVIMPQYAIERLYELTRNRNTYITTEVGQHQMWAAQFFGFEQPNRWLTSGGLGTMGYGLPAALGVQIAHPDALVIDIAGDASIQMCIQEMSAAIQHNAPIKIFILNNQYMGMVRQWQQLLHGNRLSHSYTEAMPDFVKLAEAYGAHGIRCEKPGDLDAAIQEMIDIDKPVIFDCRVANLANCFPMIPSGKAHNEMLLPDEATDEAVANAIDAKGRALV

SEQ ID NO: 21022 - protein, 372 aa, Brucella suis 1330
MQPLKYLDEMLPWNDRLQMLECISAIEEAPDVMTFSFKTTEDNWFRYTPGQFVTLELPLERADGLGPVLRTYTLSSTPSRPYHISVTVKARIGSIGTRWMLDNLRPPMKIKAYGPNGDFSLANHPGDKYLFISAGSGITPMMSMTRWLFDCAPATDVSFINCARTPDDIIFRKELELLSGRMEAMRLAFIVEQSSARHVWPGLHGRIDRARLELLAPDFLQREIFCCGPEPFMNGVRGLLEQAGFNMANYHQESFQPASEISAVPVPSPLPETGNAAAPSMPPAVAAASVVFSQSGVEVECTENDTILLAARNGGLKIPSACEFGICGTCKVKCLSGETEMNHNGGIRDDEIAEGYILACCSRPRGRVEIDA

SEQ ID NO: 21023 - protein, 69 aa, Brucella suis 1330
MATGTVKWFNTTKGFGFIQPDQGGTDVFVHISAVQRAGLTTLDEGQKVSYEIVQDRRSGRSSADNLVAA

SEQ ID NO: 21024 - protein, 400 aa, Brucella suis 1330
MAFLADALSRVKPSATIAVSQKARELKAKGKDVIVLGAGEPDFDTPENIKQAAIAAINRGETKYTPVSGIPQLRQAIVSKFKRENGLDYKPEQTIVGTGGKQILFNAFMATLNPGDEVIIPAPYWVSYPEMVAINGGTPVFIDTKIEDNFKLTAADLEKAITPKTKWLIFNSPSNPTGAAYTQAELKSLTDVLVRHPHVWILTDDMYEHLVYGDFVFTTPAQVEPSLYDRTLTMNGVSKAYAMTGWRIGYAAGPIELIKAMDMIQGQQTSGACSIAQWAAVEALNGTQDFIPANKKIFQARRDLVVSMLNQATGLQCPTPEGAFYVYPSCAGLIGKKTEAGKVIETDKDFVTELLETEGVAVVHGSAFGLGPNFRISYATSDELLEKACIRIQRFCASLR

SEQ ID NO: 21025 - protein, 71 aa, Brucella suis 1330
MAQTGQVKFFNTEKGFGFIKPDDGGADIFVHISAVQASGLPGLADNQKVSYETEPDRRGKGPKAVNITITG

SEQ ID NO: 21026 - protein, 310 aa, Brucella suis 1330
MKLFAGNSNRVLAESVAQYLNIPLGKASVRRFADQEIFVEIQENVRGEDVFVLQSTSYPANDHLMELLIMIDAFRRSSARRITAVLPYFGYARQDRKPGPRTPISAKLVANLITEAGASRVLTLDLHAGQIQGFFDIPTDNLYAVPVIARDVKANYATGNCMVVSPDVGGVVRARSLAKRIDAQLAIVDKRRERPGESEVMNVIGDVSGKDCLLFDDIVDSGGTLCNAAEALLNKGANSVTAYITHGVLSGGAVARIASSKLKELVITDSIQPTNAINDAPNIRVLSISDLIGEAIARTAAEESVSSLFD

SEQ ID NO: 21027 - protein, 168 aa, Brucella suis 1330
MVTARMRDAAVLVPVVDRGAEATLLLTRRTDTLRKHSGQIAFPGGAIDPEDGTAERAALREANEEIGLAADRAEIIGNLPRYLTGSGFSITPVLAVVKTPFDVHPNPDEVADIFEVPLSFLMNPANHRRESRLFNGKERFYYAMPYHERFIWGATAGIIRGLYERLYV

SEQ ID NO: 21028 - protein, 533 aa, Brucella suis 1330
MAPRVLVSDKLSPTAVQIFKDRGVDVDYLPDLGKDKEKLLEVIGEYDGLAIRSATKVTEKLIAAAKKLKVVGRAGIGVDNVDIPAASRRGIIVMNTPFGNSITTAEHAIALMFAVARQLPEADTSTRAGKWEKNRFMGVEITGKTLGVVGCGNIGSIVATRGIGLKMHVVAFDPFLSDARAQELGVEKVELDELLARADFITLHTPLTDKTRNIINAQTLAKMKPGVRIVNCARGGLIVEKDLIAALKSGHVAGAGIDVYETEPATENELFSLPNVVCTPHLGASTSEAQENVALQVAEQMSDYLVKGAVSNAINMPSITAEEAPRLKPFVKLADVLGAFVGQVTDEPIQEVEVLFDGSTASMNTRALLSAALAGLIRSQVADVNMVSAPIMVKERGIIVSEVKRDKSGIFDGYIKLTVKTTVRERSIAGTCFSDGKPRFIQIKGINLDAEVGPHMLYVTNKDVPGMIGLLGTICGKHDVNIANFALGRDHPGGDAIAMLYVDEQIPQAALDELMAQEAIRAATPLEFNVGEV

SEQ ID NO: 21029 - protein, 644 aa, Brucella suis 1330
MNPNYRNFALWAIIALLLIALFNLFQSPGQRTNSREISYSQFIDDVSNGRVKSVTITGQRISGTLADNGSTFQTYSPGDTGLVSRLEDKGVAITARPESDGSSSLIGILLSWLPMILILGVWIFFMRQMQGGSRGAMGFGKSKAKLLTEAHGRVTFQDVAGVDEAKQDLEEIVEFLRDPQKFQRLGGKIPRGVLLVGPPGTGKTLLARSVAGEANVPFFTISGSDFVEMFVGVGASRVRDMFEQAKKNAPCIIFIDEIDAVGRHRGAGLGGGNDEREQTLNQLLVEMDGFEANESIILIAATNRPDVLDPALLRPGRFDRQVVVPNPDIVGREQILKVHVRNVPLAPNVDLKVVARGTPGFSGADLANLVNEAALMTARRNKRLVTMQEFEDSKDKIMMGAERRSAMTPEEKTNTAYHEAGHAIVALNVPKADPVHKATIIPRGRALGMVMQLPEGDRYSATYTWMVSRLAIMMGGRVAEELKFGKENITSGASSDIQQATKLARSMVTQWGYSDKLGRVAYGDNQEEVFLGHSVSRTQNISEETAQIIDAEVRRLIDEAYAEATRILTKKKKDWIALAEGLLEYETLTGDEINELIAGNKPSRDQGNDTPSRGSGVPKAGSSRKRKGSEPGGEPGMEPKPQPQ

SEQ ID NO: 21030 - protein, 599 aa, Brucella suis 1330
MNRELTAEEGRKRRSLKPLKRMMPFLAPYKVLVAGALFSLVLAAVTTLAVPVALRRMIDHGFTGSNAVFVNNYFGMLVLLAFALALASGLRYFFVISLGERVVADLRNAVFSHVTALSPEFFDRSQSGEIVSRLSSDTTQIKSVVGATASVALRNMILGIGALAMMVVTSPKLSALVIAAIPIIVIPLIAFGRSVRRRSRMTQDMLARANAYASEQIGAMRTLQAFTNESMVVGSFAHAVEKAYQAARSSIQARAILTAFAIFLVFSSIVAVLWFGSRDVLAGTMSAGTLGQFVLYAVFAGSSFGALSEVGGELAQAAGATERLVEILDEKPGITAPAHPVALPKPPRGEIAFENVYFSYPTRPDAPSLNGLGFTVKPGETVAIVGPSGAGKSTIFSLVMRYYDPQSGRVLMDGVALPNADPHDVRSRIAMVPQDVAIFATTIRENIGFGKPGASDAEIIAAAKAALAHEFIMALDNGYDTEVGERGITLSGGQRQRIAIARALLRDAPILLLDEATSALDAESEMLVQKALDGLMADRTTLVVAHRLATVLKADRILVLDHGRIVEEGTHESLVAKGGIYARLAKLQFEAGAGAFAAQ

SEQ ID NO: 21031 - protein, 394 aa, Brucella suis 1330
MSDPKSIVIASAARTAVGAFNGAFANVPAHELGAVAIKAALERAGVDAADVDEVILGQVLTAGEGQNPARQAAMGAGCPKETTAFAINQLCGSGLRAVALGMQQIVSGDAKIIVAGGQESMSMAPHCAYLRSGVKMGDFKMIDTMLKDGLTDAFHGYHMGITAENIARQWQLSRSEQDEFALASQHKAEAAQKAGRFDEEIVPFTVKARKGDVVVSADEYIRPGTTMEVLAKLKPAFDKEGTVTAGNASGINDGAAAVVLMDAGEAARRGVKPLARIVSWATAGVDPSIMGTGPIPATRKALEKAGWSVGDLDLVEANEAFAAQSCAVVRDLGLNPEIVNVNGGAIAIGHPIGASGARVLTTLLYEMERRDAKRGLATLCIGGGMGVALCVERD

SEQ ID NO: 21032 - protein, 217 aa, Brucella suis 1330
MKFFVDTADVKEIRELNDLGLVDGVTTNPSLILKSGRDIIEVTKEICNIVKGPVSAEVAATEYEQMMKEAAVIARIADNICIKLPVTLDGLKACKALTSEGHKVNMTLCFSANQALLAAKAGATFISPFIGRLDDTGINGMELIAEIRTIYDNYDFRTEILAASVRTVNHVKEAALIGADVVTAPPATLKALVKHPLTDKGLETFLADWAKTGQKIA

SEQ ID NO: 21033 - protein, 341 aa, Brucella suis 1330
MKFLDQAKIYIRSGNGGAGAVSFRREKFLEFGGPDGGDGGRGGDVWVEAVDGLNTLIDYRYQQHFKAKTGMHGMGRNMTGGKGDDVVLRVPVGTQIFEEDNETLICDITEVGQRYRLAKGGNGGFGNLHFTTSTNRAPRRANPGQEGIERTIWLRLKLIADAGLVGLPNAGKSTFLASVTAAKPKIADYPFTTLHPNLGVARIDGREFVIADIPGLIEGASEGVGLGDRFLGHVERTRVLLHLVSAQEEDVAKAYQVIRGELEAYEHGLADKPEIVALSQVDTLDPETRKAKVKALKKACGCEPLLLSAVSHEGLNDTLRQLARIIDLSRAEEAGTAQAEE

SEQ ID NO: 21034 - protein, 142 aa, Brucella suis 1330
MFAVIKTGGKQYRVAANDLIKVEKVAGEAGDIVEFAEVLMVGSTIGAPTVAGALVTAEVVEQGRGRKVIAFKKRRRQNSKRTRGHRQELTTIRISEILTDGAKPSKKAAEKKAPKADAAEGEAAKPKKAAPKKAAAKAESAE

SEQ ID NO: 21035 - protein, 423 aa, Brucella suis 1330
MARIVMKFGGTSVADLERIYNVARHVKREVEAGNQVAVVVSAMSGKTNELVDWVQNMPKVCGASSPFYDAREYDTIVASGEQVTSGLLAIALQSIGVDARSWQGWQIPIQTDNAHGAARIQEIDGSQIIRRMEMGQVAVVAGFQGIGPDNRVATLGRGGSDTSAVAVAAAVKADRCDIYTDVDGVYTTDPRIEPKARRLPKISFEEMLEMASLGAKVFQVRSVELAMVHKVRTFVRSSFTDPDAPGMGDPINPPGTLICDEEEIVEQQVVTGIAFAKDEAQISLRRVADRPGVSAAIFGPLAEEHINVDMIVQNVSEDGSKTDMTFTIPTGDIDKALKVLDKAKSEISFDNIQSETGLAKISVIGIGMRSHAGVAATAFKALAEKGINIRAITTSEIKISILIDGPYAELAVRTLHAVYGLDK

SEQ ID NO: 21036 - protein, 337 aa, Brucella suis 1330
MTDKLTSAPKHGHTSMLYSKVHTDLDTLDAHIAFLGIPYGSAYTIDEVTNDQTRAPTAVRQATDRAVRNLDRYDFDVDGPLYDGRAIKAVDCGDVVGDPKDPGAHYRNAEAAVRKILAAGALPLIIGGDHGIPIPVLRAYDDQGPITLIQIDAHLDWRDHINGVHDGLSSPIRRASEMAHVKDIFQIGIRAQGTARPEEYEAARAYGSNIITAYELHDVGMDAILDRIPDGGRYYITIDADGIDPSVMPAVAGPAFGGVTYAQTRKLLHGLVKKGRVVGMDIVEITPSKDVNQLTAIAAGRFFVNLIGAAVRADYFGTKAELETAAGKTMKPAHAAA

SEQ ID NO: 21037 - protein, 637 aa, Brucella suis 1330
MAKVIGIDLGTTNSCVAVMDGKNAKVIENAEGARTTPSIIAFTDGDERLAGQPAKRQAVTNPEGTLFAVKRLIGRRYDDPMVTKDKDLVPYKIVKGDNGDAWVEVHGKKYSPSQISAMILQKMKETAESYLGETVTQAVITVPAYFNDAQRQATKDAGKIAGLEVLRIINEPTAAALAYGLDKSEGKTIAVYDLGGGTFDVSVLEIGDGVFEVKSTNGDTFLGGEDFDIRLVEYLVAEFKKESGIDLKNDKLALQRLKEAAEKAKIELSSSQQTEINLPFITADQTGPKHLAIKLSRAKFESLVDDLVQRTVEPCKAALKDAGLKAGEIDEVVLVGGMTRMPKIQEVVKAFFGKEPHKGVNPDEVVAMGAAIQGGVLQGDVKDVLLLDVTPLSLGIETLGGVFTRLIERNTTIPTKKSQTFSTAEDNQSAVTIRVFQGEREMAADNKLLGQFDLVGIPPAPRGVPQIEVTFDIDANGIVNVSAKDKGTGKEHQIRIQASGGLTDADIEKMVKDAEANAEADKKRRESVEAKNQAESLVHSTEKSLAEYGDKVSADDKKAIEDAIAALKTSLEGEDAEDIKAKTQALAEVSMKLGQAMYEAAQAAEGAGAEGGEQASSSKDDVVDADYEEIDDNKKSS

SEQ ID NO: 21038 - protein, 334 aa, Brucella suis 1330
MSNKKKPMVVLTRKLPDPVETRMRELFDARLNIDDHRMSQPEIIAALKEADVLVPCITDVIDAAVIEQAGPNLKLIANFGNGVDNIDVAAAARRGITVTNTPNVLTEDTADMTLALLLSVPRRLVEGANVINERHGQWPGWSPTWMLGRRIWGKRLGIVGMGRIGTAVARRAKAFGLSIHYHNRKRVSPQVEEELEATYWDSLDQMLARMDIISVNCPSTPATFHLLSARHIALMQPTAYLVNTARGQIIDENALIDLIEEGRLAGAGLDVFEHEPAVNPRLLALAEKGKVVLLPHMGSATIEGRIDMGDKVITNIRAFVDGHRPPDRVLPNRV

SEQ ID NO: 21039 - protein, 922 aa, Pisum sativum
MEYGGGIVDDGGVFGTMVGGDQGDIIEELLGEGCWIEASENNMMAMQQTASPPQQHYIGNNIPIGMGEGDHFNHHQVDQESGFVVGKRWWIGPRGSQGPSTSVKERLVVAVGYLKEYTKNSSNNVLIQIWVPALRRRSAIHYLQQDSSSSVPVSVNPNMNVHVRFFRSHEYPRHQQQQQQYGSLLALPVFERGSGTCLGVIEFVIANQNLINYRPQLDHLSNALEAVDFRSSHNMNIQPAVKVIFEELYEAAVNEIVEVLASVCKTHNLPLALTWAPCIQQQGGGKGTTGGGGCSVSVTVPTDQMNNNNHMMMSCISTVDSACYVGDMEVLGFQEACSEYHLFNGQGIVGTAFTTTKPCFAIDITAFSKAEYPLAHHADMFGLHAAVAIPLRSVYTGSAADFVLEFFLPKDCRDTEQQKQMLNSLSLVVQQACRSLHLHVVMEDDNANHHEDQDQFTFPTTTNNYMPSSASDAATTASLSQVDAASGCSTKDTTSSSCSWIAHMMEAQNKGKGVSVSLEYLQEPKEEFKVTTCNWEREGNSVFSEFGQVIQHDQSSNSRASVEAGEESGGGGTGGGRRSSSSSSGRKSGDKRRTKAEKTISLPVLRQYFAGSLKDAAKSIGGCPTTLKRICRQHGITRWPSRKIKKVGHSLKKLQLVIDSVQGAEGAIQIGSFYASFPELSTAAAHGGGGGGDHINNNSFYNSHGDLVTNLKSPPSACSQTHAAGNKSIINGDHHHHHHQHLVMTENLAAPSAVDALMQHASTINIQDYQQLQEDHDTKQLLLHFNNNNNNSNNQTLPPRPTVTWNNNNSSSSGLLERGAFRVKATFADEKIRFSLQAVWCFRDLQLEIARRFNLNDMNNLVLKYLDDEGEWVVLACDSDLEECKDLHTSSHTRTIRLSLFQASPLNNLANSFRNNSSSPSS

SEQ ID NO: 21040 - protein, 924 aa, Pisum sativum
MEYGGGIVDDGGVFGTMVGGDQGDIIEELLGEGCWIEASENNMMAMQQTASPPQQHYIGNNIPIGMGEGDHFNHHQVDQESGFVVGKRWWIGPRGSQGPSTSVKERLVVAVGYLKEYTKNSSNNVLIQIWVPALRRRSAIHYLQQDSSSSVPVSVNPNMNVHVRFFRSHEYPRHQQQQQQYGSLLALPVFERGSGTCLGVIEFVIANQNLINYRPQLDHLSNALEAVDFRSSHNMNIQPAVKVVFEELYEAAVNEIVEVLASVCKTHNLPLALTWAPCIQQQGGGKGTTGGGGCSVSVTVPTDQMNNNNHMMMSCISTVDSACYVGDMEVLGFQEACSEYHLFNGQGIVGTAFTTTKPCFAIDITAFSKAEYPLAHHADMFGLHAAVAIPLRSVYTGSAADFVLEFFLPKDCRDTEQQKQMLNSLSLVVQQACRSLHLHVVMEDDNANHHEDQDQFTFPTTTNNYMPSSASDAATTASLSQVDAASGCSTKDTTSSSCSWIAHMMEAQNKGKGVSVSLEYLQEPKEEFKVTTCNWEREGNSVFSEFGQVIQHDQSSNSRASVEAGEESGGGGTGGGRRSSSSSSGRKSGDKRRTKAEKTISLPVLRQYFAGSLKDAAKSIGGPTTLKRICRQHGITRWPSRKIKKVGHSLKKLQLVIDSVQGAEGAIQIGSFYASFPELSTAAAHGGGGGGGDHINNNSFYNSHGDLVTNLKSPPSACSQTHAAGNKSIINGDHHHHHHHQHLVMTENLAAPSAVDALMQHASTINIQDYQQLQEDHDTKQLLLHFNNNNNNNSNNQTLPPRPTVTWNNNNSSSSGLLERGAFRVKATFADEKIRFSLQAVWCFRDLQLEIARRFNLNDMNNLVLKYLDDEGEWVVLACDSDLEECKDLHTSSHTRTIRLSLFQASPLNNLANSFRNNSSSPSS

SEQ ID NO: 21041 - protein, 921 aa, Pisum sativum
MEYGGGIVDDGGVFGTMVGGDQGDIIEELLGEGCWIEASENNMMAMQQTASPPQQHYIGNNIPIGMGEGDHFNHHQVDQESGFVVGKRWWIGPRGSQGPSTSVKERLVVAVGYLKEYTKNSSNNVLIQIWVPALRRRSAIHYLQQDSSSSVPVSVNPNMNVHVRFFRSHEYPRHQQQQQQYGSLLALPVFERGSGTCLGVIEFVIANQNLINYRPQLDHLSNALEAVDFRSSHNMNIQPAVKVFEELYEAAVNEIVEVLASVCKTHNLPLALTWAPCIQQQGGGKGTTGGGGCSVSVTVPTDQMNNNNHMMMSCISTVDSACYVGDMEVLGFQEACSEYHLFNGQGIVGTAFTTTKPCFAIDITAFSKAEYPLAHHADMFGLHAAVAIPLRSVYTGSAADFVLEFFLPKDCRDTEQQKQMLNSLSLVVQQACRSLHLHVVMEDDNANHHEDQDQFTFPTTTNNYMPSSASDVATTASLSQVDAASGCSTKDTTSSSCSWIAHMMEAQNKGKGVSVSLEYLQEPKEEFKVTTCNWEREGNSVFSEFGQVIQHDQSSNSRASVEAGEESGGGGTGGGRRSSSSSSGRKSGDKRRTKAEKTISLPVLRQYFAGSLKDAAKSIGVCPTTLKRICRQHGITRWPSRKIKKVGHSLKKLQLVIDSVQGAEGAIQIGSFYASFPELSTAAAHGGGGGGDHINNNSFYNSHGDLVTNLKSPPSACSQTHAAGNKSIVNGDHHHHHHQHLVMTENLAAPSAVDALMQHASTINIQDYQQLQEDHDTKQLLLHFNNNNNNSNNQTLPPRPTVTWNNNNSSSSGLLERGAFRVKATFADEKIRFSLQAVWCFRDLQLEIARRFNLNDMNNLVLKYLDDEGEWVVLACDSDLEECKDLHTSSHTRTIRLSLFQASPLNNLANSFRNNSSSPSS

SEQ ID NO: 21042 - protein, 924 aa, Pisum sativum
MEYGGGIVDDGGVFGTMVGGDQGDIIEELLGEGCWIEASENNMMAMQQTASPPQQHYIGNNIPIGMGEGDHFNHHQVDQESGFVVGKRWWIGPRGSQGPSTSVKERLVVAVGYLKEYTKNSSNNVLIQIWVPALRRRSAIHYLQQDSSSSVPVSVNPNMNVHVRFFRSHEYPRHQQQQQQYGSLLALPVFERGSGTCLGVIEFVIANQNLINYRPQLDHLSNALEAVDFRSSHNMNIQPAVKVFEELYEAAVNEIVEVLASVCKTHNLPLALTWAPCIQQQGGGKGTTGGGGCSVSVTVPTDQMNNNNHMMMSCISTVDSACYVGDMEVLGFQEACSEYHLFNGQGIVGTAFTTTKPCFAIDITAFSKAEYPLAHHADMFGLHAAVAIPLRSVYTGSAADFVLEFFLPKDCRDTEQQKQMLNSLSLVVQQACRSLHLHVVMEDDNANHHEDQDQFTFPTTTNNYMPSSASDAATTASLSQVDAASGCSTKDTTSSSCSWIAHMMEAQNKGKGVSVSLEYLQEPKEEFKVTTCNWEREGNSVFSEFGQVIQHDQSSNSRASVEAGEESGGGGTGGGRRSSSSSSGRKSGDKRRTKAEKTISLPVLRQYFAGSLKDAAKSIGVCPTTLKRICRQHGITRWPSRKIKKVGHSLKKLQLVIDSVQGAEGAIQIGSFYASFPELSTAAAHGGGGGGGDHINNNSFYNSHGDLVTNLKSPPSACSQTHAAGNKSIINGDHHHHHHHQHLVMTENLAAPSAVDALMQHASTINIQDYQQLQEDHDTKQLLLHFNNNNNNNSNNQTLPPRPTVTWNNNNSSSSGLLERGAFRVKATFADEKIRFSLQAVWCFRDLQLEIARRFNLNDMNNLVLKYLDDEGEWVVLACDSDLEECKDLHTSSHTRTIRLSLFQASPLNNLANSFRNNSSSPSS

SEQ ID NO: 21043 - protein, 219 aa, Leymus triticoides
  misc_feature (50)..(50): Xaa can be any naturally occurring amino acid
  unsure (1)..(219): unsure at all Xaa locations
GRRRVEMEDRHVAKLALGGDPEVALFAVFDGHGGAAEFAAENMPKFMAEXVRKVDGGGSEEIEGAVKKCYLKTDEEFLKREESGGACCVAALLQKGGLTVSNTGDCRAVLSRAGTAEALASDHRASCEDERERIENLGGFIVNNRGTWRVQDSLAVSRGIGDAHLKQWVVADPDTRTLLVDPQCEFLVLASDGLWDKVDNQEAIDIARPLCIGNDKASR

SEQ ID NO: 21044 - protein, 221 aa, Leymus cinereus
GRRRVEMEDRHVAKLALGGDPEVALFAVFDGHGGKNAAEFAAQNMPKFMAEEVRKVDGGDSDEIEGAVKKCYLKTDEEFLKREESGGACCVTALLQKGGLTVSNTGDCRAVLSRSGTAATLTSDHRASREDERERIENLGGFVVNNRGTWRVQGSLAVSRGIGDAHLKQWVVADPDTRTLLVDPQCEFLVLASDGLWDKVDNQEAIDIARPLCIGNDKASR

SEQ ID NO: 21045 - protein, 233 aa, Rhodobacter sphaeroides
MNKLDESLLTKLPPFSRLDRPQIRTILDQAAPRRYDEGTTVFGEGMAAERFYLLLDGTIRVVRTTPTGEQIIALHIGPGQLFGIAPALARDTYPATAVAAADCVTLSWPVRLWADFTANYPGFATESYRTLGARLGEMQNRITELATQQVEQRVAACLLRLVDQSGRKVEAGIEISFPITRQNISEMTGRTLHTVSRLLWAWEREGIAESARRRIVVTAPHRLVVLSGASGQG

SEQ ID NO: 21046 - protein, 322 aa, Castellaniella defragrans
MRAQDMLLDAARRDPKRIVLCEGDDPRVKAAARRAAADGIAQVLLLGSSEDVPGVHGIRPADSGWLDAFAEELLSLRRARGMTPEQAREAVRQPLVFAALMVRLGHADGSVAGAVHTTADVVRTAIQVIGKRPGVRTVSSFFMMMRDEPFPTGEHAMVFSDCGLVIEPDSRELAEIALASARSARTLLGIEPRVAMLSFSTHGSAAHQQIDKIREAMALARRQAPDLLIDGEMQLDTAIVPEVARRKWPQSSVAGQANVLVFPSLDAGNIGYKLVERLGHATALGPILQGLDKPANDLSRGCSADDIHQVIAVTAVQAAWTD

SEQ ID NO: 21047 - protein, 588 aa, Burkholderia sp. ICD
MTPSEAFVETLAANGVTEMFGIMGSAFMDAMDIFAPAGIRLIPVVHEQGAGHMADGYARVSGRHGVVIGQNGPGISNCVTAIAAAYWAHSPVVMITPEAGTMGIGLGGFQEAKQLPMFQEFTKYQGHVTHPARMAEFTGRCFDRALAEMGPTQLNIPRDYFYGQIKAEIPQPQRLDRGPGGDQRLDEAAELLAQAKFPVIISGGGVVMGDAIEECKALAERLGAPVVNSYLHNDSFPANHPLWCGPLGYQGSKAAMKLIQRADVVVALGSRLGPFGTLPQHGMDYWPQNAKIIQIDADHKMLGLVKKISVGICGDAKAAAKALTQRLEGRTLVCDASREERAGEIAAEKAAWEKELDGWTHERDPYSLDMIEEQKGERTPGGGNYLHPRQVLRELEKAMPEDVMVSTDIGNINSVANSYLRFNKPRSFFAAMSWGNCGYAFPTIIGAKVAAPHRPAVSYAGDGAWGMSLMETMTCVRHNIPVTAVVFHNRQWGAEKKNQVDFYNRRFVAGELDNQSFAGIARAMGAEGVTVDRLEDVGPALKRAIDAQMNHGKTTIIEIMCTRELGDPFRRDALAKPVRLLDKYKDYV

SEQ ID NO: 21048 - protein, 285 aa, Burkholderia sp. ICD
MKAINRIIERARISPRRIVLCEAEDPRMLEAAQRASREGIAHIVLVGPSERIRAAAAGHNIDLSGMELVDPAISPLAPSLTEALFALRSKKGMTLEQAQQEILKPLCFANLMVRLDHADGSVAGAVHTTADVVRTAIQIIGIHPSFKLVSSFFLMMLCEPFHTLKGGLIFSDCGLVVDPDAGELAQIAMAAADSAQSLLMEEPRVAMLSFSTSGSARHAAVDKVVEATRQVRAARPHLAIDGDVQLDAALVSEIAMRKIEHSQVQGHANVLIFPSLEAGNIGYKL

SEQ ID NO: 21049 - protein, 586 aa, Ralstonia sp. EDS1
QAMTPSEAFVETMVANGVTDMFGIMGSAFMDAMDIFAPAGIRLIPVVHEQGAAHMADGYARASGRHGVTIGQNGPGISNCVTAIAAAYWAHSPVVIITPETGTMGMGLGGFQEANQLPMFQEFTKYQGHVNNPKRMAEYTARCFDRAMSECGPTQLNIPRDYFYGEIECEIPKPMRVERGAGGEQSLQAAADLLSTAKFPVILAGGGVVMGNAVEECKALAERLGAPVVTGYLRNDAFPASHPLWAGPLGYQGSKAAMKLIAQADVVIALGSRMGPFGTLPQHGMDYWPKEAKIIQVEADHTNLGLVKKISVGIHGDAKATAAELSKRLAGKTLACDATKDARAQTIKAEKDAWEKELTEWTHERDPYSLDMIEEAKKEGGKFLHPRQVLRELEKAMPPRVMVSTDIGNINSVANSYLRFEEPRSFFAPMSFGNCGYALPTIIGAKCASPDRPAIAYAGDGAWAMSMVEIMTAVRHNIPVTAVVFHNRQWGAEKKNQVDFYNRRFVAGELENPSFAEIARTMGAEGITVDTLEDVGPALKKAIDMQMNEGKTCVIEIMCTRELGDPFRRDALSKPVRLLDKYKDYV

SEQ ID NO: 21050 - protein, 588 aa, Ralstonia sp. EDS2
GPQAMTPSEAFVETMVANGVTEMFGIMGSAFMDAMDIFAPAGIRLIPVVHEQGAAHMAYGYARASGRHGVTIGQNGPGISNCVTAIAAAYWAHSPVVIITPETGTMGMGLGGFQEANQLPMFQEFTKYQGHVNNPKRMAEYTARCFDRAMSECGPTQLNIPRDYFYGEIECEIPKPMRVERGAGGEQSLQAAADLLSTAKFPVILAGGGVVMGNAVEECKALAERLGAPVVTGYLRNDAFPASHPLWAGPLGYQGSKAAMKLIAQADVVIALGSRMGPFGTLPQHGMDYWPKEAKIIQVEADHTNLGLVKKISVGIHGDAKATAAELSKRLAGKTLACDATKDARAQTIKAEKDAWEKELTEWTHERDPYSLDMIEEAKKEGGKFLHPRQVLRELEKAMPPRVMVSTDIGNINSVANSYLRFEEPRSFFAPMSFGNCGYALPTIIGAKCASPDRPAIAYAGDGAWAMSMVEIMTAVRHNIPVTAVVFHNRQWGAEKKNQVDFFSRRLVAGELENPSFAEIARTMGAEGITVDTLEDVGPALKKAIDMQMNEGKTCVIEIMCTRELGDPFRRDALSKPVRLLDKYKDYV

SEQ ID NO: 21051 - protein, 681 aa, Nicotiana glutinosa
MVSKKKLDFGFNGFQVPFIPKAPRSVRRRGTCKKFDDDQICAFELLAAVAGKLLQESESSTSSNAAEGKYELSDCRDGIKCEQVEEDKAVKSECLDQGSCVESAYVPEPAVREQNLKRDLDKPYYAENSSILEQHTSTVIGSDSDMTLENCKEVNVADGNFPAKVEDFDSKISGTQKHLDDDSKQIDDLTVTNACRVKGPIEKHVNNNALFNSESSVQLSLYRDLVPRASFVKQRNSVKLGVRDDDDNSFGCYRYSTKLRTFRTTSRIGYRRIRKMLTSRRWKVAPKLKEYERSYTNGGVESFYVSGKSGRARKRCQPEVPSKRRKLSDHGFAFAYYQEASSESISNSPEKGIKRDTNTSHAIPPRGTADSVTVKNHHKKDPNVKFSIKSFKVPELYIEVPETATVGSLKRTVMEAVTAILESGLRVGMVLQGKKVRDDSRTLEQAGISQNGNLDNLGFTLEPRFTQVSPSLSPNDRPASSAYVADQELTRLPPSPSSELGITNASSDPPATTLDKHHENNFSAELFPTNSVDPSTDIAIPDSRALVIVPPVNPEALAMVPVNQKSKRSELSQRRIRRPFSVAEVEALVEAVEHLGTGRWRDVKMRAFDNADHRTYVDLKDKWKTLVHTASIAPQQRRGEPVPQDLLDRVLAAHAYWSQQQGKQHVEPLKILDAKAQKVGA

SEQ ID NO: 21052 - protein, 402 aa, Azoarcus evansii
MPRHVYICDAIRTPFGRYGGTLSSMRADDLAALPIKALVARNASVDWAAVDDIIYGCANQAGEDNRNVARMAALLAGLPVEVPGTTVNRLCGSSLDALGMVARAIASGETELMIAGGVESMSRAPFVLGKADSAFSRSAKIEDTTIGWRFVNPLMKAQYGIDSMPETAENVAQEFGVSRADQDAFALRSQQRWSAANERGFFGREILPVEIPRKKGDPVIFSVDEHPRADTTLEGLAKLKGVVRPDGSVTAGNASGVNDGACALLLASEDAVRRHGLTPRARILGSAAAGVPPRIMGIGPAPATQKLIARLGMDIGEFDTIELNEAFAAQGLAVLRQLGLPDDGEHVNPNGGAIAIGHPLGASGARLVTTALNQLETTGGRYGLATMCIGVGQGIALAFERV

SEQ ID NO: 21053 - protein, 272 aa, Leptosphaeria maculans
PVKQNGIKRSETGESNKSDKTNGDCGANGANGIGGLVRVPTTKPPVFEPQVGYRQWVAQAGTLIADLLTCAGADHVITMDLHDPQYQGFFDIPVDNLYGRHLLRKYIQFNIPNYLQAVVVSPDAGGAKRATAIADSLGMPFALIHKERRPTQINDRQNATMMLVGDVADRTTILIDDLADTSNTITRAAKLLKKEGATQVVALITHGILSGDAIDRINASALDKVIVTNTVPQAEHKARCPKLEVLEVGNVFAEAIRRVHHGESISVLFDYS

SEQ ID NO: 21054 - protein, 783 aa, Candida albicans
MDKIRAVISGGEKPPVDTDNDHNTDFEADRKMPDLDIVVSKSQEFDPVTSHLVNDIMEDEYAAVHVEDDSPYPEVRAAVPSTDDPTLPQNTIRAWVIGLILTTVGCGMNMLFSFHSPSFAITTFVTSILAWPIGNFWAWIVPDWKIFGASLNPGPFNVKEHTIITIMANVSFGTGAAYATDILLAQNMFYKSNFGWGYNLLLIWSTQCIGFAFGGVMRRFVVDSPGAIWPSNLVTATFLTNMHINENHTANGWKISRLAFFVIVFVASFVWYWFPGYIFQALSYFSWITWIKPNNVIINQVFGSSSGLGMIPNNIALDWNQIAGYIGSPLIPPASVIATIFGSIVLIFWIVVPAIHYSNTWYSQYLPISSTGSFDRFQQTYNVSKIIDHKTLSFNEAEYKKYSPLFLSTTFAISYGLSFASILATITHTICFHGRDLIASLKAKEKPDVHNRLMKAYKPVPEWWYLVVFLVFFGMSIATVRAWPTEMPVWGLVFALIIAIIFLLPVAIIYAKTNIAVGLNVVTEFIVGYVLGGRPLCMMLFKTFGYITNNQAVTFVQDMKLGHYMKIDPRTLFWAQFAATIWGSLVQIAVLEWAYGAIDNLCAADQKNHYTCPNGKVFFNASIIWGVIGPQRQFSHGQIYYGLLFFFIIGAVTPVINWLILKKWPNSPVKYLHWPVFFSGTGYIPPATPYNYTSYCAVGLFFGWWIKKKWFHWWSKYNYSLSAGLDIGLAWCSLIIFLCLSLTNTDFPSWWGNDVINTTLDTQVVTNIRHILKEGEAFGPSSW

SEQ ID NO: 21055 - protein, 574 aa, Lotus japonicus
MEGKGYTLDGTVDLAGRPVLSSLTGKQKACTYILVYRVLERFAYYGVGANLVNFMTTQLNKDVVSSITSFNNWSGLATLTPILGAYIADTYTGRFWTITFSLLIYAIGLVLLVLTTTLKSLRPACENGICREASNLQVALFYTSLYTIAVGSGAVKPNMSTFGADQFDDFRHEEKEQKVSFFNWWAFNGACGSLMATLFVVYIQEKNGWGLAYSLSAIGFLLSSIIFFWGSPVYRHKSRQARSPSMNFIRVPLVAFRNRKLQLPCNPSELHEFQLNYYISSGARKIHHTSHFSFLDRAAIRESNTDLSNPPCTVTQVEGTKLVLGMFQIWLLMLIPTNCWALESTIFVRQGTTMDRTLGPKFRLPAASLWCFIVLTTLICLPIYDHYFIPFMRRRTGNHRGIKLLQRVGIGMAIQVIAMAVTYAVETQRMSVIKKHHIAGPEETVPMSIFWLLPQNIILGVSFAFLATGMLEFFYDQSPEEMKGLGTTLCTSCVAAGSYINTFLVTMIDKLNWIGNNLNDSQSRITIMPFFSVISALNFGVFLWVSSGYIYKKENTSTTEVHDIEMSAEKTVKY

SEQ ID NO: 21056 - protein, 1135 aa, Nicotiana plumbaginifolia
MASGSRTKHSHQSGQGQGQVQAQSSGTSNVNYKDSISKAIAQYTADARLHAVFEQSGESGKSFDYSQSVKTTTQSVVPEQQITAYLTKIQRGGHIQPFGCMIAVDEASFGVIAYSENACEMLSLTPQSVPSLERPEILTVGTDVRTLFTPSSSVLLERAFGAREITLLNPIWIHSKNSGKPFYAILHRVDVGIVIDLEPAKTEDPALSIAGAVQSQKLAVRAISHLQSLPGGDVKILCDTVVESVRELTGYDRVMVYKFHEDEHGEVVAESKRPDLEPYIGLHYPATDIPQASRFLFKQNRVRMIVDCHATPVRVVQDESLMQPLCLVGSTLRAPHGCHAQYMANMGSIASLTLAVIINGNDEEAVGGRSSMRLWGLVVGHHTSARCIPFPLRYACEFLMQAFGLQLNMELQLASQLSEKHVLRTQTLLCDMLLRDSPTGIVTQSPSIMDLVKCDGAALYCQGKYYPLGVTPTEAQIKDIVEWLLTYHGDSTGLSTDSLADAGYPGAALLGDAVCGMAVAYITSKDFLFWFRSHTAKEIKWGGAKHHPEDKDDGQRMHPRSSFKAFLEVVKSRSLPWENAEMDAIHSLQLILRDSFKDAEASNSMAVVHAQLGEMELQGIDELSSVAREMVRLIETATAPIFAVDVDGRINGWNAKVAELTDLSVEEAMGKSLVHDLVHEESQETAENLLFNALRGEEDKNVEMKLRTFGSEQPKKAVFVVVNACSSKDYTNNIVGVCFVGQDVTGQKVVMDKFIHIQGDYKAIVHSPNPLIPPIFVSDENTCCSEWNTAMENLTGWSRGEIIGKMLVGETFGSCCRLKGPDAMTKFMIVLHNAIGGQDTDKFPFSFSDRNGKYVQALLTANKRVNMEGQIIGAFCFIQIASPELQQALRVQRQQDKKCYSQMKELAYLCQEIKSPLNGIRFTNSLLEATDLTEDQKQYLETSTACERQMSKIIRDVDLENIEDGSLTLDKEEFFLGSVIDAVVSQVMLLLRERSVQLIRDIPEEIKTLTVHGDQVRIQQVLADFLLNMVRYAPSPDGWVEIQLQPNMKQISDEVTVVHIEFRIVCPGEGLPPELVQDMFHSNRWVTKEGLGLSMCRKILKLMNGEIQYIRESERCYFLIILDLPMTGRGSKSVG

SEQ ID NO: 21057 - protein, 110 aa, Sinapis alba
MSGVWVFKNGVIRLVENPNQSGGDTNSRRKVMVYLPTGEVISSYSTLEQILRSLGWERYFGGGDTDLLQFHKRSSIDLISLPKDFTKFSSVYMYDIVVKNPNYFHVRDSN

SEQ ID NO: 21058 - protein, 605 aa, Escherichia coli K12
MGKIIGIDLGTTNSCVAIMDGTTPRVLENAEGDRTTPSIIAYTQDGETLVGQPAKRQAVTNPQNTLFAIKRLIGRRFQDEEVQRDVSIMPFKIIAADNGDAWVEVKGQKMAPPQISAEVLKKMKKTAEDYLGEPVTEAVITVPAYFNDAQRQATKDAGRIAGLEVKRIINEPTAAALAYGLDKGTGNRTIAVYDLGGGTFDISIIEIDEVDGEKTFEVLATNGDTHLGGEDFDSRLINYLVEEFKKDQGIDLRNDPLAMQRLKEAAEKAKIELSSAQQTDVNLPYITADATGPKHMNIKVTRAKLESLVEDLVNRSIEPLKVALQDAGLSVSDIDDVILVGGQTRMPMVQKKVAEFFGKEPRKDVNPDEAVAIGAAVQGGVLTGDVKDVLLLDVTPLSLGIETMGGVMTTLIAKNTTIPTKHSQVFSTAEDNQSAVTIHVLQGERKRAADNKSLGQFNLDGINPAPRGMPQIEVTFDIDADGILHVSAKDKNSGKEQKITIKASSGLNEDEIQKMVRDAEANAEADRKFDELVQTRNQGDHLLHSTRKQVEEAGDKLPADDKTAIESALTALETALKGEDKAAIEAKMQELAQVSQKLMEIAQQQ

SEQ ID NO: 21059 - protein, 423 aa, Thauera sp. MZ1T
MSKQGMGNFAESEAAARGLAYDDIWLVAGRRTPFADYNTVLRDVSPTDLGIAAARALFADSGIPAAEVDAIVAGNMAQSSFDAYYLPRHIGLYSGVNPDVPALLVQRLCCTGFDTILTAADHITLGKANVVLCVGAESMSRNPVAAYTHRAGFRMGQVEFKDFLWEATLDTAPKTSMGGTAENLAVRYGIDRDEVDRFAAQSFARGVAAWEAGWFGDEVSALANETWELDGYKPRGIRLADRASVCDRDGHVRPTALEILQKLKPAFGGVQTGGNSSAIVDGAAAVLVARGDWVRAHGLQPLARVVAGAAVAVPPEIMGIGPAPAIRAAARLAGIAVEDIGRVEINEAFGAQYLACERELALDRDKANVHGGAIAIGHPLGASGVRLTHTVARAVRAAGLQYGVASACAGGGQGVAVIVENVA

SEQ ID NO: 21060 - protein, 310 aa, Thauera sp. MZ1T
MENLKVSLIGVPTDVGAGVRGASMGPEALRVAGLGRAIAAFGAEVRDCGNLAGPSNPELPAVNGFRHLAEVAQWNLAVHQAVYAELSEGRVPIMLGGDHCLAIGSISAVARHCRETGRKLRVLWFDAHADLNTATMTPSGNIHGMPVACLCGHGPEMLTGIGGEMPAIRPEQIRQIGIRSVDEGEKRFLHDLCVEVFDMRYIDEIGMRATMEQALAGVDQDTHLHVSLDVDFLDPTIAPGVGTTVRGGPTYREAELCMEMIADTGQLASLDIVELNPALDHCNMTAELAVDLVESLFGKSTLMRMHRNYR

SEQ ID NO: 21061 - protein, 435 aa, Thauera sp. MZ1T
MKAVKTLELAAASPEPVIKAEAGAAAAPRPIRKSAKLAEVCYDIRGPVLVRAKQMEDEGHKIIKLNIGNLAAFGFDSPEEIQMDMIRNLPNAAGYSDSKGIFSARKAVMHYTQQKGIKGVTIEDIYIGNGVSELIVMAMNALLDAGDEVLVPAPDYPLWTAAVSLSGGKPVHYLCDESKGWLPDIDDMRAKINANTRAIVVINPNNPTGAVYPDETLKQIVALAREHDLILYADEVYDKVLYEGVRHTSMAALSEDVLTIIFNGLSKNYRSCGYRAGWMVVCGDKRRANDYIEGLNMLASMRLCANVPGQYAIQTALGGYQSIDDLVAEGGRMRRQRDLAWELINQIPGVSCVKPQATLYMFPRLDPKVYPIEDDQAFIAELLEEERVLLVQGSGFNWPHPDHFRLVFLPHEDDLRDAIGRIARFLENYRKRHGT

SEQ ID NO: 21062 - protein, 860 aa, Thauera sp. MZ1T
MRFDKLTTKFQQALADAQSIAVGNDQQFIEPLHVLQALLEQDDGGSVSLLQRAGVNVPPLKNAVAKAVGRLPKVEGHGGEVSIGRDLNNLLNVTDREAQKRGDQFIASEMFLLALADDKGEAGRLLKENGLARKALEAAIEAVRGGANVGSQDAEGQRESLSKYCLDLTERARSGKLDPVIGRDDEIRRAIQILQRRTKNNPVLIGEPGVGKTAIVEGLAQRIVNDEVPETLKGKRVLSLDMAALLAGAKYRGEFEERLKAVLKEIAQEEGRIIVFIDELHTMVGAGKAEGAIDAGNMLKPALARGELHCIGATTLDEYRKYIEKDAALERRFQKVLVEEPSVEATIAILRGLQEKYEIHHGVDITDPAIVAAAELSHRYITDRFLPDKAIDLIDEAAARIKMEIDSKPEVMDKLDRRMIQLKIEREAVKKEKDEASLKRLQLIEDELAKLQREYNDLEEVWKAEKAKVAGSAHIKEEIDALRAQMAEYQRKGQLDKVAELQYGKLPQLEGQLRMAEQAGQNAAPNKLLRTEVGAEEIAEVVSRATGIPVSKMMQGEREKLLKMEDKLHERVVGQDEAVRLVADAIRRSRAGLSDENRPYGSFLFLGPTGVGKTELCKTLANFLFDSEEHLIRIDMSEFMEKHSVARLIGAPPGYVGYEEGGYLTEQVRRKPYSVILFDEVEKAHPDVFNVLLQVLDDGRMTDGQGRTVDFKNTVIVMTSNLGSQMIQAMAGDDYGVIKLAVMAEVKTYFRPEFINRIDEVVVFHALDEKHIAGIAKIQLQYLEKRLARLEMGMEISDAALAELATAGFDPVFGARPLKRAIQERIENPLAKAILEGRFAAKDCIRVDAEGGQLVFRRAD

SEQ ID NO: 21063 - protein, 393 aa, Thauera sp. MZ1T
MANREVVVLSAVRSAVGGFGGSLKDMEPSDLGAVVIKEAIARAGVDPKAVSFASVGHCIPTDSRYAYVSRVATINAGMSMDSVAFQVSRLCGSAQQAIVSSAQAIMLGDADFAIGGGVEVMSRGTYLLPALRSGARMGDTKAIDSMVAVLTDPFGVGHMGITAENLCTKHGITREEQDAFALESQKRAAAAIAEGRFKGQIVPITFETRKGTVVFDTDEHPRMTTMEALGKMKPAFKKDGSVTAGNASGINDAAAFLVLADAAKAAAGGHKPIARLVSYAIAGVPNDVMGEGPIPATKLALQRAGLKLDQIDVIESNEAFAAQSITVNRGLGLDTAKVNPNGGAISLGHPVGATGSVIITKLLHELIRTNGRYGVATMCIGGGQGITTVWERV

SEQ ID NO: 21064 - protein, 207 aa, Thauera sp. MZ1T
MNPASGPHGLPPLEQIRRRLAAGPHRDGGFNGDGRDLARSRPPKPAAVLVPLVVRDEVPSVLLTRRTDHLHHHPGEISFPGGRLEDDDPSPVHAALRETEEEIGLARRHVELIGALPDYFTGTGFRVTPVVGVVHPPLELTLDAFEVAEAFEVPLAHFLDPRNHQEHSILHEGRMRRFHAMPWHGYFIWGATAGILMSLYRLLNEEG

SEQ ID NO: 21065 - protein, 409 aa, Thauera sp. MZ1T
MSDVNKVVLAYSGGLDTSVILKWLQDTYQCEVVTFTADLGQGEELEPARAKALQFGIQPENIFIDDLREEFVRDFVFPMFRANTIYEGEYLLGTSIARPLIAKRQIEIARATGADAVSHGATGKGNDQVRFELGYYALMPGVKVIAPWREWDLLSREKLLAYAEKHGIPIEMKHKQGGSPYSMDANLLHISFEGRHLENPAAEAEESMWRWTVSPEAAPDAAEYIDLEFEQGDLVAIDGKRMKAHELLARLNELGGKHGIGRLDLVENRYVGMKSRGCYETPGGTILLRAHRAIESITLDREVAHLKDDLMPRYASMIYNGYWWSPERRAIQALIDHTQQTVNGWVRLKLYKGNVIVTGRDSKTDSLFDPTIATFEDDAGAYNQKDAHGFIRLNALRMRIAANAKAKRG

SEQ ID NO: 21066 - protein, 570 aa, Thauera sp. MZ1T
MVLSGAEIVIRCLQEEKVEYVFGYPGGAVLFLYDALFQQETVRHVLVRHEQAAVHAADGFARSTEKVGVALVTSGPGATNAVTGIATAYCDSIPMVIISGQVPVAAIGQDAFQEVDTVGITRPCVKHNFLVRDVRDIAATMKKAFHLARTGRPGPVLVDIPKDVSMQRCEYEYPKEISMRSYNPVTKGHSGQIKKAVQLLLEAKRPMIYTGGGVVLSNAAEQLVKLTRLLGYPITNTLMGLGGYPSSDRQFLGMPGMHGTFEANMAMHYSDVLLAVGARFDDRVIGNPAHFAEEPRKIIHVDIDPSSISKRVRVDTPIVGDVKEVLDEMIRQIESGEARPNPEALASWWKQIEQWRERKCMVYKNSDEIIKPQFVIQKLWEVTGGDAIVTSDVGQHQMWAAQYYGFDKPRRWLNSGGLGTMGVGMPYAMGAKLANPDMQVACVTGEASIQMNIQELSTCKQFRLPIKICNLNNRYLGMVRQWQELFHGGRYSESYMDSLPDFAKLAESYGHVGIRVDRPADVEGALREAFTTHKDELVFLDFQIDQTENVYPMVQGGKGLTEMILSAEDL

SEQ ID NO: 21067 - protein, 644 aa, Thauera sp. MZ1T
MGKIIGIDLGTTNSCVSVMEGGKPKVIENSEGARTTPSVVAYAEDGEILVGAPAKRQAVTNAKNTLFAIKRLIGRRFQEKEVQKDIDLMPFTITKADNGDAWVEVRGKKIAPPQVSAEILRKMKKTAEDYLGEEVTEAVITVPAYFNDSQRQATKDAGRIAGLEVKRIINEPTAAALAFGMDKKPGDSKIAVYDLGGGTFDISIIEIADLDGEHQFEVLATNGDTFLGGEDFDQRIIDYIVTEFKKEQGVDLKNDVLALQRLKEAAEKAKIELSSGQQTEINLPYITADASGPKHLAIKITRAKFESLVEDLIERSIEPCRIALKDAGLKVSDIDDVILVGGQTRMPKVIDRVKEFFAKEPRRDVNPDEAVAVGASIQGGVLQGEVKDVLLLDVTPLSLGIETLGGVMTKLIQKNTTIPTKASQVFSTADDNQSAVTIHVLQGEREMASGNKSLGQFNLSDIPPAPRGMPQIEVTFDIDANGILHVSAKDKATGKENKIKIQANSGLSDEEVQRMVRDAEAHAEEDKKAHELVDARNQCDALIHSTKKALTEYGDKLSDDEKSKIEAAMKEAEESIKSGDKDSIEAKSQALAMAAQKLGEHMYAQAQAEGGAQPGAGAGGQQAGGKADDADVVDAEFTEVKDKK

SEQ ID NO: 21068 - protein, 555 aa, Thauera sp. MZ1T
MMQMTGAQLMVRLLERQGVRTVAGIPGGAILPFYDALSGSEHIHHVLARHEQGAGFIAQGMARVSGVPQVCIASSGPGATNLVTAIADACLDSIPMVVITGQVPQAMIGTDAFQEVDIYGITVPITKHNFLVRSAQELLEVIPDAFRIAMSGRPGPVLIDVPKDVQNQLVAVAEFPAPAVADPAPQLDLAAVELAAKMINEAEQPVLYLGGGVVASGAAPLAVQLAEQAGLPTTMTLMALGAMPMDHPLSIGMLGMHGARYTNFVLEEADVLVCVGARFDDRAIGRAAQFCPNAKIVHIDIDRSELHKIKNAHVAIHANVKCALEALLPRVQATLRKRWLSHVDSLKTRFPMQFPGQDDPRTHYGLIQAVAAALDDRAIVATDVGQHQMWVAQAYPFRRPRQWLTSGGLGTMGFGLPSALGAALAEPGRTVVCFTGDGSFKMNIQELATLAEEGLNVKIVLMNNNALGLVYQQQTLFYGQRLFASKYRTEPDFVKIAEGFGVPAVDLDLADNPRAALAEALHRPGPCLIHATIDREQFVYPMVPPGAANTEMIGG

SEQ ID NO: 21069 - protein, 336 aa, Thauera sp. MZ1T
MTFKIALNFEDGVTRFIDCNATETVADAAYRQGVNVPIDCRDGACGACKCKAESGKYELGFYIDDAMSAEEAKLGYVLTCQMHPKSDCVVNVPASSEVCKIKHATLTATVAEVRQLSPSTLSLVLQGEGIGKLAFLPGQYANLTVPGTEQTRAYSFSSMPTDSQVSFLIRNVPNGLMSGYLTGAAKAGDTIKLAGPIGSFYLRDVARPVLMLAGGTGLAPFLAMLDKLVAAGGSAHPVHLIYGVNTDADVVELQRLDAFKAALPNFTYDVCVVADDSSWPKKGYVTAHIEPAHLNEGNVDIYLCGPPPMVEAVAHDLRERKVEPNSFHYEKFAASV

SEQ ID NO: 21070 - protein, 618 aa, Thauera sp. MZ1T
MCGINGIFAYAPAANAVDRAELLRVRDTMIERGPDGAGVWTGDDGRIGLGHRRLAILDLSAAGAQPMHSADGTLVVSFNGEIYNYPELRGDLERAGVEFRSHSDTEVLLHLYRRHGPAMVGRLRGMFAFALWDARARSLLLARDPHGIKPLYYADDGRTLRFASQVSALLAGEGVDTRPEPAGAVGFLLWGSVPEPFTLYRGIRLLPAGSTLLVNEAAGAGAAVRYWSLSAALQRSVQAAAAVPAGGEAAFMRERLLESVRAHLLSDVPVGAFLSAGLDSSTLVGLAREASPARLRTLTLTFDDLQGTAHDECPAASLIARHLDVDHTCIVLSAGEQEDELDRFFAAMDQPTIDGINTWFVSRAAQQAGLKVALSGLGGDELLGGYVTFAEHPRLRARAHASPWRHAPRLYRGAHRLLGARLGWPPNAAGIPACGADPEGAYHLLKGVFMPWELDGVVDADVLCEGLQALAEHDAAHTEALAGLNDFGQVACLESVRYMRNQLLRDTDWVSMSHSLEIRVPLVDHLLSEALLGLAASGRLGPGKSMLPRTLARGLPDEILNRPKSGFVVPTWRWLRHHPGLDAWKSLPALRHPRMSDGRRWAYTLLSRHPAGKALIRN

SEQ ID NO: 21071 - protein, 614 aa, Thauera sp. MZ1T
MTIRRVLCGWINLDERVASQDALAAMLAAEGLAPAQIRVQTSEAGVLACTHPAGSSAVDLRSGSMAVLLGNPRWPDARLAMLAHSEGHAAALLDAWRNSGEAALETIQGSFALVLVDSARDRILLAVDRCGAERLCFAAVGGTLVFSTSARAVARHPLVAATIDRQALYEYLYCHMVPSPDTAFAGVEKLLPAQCASFSGGRLERRFYWQLPYAPEVDADEASLRKRFLDLTEQAVARQYDEKRSTGAFLSGGTDSSTVSGMLGKVSGQPARTYSIGFRAEGFDEIEYARITSRHFGTEAHEYYVTADDIVEAMPLIAAAYDEPFGNASAAPTYFCAKMARETGIEIVLAGDGGDEFFGGNERYAKQGVFERYHRTPAALRKLLEPLVMNFPLGDSILPVRKAQSYIRQARIPLPDRLETYNFLHRDPLQEIFEPEFLSAVDTERPLKLARDAYFRSASTEVIERMMHLDHKITLADNDLRKVTRMCEAAGVEVRFPFLDDDLVEFSGRLTPRHKVDKGRLRVLFKDALRGFLPNETITKSKHGFGLPFGVWLNSHGPLKSLADNALDSLSQRGIVRPAYLDALRKAHASGHASYYGVMIWILIELELWLQHNA

SEQ ID NO: 21072 - protein, 642 aa, Thauera sp. MZ1T
MCGIAGLFDTRGRRDFERALMQRMNDVQHHRGPDEGGYHFEPGVALAHRRLSIIDLATGQQPLFNEDGSVAVVFNGEIYNFQELVPELEALGHVFHTRSDTEVIVHAWEAWGEDCVQRFRGMFAFALHDRNRDTFFMARDRLAVKPMFYALLPDGTLAFGSELKVLMQHPALDRRIDPLAVEEYFALGYVAEPRTIFLGARKLGPGESLCIRRGQPIPAPKQYWDVRFTLDNDIGLADATAELTERLRESVRLRMIAEVPLGAFLSGGVDSSAVVATMAGLSDDPVNTCSIAFDDPKYNESAFAQKVADRYRTRHFVETVKSDDFDLIDTLAALYDEPYADSSAIPTYRVCQLARKQVTVALSGDGGDESFGGYRRYRMHLMEERMRAALPMGVRRPVFGLLGRVYPKADWAPRVFRAKTTFQAMARDSVEAYFHSVSLLRGDMRQRLFSADFRRKLGGYDALEVFRRHAAAAGTDDALALIQYLDLKTYLVGDINTKVDRASMAHSLEVREPLMDHKLVEWLATLPSGLKIQGNEGKYLFKKAMEPFLPNDVLYRPKMGFAVPLERWFRGPLKQRVRDAVLGETLAATGIFERSYLEHLVDAHQSGARDYSAPLWTLLMFEAFVRNTAAGAILPAAMAEAV

SEQ ID NO: 21073 - protein, 385 aa, Thauera sp. MZ1T
MPNFPAPIESRLPHVGTTIFTVMSRLAQECGAINLSQGFPDFNADDLLFERVAHWMRAGHNQYAPMAGTAALRAAIAAKVETLYGTAYDVEREITVTAGATQALFTAVTACVRAGDEVIVFEPVYDSYVPAIEPAGGKVVRMRLAAPDYRPDWDAVAAAIGPRTRMIMINTPHNPTATVWTRDDLDRLAALVRGTGIVVVADEVYEHIVFDGAAHASCAAHPELAQRSFVVSSFGKTYHITGWKVGYVLAPRELMAEFRKVHQFNVFTVNTPVQLALADYMADASRHLGLAAFYQAKRDFFRAALAASRFELLPSHGTYFQLARYAAISDLDDAAFCEHLTRNVGVAAIPVSAFFADGRDEHVIRFCFAKNEATLAAACAKLVAL

SEQ ID NO: 21074 - protein, 580 aa, Thauera sp. MZ1T
MKPEKKPAAPAAEAPVVSNFIRSIIDEDNRNGKWGGRVETRFPPEPNGYLHYGHAKSICLNFGLAESYGGVCHMRFDDTNPEKEEQEYVDAILEAVQWLGFEWGEHLYFASDYFDKMYACAISLIKAGKAYVDSQSAEEMRVNRGTLTEAGKNSPYRERSVDENLELFARMRAGEFAEGTHILRAKVDMASPNINLRDPAIYRIRHATHHRTGDAWHLYPMYTFAHPIEDAIENITHSVCTLEFEDQRPFYDWLLDALATEGHFPRPLPQQIEFARLNLTYVVLSKRKLIQLVNEGHVDGWDDPRLPTLVGARRRGFTAAGFRRFAERIGVSKADSWIDMSVLEECMRDDLNEAAQRRVAVLDPLKLVLTNYAEGASELCQAPNHPLEPELGKRDMPFSRELWIEREDFMEEPVKGFHRLYPGNMVRLRYGFVVKCTGCEKDAAGNITAVLAEYMPDSKSGTPGADNYKVKGNLHWVSAAHGYEAQVRIYDRLFAHPHPGQRREGDAPDFERDFLDDINPDSKRVITAYLEPALKDARPEEHFQFERHGYFVADRVDSKPGAPVFNRTVTLKDSWAKGGK

SEQ ID NO: 21075 - protein, 398 aa, Thauera sp. MZ1T
MKAVLVLNAGSSSLKFALYPLEASNSGRVAAAPAVSGQVEGIGARPEVSFKTATGERIQEPVVTGGSQAEQHRDALEHVFALLARHNPTVDIVAAGHRIVHGGEHYSAPTRLEESVLRTLDAFVPLAPLHQPHNLRAVRAVAGLMPQVPQVGCFDTAFHRTQPAVAQAFALPRRLSAEGIKRYGFHGLSYDYVARQLPEVVGERARGAVVIAHLGNGASMCALRDGRSVASTMGFTAVEGLMMGTRTGSLDPGVMLYLMEQKGMDAKALTSLLYKESGLLGVSGISQDMRTLLASDAPEAKEAVDLFCYRIARELGSLAAAAGGLDALVFTGGIGEHAAPVREKVAALAAWMGIEVDPAANADHARRIDTAASRVAVAVVPTNEERMIARYTAETLGL

SEQ ID NO: 21076 - protein, 316 aa, Thauera sp. MZ1T
MPHGSLMVFTGNANPKLGADVTRRLGISLGSATVGRFSDGEVNVELLENVRGKDVFVLQPTCSPTNDNLMELLVLVDALKRASAGRITAAIPYFGYARQDRRPRSARVPITAKVVANMLQAVGVQRLLTMDLHADQIQGFFDIAVDNVYAAPVLLADLDKQKYDDLLVVSPDVGGVVRARAFAKRMECDLAIIDKRRPKANVSEVMNIIGEVEGRTCVIMDDIVDTAGTLCKAAAALKKHGAKRVLSYCTHAVLSGAAVSRINESELDELVVTDTIPLRDDAKACPRIRQISVASLLADTILRISNEESVSSLFME

SEQ ID NO: 21077 - protein, 121 aa, Thauera sp. MZ1T
MPIRKILVVDDSPVERLALQEVLGRNGYQVLTAENGEQAIARSRSDHPDLILMDVVMPGMNGYQATRTISRDDETRDIPIIMCTSKGQETDKIWGMRQGALDYLVKPVDHDELLARIRAMG

SEQ ID NO: 21078 - protein, 610 aa, Thauera sp. MZ1T
MTAVPEPIASSTPAPAVEKPPSSSMKVYLRLLGYTRPFLGYFALSILGFAIAGACKAGLASVLKYFIDGLAAPDAPIATGLPWLDALDLIFAIPLMIVVIALVEGLGTFLGNYGISRVSLGLIHDLRTQLFGSFLVLPNRFYDANNSGHLVSKLTYNVSMVTDAATDAVKILFREGLTVVALLGYLLWMNWRLTLTLLVVLPAIAWLVSNASRKFRRLSKNIQTSMGEVTHVASETIQGYRVVRSFGGEDYERARFRKASTDNTKRQLKMVRTQETFSALMHLIVYSSMGLLLFTVLKVRGDASAGDVVAYITAAGLLPRAIQLLGGVSARIQRGVAAADSIFEQLDEAPEPDTGSVERERITGRVEAKGLGFGYPGAEGRALQCIDFKAEPGQMIALVGKSGSGKSTLANLIPRFYQHDAGRLLVDGVAVEDYTLANLRHHIALVTQQVTLFNGTVAQNIAYGELAGASREQIVAAAEAANACEFIDRLPQGFDTEIGENGVLLSGGQRQRLAIARALLKNAPILILDEATSALDTESERLIQAAIERLMEGRTTIVIAHRLSTIEKADQILVMEAGRIVERGTHAELVARGGVYARLQAMGIEPDAAA

SEQ ID NO: 21079 - protein, 404 aa, Thauera sp. MZ1T
MTTSDWKIAVVGAGIGGLTLALALRQHGIEVELYEQTPELREVGAAVALSANATRFYDRIGLRSQFDEVCYSISTLIYRDGRDGRVIGRHSGEPDYEGQFGARYWGIHRADLQAILSRAVGIEHIHLGKRVSNLKDDGNEVVLEFEDGSSVRADLVIGGDGARSVVRRWMLGYDDALYSGCSGFRGIVPPAMLDLLPDPEAIQFWIGPGAHLLHYPIGNGDQNFLLVERSPSPWPVREWVTGAEQGEQLQRFADWHPAVVQMISAVPTSQRWALFHRPPLGRWTRGRVTLLGDAAHALVPHHGQGANQSIEDSVVLAAQLAEKGPARFEQALEDYEHLRRGRTRKVQFASISTADVLHLPDGPAADLRNARFADREEMMNHLGWIHDFDPATQIPSERQGGTWL

SEQ ID NO: 21080 - protein, 304 aa, Heptacodium miconioides
MRWGMEILSPASYHSNSSYLLEESKSTTRWTIVENKLFENALAKFDKETPDRWHKVAAMVPGKTVEDVKKQYKELEDDVSSIEAGLVPIPGYNTNTSPFTLEWGNNFHGFDGFKPGGKRSSSTRPCEQERKKGVPWTEEEHKLFLLGLKKYGKGDWRNISRNYVITRTPTQVASHAQKYFIRQLSGGKDKRRASIHDITTVNLNENQTPQEEKIVPSPEEHSTGLSQQPNTATSFQWNHPNSGKVAMDFNQTCENMFMPPPYGVLNTYGLKMQGQNQQRNVVQESFLGPQSMVFQMQSARHYPH

SEQ ID NO: 21081 - protein, 507 aa, Brassica rapa subsp. pekinensis
MSEEEAHANLAVPAFRTEKVAKTQTQNGHGTVWRFGGADKAAKAATVTLRGVIYMLFDNCSKDVKKTILPLGHGDPSVYPCFRTCIEAEDAVVNVLRSGKSNSYCPGAGILPARRAVADYLNRDLPNKLTPDDIFLTAGCNQGIELVFESLARPNANILLPRPGFPHYDARAVYSGLEIRKFDLLPDREWEIDLEGVEAVADENTVAIVVINPNNPCGNVYSHDHLHKVAETARKLGIMVITDEVYDQTIFGDNPFVPMAKFASIVPVLTLGGISKGWVVPGWKIGWIPLNDPEGVFESTKVVQSIKQSLDITPDPSTIIQAALPEILEKVDKNFFAKKNKILKHNVDLVCDRLKDIPCVVCPKKPESCTYLLTKLELSLLDDIKDDIDFCVKLAREENLVFLPGEALGLKNWMRITIGVEAHMLEDALERLKGFCTRHTKKTVTETESLQAFKMSHSVGIVDITWIVHAPKPCDCTFNVPGDVLVIYLSCLSIPFCFIILTKFQTK

SEQ ID NO: 21082 - protein, 787 aa, Chlamydia trachomatis
MRMNKRTLLFVSLVSAAFLGCQIFFGYRDLKSCQDLAEKQRAISEQILASTEQLSVVPWTASLEESESVNQYAIRLGNRLLLLTKGGSHPEVYSRGTYWSLIEQTSTFGGILVSLYGETGQEVLSKGSSVYLPNQRDAFPVLVAEFRSNQEPLVFLGEYKDGKIANKAGAIYGTSLVFLNTGNGFVPLGIYNSKEECVESLDLPMARAVVFADKENPTASGSYYMLSNEYMQIVVSQESGAIEGINLPFASDQEENKSIVNEIGFDRELAINSPSEASFPGVETIDSQRQNIANVVGGYYPLLRRGTLSDVKKRVPAQYQALNIVSGRELASPVATGFRVVSFDNKTLILESGDGGIRRTYSLGEQPYAFELEIQTTQGREDLWITSGVPEVEIMSNAFVPAVKYHAVKKNKSDLFNVKLPKAKDSLLVRNNATPQWILNSNGYFGVILTPRTPIPAGYASSFIPGNVVPTRLSQLPPKDQAYPASKYPGYTAMLPLPKEAGRYQFMVYAGPLADPTLKALDRANANSKGETPEYVDAIAFRGFFSFITEPFAALLFVIMKFFKFLTGSWGISIILLTIVLKLLLYPLNAWSIRSMRRMQKLSPYIQEIQQKYKREPKRAQMEIMALYKMNKVNPITGCLPLLIQIPFLIAMFDLLKSSFLLRGASFIPGWIDNLTAPDVLFSWETPIWFIGKEFHLLPILLGVVMFAQQKISAVKRSGPASDQQRQQEAMGTMMALLFTFMFYNFPSGLNIYWFSSMLLGVVQQWVTNKILDEKHLQHEVIINKKR

SEQ ID NO: 21083 - protein, 431 aa, Chlamydia trachomatis
MLRQETAPLVCKFGGTSVGTAQSIRRVCEIIQEERPSFVVVSAVAGVTDWLEEFCRLPKGKRAALTEKIRERHESIAKELGIEVSLAIFWEILEHFEDVEELLSEDQARILAIGEDLSSTLICSYCCTYVLPLKRLEARQVILTDSQFLRAVPDLALMQTAWGELALQEDAIYLMQGFLGATSSGKTTVLGRGGSDFSASLIGELCKARELRIYTDVCGVHTADPKILKDTQLIDSLTFEEMQELASSGAKVLHQDMLKPCVRAKVPIFVTSTFNVTKEGTWICASLNESTEGPVIKALSLKSNQALWFVEYNSPLVRLEDVLGCVRSLGFVPGVVMAQSLGVYFTIDWEEYPQTITKALEAFGTVSCEGPLSLVALVGAKLASWSMSRVFEALHRTPVLCWSQTDTVINLIINKDFGVAVTELLHDCLFK

SEQ ID NO: 21084 - protein, 328 aa, Chlamydia trachomatis
MYVPGIAENLCLDIFHKQKQVISQYFASFHYDCVHQLTEKLLCHQGSLFFSGIGKSGCIARKLVATMQSFGEKAFFLSGDLLHGDLGVVSPGDIVCLFSNSGETREILEWIPHLKNRPVFLVGITAAPCSSLAAFSDFVIVLPKLEELDPFNLMPTTSTTCQLLFSDLLAMTLLRCRKISLSDYGSNHPSGQIGLKANGKVKDYLYPRTEVPFCSPLTTVAESLPTLSSYGYGCVCVVNELFELLGIFTDGDLRRGLSEYGGDILAYPLQQIMTHNPKVISEDSDVLLSLEMMESGNPVTVLPVVDAQQQRFIVGLLHMHALARAGLL

SEQ ID NO: 21085 - protein, 567 aa, Chlamydia trachomatis
MVKVSLSFKHLVPKLVTCLKEGYSFNTLKKDFTAGITAGILAFPLAIAIAIGIGVSPLQGLLASIIGGFLASALGGSRVLISGPTSSFISILYCIGVKYGEDGLFTITLMAGIFLIIFGLAGLGTFIKYMPYPVVTGLTTGIAVIIFSSQIRDFLGLQMGDGVPLDFIGKWAAYWDYLWTWDSKTFAVGLFTLLLMIYFRNYKPRYPGVMISIIIASTLVWILKIDIPTIGSRYGTLPSSLPGPVFPHISITKMLQLMPDALTISVLSGIETLLAAVVADGMTGWRHQSNCQLIGQGIANIGTSLFAGMPVTGSLSRTTASIKCGASTPIAGIIHTICLSFILLLLAPLTIKIPLTCLAAVLILIAWNMSEIHHFIHLFTAPKKDVLVLLTVFILTVMTTITSAVQVGMMLAAFLFMKQMSDLSDVISTAKYFDESEQPQNDLLFSKNEVPPFTEIYEINGPFFFGISDRLKNLLNEIEKPPKIFILCMTRVPTIDASAMHALEEFFLECDRQGTLLLLAGVKKTPLSDLRRYHVDELIGVDHIFPNIKGALLFAKALIKLESKSSQ

SEQ ID NO: 21086 - protein, 843 aa, Prunus persica
MEMPGRRSNYTLLSQVPDDQTAAFYDSESKNNKGKAERGFEWETGADFRANRVGNPYSSVGLQRQSSGSSFGESSLSGEYYAPTLSNTAANEIDGFGYVPDDVFKVGGGGEFRMKGGDGAVGTTGGGGSSSGKSWAQQTEESYQLQLALALRLSSEATCTDDPNFLDLVPDVSSSRSSGSVDAVSHRFWVNGCLSYFDIVPDGFYLIHGIDPYVWTVCTDMQENGRIPSIESLRSVDPGIGSSIEVVLIDRRSDPSLKELQNRVFSLSCTCITTKEIVDQLAKLVCNRMGGSASVGEDEFVPIWRESSDDLKDCLGSVVVPIGSLSVGLCRHRALLFKVLADRIDLSCRIAKGCKYCTRDDASSCLVRFGLDREYLVDLIANPGYLCEPDSLLNGPSSISISSPLRFPRLKPVEPTIDFRSLAKQYFSDCQSLNLVFDEASAGSAVDEDNKEFSMYPKQLDRKITEGNNLLLVSSLNDNTSMYAKVSQPSFEDRNPQLFNPSQNIVHTPGMVKDPIPLKRIPPIGHRDVSRVDTTKGSRFVEGVQLVPSKPSKELTFDIEDLDIPWNDLVLKDRIGAGSFGTVHRADWHGSDVAVKILMEQDFHAERFKEFLREVTIMKRLRHPNIVLFMGAVTKPPNLSIVTEYLSRGSLYRLLHKPGAMEALDEKRRLNMAYDVAKGMNYLHRRNPPIVHRDLKSPNLLVDKKYTVKVCDFGLSRLKANTFLSSKSAAGTPEWMAPEVLRDEPSNEKSDVYSFGVILWELATLQQPWGNLNPAQVVAAVGFKNKRLEIPRDLNPQVASIIEACWANEPWKRPSFASIMESLMPLIKPPATQPSRPGVPLLS

SEQ ID NO: 21087 - protein, 215 aa, Fragaria vesca
MVRGKTQVRRIENATSRQVTFSKRRSGLLKKAFELSILCDAEVALIIFSPRGKLYEFASSSMQETIERYEKHTRDNQANNKVAISEQNVQQLKHEATSMMKQIEHLEVSKRKLLGESLGLCTIEELQEVEQQLERSVNTIRARKAQVFKEQIEQLKEKERILTAENERLTEKCDALQQRQPVIEQREHLAYNESSTSSDVEIELFIGLPERRSKH

SEQ ID NO: 21088 - protein, 597 aa, Actinoplanes garbadinensis
MTERTVSDVVVERLTAWDVERVFGYSGDGIDGVIGALRRAGRPTFVQARHEEGAAFMAVGHAKYTGGAGVCLATQGPGAVHLLNGLYDAKLDSKPVVAIVGQQVSTVLGSAYQQEIDLVRLFGDVCAQFVQAAHTSEQVPMLLDRAFRTALATRSPTCVVLPHDVQTAPAPDPQAHEHGVLATSAGLRPARVVPRPEDLREAAEVLRSGERVAIMVGQGAYGAEREIVELAQRLGAGVTTSLLGKPVLDENLPFHTGVMGHLGTTASAELMRHCDTLLLIGTNDPWTEFYPRPGQARAVQIDVDGRRLGVRYPVEVPLLGDAVETLRELLGLLPSRASGAWGARVEEWVQRWRLISAARAAAPAEPVNPQHVIRSLSDHLPADAQVAVDVGSVVYWYARHLRLPRGVPAHLSSTLASMGCGLPYGLAAKLAAPQRPVVVLAGDGAMQMAGMAELITVAARWRDWADPRFVVCVLNNRDLAEVSWEQRETEGEPRFVTSQELPDVPYARYAELLGLRGVRITDPSDLTGAWEAALSADRPTLIEAVVDPAIPLLPPGQPYEKVQAMYAGLAAEKGDQARRAEAHLRRERADEGFDDPS

SEQ ID NO: 21089 - protein, 491 aa, Zea mays
MTGNASYQHLGLGVDATMRSCFASGDGSVISSADAPFFHVPEYTLHGGGGFGFGEPAADVAASSFLADGSVLLAGQLLRATALQSVSPEERHGAYYGVTGGSSSYGPSPWDVTVAHAPSRMTKQPVAGEPEGGWIHESSYYCPATWFSGDGFRDPFAGAAASELSLRLRAGSSPTAGAASVSLPDQSSEVSCSGLTHWSSGGGPGMFQLPCGGAGQVAVAARPGPMHFSQVLSRWSGYADVTQQVLDEFVIRLLQDVAGFAGGGEASCPLPSSSYCSKTTSSNPNPSVFVSSEEHHNELKNDFQKLLQIMDQRCKQCLDEIQNAASKYGSLVRPGGGGGALSTLFAQRAVSATHRRLRARITGEIAAATRGGNQPSSSSSLSLADRERSWESAFIQKHWALRQLRRGDQQSWRPQRGLPEKSVAVLKAWMFENFLRPYPRDKEKEMLAARSGLSRSQVSNWFINARVRLWKPMIEEMYEDLKKASAGIMEA

SEQ ID NO: 21090 - protein, 568 aa, Zea mays
MAAALRFPGVARESLSLDAPVAASKLGRERRPAPASANPGPQCWRRRRGLAVRCQTGSTAPPVLRTEEAPAAAAGARNAQAGFTVVMKFGGSSLASAERMREVAGLILSFPDETPVVVLSAMGKTTNNLLLAGEKAVSCGAPKASEIPELAVIKDLHLRTVDELGLDRSIVSGLLDELEQLLKGVAMMKELTLRTRDYLVSFGECMSTRIFAAYLNKLGKKARQYDAFDIGFITTDDFTNADILEATYPAVAKRLHEDWMDDPAIPIVTGFLGKGCKSCAVTTLGRGGSDLTATTIGKALGLREIQVWKDVDGVLTCDPNIYANAIPVPYLTFDEAAELAYFGAQVLHPQSMRPARDGDIPVRVKNSYNRHAPGTVITKSRDMSKSILTSIVLKSNVTMLDIVSTRMLGQYGFLAKVFSIFEDLGISVDCVATSEVSISLTLDPSKLWSRELIQQELDHVVEELKKFAVVHLLQRRSIISLIGNVQRSSLILEKAFNVLRRNGVNVQMISQGASKVNISLVVNDSEAKQCVQALHSAFFENGFLSEVEGADVPQNGASLNSNGAVYGN

SEQ ID NO: 21091 - protein, 460 aa, Zea mays
MCYFHFRNLSYNNFSGHVPSSKNFSKFPMESFMGNLMLHVYCQDSSCGHSHGTKVSISRTAVACMILGFVILLCIVLLAIYKTNQPQLPEKASDKPVQGPPKLVVLQMDMAVHTYEDIMRLTENLSEKYIIGYGASSTVYRCDLKSGKAIAVKRLYSQYNHSLREFETELETIGSIRHRNLVSLHGFSLSPHGNLLFYDYMENGSLWDLLHGPSKKVKLDWDTRLRIAVGAAQGLAYLHHDCNPRIVHRDVKSSNILLDGSFEAHLSDFGIAKCVPAAKSHASTYVLGTIGYIDPEYARTSRLNEKSDVYSFGVVLLELLTGRKAVDNESNLHQLILSKADDDTVMEAVDPEVSVTCTDMNLVRKAFQLALLCTKRHPADRPTMHEVARVLLSLLPPAAKPPASKAAAASAAAGDYTRFLATAADLRRGGVADDDTGDNSSSDEQWFVRFGEVISKHTLS

SEQ ID NO: 21092 - protein, 638 aa, Zea mays
MSDSSDFAELLWENGQAVVHARTRKHPPQQAAFPPFTFTCSSRAQQRQPVPPLLKTGGGLFADFSSATAGLDAPRDNADLDDTVPWIHYPIPIVDEASPAAPALADSFIPDFFSELHAAAATTSLGPLPPPPPPPPAVQHTGDDNDNRSTPVPNPTTGRGPEPSKETHRAPVPGPAGRPEPQPQAELAPARKPRQESGGGEALMNFSIFSRPAAMARASLRQRPPQTGTDKASNATTSTRVESTVLQSASASGPRTAAAPAVFVDQRTAWPSQQPKEVRFPCAAAAPPPTPTAGNLQQERPSNNNMTPPQKEVETRKASEAAGATATSSVCSGNGAGTGKDDESWRQQKRKTLQAECSASQDDDPDDESGGMRRSCSRGAKRSRTAEVHNLSERRRRDRINEKMRALQELIPNCNKIDKASMLDEAIEYLKTLQLQVQMMSMGSGLCIPPMLLPPAMQHLQIPPAAAHFPHLGMGLGYGMGVLDMNSAAAAAAAVPFPHMPGAHFPCPMIPGAPLPRGLGIGMPARNTMPVFGVPPGQPIQPPFPSLAGLPVRPNLAPPHASSAAMANMVQEQQQQQQHQSLNNGASTAAATASDPQTIVQAERQHFSVPSSAQTESDQFLDGGGNRAICTGRNEAET

SEQ ID NO: 21093 - protein, 359 aa, Zea mays
MDMDMAMMGFDEDLDQVLAAMGPADSSATSSAPNAAAPAPLAVVPAGSSDDEEAAAADSADDLRRGPWTVDEDILLVNYIAAHGEGRWNSLARSAGLKRTGKSCRLRWLNYLRPNVRRGNITAEEQLLILDLHSRWGNRWSKIAQQLPGRTDNEIKNYWRTRVQKHARHLRCDVNSAHFRHIVRHVWMPRLRERAQAGGVQAPATTTASAPPACYNYCGSQHLVQQQGAHRGVTAASEAHHHHQYYSEPAGPTSAATALSPDDASSALRSSSLRADDASHYTAAYTYTSAATATPTTNDQGYEQTTTDDDVFAGSTTSELLVTATGGPDDEYSSMIGLQLQDFGFEDFEYGLWSLDDLC

SEQ ID NO: 21094 - protein, 341 aa, Zea mays
MLAIRRANCFHQKGHGNPCKISSTPYMIIFGVAEIFFSQIPDFDQISWLSILAAVMSFTYSSIGLGLGVVQVIANRGVQGSLTGITIGVVTPMDKVWRSLQAFGDVAFAYSYSLILIEIQDTIRAPPPSESTVMKRATVVSVAVTTLFYMLCGCMGYAAFGDGAPGNLLTGFGFYEPFWLLDVANAAIVVHLVGAYQVYCQPLFAFVEKWAAQRWPDSAYITGEVEVPLPLPASRRRCCKVNLFRATWRTAFVVATTVVSMLLPFFNDVVGFLGALGFWPLTVYFPVEMYVVQKKVPRWSSRWVCLQMLSLGCLVISIAAAAGSIAGIASDLKVYRPFKSY

SEQ ID NO: 21095 - protein, 380 aa, Zea mays
MMKELTPRTSDYLVSFGECMSTRIFSAYLNKIRVKARQGPCNQPSCKSPYDAFDIGFITTDEFGNADILEATYPAVAKRLHGDWIQDPAIPVVTGFLGKGWKSGAVTTLGRGGSDLTATTIGKALGLREIQVWKDVDGVLTCDPNIYPHAKTVPYLTFEEATELAYFGAQVLHPQSMRPAREGDIPVRVKNSYNPKAPGTLITRQRDMDKVVLTSIVLKSNVTMLDIVSTRMLGQYGFLARVFAIFEDLCISVDCVATSEVSVSVSLDPSKIWSRELIQQELDHVVEELEKIAIVRLLQQRAIISLIGNVEQSSLILEKTGRVLRKSGVNVQMISQGASKVNMSLIVHDSDAKALVEALHQAFFEDDVLSQVEAENLLVG

SEQ ID NO: 21096 - protein, 302 aa, Zea mays
MLPCLRLHARFCCCRDAAGLGGSAWHHSSLACTCREAFVASEASVFMNQPPPHMSRPTIIIKLILWLLWTITHLAISILNLWSHLIYSLDCYLISSGLLRKYQNLHLGRLKYLAIVVDSKEAKSTVKVKRLLCWLSSMGVKYVCLYDIEGVLKKSFEPAVNVSRDRTAGEHFGIGANIKDLHCSQREMMIDCLSGSDGKEGIAKAASLLCSTYLNGDTHGDDKRKPAFTEADMAGALKAVGCGGPEPDLLLMYGPARCHLGFPTWRLRYTEIMYMGPLKSMKYGAIVKALYNFSKKHQNYGK

SEQ ID NO: 21097 - protein, 598 aa, Zea mays
MAAPPATTATTHHRALLPPTRTHAAATHSALRLPLRAHPHAHAQRARLTAAAAPAPAASTASLESSAAGLALLREFANVDCSYGLSPEDLRAKISLCDALIVRSGTKVGRDVFEASGGRLRVVGRAGVGIDNVDLAAATEHGCLVVNAPTANTVAAAEHGIALLTAMARNIAQADASLKAGKWQRNKYVGVSLVGKTLAILGFGKVGSEVARRAKGLGMHVIAHDPYASADRARAIGVELVSMEEAMTTADFISLHMPLTPATNKMLNDEAFAKMKYGVRIINVARGGVIDEDALVRALDSGIVAQAALDVFTKEPPAPDNKLVLHENVTVTPHLGASTVEAQEGVAIEIAEAVIGALKGELAASAVNAPMVPAEVLSELAPFVVLAEKLGHLAVQLVAGGGGIKSVKVTYASARAPDDLDTRLLRAMITKGLIEPISSVFVNLVNADFTAKQRGVRITEERIILDGSPETPIDYIQVQIANVKSKFPSAISETGEITVEGRVKDGVPHLTKVGAFQVDVSLEGSLILCRQVDQPGMIGSVGSVLGEENINVSFMSVGRIAPRKHAVMAIGVDEEPSKVTLRKIGEIPAIEEFVFLKL

SEQ ID NO: 21098 - protein, 609 aa, Zea mays
METLLAGNPANGVAKPTCNGVGALPVANSHAIIATPPAAATLAPAGATLGRHLARRLVQIGASDVFAVPGDFNLTLLDYLIAEPGLTLVGCCNELNAGYAADGYARSRGVGACAVTFTVGGLSVLNAIAGAYSENLPVVCIVGGPNSNDYGTNRILHHTIGLPDFSQELRCFQTITCYQAIINNLDDAHEQIDTAIATALRESKPVYISVSCNLAGLSHPTFSRDPVPMFISPRLSNKANLEYAVEAAADFLNKAVKPVMVGGPKIRVAKAREAFAAVADASGYPFAVMPAAKGLVPEHHPRFIGTYWGAVSTTFCAEIVESADAYLFAGPIFNDYSSVGYSLLLKREKAVIVQPDRMVVGDGPAFGCILMPEFLRALAKRLRRNTTAYDNYRRIFVPDREPPNGKPNEPLRVNVLFKHIKGMLSGDSAVVAETGDSWFNCQKLRLPEGCGYEFQMQYGSIGWSVGATLGYAQAAKDKRVIACIGDGSFQVTAQDVSTMLRCGQKSIIFLINNGGYTIEVEIHDGPYNVIKNWDYTGLVNAIHNSEGNCWTMKVRTEEQLKEAIATATGAKKDCLCFIEVIVHKDDTSKELLEWGSRVSAANSRPPNPQ

SEQ ID NO: 21099 - protein, 450 aa, Zea mays
MFSTSWKLTLLALVIVPVISVAVRRFGRFLRELSHQTQAAAAVASSIAEESFGAIRTVRSFAQEYHEISRYGEKVEETLKLGLKQAKVVGLFSGGLNAASTMSVVIVVIYGANLTINGYMTTGSLTSFILYSLTVGSSVSALSGLYTTVMKASGASRRVFQLLDRVSSMTNSGDKCPINEKDGEVELDDVWFAYPSRPSHMILKGITLKLAPGSKVALVGPSGGGKTTIANLIERFYDPLKGRILLNGVPLVEISHQYLHSKVSIVSQEPTLFNCTIEENIAYGLEGTTNFADVESAAKMANAHNFICGFPDQYKTVVGERGIRLSGGQKQRIAIARALLMNPRVLLLDEATSALDAESEYLVQDAMDSLMKGRTVLVIAHRLSTVKSADTVAVISDGLIVESGTHDELLDRDGIYTALVKRQLQGPKFEATSSISEASEIEAEPSSNGQ

SEQ ID NO: 21100 - protein, 145 aa, Zea mays
MMERVEDLGLSLSLSSSLASPRTHHVATMLLRAPEKRFLEMPLLLPAKRTTEVTGEDGLRGGSDEEDGGCGIDGSRKKLRLSKDQSAVLEDSFREHPTLNPRQKAALAQQLGLRPRQVEVWFQNRRARYVRSAHAICRRALARVC

SEQ ID NO: 21101 - protein, 561 aa, Zea mays
MERQSSIRLGALEKLRSFRGMEKQKSFRGIMSLERRSRDSPGKRGDTPLHLAARAGSVAHVQRILAELDRALAAEMAARQNQDGETPLYVAAEKGHAEVVREILKVCGVQTAGIKASNSFDAFHIAAKQGHLEVLKEMLQALPALAMTTNSVNATALDTAAIQGHVDIVNLLLETDASLARITRNNGKTVLHSAARMGHVEVVRSLLNKDPRIGLRTDKKGQTALHMASKAQNAEIVVELLKPDVSVIHIEDNKGNRPLHVATRKGNIIIVQTLLSVEGIDVNAVNRSGETAFAIAEKMDSVELVNILKEAGGEAAKQQVHPPNSAKQLKETVSDIRHDVQSQFKQTRQTKMQVNQIKKRLEKLHIGGLNNAINSNTVVAVLIATVAFAAIFTVPGNFVEELSQAPPGMSLGQAYVASNPAFIVFLVFDALALFISLAVVVVQTSLIVVERRAKKRMVFVMNKLMWLACLFISVAFIALTYVVVGRDDWWLAWCTMGIGAAIMLTTLGSMCYCIVAHRLEEKNTRKIRRASASQSRGSWSRSVDSDEEILNSEYKTKMYAL

SEQ ID NO: 21102 - protein, 227 aa, Zea mays
MGVVLGQDVAAWLAKPVPVVAFGGAGALLYGLGVSVYAFEGIGMVLPLEAEAANKSKFGVTLGLSMAFIAVMYGLFGVMGYVAFGDATRDIITTNLGAGWLSAAVQLGLCINLFFTMPVMMNPVYEVAERLLHGKRYCWWLRWLLVVVVGLAAMYVPNFTDFLALVGSSVCVLLGFVLPASFHLKVFGAEMEWPGVLSDVLLVVIGLALAVFGTYTSLLQIFQSSSA

SEQ ID NO: 21103 - protein, 142 aa, Zea mays
MVENRLVGMKSRGVYETPGGTIMAAAVRELESLTLDRETMQWKDIIALKYAELVYAGRWFDPLRQSFDAFMEKVTATTTGSVTLKLYKGSVNVASRKSPYSLYREDISSFENGEIYNQADAEGFIRLYGLPTRVRAMLEKGI

SEQ ID NO: 21104 - protein, 479 aa, Zea mays
MDEDWSTDPAHRRRRLLLPTSCQTQTQNPPQTQPPLPMDLASQYNRRFAPSLFLPPMAPRLASSSGFSVFSNYQSPPTLVPTAAGAGSHLARSLPKLPLFSMDSLGLLPYSTNPAAGAAVPRSLSSPGGSEQQVPSASGLPPRGAGHRRSRSDFLVGFSRPNQLSLPMTPAAGEYRSREASVLEELFRSYRDPNLSSSGDNNSERNDHLGRQLTGQGAWSPGDSSDNDAESWAASGSAAAGTSASHSHTRHCRSLSVDSIMGNLNFGGLGQVSLRLPPPSPVAGAGGSLSRAGSGASGGAVATASSQPANGEFSESEMKKIMANDRLAELALVDPRRVKRILANRISAAKSKERKVKYMGELERKVRVLQMETSTLSSKAASSQRECEALRILNNEMKIRLQAMEQQAQLKDALNEALTAEVQRLKQIAGEASDPHVPNMSRKIVEQQLQKQPSEAQLAEQQQPQESEEFKAQQKQWNH

SEQ ID NO: 21105 - protein, 240 aa, Zea mays
MAAAARQRGTVKWFNDTKGFGFISPEDGSEDLFVHQSSIKSEGFRSLAEGEEVEFSVSEGDDGRTKAVDVTGPDGSFVRGGGGGGGGGGGYGSRGGGGSGGGGRSYGGSWGGGRRSGGGGGPGACYKCGEPGHMARDCPSADGGGGYGGGGYGGGGYGGGGGGGGGCFKCGEPGHMARDCSSGGGGGGCYNCGQAGHMARDCPSGGGGGGGRFGGGGGGGGDRSCYNCGEAGHIARDCPT

SEQ ID NO: 21106 - protein, 435 aa, Zea mays
MNFSIFSRPAAMARASLRQRPPQTGTDKASNATTSTRVESTVLQSASASGPRTAAAPAVFVDQRTAWPSQQPKEVRFPCAAAAPPPTPTAGNLQQERPSNNNMTPPQKEVETRKASEAAGATATSSVCSGNGAGTGKDDESWRQQKRKTLQAECSASQDDDPDDESGGMRRSCSRGAKRSRTAEVHNLSERRRRDRINEKMRALQELIPNCNKIDKASMLDEAIEYLKTLQLQVQMMSMGSGLCIPPMLLPPAMQHLQIPPAAAHFPHLGMGLGYGMGVLDMNSAAAAAAAVPFPHMPGAHFPCPMIPGAPLPRGLGIGMPARNTMPVFGVPPGQPIQPPFPSLAGLPVRPNLAPPHASSAAMANMVQEQQQQQQHQSLNNGASTAAATASDPQTIVQAERQHFSVPSSAQTESDQFLDGGGNRAICTGRNEAET

SEQ ID NO: 21107 - protein, 128 aa, Zea mays
MTAPVLTRVSPSDGPFCASAFAVSFYVPAKNQADPPPAEGLRVDRWAGARYAAVRRFGGFVADADVGEQAARLEASLQGTRWAAAVNDARRADPASPYTVAQYNSPFEFTGRVNEIWMLFDADDDASM

SEQ ID NO: 21108 - protein, 1288 aa, Pichia pastoris
MGLSFFKRKKYSDKESLSSPETLEEKPNDELDPRVTEILERQIKADSYGASLVDLYGMLQGWEYCLAVAAYICSIVAGAALPLMTLIFGDMAQQFTDYSSGLHSNNQFVDKIDENALYFVYLGVGLLVFNYFATLLHIVVSEIIASRVREKFIWSILHQNMAYLDSLGSGEITSSITSDSQLIQQGVSEKIGLAAQSIATVVSALTVAFVIYWKLALVLLSVMVALILSSTPTILMLMQAYTDSIASYGKASSVAEEAFAAIKTATAFGAHEFQLQKYDEFILESKGYGKKKAISLALMMGSIWFIVFATYALAFWQGSRFMVSDNSGIGKILTACMAMLFGSLIIGNATISLKFVMVGLSAASKLFAMINREPYFDSASDAGEKINEFDGSISFRNVTTRYPSRPDITVLSDFTLDIKPGQTIALVGESGSGKSTVIALLERFYEYLDGEILLDGVDLKSLNIKWVRQQMALVQQEPVLFAASIYENVCYGLVGSKYENVTEKVKRELVEKACKDANAWEFISQMSNGLDTEVGERGLSLSGGQKQRIAIARAVISEPKILLLDEATSALDTRSEGIVQDALNRLSETRTTIVIAHRLSTIQNADLIVVLSKGKIVETGSHKELLKKKGKYHQLVQIQNIRTKINNSGPQAPISLSNSSDLDSVSHKIDRVESLIYERAAADTIDESPVKKQSIPQLFLMLLQINKGDYYLLIPCLFLALIAGMGFPSFALLAGRVIEAFQVTGPQDFPHMRSLINKYTGFLFMIGCVLLIVYLFLTSFMVLSSESLVYKMRYRCFKQYLRQDMSFFDRPENKVGTLVTTLAKDPQDIEGLSGGTAAQLAVSVVIVVAGIILAVAVNWRLGLVCTATVPILLGCGFFSVYLLMVFEERILKDYQESASYACEQVSALKTVVSLTREVGIYEKYSNSIKDQVKRSARSVSRTTLLYALIQGMNPWVFALGFWYGSRLLLEGRATNREFFTVLMAILFGCQSAGEFFSYAPGMGKAKQAAINIRQVLDTRPKSIDIESEDGLKIDRLNLKGGIELRDVTFRYPTRPEVPVLTDLNLIIKPGQYVGLVGASGCGKSTTVGLIERFYDPESGQVLLDGVDIRDLHLRTYREVLALVQQEPVLFSGSIRDNIMVGSISDGADDGSEEDMIKACKDANIYDFISSLPEGFDTLCGNKGTMLSGGQKQRVAIARALIRNPRVLLLDEATSALDSESEMVVQDAIDKASKGRTTITIAHRLSTVQNCDVIYVFDAGRIVESGKHDELLQLRGKYYDLVQLQGLNA

SEQ ID NO: 21109 - protein, 414 aa, Emericella nidulans
MSFANMFNKLSGQPESYEKKSLYRFGRTLGAGTYGIVREADCSSGKVAVKIILKRNVRGNERMVYDELDLLQKLNHPHIVHFVDWFESKDKFYIVTQLATGGELFDRICEYGKFTEKDASQTIRQVLDAVNYLHQRNIVHRDLKPENLLYLTRDLDSQLVLADFGIAKMLDNPAEVLTSMAGSFGYAAPEVMLKQGHGKAVDIWSLGVITYTLLCGYSPFRSENLTDLIEECRSGRVVFHERYWKDVSKDAKDFILSLLQVDPAQRPTSEEALKHPWLKGESASDRDLLPEIRAYIARSRLKRGIEIIKLANRIEALKMQEEDEEDIPSAVDVQASEASDKSGLSPFPALSTENSNTHPASTGNGESGGTKKRSLSKIARGAIFREVVLAKVREMKENEEREKVEREARERAHS

SEQ ID NO: 21110 - protein, 278 aa, Micromonospora sp. ATCC 39149
MCGIALSIGPEADPATFRRMLAVLAPRGEVTETRREANLLAGTRRLRIVDRERAVQPWVSADERLLLCYNGEVFNHRELRAELTRLGHLFRSASDTEVVLVAFERWGEDAVHRLRGEYAFVVVERATGRAYLARDPLGVKPLYWSRVPGCLHLASEVKALVGHGAPVGEVPPGHHGWAEPGGHVRLHPYVDVRTLGDGLPVVDDPDEAALLVRAALTDSIRTRVDTDLTVRAIADGRARPDYTVLEHARDLVGAAKWNAAPVVRRLAGPRATRRTPVG

SEQ ID NO: 21111 - protein, 576 aa, Micromonospora sp. ATCC 39149
MPMSSAPARQDPPTDPHSPGVDDEASAFTDLGLRAELLGALSALGYEEPTPIQREAIPPLLAGRDLLGQAATGTGKTAAFALPLLHRMPDGRAGGEPVALVLVPTRELAVQVSEAFHRYGKDLGARVLPIYGGQPIGRQLRALDLGVDVVVATPGRALDHIARGTLRLGGLATVVLDEADEMLDMGFAEDIEAILEHAPQQRQTVLFSATMPSRIDGMARQHLTDPVRIQIGREQQVAGETPRVRQSAYIVARAHKPAALGRVLDVESPTAAIVFCRSREEVDRLTETMNGRGYRAEALHGGMSQEQRDRVMGRLRAGTADLLVATDVAARGLDVEQLTHVVNYDVPSAPESYVHRIGRVGRAGREGVAITLAEPREHRMLKTIERVTGQRIAIDKIPTAADLRNRRLELTQAALRESLLEDDLEPFRVIVESLSDEFDMMEVALAAVKLAHEAASPGSDDDEEEIPQVAVRPPREARPGQEGRGGERRPGRPRSGGTTQVFIGLGRRAGVRPQDLVGAITGETQVSGRDIGSIEIADRFSLVEVPAAVADEVIAGLRGSTIKGRKTTVRRDRDRP

SEQ ID NO: 21112 - protein, 653 aa, Micromonospora sp. ATCC 39149
MCGLLAFFSANGNAAAHRDHIAGALECLHHRGPDETGVEVVGDAGGRYADGVFAHKRLAIIDVASSHEPLPYAGGRYLLTFNGEIYNYIELRDELVRAFGAQFATAGDGEVIVAGYHYWGEQVLTRLRGMFAFVIWDRQERRAFGARDNFGIKPLHYLETADGLYLASEKKALLPFAQSAYAGDAGIDTANLSHYLTLQYVPEPGTLHLGISRIGSGEYLTWTPGGRIDVRRWYRPVFRPAPVADEQRLYHQIRETLRESVRMHMRSDVPVGSFLSSGIDSTAVVALAREFNPHILTFTVGYDVPGYSEIDVAQESARHLDVTTIPTKIGPQDMIDALPKIVWHLDDPVADPALVPLYFVAKKAAEHVTVVLSGEGADEFFGGYTIYREPLSLGAVNGLPDGVQKGLRAVSRAIPQGVKGKSFLERGTTPIEQRYYGNARMFTEEEKQHLLRRYDPSVRYTDVTAPIYAECTELDDVTKMQYVDLYTWLRGDILVKADRISMAHSLEVRVPFLDKEVFDVAATIPVDLKLPPRSDATKYAMRQALQGVVPPAIVNRRKLGFPTPTRVWLRGEMYEWARWVLANSGAGELIDLPYAMRLLEEHKREEADHSRKVWTVLIFCIWHAIFVAKTLDPGIQRNQSALLTKPVVGSMVR

SEQ ID NO: 21113 - protein, 659 aa, Micromonospora sp. ATCC 39149
MSDGGMAGWSMIRSMRNQDEVSAHRLSRGTARRIVEFAHPYRRDIVVFLVTVVIAAVIGVATPVLAGDVINAISRGGAEAGSTVVRLALVIAALAVADALFSLAQRWYSARIGEGIILDLRTRVYDHVQRMPLQFFTRTQTGALVSRLNNDVMGAQRAFTSTLSGVVSNVIQLVLTTVVMLTLSWQITVLSLVLLPIFIVPARRVGRRLAEITRESYNLNANMNATMTERFGVAGALLVKLFGAPEVEARRFAGRAERVRDIGIQSAMYSRTFFVAMLLVASLAQALTYGLGGWLAVTGSVSAGTVVTLALLLTRLYGPLTALSNVRVDVMSALVSFDRVFEVLDLRPGIAEKPGAVAVPRGNGRVEFREVRFRYPAAAEVSLASLEEVTTLDRTVNEPVLRGVSFAVEPGQMIALVGPSGAGKSTLSMLIPRVYDVTDGQVLVGGVDVRDATLASLRDEIGMVTQDSHLFHETIAENLRYAKPDATDDEIWAALAGAQVADLVRSLPDGLDTTVGERGYRFSGGEKQRIAIARLLLKAPSIVILDEATAHLDSESEAAVQRALAVALTGRTALVIAHRLSTVRDADQILVLDEGRIVERGRHEELVAVGGLYAELYRTQFAVADSPTPYVDATGAEKIITMPMASYVADEALPPAAAN

SEQ ID NO: 21114 - protein, 257 aa, Micromonospora sp. ATCC 39149
MSTLEIRDLKVSVKLPEGELKPILSGVDLTVRSGETHAIMGPNGSGKSTLAYSIAGHPKYEITGGSVTLDGVDVLAMSVDERARAGLFLAMQYPVEVPGVSVANFLRTAKTAIDGEAPKLRTWGGELRGAMERLQMDPAFAQRNVNEGFSGGEKKRHEIVQLELLKPKVAILDETDSGLDVDALRVVSEGVNRVRDTGDTGLLLITHYTRILRYIKPDFVHVFVAGRIVEQGGPELADKLEDEGYERYVAGAGAARA

SEQ ID NO: 21115 - protein, 67 aa, Micromonospora sp. ATCC 39149
MATGTVKWFNSEKGFGFIEQDGGGPDVFVHYSAIATSGYRELNEGQKVEFEVTQGQKGPQADNVRPM

SEQ ID NO: 21116 - protein, 395 aa, Micromonospora sp. ATCC 39149
MRTAVVVGAGIGGLAVSGALARSGWQVTLLERADRVRPDPTAVVLWPNGVRALRALDLGAGLDAIATPLPDGGVRRPDGQWLVQPRPTPADRMPVVVHREDLHDALIAGLGERVELRTGVSVRTVRAEAGQRPWVGDGRQRFEADLVVAADGTDSEIRRQLAPESGVVSSGCAAWRAVIPWYRAPRLPSDQPVGGETLGAGYRFVSASLGERGSSGGSSRGGIYWVATAAGAPRPEPPETQLTLLRRWYAGWPAPVDELLAATEPADLVQQEIRELRPLPRSYSFPAGPGGVVLLGDAAHAMPPHLGQGACLAFEDAATLALLLRESRLPDAVVAYDRLRRPRAATVVRQTRRMSAVLQARGRLALRARDAALGTISPRLLSGAAASAAQWRPPS

SEQ ID NO: 21117 - protein, 475 aa, Micromonospora sp. ATCC 39149
MPEMRQSSLVVVANRLPIDDSVAPDGACEWRRSPGGLVSALHPLLRHTPATWVGWAGGTGPAPSLPDIGSVRMRTVPLSGEDFRDHYEGFANSTLWPLYHDAVEQPEYHRRWWESYQRVNQRFAEATAEVAEQGAVVWVQDYHLQLVPGLLRELRPDLRIGFFLHVPFPPPELFMQLPRRAELLRGILGADLIGFQRAQAAHNFAQLVAKVLELPATDRRIGVDGRVVRIGAFPVSIDTAEMAALAARPDVVARAQRLRRDLGDPDHVILSVDRMDYTKGIEQRLKAYSELLASGHVKVRDTVLVQVAVPSRERVTQYQILRDRVEREVGRINGEFGRVGEPAIHYLTQPFDRVELAALYRIADVMAVTPLRDGMNLVAKEYVAARVDDTGSLLLSEFAGAAAELPQAYLVNPHDLEGLKQGLLSALQADPADATPRMRAMREHLHRNDIRAWARSYLSALDDGGSLLTHLAPTG

SEQ ID NO: 21118 - protein, 383 aa, Micromonospora sp. ATCC 39149
MSASPVYLDAASAAPPHPVARQALLAALDDGWADPARLYGQARRARQLLDAAREAAAATLGVRADELSFTPSGTAAAHSAVLGGLAGRRRAGGTLVHSAIEHSAVLHATERHVAGGGTAVAVPVDRLGRLDPAAWSAAVGAPGVALAALIGASHEVGTVQPVAEAAAACAAAGVPLYVDAAQLVGRAPVPAGWSVLTASAHKWGGPPGVGLLVVRKGTRWESPWPADERESGRTPGVVNLPAVVAAAASLRAAAAEAAAEAARLAPLVDRIRARVAAEVPDVEVVGDPVHRLPHLVTFSCLYVDGEALLHALDRRGFAVSSGSSCTSSTLRPSHVLEAMGVLSHGNVRVSLHRETTEDDVERFLAELPGIVADLRAEAGVVGL

SEQ ID NO: 21119 - protein, 546 aa, Micromonospora sp. ATCC 39149
MTEIIVFTALFLLVSVMGFVAARWRAPRDMAHLDEWGLGGRSFGGWITWFLVGGDLYTAYTFVAVPALMFGAGAAGFFAVPYTIVIYPLVFLVLCRLWSVSHRHGFVTPADFVRSRFDSPVLALVVAITGIVATMPYIALQLVGIEAVLKTMGVTGESALARHLPIIIAFAILAAYTYQSGLRAPALIAFVKDTLIYIVILVAVLWLPQKLGGWGSIFDAAEAKFAASPNPNDGILLNANNQLQYVTLAFGSALALFLYPHSITGVLASRNRDVIKRNMSALPAYSLVLGLIALLGFMAIAAGVKPLPGSSAGSVDSNTVVPVLFDQQFPDWFAGVAYAAIGIGALVPAAIMSIAAANLFTRNIYKEYLKRDATPAQEANVSKITSLVVKVGAVACIVFLDPQFSIDLQLIGGVIILQTLPAVALGLYTRWFHRGALVAGWAAGMGLGMWMLYQIPNPATKRAHFGGSAFPLGDFGFDTKKTIYVGIVAVLVNLVVAALVTLALRAARVAEGTDGTTRDDYFADEGDPRVTPGATRGADAAPEPAA

SEQ ID NO: 21120 - protein, 423 aa, Micromonospora sp. ATCC 39149
MDASDRESGAGVPERNWAGNVRYSAARRHRPTGLDELRRLVTGSDRLRAVGTGHSFNRLGDTGGDLVSLAGLPPTVEVDRERSTVTVAAAVRYGDLATRLHAAGYALPTMASLPHISVAGAVATATHGSGVGIGNLASAVSALELVTADGDLLTVRRDADGDRFAGMVVSLGALGVVTRVTLDVVPDFEVRQYVRLGLSRAALDEAFASAYSVSLFTDWRGDRIDQVWRKQLADAPPPPADWLGTTAAAGPVHPVPGMPARNCTAQLGEPGPWHERLPHFRLGFTPSSGDELQSEYHLPRAAAAGALAALDPLADRIAAVLQVCELRTVAADELWLSPQYRRDSLAVHFTWIGDADAVAPVLAEVERVLAPFAPRPHWGKVFTLDPAAVAAAYPRHADFLALARELDPVGKFRTDLLDGYFPR

SEQ ID NO: 21121 - protein, 301 aa, Micromonospora sp. ATCC 39149
MSDVGVGGVRPYRAGFACFVGRPNAGKSTLTNALVGTKIAITSNKPQTTRHIIRAVLHRPDSQLVLVDTPGLHRPRTLLGERLNDLVRSTWSEVDVIGLCVPADEPVGRGDRFITGELAELKATVLAVVTKTDLVDKKRLAEQLLAVSEMGDFAAVVPVSAVSGHQLDTLVNVMTDYLPESPQLYPDDMLTDDPEQVLVAELIREAALEGVRDELPHSIAVVVEEMIPEGQLMKIYADVYVERPSQKAIVIGHRASRLKEVGTTARRQIEELLGTRVYLDLHVRVAKDWQRDPKQLRKLGF

SEQ ID NO: 21122 - protein, 490 aa, Micromonospora sp. ATCC 39149
MFVDRVVLHLQAGDGGHGCVSIHREKFKPFGGPDGGNGGHGGSVTLVVDPQVHTLLDFHFHPHVKGENGKGGAGSNRDGANGRGLVLKVPDGTVVQTLGGEVLADMVGAGTTFEVARGGRGGRGNASLANARRKAPGFAELGEPGEQLDVVLELKSVADVGLVGFPSAGKSSLISVISAAKPKIADYPFTTLVPNLGVVRVDNHTFTVADVPGLIPGAATGKGLGLEFLRHIERCAVLVHVIDTATLDPGRDPLADIDAIESELNQYGGLADRPRLVALNKIDVPDGRDLAEIVRPDLEARGLRVYEVSAATREGLKELMFALAELVEKARSAAPPAEPTRIVIRPKAVDDTGFTIDAEPDGSFTVRGDRPERWVRQTNFDNDEAVGYLADRLARLGVEDKLAKAGAKPGDLVRIGEREFDWQPALYAGVDFVPGNRGTDVRLEEKSSRASAAERLAARKARRQRPGDELGADVTDDEPAPGADDLDDEE

SEQ ID NO: 21123 - protein, 466 aa, Micromonospora sp. ATCC 39149
MTVRSSFVVVANRLPVDEVITPEGRQWRRSPGGLVTALHPVLAEHQGTWVGWAGGTGPAPEPFDLEGIRLHPVPLSADELERYYEGQSNATIWPLYHDAVETPAYKRRWREAYRLVNARFAEAAAEVAADGATVWVQDYQLQLVPAMLRELRPDLRIGFFLHIPFPPIELFMQMPFRTEILRGLLGADLIGFQQRLAAQNFVRLARHLLGLRYEGQMIQVDGRQVKAGAFPISIDTKEMERLAEDPAIQSRAKQIREELGNPKTIILGVDRLDYTKGIELRLKAFRELLADGKLTVPDAVMVQVATPSRERVEHYQALRVKVEREVGRINGEFGRVGVPAVHYLHQSYSRSELAAMYVAADVMMVTPLRDGMNLVAKEYVASRADQGGALVLSEFAGAATELRQAFLCNPHDPDAVKDALLKAVHVEKPEARRRMRIMQRHLRTHDVGHWAKSFLTELGVPDSEVA

SEQ ID NO: 21124 - protein, 398 aa, Micromonospora sp. ATCC 39149
MASVIVSGARTPMGRLLGNLKDLPATKLGGVAIKAALERAGVAPDQVQYVIMGQVLQAGTGQIPARQAAVEAGIPMSVPALTINKVCLSGLDAIALADQLIRAGEFDIVVAGGMESMTNAPHLLRGQRVGYKYGDVTISDHMALDGLTDAWDCCSMGESTERHGARHGITRTEQDAFAAASHQRAAAAQKNGHFADEIVPVTIPQRKGDPVVISEDEGIRPDTTVESLGRLRPAFASDGTITAGSASPISDGAAAVVVMAKAKAKELGLTWLAEIGAHGNVAGPDNSLHSQPSNAISHALRKDGLGVEDLDLIEINEAFAAVGIQSMRDLGVGAEKVNVNGGAIALGHPIGMSGARLVLTLALELKRRGGGIGAAALCGGGGQGDALIIRVPNPGEQP

SEQ ID NO: 21125 - protein, 439 aa, Micromonospora sp. ATCC 39149
MTSPVRLALLGCGTVGSEVVRLLHEQSADLAARIGAPLEIAGIAVRRLGRARGGLPVDEALFTTDPLGLIKRDDVDVVVEVVGGIEPARGWLVEALRAGKSVVTANKALLAEDGAALHDAAAEGGADLYYEASVAGAIPLLRPLRDSLHGDRVNRVTGIVNGTTNFILSAMDATGAGFAEALEEATELGYAEADPTADVEGFDAAAKAAILASLAFHTRVTAADVHREGITEVTAADVASAKGMGCTIKLLCIAARGRDAAGKETVSVRVHPAMIPRSHPLASVGDAFNAVFVEAEAAGQLMFYGRGAGGAPTASAVLGDVVAVARNRLAGVRAPSESAYADLAVRPMGEALTRYHISLDVADRPGVLAAVAGVFARHDVSIATVRQGSADGPAGAGDAELVIVTHVARDAALAATVGELRGLDIVRSVASVLRVEGGA

SEQ ID NO: 21126 - protein, 639 aa, Micromonospora sp. ATCC 39149
MCYAVLTSSTKRSTCRVFSPFSMACPRRMESGTCGTLSKTVYPNSRAGRPRTRSRWSVVIELPARSDGKKSVSEYVGQWLSANDISQVFTLPGGMIAPILDAIHQRGDIDLVTMHHEQAVAFAADGVGRFAGTPGVAFATAGPGATNMLTAIASAYLDSVPAVFVTGQVQSYLLKGERPVRQYGFQECDVVAMAVPVTKAAWRARSGDEVPELLDRAMRLAVEGRPGPVLVELPSDVQTMSVPPEAAPRRAAATVPAAVDRDTITEVLDELASAARPLVLIGGGVQAARAADAARHLLRRLGAPVAASVTALDVLPAEDPLRLGMIGMYGNRWVNLAVSEADFVLTLGARLDFGTLGADVAAWGRGRRVVQVDCDPGEMRRVRGVRAIVADLRSFIDAGLAASDGRVFPEHEDWRTHIDRMRAEWPDTEELTGHAGINPNVLMRQLSAASLPAAAFVIDAGQHLWWACQSLRPAQGQRLLPALGLGPCGWAFPAAIGVACHARRPVVVVVGDGAFQFNIQELQTVARGRLPIKLVIVDNGAHGSVRQLQEEAFEGRYPTTVQGYDAPDFARVAQAYGIDSRSVSEPEEVADALSWLWRDETAPALLHVRIPTELNVYPNVPFGASLTVMRSQPGRQAAS

SEQ ID NO: 21127 - protein, 299 aa, Micromonospora sp. ATCC 39149
MGRGSGLPPCCPAGSAVVRPAAPAHGPPDTTGNRTEGSPMLAFAPLHAAVGVAVTAVTRLADTLHPLTGGAATAAAIVLFTIAVRLLISPLTLAQVRGERRRAVLAPQVRDLRRRHAADPARLQGELFALYRSAGASPVAGCLPALLQAPFFLVMYRLFSTDDGGTGLLDERLAGVPLGWHLSDGLAGAAGPLFGTLLAALVALAWWSSRRARRAAAAGAMAGGSRAAGTGAAGGTGTGASAEEPGAAILGRVLPLLPYLTVVVALVMPLAGVLYLVTTTTWTALEQAVLRREQGRAPS

SEQ ID NO: 21128 - protein, 688 aa, Micromonospora sp. ATCC 39149
MARSVYLTSVGSGGGKSTIALGLAELLSRQVERIGAFRPLVPATGTDPILALLTERYRMDLPTADLSGTTYAQASALVADGRREELISRIVERYRDVERRCPAVVVVGSDFADGGDGTGPRELAFNARLAIEFGSVVVPVVDGIGQGPEAIAAATRGAYHDLVDLGATVLAVIANRVPGPMTLPDLPVPAYAIPEVPTVSAPTVAEVAAALGATLLSGDDAALGRDVLDFVVGAAHVPTLLDHLTEGALVITPGDRADLLVAASAAHVAGQVSVAGLVLTLGEQPDPRAMRLVEGLNTGLAVLSVPSDSYDTVAASSRIEGRPSVAHPRKVEAALGAFESCVDTVDLARRLRVSRSERVTPLMFEYDLIDRARATRRRLVLPEGAEERILRATEILLRRGVAELTLLGRPDDIARRTRELGIDIAGASVVDPAGSPWRDEFAEAYAKLRAHRGMTAELAHDIVAQPNYFGTMMVHTGHADGMVSGATHTTAATIRPAFEIIRTVPGVSVASSVFFMLLADRVLVYGDCAVNPDPDAAQLADIAISSADTAARFGIEPRVAMLSYSTGDSGTGADVEKVAAATRLVRERRPELLVEGPIQYDAAIDPRVAVTKLPDSAVAGRATVFIFPDLNTGNNTYKAVQRSAGAVAVGPVMQGLRRPVNDLSRGATVPDIVSTVAITAVQAAGESS

SEQ ID NO: 21129 - protein, 386 aa, Micromonospora sp. ATCC 39149
MSRVLVLNCGSSSVKYRLYDGEEVLRKGTVERVGEPGGGPADHETAVREILDGLDQLDPTGLTAVGHRVVHGGRRFAEPVLVDDAVFAAIEELVPLAPLHNPANLAGIRVAREALPGVPQVAVFDTAFHHTLPEAAATYAIDRDTARRYDIRRYGFHGTSHAYVSRRTAELLGRPYAELNTITLHLGNGASACAVAGGRSVATSMGMSPLEGLVMGTRSGDLDPTVIFHLRREAGMGVDEIDDLLNHRSGLLGLAGVNDMREVLARRDAGDPAATLALDVYTRRITGYVGAYYALLGRVDAVTFTAGVGEHAAGVRAAALAGLGRLGIAVDPARNDGDGDRVISPAGAEVAVCVIGTDEEREIAREARTVAEAATADWGGPAGRRP

SEQ ID NO: 21130 - protein, 570 aa, Micromonospora sp. ATCC 39149
MAVSSTPARPEAPTAPVARAPRRPRGEGQWALGHREPLNANERIKKDDDPLNVRARIENIYAHRGFASIDPQDLRGRFRWWGLYTQRRAGIDGGRTAVLEPHELEDEFFMLRVRVDGGQLTLAQLRVVADISREFARDTADITDRQNIQYHWIRVEDMPEIWRRLEAVGLQTTEACGDCPRIVLGSPVAGVAEAELLDPTPALDEIVRRYVGDKRFSNLPRKFKTSISWLVDTPYEANDIAFLGVDHPEHGPGFDVWVGGGLSTNPMLAKRLGVWVPLAEVPDVWAGVVGIFRDYGYRRLRSRARLKFLVADWGVEKFREVLEKEYLGRTLLDGPAPALPDKPVDHIGVHRQRDGRAYVGAAPVVGRVSGSQLARLADVVEAHGSDRVRLTPYQKLLVLDVPPERTNSLVAELSAIGLEARPSAWRRGTMACTGIEFCKLAIVETKARGEELVARLEERLRDFDADISIHLNGCPNACARTQVADIGLKGQLVVGPDGRQVEGFQVHLGGGLGMAQGQTAGFGRKLRGLKTTADELPEYVERLARRYLASRTEGETFANWVIRVDEEELR

SEQ ID NO: 21131 - protein, 312 aa, Micromonospora sp. ATCC 39149
MRDIAVFSGTAHPDLAAEICAHLGVLLHPTRVSRFANDCLEVQLQANCRERDVFLIQPLVPPVQENLVELLLMIDAARGASAARITVVLPHYAYARSDKKDAPRISIGGRLVADLLTSAGADRVLAMTLHSPQVHGFFSVPVDHLHALRELAGHFSRYDLRDTVVVSPDLGNAKEAAAFARMLGTPVAAGAKQRFSDDRVTISTVIGEVADRDVIVLDDEIAKGSTVIELMTHLRELKVRSIRLACTHGLFSGGALERLSGQDGVLEIVCTNTVPIPESKRVPKLQVLSVAPALAEAMRRIHNGESVSALFG

SEQ ID NO: 21132 - protein, 67 aa, Micromonospora sp. ATCC 39149
MAIGTVKWFNADKGFGFITPDGGGADVFAHFSAIQSSGYRSLDENQRVEFEITQGQKGPQAENIRPL

SEQ ID NO: 21133 - protein, 557 aa, Micromonospora sp. ATCC 39149
PCGPRHYRPRPEDLTGRTTRGHPQIHMSEQIFDLTADQELAPTAPVRPEAPTFAELGARPETVEALAEAGITRAFAIQEYAIPIALRGVDMIGQAPTGTGKTLGFGVPLLERVFAPAEGGDGVPQALVVVPTRELGIQVAKDLAAAGRTRGVRVLPIYGGVAYEPQIDALRKGVEILVGTPGRLMDLQKQKHLRLDRVRALVLDEADRMLDLGFLDDVEKILAMLPEDRQTMLFSATMPDPIVTLSRRFLRRPMTIHAGHTAETGPSPQTEQLVYRTHSMNKIEIVARILQAEGRGLTMIFTRTKRAADRVAEDLDFRGFAVAAVHGDLGQGARERALRAFRAGKIDILVATDVAARGLDVSGVTHVINYDCPEDQDTYTHRIGRTGRAGATGVAVTFVDWDDMPRWRIIDKTLGLEMPEPPETYHTSPHLYTDLAISRDVSGTLPTAERTRAGLSAEVEEDLGGRSRRGDTGGGRGSRRGERGEPRSQGERRRSRSDATPDAAEAPTGQAAEDDSRTPRRRRRRRVGEVVAGEPTVVISAEPSGSGPAAASADGEP

SEQ ID NO: 21134 - protein, 417 aa, Micromonospora sp. ATCC 39149
MERLARRLGVADAVVVGLGSMLGAGVFVVFAPAAASAGGAGLLVALTLAGFVAFCNATSSAWLAARYPESGGTYVYGRERLGPFAGFLAGWGFVVGKTASCAAMALTVGAYLWPGRARVVAVVAVAAVTAVNLRGIGKTATATKALVGVVLAVLALVAGAGLLGGGFDAGRIAGPAAPGGTGAHGVLAAAGLLFFAFAGYARIATLGEEVRDPQRTIPRAVPLALGLVLVIYLVLAVMALGVLGPERLAASTAPLADVVTLAGLPGLAWVVRAGATVAVTGVLLSLLAGVGRTLLAMARRRDVPAGLAAVHPVHRVPHRAELAVAAVVAAVVLVGDVRGAIGFSSCTVLVYYAITNAAALTLGRDPGRRLPLRLLAALGLVGCVALAVSLPPASVLAGFGVLALGAAWYALRPATPR

SEQ ID NO: 21135 - protein, 199 aa, Micromonospora sp. ATCC 39149
MFRTMLKSKIHRATVTQADLHYVGSVTVDQDLLDAADLLPGEQVAIVDVTNGARLETYVIPGERGSGVVGINGAAAHLVHPGDLVILISYGQFDDAEARAYRPGWCTSTPPTGWWSWAVTRLRRPPAPPATRSRAPSPSSAESPAPPCRIRSGRGARRSSRLEVDPDVGPYAVCHRWSSLVTLGFRRELVVGEARCVVC

SEQ ID NO: 21136 - protein, 671 aa, Micromonospora sp. ATCC 39149
MERTRFFRRPVVWIILVILGAVVLSQLFTAGPSYHRVDTSVALDQLHTAKIKKAVFQDKEQTLQLDLQSKTKFGDTTTDRIEAQFPYEVGDEVWNEVLAAKAANRITGPADTKVSSDSVWVSLLVNLLPIALLVLLLLFFMSQMQGGGSRVLNFGKSKAKMITKDTPKTTFADVAGAEEAVEELHEIKDFLQNPAKYQALGAKIPKGVLLFGPPGTGKTLLARAVAGEAGVPFYSISGSDFVEMFVGVGASRVRDLFEQAKSNAPAIVFVDEIDAVGRHRGAGMGGGHDEREQTLNQLLVEMDGFDTKGGVILIAATNRPDILDPALLRPGRFDRQIPVDAPDMEGRKAILRVHAKGKPFTPDVDLDSVARRTPGFSGADLANVINEAALLTARKDQRAITNDSLEESIDRVIAGPQRRTRVMSDQEKKITAYHEGGHALVAWALPHAAPVHKVTILSRGRSLGHTLVLPTEDKYTQTRAEMVDTLAYALGGRAAEELVFHEPTTGAGNDIEKATGLARAMITQYGMSSKLGAIKYGTSGDEPFLGRNMGHERDYSDTVAAEIDSEMRALIELAHDEAWEILVEYRDVLDNIVLELIEKETLSTADMARICARVVKRPPMAPYNGFGKRQPSTEPPVLTPTEKEALKAQAQADGASVGGGLPGGNNSDGTH

SEQ ID NO: 21137 - protein, 232 aa, Micromonospora sp. ATCC 39149
MSRTPPPWMGPLLSRLGTARVEDFTRLTTPASGGRESAVLVLLGEEPGVGPDVLVLQRAATLRNHAGQPAFPGGAADPTDADSAATALREANEEVGLDPASVTVLAELPRLWIPVSEFVVTPVLGWWHRPHPVHPREPAEVAHVARLPVAELVAPENRMQVRHPSGWIGPAFSVRGMLVWGFTAGVLAALLEMGGWARPWPGDRVVDLPPSGAAPAPSAGTDPADEMAGPLT

SEQ ID NO: 21138 - protein, 225 aa, Micromonospora sp. ATCC 39149
MDEVLARSGIFQGVDPEAAEALAKEMETIEVRKGEVVFNEGEPGDSLYILLSGKIKVGRRAADGRQNLIAVMGPSDMVGELSLFDPGPRTATATAVTDTRLVRLRKQALRPWLNNRPEIAEQLLRVLARRLRRTNDSLADLIFTDVPGRVAKNLLQMAGRFGTRDGGVLRVTHDLTQEEIAQLVGASRETVNKALADFASRGWLRLDGKSIIILDPERLARRARV

SEQ ID NO: 21139 - protein, 421 aa, Micromonospora sp. ATCC 39149
MALVVQKYGGSSVANAERIKRVAERIVAARKAGDDVVVVVSAMGDTTDELLDLANQVSPLPPGRELDMLLTAGERISMALLAMAIHNLGYEARSFTGSQAGVITTSVHGKARIIDVTPGRLKGALDEGAVVIVAGFQGVSQDTKDVTTLGRGGSDTTAVALAAALHADVCEIYTDVDGVFTADPRIVPNARHIRHITYEEMLELAACGAKVLHLRSVEYARRAGLPIHVRSSYSTNTGTMVTGSMEDLPVEQALITGVAHDRSEAKITIVGVPDEPGAAARIFDTVAGAEINIDMIVQNVSTEGTGRTDISFTLPKTDGPTAMAALSKIQEQVKFKGLLYDDHVGKVSLIGAGMRSHPGVAAGFFAALGSAGVNIEMISTSEIRVSVVCRDTDLDKAVRAIHDAFELGGDSEAVVYAGTGR

SEQ ID NO: 21140 - protein, 394 aa, Micromonospora sp. ATCC 39149
MDILWVPDPPSARSAARRRSAPVDHVARLLKESWTLVEEDRDRLSGHFYARLFLLDPALRQLFPVEMAGQGDRVLDAIVTATQVVDDPESFDEYLRSLGRDHRKYHVDAAHYETMGVALLDALRSTAGDGWNLEYDQAWRDAYGAISARMLAGAAADDNPPFWHAEVLTHERHGRDTAVLTVRALQHPLRWQAGQYVSVEVPRHLPRVWRTYSVANAPNDDNVLEFHVRTPRGAGWVSGALVRRTKPGDLLRVAAPMGSMVLDRSSERDVLCVAGGVGLAPVKALVEELTGWNRTRWVHVFYGARHAADLYGLAQLRELVEAHPWLSVTAACCDDPDFDGERGDISEVITRYGPWTTHDCYVSGSARMVRSTLRALAEDEVPPPNIRYDTFGEL

SEQ ID NO: 21141 - protein, 390 aa, Micromonospora sp. ATCC 39149
MSDAVIVGAVRTPVGRREGSLAAVHPVDLSAHVLRALAERTGIDPGQVDDVIWGCVSQVGEQSWNVARNAVLAAGWPESVPGTTLDRQCGSSQQALHFAAATVLSGQADLVVAGGVESMTRVPMGSSVGGGMPFSGQVRDRYRGVEGFADDDPLPFSQGVGAELIAARWRFSRAQLDEFALASHVKAAAAQDAGAFDPELAPVVLADGGKFAADEGIRRDTSLAKLGGLKTPFRADGVVTAGSASQISDGAAALAVTTSEWASRHGLRPLARVHTAVVAADDPVTMLTAPIPATAKALRRAGLGIEEIGVYEVNEAFAPVPLAWLAETEADPERLNPRGGAIALGHPLGASGARIMTTMLQHMRDNGIRYGLQTMCEGGGMANATIVELL

SEQ ID NO: 21142 - protein, 327 aa, Micromonospora sp. ATCC 39149
MFSLDWIYYAISWILLTWHSAWDAIGVPVDAVIGTNWAWILAIVFLVVTVRVILFPVFVKQIKSQRAMQALQPRVKELQEKHKGDRETLQKEMMELYRKEKANPLMGCLPMFLQIPVFLGLFHVLRRLDPAKVNKTLYGWTVEQFDSASSAKLFTAPIAGKFGSTADELARLGANGTTVKVIAGILVLVMMGTTYLTSRQMILKTGWAEDPQQKMIQRLMLYGIPLSLLVSGAIFPIGVIIYWVTNNLFTLGQQQWVLRKYPPPPTPGRTGAKPGSPVQPARTAGLFGRKAAPAPAKQTPAAPKVAGPKPGSKPVNPKKSRPAKRQG

SEQ ID NO: 21143 - protein, 618 aa, Micromonospora sp. ATCC 39149
MARAVGIDLGTTNSCVSVLEGGEPTVIANAEGSRTTPSIVAFARNGEVLVGEVAKRQAVTNPDRTIRSVKREIGTNWTVDIDGKKYTPQEISARTLMKLKRDAEAYLGEQITDAVITVPAYFNDGQRQATKEAGEIAGFNVLRIVNEPTAAALAYGLDKGSKEQTVLVFDLGGGTFDVSLLELAEGVIEVKSTSGDNHLGGDDWDQRIIDHLVKTFRGEHGIDLAQDKMALQRLREAAEKAKIELSAATTTNINLPYITAGSAGPLHLDVTLSRAEFQRMTQDLLDRCKGPFEQAVKDAGIKVSDVDHVILVGGSTRMPAVTDLVKQLTGAEPNKGVNPDEVVAVGAALQAGVLKGEVKDVLLLDVTPLSLGIETKGGIFTKLIERNTTIPTKRSEVFTTADDNQPSVLIQVFQGEREIAAYNKKLGTFELTGLPPAPRGVPQIEVTFDIDANGIVNVHAKDLGTGKEQKMTITGGSSLPKDDIERMRRDAEEHAEDDKRRREEAETRNLAEALQWQTEKFLAESGDKLPGENREQLNEALGELRGALGGQDIDKIKAAHEKLAQVSQQAGSLLYASQQAEQGEQPGAAGPGAGATGGAKAGGADDVVDAEIVDEDKK

SEQ ID NO: 21144 - protein, 707 aa, Micromonospora sp. ATCC 39149
MGDLAGDPAAFSCGRPSRRCAPLERHFLTTFADPSTFPSVFDASAHAGDPAGITAVAETAPAGTTTDDSATIDAAVDTPADTQTDSKVDTDTDGEALVEADVDFAALGLPQPLVQALGRLGIATPFPIQRATVPDALAGRDVLGRGQTGSGKTLAFGLPVIARLAKRARARPLHPRALVLVPTRELAMQVNDALVPLGKAVGIFLKTAVGGVPYDRQIDALRRGVEIVVATPGRLGDLINRGVCHLDDVEVTVLDEADQMADMGFLPEVTELLAKTPAGSQRLLFSATLDGDVDSLVKRFMTDPVTHSTAPATAAVSTMDHHLLLIPPHDKFAVTASIAARAGRTMLFARTQLGVDRLVEQLAAVGVRAGGLHGGKTQRMRTKTLAEFREGRMSVLVATDVAARGIHVDGVSLVLHVDPPKEPKDYLHRAGRTARAGESGAVATLVLPKQRRTTLAMLEKAGVEPAETRVRAGDPALAELTGAREPSGVPVRDEAPAPRRHGDRPSAPRRFEDRGERRYGDRPTGERRYGDRDGRGERGFGDRPAGERRYGDRPTGERRYDDRDGRGERGFGDRPAGERRYGDRPAGERRYDDRPAGERRYDDRPSGGRRFDERAGGERRYGDRPTGEQRYDDRPTAPRRYEDRPVGERRYGDRPAGERRFAERGERGGDPRTGDRRGSFRPEGRGRDDRPRDDRRGFGGRPPARTH

SEQ ID NO: 21145 - protein, 438 aa, Micromonospora sp. ATCC 39149
MGSTTPLSPSWSNWAGNQRSAASTILRPRTIADITAAVQAAAAAGERIRPVGSGHSFTPVACADGSRMELTDLDTGVRVDRDRRLVTVPAGMPLHRLNALLAEHGLAMPNLGDIDAQTVAGAISTGTHGTGAAYGCLSTFVETLTLVTGTGEVLRCSAGEHPDVFAAARVSLGALGVLAEVTLRVVDAFVLRAHERPALLADVLADLPSLVAAHDHVEFFWFPYTDRVQLKVNDRVPTDDRPLPRWRAWLDDDFLSNTAFAGLCRLGRAAPRLVPAIHAASARALSERAYTGRSDAVFCTPRRVRFMEMEYGLPRAALPEALAEVRRIIDRLPFKVLFPVEVRFTAADDIWLSHGYGRDSAYIAVHQYAGVPYEPYFRAVEEMATGLGGRPHWGKLHWRDAESLAPTYPRFADFQALRARLDPHGVFGSPHLTTLLGP

SEQ ID NO: 21146 - protein, 67 aa, Micromonospora sp. ATCC 39149
MTTGTVKWFNADKGFGFISPDGGGADVFAHFSAISASGFRSLDENQKVEFDITQGQKGPQAENIRPL

SEQ ID NO: 21147 - protein, 326 aa, Micromonospora sp. ATCC 39149
MGSIVAENRKSLMLFSGRGFPELAREIGEVLGIAPTPADAYEFANGEIFVRFKDSVRGSDAFVVQSVTHGVNTWIMETLIMIDALKRGSAKRITVVLPFYPYSRQDKKHRGREPISARLVADLLKTAGANRILTVDLHTAQIQGFFDGPVDHLFAMDVLAEYVERKFAGRPMTVVAPDSGRVRVAERWTDRLGGCPLAFIHKTRDPLKPNQVVANRVVGEVEGRVCLIVDDMIDTGGTITKAADILRESGAAEIVVASTHALLSDPATERLKNSPITEVVVTNTLPLPPEKQLDKIKVLSIAPLLARAIREVFDDGSVTTLFGGLS

SEQ ID NO: 21148 - protein, 594 aa, Micromonospora sp. ATCC 39149
MCGLAGEFRRDGSRADVAAVERMAATMSDRGPDDGGVWSQGATALGHRRLKIIDLSAASGQPLVDPASGLTGVFNGCVYNYRELREELQARGHRFFSSGDSEVVVKAYAEWGLDFVDHLVGMFAVAISERDTGRLVLARDRLGIKPLYVAEAPGVVRFASTLPALLAGGGIDTAIDPVALAHYLSFHSIVPPPRTILRGVAKLPPATVRVYEADGTCRERVYWDPAFTRREERSGWSARDWEDALLESLTTAVRRRMVADVPVGVLLSGGLDSSLVVALLAEQGQRGLSTFSIGFDAVGGRSGDEFVYSDLVAKTFDTDHHQIRVAARDLLPPLEAAVAAMSEPMVSHDCVAFWLLSQEVSKHVKVVQSGQGADEILGGYHWYPPLAGVDRERAVETYARAFLDRDAAGLARVLDPAWLADGDPAREFVAAHLALPGAQTAVDAGLRIDTQIMLTDDPVKRVDNMTMAHGLEARVPFLDHEFVELAATCPPELKLAQGGKGVLKEIGRRVLPHQVIDRPKGYFPVPGLTHLEGKLLDRVRDALHAPAARRRNLFRTEYVDALLADPNAELTPLNGNKLWQLGLLEMWLQSHGID

SEQ ID NO: 21149 - protein, 339 aa, Micromonospora sp. ATCC 39149
MTRYGPMFGPDVTFLGVDRCALDDPASYADADVVIVGAPFDGGTSHRPGTRFGPSAIRQACYLPHDGSRPSLALRVDALRDLRVYDAGDVEMFSGDIERSLSSLEAAVHAVARSGAIPVVLGGDHSIALPDATGVARHHGLGRVSLVHFDAHADTGDVEFGSLHGHGQPMRRLIESGAVRGDRFLQIGLRGYWPGPDVLQWMAAQRMRSYEMTELVARGLDTCLSEAFDIAVDECEGVFLSVDVDVVDPGMAPGTGTPEPGGLTSRQLLDAVRRCCYELPVVGVDVVEVAPPYDHADITAYLGNRVVLEALSAIARRRRDAQGGPPWEPTQPLLDIRLP

SEQ ID NO: 21150 - protein, 422 aa, Micromonospora sp. ATCC 39149
MATLRFRAMTTSLNRRGFLRLTGTAAAVAAAGGVLTACAVDENPGQPASAGGNNLRKVKLGFIALTDCAPLIVAKELGYFAERGLDVELIKQASWPATRDNLLSGEIDGGHVLFSMPLSVAMGIGGKAGTTDLKIAMVLNNNGQAITLKKAYAGAGYGDLAVAKALLEKEKPKLAMTFPGGTHDTWLRYWLKATKADVSNIQISAVPPPQMVSNMAANNQDGYCVGEPWNAVAVQKDIGFTHITTQDIWQHHPEKALVVGAKLTNDQDTLADIMKATLKAAKWLDDLANRDKLAGMLAPVGYVNAPAADIKGRLLGQYNLGAGLGTKTYTGDQMMFFRDGETSFPRRSHVYWFLAQYQRFGLVKETPDYAKLADELILHDLYAKVATAEGIKIPDDDMAPFHIKLDDTMFDPKNVADEARRP

SEQ ID NO: 21151 - protein, 540 aa, Micromonospora sp. ATCC 39149
MTQRVEGHGGELALAALRAHGVREMFTLSGGHVFPLYAAAHSAGFPLYDVRHEQSAVFAAEAVAKLNRRPGLAVLTAGPGVTNGVSGLTSAYFNASPVLVLGGRAPQFRWGSGSLQEMDHLPLVAPVTKHAETVFATDDIPRAVSAALTTALTPHRGPVFLDFPLEAVFSVGDADLPEAVAPAPVEADPEEVARAAGLIAAAHRPVIIAGSDVYAGDAVEALRAAAEALRVPVFTNGMGRGALPPSHPLAFAKARRAALRDADVVVVVGTPLDFRLAFGDFGDAQVVHVVDAPSQRAGHVAPAVSPAGDLRLILTAFAEHPGDRADHDDWVARLRVAEDAAKARDAEEMAAETDPIRPARVYGELRRALAPDAITIGDGGDFVSYAGKYLEPAQPGTWLDPGPYGCLGTGMGYAMGARVSHPDRQVCVLMGDGAAGFSLMDVESLVRQRLPVVIVVGNNGIWGLEKHPMRAMYGYDVAADLQPGLRYDRVVEALGGAGETVEKAGDLAPALDRAFASGVPYLVNVLTDPADAYPRSSNLA

SEQ ID NO: 21152 - protein, 391 aa, Micromonospora sp. ATCC 39149
MAYLDHAATTPMLDEALEAYVAAAREVGNASSLHAAGRRARRRVEESRERVAAALGARPSEVIFTGGGTESDNLAVKGIFWARRAASPAQRRVVSSAVEHHAVLDAVDWLAGHEGAEVGWLPVDDAGRLDPEALRAELADHGDAVAVVTAMWANNEVGTLQPVAGLAAVAAEHGVPFHTDAIQAVGQVPVDFAASGVSALTVTGHKLGGPAGVGALLLARDVAATPLLHGGGQERDVRSGTLDTAGIVAFAVAVETAVKGQQEYAARVAALRDDLVRRVRHAVPEVVFNGDPVDRLPGNAHFSFPGCEGDALLLLLDAQGIACSTGSACSAGVAQPSHVLIAMGADDDRARSSLRFTLGHTSGQADVDALVAALPAAVERARRAAALRAPR

SEQ ID NO: 21153 - protein, 626 aa, Micromonospora sp. ATCC 39149
MTRPTPETLAHSARRARAGGEPATDAAAAGRGAVVPAAPGVRQPGPVQISGAGSLVRSLEALGVDVIFGIPGGAILPAYDPLYDSTVRHILVRHEQGAGHAATGYAQATGRVGVCMATSGPGATNLVTPIADAYMDSVPMVAITGQVARPLIGTDAFQEADIQGITLPITKHNFLVQTAEEIPRVLAEAFHLASTGRPGPVLVDIPKDVLQAQTTFSWPPTLDLPGYRPTLHPHGKQIREAARLMTSARRPVLYVGGGVLKAGATEGLRQLAELTGIPVVTTLMALGAFPDSHQQHLGMPGMHGTVAAVYGLQKADLIVALGARFDDRVTGRLDSFAPDATIVHADIDPAEIGKNRHADVPIVGDAKHVIEELIAAVTTERAAGRPADLGDWWTQLDDLRDRYPLGYEEPADGTLSPQYVIQRLGKIAGPEAIYVAGVGQHQMWASQFISYEKPGTWLNSGGLGTMGYAVPAAMGAKVGRPDTVVWAVDGDGCFQMTNQELATCALEGIPVKIAVINNGNLGMVRQWQTLFYNERYSNTELGTHKHRIPDFVKLAEALGCVGLRCENAADVDKIIEAAMAINDVPVVIDFVVGKDAMVWPMVAAGTSNDEIMFARGVRPAFDEDDI

SEQ ID NO: 21154 - protein, 532 aa, Micromonospora sp. ATCC 39149
MNPVVLIAEELAPAAIEVLAHDFDVRHVDGTDRPALLSALSEADAVIVRSATQIDAEAIAAAPRLKVVARAGVGLDNVEVPAATARGVMVVNAPTSNIVSAAEQAVALLLAVARNTASASAALKAGEWKRSKYTGVEVQGKTVGVVGLGRIGVLFAQRIAAFGTRLIAYDPYIQPARAAQLGVRLVGLEELLRESDFISIHLPKTPETVGLIGEKELAIVKPGVRIVNAARGGLVDEQALADAIAEGRVGGAGVDVYAKEPCTSSPLFAFDNVVATPHLGASTAEAQDKAGLAVAKSVKLALQGEFVPDAVNVQAGGVVAEDVRPLLPLTEKLGRAFTAVAGGVAASVTVEVRGAVVNHDVSVLKLAATKGLFSSVVEEQVTYVNAPHLAVERGVEVNLASQAETTDHPTLVTVRGALPDGRTVSVSGTVASAGARDVLKLTEVDGFDVEIGAEGILLFLRYVDRPGVVGTVGTLLGEAGINIAAMQVARREAGGETLMTLTVDQALGADLLTSAADSIGATSASAADLRDE

SEQ ID NO: 21155 - protein, 400 aa, Micromonospora sp. ATCC 39149
MTVAYLVAGVRTPIGRYAGALAGVRPDDLAAHVIRELVARHPSVDWARVDDVVLGCANQAGEDNRNVARMAALLAGLPGEVPGSTVNRLCGSGLDALATAARQIVAGEAELVVAGGVESMSRAPFVLPKAASAFSRAAEMYDTTIGWRLVNPLMEQGWGIDSMPETAENVAAEYGVDRAAQDAFAYRSQQRAAKAQADGRFVEEIVPVTVPAGRRETKLVDVDEHPRETSLEKLAALPTPFRDGGTVTAGNSSGVNDGAVALLVAGEAAVARYGLTPLARVTGAAAAGVPPRIMGIGPVPATRRLLGRLGVGLGAVDVIELNEAFAAQSVAVLRELGLPEDAEHVNPNGGAIALGHPLGASGARLALTAALELRRRDARRALATMCVGVGQGISLMLESA

SEQ ID NO: 21156 - protein, 326 aa, Micromonospora sp. ATCC 39149
MERVVPRRAPSKKEKSMRMKRVAAVAMMASLALSAAACGKEGTPAPSGGNASGGAQGDTCTTSGATFTPKGDANVAGSPTFDKIKSSGKVTVGVKFDQPNLGYKDAQGKRCGFDIEIAQYVASTLGVDPAKIEYKEIASANRETAIKGGEIDYYVGTYSITDKRKNDISFAGPYFIAGQDLLVRKDETTITGKDTLKGKKVCSATGSTPIQKVRDEGLTEPENIVEFKTYSECVSQLLDKKVDAVTTDDAILKGYAAQNPDELKVAGQPFSTEKYGIGLPKDDKALRDYVNDQIEAAAKDGTWQKIYDGTLGKSGSAGSPPALERY

SEQ ID NO: 21157 - protein, 293 aa, Micromonospora sp. ATCC 39149
MAQNAVEKTPVTLLGLGAMGTALARTWLAAGHPLTVWNRTPARAAALAAEGARVADSAAEAVAANTLVVVCLLDDASVEEVLAGTDLADKDLVNLTTSTPAHSRARAEWARERGARYLDGGIMAVPPMIGVSEAGGYVFYSGSRELFERHQETLGIPAGTTYVGQDAGFAALHDVALLSAMYGMFAGAAHAFALIRKEDIDPASLAPLLADWLVAMAPAVHQTADQLRSGDYTKGVVSNLAMQVAGTQTFLSTAEQQGVSPELLSPYFELMRRRLTEGSGEEDLTGVIDLLVR

SEQ ID NO: 21158 - protein, 67 aa, Micromonospora sp. ATCC 39149
MAQGTVKWFNADKGFGFITVDGGGADVFVHFSAIQTSGYRTLEENQRVEFEIAQGQKGPQAEQVRPI

SEQ ID NO: 21159 - protein, 401 aa, Micromonospora sp. ATCC 39149
MTERVVLAYSGGLDTSVAIPYLAEQTNAEIIAVAVDVGQGGEDLDAIRQRALDCGAVESEVVDARDEFAAEYCLPAMRANALYMDRYPLVSALSRPLIVKHLVAAARKHGGTIVSHGCTGKGNDQVRFEVGIGALAPDLKIVAPARDFAWTRDKAIAFAEEKGLPIDVSARSPYSIDQNLWGRAVETGFLEDIWNAPIEDLYSYTSDPAQERDADEVVITFDAGVPVAIDGETVTPYQVIRELNRRAGAQGVGRLDMVEDRLVGIKSREVYEAPGAIALITAHQELEAVTVERDLARFKKGVEQRWGELVYDGLWFSPLKKALDAFIDDAQQQVSGEVRLVLHGGRATVTGRRSEASLYDFGLATYDTGDTFDQSLAKGFVRLWGLPSRLAAARDARLGGC

SEQ ID NO: 21160 - protein, 371 aa, Micromonospora sp. ATCC 39149
MKVGIPREVKNHEYRVAITPAGVNEFTRSGHHVFVESGAGVGSSITDEEFAAAGAKILATADEVWDTAELVLKVKEPVAEEYHRMRTGQVLFTYLHLAASKACTDALVERGVTGIAYETVELPDRSLPLLAPMSEVAGRLAPQVGAYHLQRSGGGRGVLMGGVSGVYAAKTVVIGAGVSGMNAAAIALGLQAEVLLLDKNVARLRQADAIYRGHLQTVASNAYEIERAVLDADLVIGAVLVPGAKAPTLISNELVSRMKPGSVLVDISIDQGGCFEDSRPTTHAEPTYRVHDSIFYCVANMPGAVPHTSTYALTNVTLPYALELANQGWREALRRDPALALGLNTHDGQVVYGPVAEAHGMPTLPLAEVLA

SEQ ID NO: 21161 - protein, 404 aa, Micromonospora sp. ATCC 39149
MVEFVNWSGSLAFTPGEHAEPATEDEVRDLVRRARETATTVRPVGSGHSSSPLVRTGGILLSLDRLSGVIHDDGNAATVWAGTRLKDLGEGLYDAGLAMDNLGDVDYQSIAGATATGTHGSGLGFGNLSTQVAGIRLVTGTGEALDISAEHNPEVLPAARLSLGALGVVTQVTLDVQPRYELKRRAWCAPVDWTLDHLAELQHTNRNMDFYWYPRSDMTQVRIMNRADDVAAERPWAVPRVPGSGPWEDPREVRVGPTHRTIPQHRELRFEEIEYMLPSEAFPACFAEVRRRIRERHRRDVGWRVLVRTIAADDIWLSNAYGRPTTTIACLQNTSLPYEEYFRDVEAVFRQYGGRPHWGKKHWLTARELRPLYPRWDDFQELRRRLDPDGVFLSPDLARLLGKA

SEQ ID NO: 21162 - protein, 281 aa, Micromonospora sp. ATCC 39149
MRVTRAAAVVVFATLSLIPGSCGRGDSGPDVIEKAAETKTITIGVIPNQPNLSLKTDGTYVGFDVEIGKIVAKGLGVDPANIQWKDTTVPDRERVIKDGTVDLVVATYTINDARKKEIRFAGPYYVAGQDLLVKANSTIKGPEDLEGKVVCSSAGSTPAKRIRSQYPKTRLQQYDQESRCLPDLESGAIDAVTTDNVVLLGYSMRPENAGKFKLVGNTFSEEPYGIGMKKRDRASCEKINEILQAAARDGSYKAAWDATLGKGGGNSAPTLDASKMSHCSA

SEQ ID NO: 21163 - protein, 362 aa, Micromonospora sp. ATCC 39149
MGRYDLALIGFGGVNRALAALICERGERLSAELGFALRVVAITDLRAGSLVDTEGIDLAPLLAVEFGELTFAGMTGGSADPRNEWVIREVPADIVVEATFTDPTEGEPALSHVRWALESGKHVCTTNKGPVAFGGRALRRLAAERGVSFEFEGAVLSGTPVLRTAQRMLGGLEIAGVQGIMNGTSNYILGRIEAGIDLATAIAEAQELGYAEADPTADLEGHDVQLKLMILANEVLGADLRREDVFREGISNITQQDVQNAMSKGLRWKLVGSATRQADGSVDARVSPRALPAHHPLAGISGPVNAVAFHTDLLGIVTVSGPGAGRTETAYALLSDIIAIHQRHPADDDSALRRVPQETPHG

SEQ ID NO: 21164 - protein, 363 aa, Micromonospora sp. ATCC 39149
MTTTVPRPPGRRTVRDRLFRLAETVTTPLLPEDYLDLIAPLRSGAALRGRILDVRPETRDAATLTIRPGRGWRGHTPGQYVRLGVDVDGVRQWRAYSLTSAPGRSDGLISVTVKAIPDGRVSNHLVRRARPGTLVQLDQAQGDFVAPVPAPERVLFVTAGSGITPVMGMLRAGAPATADVVLVHSAPTPDDVIFAAELRGLAARGAIRLVERHTDTDGVLGVAELADLVPDHLDRQTWACGPVGLLDAVEAHWAANGAADRLHTERFRPTVISPGAGGDVTFTRAGVTVRADGGTALLDAGEDAGVLMPSGCRMGICFGCVVPLRQGAVRDLRNGEITTAVPGDNVLIQTCVSAAAGTCDIDL

SEQ ID NO: 21165 - protein, 257 aa, Micromonospora sp. ATCC 39149
MARAALRRRLSSPLAAPLTWRVARLVERRDETPTAQTLVLDVPGWPGHLPGQHVDVRLTAPDGYQAARSYSLAGPAEGERVALTVQRVPDGEVSPYLTDVWATGDPVEVRGPVGGWFVWRPAELAPVLLVAGGSGVVPLMAMVRARRAAGSRVPFRLIYSARTPADVIYADELRRRARDDHGLDVAYVYTRTAPKGWRGEPHRIGLADVNTHGWPAELEPLCYVCGPTGFVETVADLLVGLGHQPRRVRTERFGPTG

SEQ ID NO: 21166 - protein, 568 aa, Micromonospora sp. ATCC 39149
MAERTVADLVVERLRAWRVPRAFGCPGAAIDPVVAALNRAGGDPEFVPARHGETASFMASGHAKFTGEIGVCLATQGPSAVHLLNGLYDAKLDSKPVVAIVGEDTSGPLGGAYEEIGLSRLLGDVCNQFVRYGRTPAQVPAVLDQAFRTAAATRSPTCVVLPREVQVASVPDLVAQFAGVMSATPGEPVAQVLPHDTDLAAAASLLGMGNRVAILVGQGGHGAAAEIVALADRLGAGVAASLLGKPVLDERLPFHAGVLGEVGTTAAAQLMGGCDTLLMVGTNNPWTDYYPMPGQVRTIQIDIDGRRIGNRYPVDVPLVGDATETLRALLARVPDRPRRAWRETVEASVDRWRQAAARAAEPAEPVNPQLVLHELSARMPREAAVAVDVGSVVYWYARHLELPPGVAAHLCGTLGSTGCALPYAVAAKLARPDRPVLALAGDGAMQLNGLAELITVAHHWREWSDPRLVVLVLNNRDNSGVGDGRPAAGVANRRPDVPYAGWARLLGLHGVRVDRPELVGAAWDEVLAADRPSVLEAVVDPTVARRAPEPAMADLRGLFSTGEPDTTG

SEQ ID NO: 21167 - protein, 420 aa, Methanosarcina mazei
MRSHLVKPGSVYDGIEPGELGETTESVQDRVRQLESRNSFLEEQCSQIESEKRYLENQKIKYEREIRKLQSELDRMKTSPLIIGTVIDVIKNDRIIVRSSNGPQFLVNVSQYIDEKKLLPGAKVALNQHTLAIAEVIPSTEEPFVAAMEVIESVEVDYDQIGGLDEQIQELQEAVELPLTSPERFARIGIEPPKGVLLYGLPGTGKTLLAKAVAHRTNATFIRVVGSELVQKYIGDGSKLVREIFEMARKKAPSIIFIDELDSIAARRLNETTGADREVQRTLMQLLAEMDGFDKRKNIRIIAATNRPDVLDPAILRPGRFDRLVHVPMPGIEARGKILKIHCEKMTLAEDIDFKKLAKATEGMSGADLKAIATEAGMFAVRRDKELVEMEEFLEAVEKVSMAADTQKMMPSNLPETMFV

SEQ ID NO: 21168 - protein, 198 aa, Xanthomonas axonopodis pv. citri
MLMSDSLNAAALDQLFRTARTQNAFADTPVSHEVLRELYELVKWGPTAANSCPARFVFVTSAEGKAKLKPALSEGNAAKTLAAPVTVIVAHDEDFHEKLPYLFPHADAKSWFDGPREGRTESAFRNGSLQGAYLILAARALGLDAGPMSGFDNAKVDAAFFAGTPIKSNFLVNLGYGDPAGLFPRSPRLSFDEAARFE

SEQ ID NO: 21169 - protein, 684 aa, Sagittaria pygmaea
MAAPYATAAAAAAAATATKLTFPSLAGSAAASTVSASSTSLYLPLRRHREFAGRKHPLPVVPMPLKASALRHHLPVFAALSDSPKPQAAATSTTTTITERLIRNFGPDEPRKGADILVEALEREGVKDVFAYPGGASMEIHQALTRSPSIVNHLFRHEQGEIFAAEGYARATGRPGVCIATSGPGATNLVSGLADALLDSTPLVAITGQVPRRMIGTDAFQETPIVEVTRSITKHNYLVLSVDDIPRIVHEAFYLATSGRPGPVLIDIPKDIQQQLAIPEWRTTMKLHGYMSRLPKPPQQSHLEQIVRLLLESRKPVLYAGGGSLNASDELRRFVELTGVPVASTLMGLGSFPTTSDLSLKMLGMHGTVYANYAVEHSDLLLAFGVRFDDRVTGKLEAFASRAKIVHIDIDPAEIGKNKQPHVSVCGDLKPALEGINELLEETKIHEQLDFSSWRGELDEQKRKFPLSYKKFGDAIPPQYAIHVLDELTNGEAVISTGVGQHQMWAAQWYSYKKPRNWLSSAGLGAMGFGLPAAAGAAVGRPESIVVDIDGDGSFLMNIQELAVLRIENLPVKIMVLNNQHLGMVVQWEDRFYHANRAHTYLGDPARESDIYPDLVTIAKGFNIPAARITKIGEVRDAITKMLETPGPYLLDIIVPHQEHVLPMIPSGGAFKDLIVEGDGRSSY

SEQ ID NO: 21170 - protein, 537 aa, Arabidopsis thaliana
MANSKYEYVKSFEVEDEVMFPNLIIIRIDGRDFSRFSQVHKFEKPNDETSLNLMNSCASSVLVEYPDIVFAYGYSDEYSFVFKKASRFYQRRASKILSLVASFFAAVYVTKWKEFFPHTKLEYAPSFASKVVSCASVEVLQAYLAWRQHDCHISNQYDTCLWMLVKSGKTLSETQEILKDTQKQQRNELLFQQFGINYKMLPVLFRQGSCLFKTKVIFSIISFFYFLLEETVKHDENGKPVKRLRRRETLVHSENVAGRSFWNEHSSLHKDLGHFAKDIGKIEPDYVKSFQFESRLLPLTWVVVRIDGCHFHRFSEVHEFEKPNDEQALKLMNSCAVAVLEEFQDIAFAYGVSDEFSFVLKNKSELYKRQSSKIISAVVSFFTSTYMMRWGDFFPHKKLKYPPSFDGRAVCYPTSDILLDYLAWRQVDCHINNQYNTCFWMLVKSGKSKIQAQDYLKGTQTREKNELLSQQFGIEYNSLPVIFRMGSSVFRLKTQEGVTEENGEVSGKQVEAEVGVDYSNIIDQCFWQQHPHILSFS

SEQ ID NO: 21171 - protein, 532 aa, Arabidopsis thaliana
MANSKYEYVKSFEVEDEVMFPNLIIIRIDGRDFSRFSQVHKFEKPNDETSLNLMNSCASSVLVEYPDIVFAYGYSDEYSFVFKKASRFYQRRASKILSLVASFFAAVYVTKWKEFFPHTKLEYAPSFASKVVSCASVEVLQAYLAWRQHDCHISNQYDTCLWMLVKSGKTLSETQEILKDTQKQQRNELLFQQFGINYKMLPVLFRQGSCLFKTKKSKSFQLLEETVKHDENGKPVKRLRRRETLVHSENVAGRSFWNEHSSLHKDLGHFAKDIGKIEPDYVKSFQFESRLLPLTWVVVRIDGCHFHRFSEVHEFEKPNDEQALKLMNSCAVAVLEEFQDIAFAYGVSDEFSFVLKNKSELYKRQSSKIISAVVSFFTSTYMMRWGDFFPHKKLKYPPSFDGRAVCYPTSDILLDYLAWRQVDCHINNQYNTCFWMLVKSGKSKIQAQDYLKGTQTREKNELLSQQFGIEYNSLPVIFRMGSSVFRLKTQEGVTEENGEVSGKQVEAEVGVDYSNIIDQCFWQQHPHILSFS

SEQ ID NO: 21172 - protein, 116 aa, Arabidopsis thaliana
MSATPEEDKKPDQGAHINLKVKGQAFFVVGTWLVIDTDGNEVFFRIKRSTQLKKLMNAYCDRQSVDFNSIAFLFDGRRLRAEQTPDELEMEDGDEIDAMLHQTGGGAKNGLKLFCF

SEQ ID NO: 21173 - protein, 392 aa, Desulfotignum balticum
MKEIVIVGASRTAIGDFGGALKNVPPMDLARHVITSVLKRSNVQPGWIDKVMFGCAFSPVDQNIARNAAFKAGVPQEAPGFTINGTCGSSLQAIMSGVQSILCDECDVVLAGGVESMSNAPFIMDSARWGQRLRHLTAYDLVWKGMQEPSIGVGMGLTAENLAEKYEISREEQDEFALLSHQRAARAIKDKRFIEEITPYPIPSRKGQPVSFDTDEHVRSNATLEGMAKLPAIFKKGGTVTAGNACGMNDASSAIIITHREKADELGLKPLAKISAYHVAGVDPDYMGIGPVPAIQGVLAKSNFGVNDIDRYEINEAFAAQYLACEKVLGLDREKTNIYGNGIALGHPVGATGCRLVVTLLYQMQDQGLESGVASLCAGGGMGFAVLLEGVS

SEQ ID NO: 21174 - protein, 394 aa, Staphylococcus aureus
MQEAYIVAYGRSAAAKAKQGALFHERPDDVAAKVLQGVLKRIDGKFNKNMIEDVIVGTAFPEGLQGQNIARTIALRTGLSDTVPGQTVNRYCSSGLQTIAIAANQIMAGQGDMLVAGGVELMSAVPMGGNEPTNNPTLQYDDIGASYPMGLTAENVASQFDVSREDQDAYAVRSHQRAYDAQRDGRFKDEIIPIQVNSVEYTNAGPKVHTNIFDQDEFIRPDTTMEALAKLRTVFKADGTVTAGTSAPLSDGAGFVVLMSGDKVKELDVTPIARFVGYKAVGVDPKIMGIGPAYAIPEVLSLSNLSVEDIDLIELNEAFASQTIASIKEVGLDISRTNVNGGAIALGHPLGATGAMLTARLLNEMGRRPDSRYGMVTMCIGVGMGAAAIFEYVR

SEQ ID NO: 21175 - protein, 394 aa, Staphylococcus aureus
MQEAYIVAYGRSAAAKAKQGALFHERPDDVAAKVLQGVLKRIDGKFNKNMIEDVIVGTAFPEGLQGQNIARTIALRTGLSDTVPGQTVNRYCSSGLQTIAIAANQIMAGQGDILVAGGVELMSAVPMGGNEPTNNPTLQYDDIGASYPMGLTAENVASQFDVSREDQDAYAVRSHQRAYDAQRDGRFKNEIIPIQVNSVEYTNAGPKVHTNIFDQDEFIRPDTTMEALAKLRTVFKADGTVTAGTSAPLSDGAGFVVLMSGDKVKELGVTPIARFVGYKAVGVDPKIMGIGPAYAIPEVLSLSNLSVEDIDLIELNEAFASQTITSIKEVGLDISRTNVNGGAIALGHPLGATGAMLTARLLNEMGRRPDSRYGMVTMCIGVGMGAAAIFEYVR

SEQ ID NO: 21176 - protein, 394 aa, Staphylococcus aureus
MQEAYIVAYGRSAAAKAKQGALFHERPDDVAAKVLQGVLKRIDGKFNKNMIEDVIVGTAFPEGLQGQNIARTIALRTGLSDTVPGQTVNRYCSSGLQTIAIAANQIMAGQGDILVAGGVELMSAVPMGGNEPTNNPTLQYDDIGASYPMGLTAENVASQFDVSREDQDAYAVRSHQRAYDAQRDGRFNDEIIPIQVNSVEYTNAGPKVHTNIFDQDEFIRPDTTMDALAKLRTVFKADGTVTAGTSAPLSDGAGFVVLMSGDKVKELGVTPIARFVGYKAVGVDPKIMGIGPAYAIPEVLSLSNLSVEDIDLIELNEAFASQTIASIKEVGLDISRTNVNGGAIALGHPLGATGAMLTARLLNEMGRRPDSRYGMVTMCIGVGMGAAAIFEYVR

SEQ ID NO: 21177 - protein, 394 aa, Staphylococcus aureus
MQEAYIVAYGRSAAAKAKQGALFHERPDDVAAKVLQGVLKRIDGKFNKNMIEDVIVGTAFPEGLQGQNIARTIALRTGLSDTVPGQTVNRYCSSGLQTIAIAANQIMAGQGDILVAGGVELMSAVPMGGNEPTNNPTLQYDDIGVSYPMGLTAENVASQFDVSREDQDAYAVRSHQRAFDAQRDGRFKDEIIPIQVNSVEYTNAGPKVHTNIFDQDEFIRPDTTMEALAKLRTVFKADGTVTAGTSAPLSDGAGFVVLMSGDKVKELGVTPIARFVGYKAVGVDPKIMGIGPAYAIPEVLSLSNLSVEDIDLIELNEAFASQTIASIKEVGLDISRTNVNGGAIALGHPLGATGAMLTARLLNEMGRRPDSRYGMVTMCIGVGMGAAAIFEYVR

SEQ ID NO: 21178 - protein, 394 aa, Staphylococcus aureus
MQEAYIVAYGRSAAAKAKQGALFHERPDDVAAKVLQGVLKRIDGKFNKNMIEDVIVGTAFPEGLQGQNIARTIALRAGLSDTVPGQTVNRYCSSGLQTIAIAANQIMAGQGDILVAGGVELMSAVPMGGNEPTNNPTLQYDDIGASYPMGLTAENVASQFDVSREDQDAYAVRSHQRAYDAQRDGRFNDEIIPIQVNSVEYTNAGPKVHTNIFDQDEFIRPDTTMEALAKLRTVFKADGTVTAGTSAPLSDGAGFVVLMSGDKVKELGVTPIARFVGYKAVGVDPKIMGIGPAYAIPEVLSLSNLSVEDIDLIELNEAFASQTIASIKEVGLDISRTNVNGGAIALGHPLGATGAMLTARLLNEMGRRPDSRYGMVTMCIGVGMGAAAIFEYVR

SEQ ID NO: 21179 - protein, 394 aa, Staphylococcus aureus
MQEAYIVAYGRSAAAKAKQGALFHERPDDVAAKVLQGVLKRIDGKFNKNMIEDVIVGTAFPEGLQGQNIARTIALRTGLSDTVPGQTVNRYCSSGLQTIAIAANQIMAGQGDILVAGGVELMSAVPMGGNEPINNPTLQYDDIGASYPMGLTAENVASQFDVSREDQGAYAVRSHQRAYNAQRDGRFKDEIIPIQVNSVEYTNVGPKVYTNIFDQDEFIRPDTTMEALAKLRTVFKADGTVTAGTSAPLSDGAGFVVLMSGDKVKELGVTPIARFVGYKAVGVDPKIMGIGPAYAIPEVLSLSNLSVEDIDLIELNEAFASQTIASIKEVGLDISRTNVNGGAIALGHPLGATGAMLTARLLNEMGRRPDSRYGMVTMCIGVGMGAAAIFEYVR

SEQ ID NO: 21180 - protein, 394 aa, Staphylococcus aureus
MQEAYIVAYGRSAAAKAKQGALFHERPDDVAAKVLQGVLKRIDGKFNKNMIEDVIVGTAFPEGLQGQNIARTIALRTGLSDTVPGQTVNRYCSSGLQTIAIAANQIMAGQGDILVAGGVELMSAVPMGGNEPTNNPTLQYDDIGASYPMGLTAENIASQFDVSREDQDAYAVRSHQRAYDAQRDGRFKDEIIPIQVNSVEYTNAGPKVHTNIFDQDEFIRPDTTMEALAKLRTVFKADGTVTAGTSAPLSDGAGFVVLMSGDKVKELGVTPIARFVGYKAVGVDPKIMGIGPAYAIPEVLSLSNLSVEDIDLIELNEAFASQTIASIKEVGLDISRTNVNGGAIALGHPLGATGAMLTARLLNEMGRRPDSRYGMVTMCIGVGMGAAAIFEYVR

SEQ ID NO: 21181 - protein, 394 aa, Staphylococcus aureus
MQEAYIVAYGRSAAAKAKQGALFHERPDDVAAKVLQGVLKRIDGKFNKNMIEDVIVGTAFPEGLQGQNIARTIALRTGLSDTVPGQTVNRYCSSGLQTIAIAANQIMAGQGDILVAGGVELMSAVPMGGNEPTNNPTLQYDDIGASYPMGLTAENVASQFDVSREDQDAYAVRSHQRAYDAQRDGRFKDEIIPIQVNSVEYTNAGPKVHTNIFDQDEFIRPDTTMEALAKLRTVFKADGTVTAGTSAPLSDGAGFVVLMSGDKVKELGVTPIARFVGYKAVGVDPKIMGIGPAYAIPEVLSLSNLSVEDIDLIELNEAFASQTIASIKEVGLDISRTNVNGGAIALGHPLGATGAMLTARLLNEMGRRPDSRYGMVTMCIGVGMGAAAIFEYVR

SEQ ID NO: 21182 - protein, 394 aa, Staphylococcus aureus
MQEAYIVAYGRSATAKAKQGSLFYERPDDVAAKVLQGVLSRVGGKFNNNMVEDVIVGTAFPEGLQGQNIARTIALRTGLSHFIPGQTINRYCSSGLQTIATAANQIMAGQGDILVAGGVELMSAVPMGGNEPTNNPILQYDKVGASYPMGLTAENVALQYGVSREEQDTYAVQSHQRAYEAQRAGRFEDEIIPIRVEYVEYTEDGVDFKEGIFEQDELIRPDTTKEALAKLPTVFKADGTVTAGTSAPLSDGAAFVVLMSGDKVKELGVTPIARFVGFKAVGVDPKIMGIGPAYAIPEVLSLSNLTIEDIDLVELNEAFASQTIASMNAVGLDSSRTNVNGGAIALGHPLGATGAILTARLLSEMSRRPDSRYGMVTMCIGVGMGAAAIFEYIH

SEQ ID NO: 21183 - protein, 394 aa, Staphylococcus aureus
MQEAYIVAYGRSAAAKAKQGALFHERPDDVAAKVLQGVLKRIDGKFNKNLIEDVIVGTAFPEGLQGQNIARTIALRTGLSDTVPGQTVNRYCSSGLQTIAIAANQIMAGQGDILVAGGVELMSAVPMGGNEPTNNPTLQYDDIGASYPMGLTAENVASQFDVSREDQDAYAVRSHQRAYDAQRDGRFKDEIIPIRVNSVEYTNAGPKVHTNIFDQDEFIRPDTTMEALAKLRTVFKADGTVTAGTSAPLSDGAGFVVLMSGDKVKELGVTPIARFVGYKAVGVDPKIMGIGPAYAIPEVLSLSNLSVEDIDLIELNEAFASQTIASIKEVGLDISRTNVNGGAIALGHPLGATGAMLTARLLNEMGRRPDSRYGMVTMCIGVGMGAAAIFEYVR

SEQ ID NO: 21184 - protein, 109 aa, Schiedea globosa
DAHYKACLYAGIDISGINGEVMPGQWEFQVGPTLGISSGDQVWVARYILERIAEAAGVIVSFDPKPVKGDWNGAGAHTNYSTKSMRNEGGIEVIKKAIEKLSLRHKEHI

SEQ ID NO: 21185 - protein, 109 aa, Schiedea globosa
DAHYKACLYAGIDISGINGEVMPGQWEFQVGPTLGISSGDQVWGARYILERIAEAAGVIVSFDPKPVKGDWNGAGAHTNYSTKSMRNEGGIEVIKKAIEKLSLRHKEHI

SEQ ID NO: 21186 - protein, 102 aa, Schiedea sarmentosa
DAHYKGLSYAGIDISGINGEVMPGQWEFQVGPTLGISSGDQVWVARYILERIAEAAGVIVSFDPKPVKGDWNGAGAHTNYSTKSMRNEGGIEVIKKAIEKLT

SEQ ID NO: 21187 - protein, 104 aa, Schiedea mannii
  misc_feature (12)..(12): Xaa can be any naturally occurring amino acid
  misc_feature (21)..(21): Xaa can be any naturally occurring amino acid
  misc_feature (56)..(56): Xaa can be any naturally occurring amino acid
  unsure (1)..(104): unsure at all Xaa locations
DAHYKACLYAGXDISGINGEXMPGQWEFQVGPTLGISSGDQVWVARYILERIAEAXGVIVSFDPKPVKGDWNGAGAHTNYSTKSMRNEGGIEVIKKAIEKLTFA

SEQ ID NO: 21188 - protein, 95 aa, Schiedea haleakalensis
ACLYAGIDISGINGEVMPGQWEFQVGPTLGISSGDQVWVARYILERIAEAAGVIVSFDPKPVKGDWNGAGAHTNYSTKSMRNEGGIEVIKKAIEK

SEQ ID NO: 21189 - protein, 356 aa, Lolium perenne
MALLTDLLNLDLSGSTEKIIAEYIWIGGSGMDLRSKARTLPGPVSDPSKLPKWNYDGSSTGQAPGEDSEVILYPQAIFKDPFRRGNNILVMCDCYTPAGEPIPTNKRNAAAKIFSNPAVAAEEPWYGIEQEYTLLQKDINWPLGWPVGGFPGPQGPYYCSIGAEKSFGRDIVDSHYKACLFAGINISGINGEVMPGQWEFQVGPSVGISAGDQVWVARYILERITEIAGVVVTFDPKPIPGDWNGAGAHTNYSTESMRKDGGFEVIVAAVEKLKLRHKEHIAAYGEGNERRLTGKHETADIHTFSWGVANRGASIRVGRETEQNGKGYFEDRRPASNMDPYVVTAMIADTTLLWKP

SEQ ID NO: 21190 - protein, 354 aa, Lolium perenne
MASLADLINLDLSSTTDKIIVEYLWVGGTGVDIRSKARTVNGPITDASQLPKWNYDGSSTGQAPGEDSEVILYPQAIFKDPFRRGDHILVMCDCYTPQGVPIPTNKRNNAAKIFDNPKVAAEVTWYGIEQEYTLLQKDVNWPLGWPIGGYPGPQGPYYCAAGADKAFGRDIVDAHYKACLYAGINISGINGEVMPGQWEFQVGPSVGIAASDQLWVARYILERITEVAGVVLSLDPKPIPGDWNGAGAHTNYSTKSMREAGGFEVIKKAIEKLGKRHPEHIAAYGEGNERRLTGHHETADINTFKWGVANRGASIRVGRDTEKEGKGYFEDRRPASNMDPYVVTSMIAETTLLL

SEQ ID NO: 21191 - protein, 347 aa, Chroomonas mesostigmatica
GNRITPSWVAFTDDERLVGDAAKNQGAINPENTVFDVKRLIGRKYGDQTVQHDKKLLPYELVEKDGKPYVSVLFKGEKKVYSPEEVSAMVLTKMKEVAEAFLGKDIINAVVTVPAYFNDAQRQATKDAGTISGLNVLRITNEPTAAAIAYGLDNKGGEKNILVFDLGGGTFDVSMLTIDNGVFEVIATNGDTHLGGEDFDRRIMDYILKLLKKKSGKDASKDKKAVQKLRREVERAKRSLSNSHQQRTEIESFFDGADLSETITRAKFEELCMDLFKKTLGPVEKVLDDSSLKKNQVDELVLVGGSTRIPKVQQLLQDFFNGKEPNKGINPDEAVAYGAAVQGGILS

SEQ ID NO: 21192 - protein, 355 aa, Guillardia theta
VEIIANDQGNRITPSWVAFTDDERLIGDAAKNQGALNPENTVFDVKRLIGRKYTDTTVQHDKKLLPYDIVDQGGKPYVQVKFRGEKKTYSPEEVSAMVLTKMKETAEAFLGKEIKNAVVTVPAYFNDAQRQATKDAGTISGLNVLRIINEPTAAAIAYGLDNKGGEKNILVFDLGGGTFDVSLLTIDNGVFEVIATNGDTHLGGEDFDRRVMDYVLKLFKKKSGKDASKDKKAVQKLRREVERAKHALSNTHQQRIEIEGFYEGSDLSETVTRAKFEELCMDPFKKTLGPVEKVLDDASLKKNQVDELVLVGGSTRIPKVQQLLQDYFNGKEPNKGINPDEAVAYGAAVQGGILS

SEQ ID NO: 21193 - protein, 355 aa, Storeatula sp. CCMP1868
VEIIANDQGNRITPSWVAFTDDERLVGDAAKNQGALNPENTVFDVKRLIGRKYTDTTVQHDKKLLPYNIVDKDSKPYIQVQFKGEKKTYSPEEISSMVLVKMKETAEAFLGKEIVNAVITVPAYFNDAQRQATKDAGTISGLNVLRIINEPTAAAIAYGLDNKGGEKSILVFDLGGGTFDVSLLTIDNGVFEVIATSGDTHLGGEDFDRRIMGYILKLFKKKSGKDASKDKKSLQKLRREVERAKRALSTTHQQRIEIEGFFDGADLSETITRAKFEELCMDLFKKTLTPVEKVLEDSSLKKSQVDELVLVGGSTRIPKVQQLLQDFFNGEEPNKGINPDEAVAYGAAVQGGILS

SEQ ID NO: 21194 - protein, 354 aa, Brassica rapa subsp. pekinensis
MSRKPCCVGEGLKKGAWTTEEDKKLISYIHEHGEGGWRDIPQKAGFKRCGKSCRLRWTNYLKPDVKRGEFSSEEEQIIIMLHASRGNKWSDIARHLPRRTDNEVKNYWNTHLKKRLIEQCIDPVTHKPLASNSNHTVNTPPENLHSLAAPSSDKQYSRSSSMPSLSRLTNKDGTPVQGGALSHKKRFKKSSSTSRLLNKVAAKVTSVKEILSASMEGSLSATTLPYASHSNGFSEQIGNEEDSSNAFLTNTLAEFDPFSQSPLYSEHEINATSDLGMDYDFSHFLEKLGRDDHNEENDMNVEYGHDLLMSDVSQEVSSTSVDDQDNMIENFEGWANYLLDHADFVYDTESDSLI

SEQ ID NO: 21195 - protein, 357 aa, Brassica rapa subsp. pekinensis
MSRKPCCVGEGLKKGAWTTEEDKKLISYIHEHGEGGWRDIPQKAGLKRCGKSCRLRWTNYLKPEIKRGEFSSEEEQIIIMLHASRGNKWSVIARHLPRRTDNEIKNYWNTHLKKRLIEQGTDPVTHKPLASNTNPTVPENLHSLDASSSDKQYSRSSSMPTMSCPPSSGFNTVFENTSKDGTPVHEDDSLSRKKRFKKSSSTSRLLNKVAAKATSMKEALSASMEGSLNANTSFSNSFSEQIRNEEDSSNASLINTLAEFDPFLQTTLYPEHEVNTTSDLGIDQDYFSHFLENFGRDDDHNEEHYMNHNYGHDLLMSDVSQEVSSTSVDDQDNTIEGWSNYLLDHADFIHDMDYDSL

SEQ ID NO: 21196 - protein, 372 aa, Brassica rapa subsp. pekinensis
MSRKPCCVGEGLKKGAWTTEEDKTLISYIHEHGEGGWRDIPQKAGLKRCGKSCRLRWTNYLKPEIKRGEFSSEEEQIIIMLHAARGNKWSVIARHLPRRTDNEIKNYWNTHLKKRLIEQGIDPVTHKPLASNTSPTVTTTQPGNLHSLDASSSDKRYSRSSSMPSMSRPLSSGFNPSSEITTPVQGGSLSCKKSIKKSNSTSRLLNKVAAKATSIKDILSATTIPYESFSNGFPEQTRNEEDSSNALADFDPFSQSLLYTDHEIHATSDLDMDQGYDFSYFLETLGRDEHNMNVDQYGHDLPMSDVSQDVVSSTSVDDQDNMTGNFEGWSNYLLDHAGLIFFFFFFFFDKYVNFINRVMRQGDTISFEELKA

SEQ ID NO: 21197 - protein, 330 aa, Brassica rapa subsp. pekinensis
MSRKPCCVGEGLKKGAWTIEEDKKLISYLHEHGEGGWRDIPQKAGLKRCGKSCRLRWANYLKPDIKRGEFSYEEEQIIIMLHASRGNKWSVIARHLPKRTDNEIKNYWNTNLRKRLIDQGNDPLTHKPLASTPEPATPKTSDLQDDSNPSNLDEQYSHSGSMSPESLPLSSNSCNILEISNSDETPRNYGSFNSKKLSSTSELLNKVATRAASMGNIISASMEGTLIPSTTLSPPCLNDGLSETSHFQMDEFDIDMNFDFNNSEHDFSEFLEQFSNNAAEEADNIIGYDQDLLFSDVSSTRVDEDGMTNIPGWSNYLLDDSEFSYDTNQD

SEQ ID NO: 21198 - protein, 302 aa, Brassica rapa subsp. pekinensis
MVRTPCCKEEGIKKGAWTPEEDRKLIAYIQRHGEGGWRTLPEKAGLKRCGKSCRLRWANYLRPDIKRGEFTLEEDDTIIKLHALKGNKWAAIATYLAGRTDNEIKNYWNTNLKKRLKQKGIDPTTHKPIKSTDQTGIEPKNLKLSSSGSARVLNRVASKYAVDLNRDLVTGIIIGNSTIVADVSQNSVDVENSTTTLLNKTAGLMTNTSTSSGFSDNCSLSDDITEFFSNEEISDMYTNVDHVGLMEELKGMLSYENAVPGEIKGSPEANIADEMEFLDSWNDDLDLEKFVSSLDSSIGVFV

SEQ ID NO: 21199 - protein, 316 aa, Brassica rapa subsp. pekinensis
MVRTPCCKEEGIKKGAWTPEEDQKLIAYLQLHGEGGWRTLPEKAGLKRCGKSCRLRWANYLRPDIKRGEFTPEEDDTIIKLHALKGNKWAAIATCLAGRTDNEIKNYWNTNLKKRLKQRGIDPTTHKPINSTDQTGSEPKHHKLGSSGSARLLNRVASKYSVDSNRDLLTGIIIGNSTNIADISQNTGDVDSPTKNSTSTLLNQMAAASSGFISILTNNTSTSPGFSDNCSFSDGFTEFFSNEEISGMYTNVDNVGLMEELEDILSYDGADVGDIKDSPEVDVTDDMDFLDSWNKEDDLDLEKFVSSLDSKIGVFV

SEQ ID NO: 21200 - protein, 320 aa, Brassica rapa subsp. pekinensis
MVRTPCCRAELGLKKGAWTPEEDQKLTSYVNRHGEGGWRTLPEKAGLKRCGKSCRLRWANYLRPDIKRGEFTEDEELSIISLHALHGNKWAAIARGLPGRTDNEIKNYWNTHIKKRLIKKGVDPATHKNISENLQDIPEKRNINQTIITSDDDLDHNKKMEKSARFLNRVANRFGKRINQSVLSEIIGSGGPHATITNNTTTITTSVTVDSKSDKSTSSSFTPTSNLLMTANGNATSSPSTFSESSINDRLMYWDKEDDIGFSTFLNDEDFMVLEESCVENTEFMKELTRFLGEDETDNVEMMPVYEHQDSFEDIDNYFA

SEQ ID NO: 21201 - protein, 333 aa, Brassica rapa subsp. pekinensis
MVRTPCCKAELGLKKGAWTPEEDQKLVSYVNCHGEGGWRTLPEKAGLKRCGKSCRLRWANYLRPDIKRGEFTEDEERSIISLHALHGNKWAAIARGLPGRTDNEIKNHWNTHIKKRLIKKGVDPVTHKSLISDKSENLPEIPEKQNVIQTIITSDDDLDNEKVKNNNEKPGLSSAKFLNRVANRFGKRINQSVLSEIIGSGGPLTTTTTSHTATTTSVTVNSESDKSTSSSFTPTSDLLCQMTVNGNATSSPSTFSEASVNDSLMYCDNEDNLGFSNFLNDEDFMMLEESSVDNTEFMKELSRFLEEDVNDDVEVMPVYEHQDNIEDIDNYFA

SEQ ID NO: 21202 - protein, 172 aa, Arthrobacter nicotianae
SYMERVDELAAVSQHVRRVFTVRTGSPKRVPLGIVEPVSSMRRRLSTGGMSYGSLSKESHETLAIAMNRIGGKSNSGEGCEDPDRLVDPERRSDIKPGPSGRDGLKSAYLTEADDIQIKLAQGAKPGEGGQLPPAKVYPWVARTRHATAGVGLISPPPHHDIYSIEDLYPLI

SEQ ID NO: 21203 - protein, 572 aa, Avena fatua
GADILVEALERCGISDVFAYPGGASMEIHQALTRSPLITNHLFRHEQGEAFAASGYARASGRVGVCVATSGPGATNLVSALADALLDSIPMVAITGQVPRRMIGTDAFQETPIVEVTRSITKHNYLVLDVEDIPRVIQEAFFLASSGRPGPVLVDIPKDIQQQMAVPVWDAPMSLPGYIARLPKPPATELLEQVLRLVGEARRPILYVGGGCSASGEELRRFVEITGIPVTTTLMGLGNFPSDDPLSLRMLGMHGTVYANYAVDKADLLLAFGVRFDDRVTGKIEAFASRSKIVHIDIDPAEIGKNKQPHVSICADVKLALQGLNALLNGSKAHKSFDFGSWHEELEQQKREFPLGYKTFGEAIPPQYAIQVLDELTKGEAIIATGVGQHQMWAAQYYTYKRPRQWLSSAGLGAMGFGLPAAAGAAVANPGVTVVDIDGDGSFLMNIQELALIRIENLPVKVMILNNQHLGMLVQWEDRFYKANRAHTYLGNPENESEIYPDFVTIAKGFNVSAVRVTKKNEVRAAIKKMLETPGPYLLDIIVPHQEHVLPMIPSGGAFKDIIMEGDGRIAY

SEQ ID NO: 21204 - protein, 572 aa, Aegilops tauschii
GADILVEALERCGIVDVFAYPGGASMEIHQALTRSPVITNHLFRHEQGEAFAASGYARASGRVGVCVATSGPGATNLVSALADALLDSIPMVAITGQVPRRMIGTDAFQETPIVEVTRSITKHNYLVLDVEDIPRVIREAFFLASSGRPGPVLVDIPKDIQQQMAVPVWDTPMSLPGYIARLPKPPPTESLEQVLRLVGESRRPILYVGGGCAASGEELRRFVELTGIPVTTTLMGLGNFPSDDPLSLRILGMHGTVYANYAVDKADLLLAFGVRFDDRVTGKIEAFASRSKIVHIDIDPAEIGKNKQPHVSICADVKLALQGLNDLLNGSKAQQGLDFGPWHKELDQQKREFPLGFKTFGEAIPPQYAIQVLDELTKGEAIIATGVGQHQMWAAQYYTYKRPRQWLSSSGLGAMGFGLPAAAGAAVANPGVTVVDIDGDGSFLMNIQELALIRIENLPVKVMILNNQHLGMVVQWEDRFYKANRAHTYLGNPENESEIYPDFVTIAKGFNVPAVRVTKKSEVTAAIKKMLETPGPYLLDIIVPHQEHVLPMIPSGGAFKDMIMEGDGRTSY

SEQ ID NO: 21205 - protein, 572 aa, Aegilops tauschii
GADILVEALERCGIVDVFAYPGGASMEIHQALTRSPVITNHLFRHEQGEAFAASGYARASGRVGVCVATSGPGATNLVSALADALLDSIPMVAITGQVPRRMIGTDAFQETPIVEVTRSITKHNYLVLDVEDIPRVIQEAFFLASSGRPGPVLVDIPKDIQQQMAVPVWDTPMSLPGYIARLPKPPSTESLEQVLRLVGESRRPILYVGGGCAASGEELRRFVELTGIPVTTTLMGLGNFPSDDPLSLRMLGMHGTVYANYAVDKADLLLAFGVRFDDRVTGKIEAFASRSKIVHIDIDPAEIGKNKQPHVSICADVKLALQGLNDLLNGSKAQQGLDFGPWHKELDQQKREFPLGFKTFGEAIPPQYAIQVLDELTKGEAIIATGVGQHQMWAAQYYTYKRPRQWLSSSGLGAMGFGLPAAAGAAVANPGVTVVDIDGDGSFLMNIQELALIRIENLPVKVMILNNQHLGMVVQWEDRFYKANRAHTYLGNPENESEIYPDFVTIAKGFNVPAVRVTKKSEVTAAIKKMLETPGPYLLDIIVPHQEHVLPMIPSGGAFKDMIMEGDGRTSY

SEQ ID NO: 21206 - protein, 572 aa, Aegilops tauschii
GADILVEALERCGIVDVFAYPGGASMEIHQALTRSPVITNHLFRHEQGEAFAASGYARASGRVGVCVATSGPGATNLVSALADALLDSIPMVAITGQVPRRMIGTDAFQETPIVEVTRSITKHNYLVLDVEDIPRVIREAFFLASSGRPGPVLVDIPKDIQQQMAVPVWDTPMSLPGYIARLPKPPSTESLEQVLRLVGESRRPILYVGGGCAASGEELRRFVELTGIPVTTTLMGLGNFPSDDPLSLRMLGMHGTVYANYAVDKADLLLAFGVRFDDRVTGKIEAFASRSKIVHIDIDPAEIGKNKQPHVSICADVKLALQGLNDLLNGSKAQQGLDFGPWHKELDQQKREFPLGFKTFGEAIPPQYAIQVLDELTKGEAIIATGVGQHQMWAAQYYTYKRPRQWLSSSGLGAMGFGLPAAAGAAVANPGVTVVDIDGDGSFLMNIQELALIRIENLPVKVMILNNQHLGMVVQWEDRFYKANRAHTYLGNPENESEIYPDFVTIAKGFNVPAVRVTKKSEVTAAIKKMLETPGPYLLDIIVPHQEHVLPMIPSGGAFKDMIMEGDGRTSY

SEQ ID NO: 21207 - protein, 572 aa, Aegilops tauschii
GADILVEALERCGIVDVFAYPGGASMEIHQALTRSPVITNHLFRHEQGEAFAASGYARASGRVGVCVATSGPGATNLVSALADALLDSIPMVAITGQVPRRMIGTDAFQETPIVEVTRSITKHNYLVLDVEDIPRVIREAFFLASSGRPGPVLVDIPKDIQQQMAVPVWDTPMSLPGYIARLPKPPSTESLEQVLRLVGESRRPILYVGGGCAASGEELRRFVELTGIPVTTTLMGLGNFPSDDPLSLRMLGMHGTVYANYAVDKADLLLAFGVRFDDRVTGKIEAFASRSKIVHIDIDPAEIGKNKQPHVSICADVKLALQGLNDLLNGSKAQQGLDFGPWHKELDQQKREFPLGFKTFGEAIPPQYAIQVLDELTKGEAIIATGVGQHQMWAAQYYTYKRPRQWLSSSGLGAMGFGLPAAAGAAVANPGVTVVDIDGDGSFLMNIQELALIRIENLPVKVMILNNQHLGMVVQWEDRFYKANRAHTYLGNPENESEIYPDFVTIAKGFNVLAVRVTKKSEVTAAIKKMLETPGPYLLDIIVPHQEHVLPMIPSGGAFKDMIMEGDGRTSY

SEQ ID NO: 21208 - protein, 283 aa, Saccharomyces cerevisiae
MNPKSSLADGAHIGNYQIVKTLGEGSFGKVKLAYHTTTGQKVALKIINKKVLAKSDMQGRIEREISYLRLLRHPHIIKLYDVIKSKDEIIMVIEYAGNELFDYIVQRDKMSEQEARRFFQQIISAVEYCHRHKIVHRDLKPENLLLDEHLNVKIADFGLSNIMTDGNFLKTSCGSPNYAAPEVISGKLYAGPEVDVWSCGVILYVMLCRRLPFDDESIPVLFKNISNGVYTLPKFLSPGAAGLIKRMLIVNPLNRISIHEIMQDDWFKVDLPEYLLEHHHHHH

SEQ ID NO: 21209 - protein, 336 aa, Schizosaccharomyces pombe
MAISKRHIGPYIIRETLGEGSFGKVKLATHYKTQQKVALKFISRQLLKKSDMHMRVEREISYLKLLRHPHIIKLYDVITTPTDIVMVIEYAGGELFDYIVEKKRMTEDEGRRFFQQIICAIEYCHRHKIVHRDLKPENLLLDDNLNVKIADFGLSNIMTDGNFLKTSCGSPNYAAPEVINGKLYAGPEVDVWSCGIVLYVMLVGRLPFDDEFIPNLFKKVNSCVYVMPDFLSPGAQSLIRRMIVADPMQRITIQEIRRDPWFNVNLPDYLRPMEEVQGSYADSRIVSKLGEAMGFSEDYIVEALRSDENNEVKEAYNLLHENQVIQEKLEHHHHHH

SEQ ID NO: 21210 - protein, 209 aa, Talaromyces emersonii
MSWLSFMPPALAPCRAASRSGVAWPLRLLGLSAVQARSVPAASCKWNNRHDYNPVPRRTATTASAPSAVPYASLTVGIPRETFPNERRVAITPQNVALLLKKGFSRVLIERGAGDAAQFPDEAYTKAGATIVDRDAVWSQSDILLKVRAPSIDGPNNEVQAVREGGTIISFLYPVQNRPVVEALASRGVTSFAMDRIPRISRAQVFDAL

SEQ ID NO: 21211 - protein, 292 aa, Zea mays
MAQEDVHLDDAGLALGLSLGSGSGGASGAARHGGISRRLSREVRLPSPHPLEPSLTLSLPDEATATGSGGGGAAHSVSSLSVAGVKRERVDDAEGERASSTAALPRACAGAEDDDDDGSTRKKLRLTKEQSALLEDRFKEHSTLNPKQKVALAKQLKLRPRQVEVWFQNRRARTKLKQTEVDCELLKRCCESLTEENRRLQRELQELRALKFAPHPQAPPSSATQAGAAAGVVPAPPPPLYMQMQMPAAATLSLCPSCDRLAGPGAAAKAEPRPKAAATHHFFNPFTHSAAC

SEQ ID NO: 21212 - protein, 365 aa, Betula pendula
MGSTAETQMTPTQVSDEEANLFAMQLASASVLPMILKSAIELDLLEIMAKAGPGAYLSPSEIASQLPTTNPDAPVMLDRILRLLASYSVLTYSLRTLPDGRVERLYGLGPVCKFLTKNEDGVSIAALNLMNQDKVLMESWYYLKDAVLEGGIPFNKAHGMTSFEYHGKDLRFNKVFNKGMSDHSTITMKKILETYKGFEGLTSVVDVGGGTGAVLSMIVSKYPSIRGINFDLPHVIEDAPSYPGVDHVGGDMFVSVPKGDAIFMKWICHDWSDEHCLKFLKNCYDALPNNGKVIVAECILPVAPDTSLATKGVIHIDVIMLAHNPGGKERTEKEFEALAKGAGFQGFQVLGCAFNTYIMEFIKKL

SEQ ID NO: 21213 - protein, 356 aa, Brassica rapa subsp. chinensis
MSLLTDLVNLDLSDNTEKIIAEYIWVGGSGMDMRSKARTLPGPVTDPSKLPKWNYDGSSTGQAPGEDSEVILYPQAIFKDPFRRGNNILVMCDTYTPAGEPIPTNKRHAAAQIFSNPDVVAEVPWYGIEQEYTLLQKDVNWPVGWPIGGFPGPQGPYYCSVGADKSFGRDIVDAHYKACLYAGINISGINGEVMPGQWEFQVGPSVGISAADEVWIARFILERITEIAGVIVSFDPKPIPGDWNGAGAHTNYSTKSMREEGGYEIIKKAIDKLGLRHKEHISAYGEGNERRLTGHHETADINTFKWGVANRGASIRVGRDTEKEGKGYFEDRRPASNMDPYTVTSMIAETTLLWNP

SEQ ID NO: 21214 - protein, 285 aa, Methanocaldococcus jannaschii
MRAKAMEVDERPNVRYEDIGGLEKQMQEIREVVELPLKHPELFEKVGIEPPKGILLYGPPGTGKTLLAKAVATETNATFIRVVGSELVKKFIGEGASLVKDIFKLAKEKAPSIIFIDEIDAIAAKRTDALTGGDREVQRTLMQLLAEMDGFDARGDVKIIGATNRPDILDPAILRPGRFDRIIEVPAPDEKGRLEILKIHTRKMNLAEDVNLEEIAKMTEGCVGAELKAICTEAGMNAIRELRDYVTMDDFRKAVEKIMEKKKVKVKEPAHLDVLYRLEHHHHHH

SEQ ID NO: 21215 - protein, 612 aa, uncultured bacterium
MHKETEFCQVAWAELLPMRRWLAQVNGRTLRADLLAGLTGAAVVLPQGVAFATIAGLPPQYGLYSAMVPAIIAALFGSSLHLVSGPTTPISIVLFAALSSLAPPGSERYISLCLTITFLAGLLQLGMGLVRMGALVNFVSNSVVVGFTAGAAILIAGSQMGNFLGIHFPDSSSFPALLEAILEGVTATDPIVLTVGLATLAAAVLFQATIPRLPGMLFALTLGGGLAWLLRSLGYEDIPRVGALPVSLPPLSSPLWDVRLWRELAMPAFAVALLCLIQAVSIARSVALQSKQRINSNQEFIGQGLSNIVGSFFSAYASSGSFTRSGINYRVGAQTPLAAIFASLLLMAIVLAVAPLAAYLPLAAMSGVILLVAYGLIDIKSIRLILRTSRAESLVMVATFLATLLVKLEFAIYLGVISSLFYYLKGRATPQMTRMVPSNDGDARHLIPTYQHPECPQLTILRVDGSLFFGSVGHVSSGFDCLATRESRSKNLLLMGTAINFLDVDGAQTLAQEALRRRGHGGRLFLFDLHESVRDVLERSGFVETIGRKAVFTSAFEAIHDIVMRYTDHAQCRQCRSNVFMECEQIRCLANVPDLPPGADPTSQRPAGAGDG

SEQ ID NO: 21216 - protein, 305 aa, uncultured bacterium
MLLAVQTVVDEGLAKPVLIGRRDVLEKRILELDLRLKLGENVELCDPQNDPRYQEYWKLYHKLMGRKGISPEYARTVVRTRTSVIAALMLARGEVEAMICGTSGRFTRHFGHIMDVIGLKPGVKSAAAMNLMILPKGTYFLCDTYVTPEPSAQQICETTLLAADEVKRFGIEPKIALVSHSNFGARDSVTAVRMREALAMILERAPHLEVDGEMHGDAAISEEIRNNIFPESRLKGEANLLVMPNMDAANISFNLLKVLGQGQSVGPMLMGVAKPAHILTPSVTVRGIVNMSALAVVDAQMYKAP

SEQ ID NO: 21217 - protein, 395 aa, uncultured bacterium
MSSDPIVIVGSARTPMGGFQGDLKDVTAPHLGAAAIRAAVQRAGIKPEDVEEVIMGLCLFAGLGQAPSRQASRFAGLPDSAGCTTISKMCGSAMKAAMLANDLLIAGSNKVMVAGGMESMTNAPYILEKARSGYRMGHGKIYDHMFLDGLEDAYDKGRLMGTFAEDTAQAYQFTREAQDDFAIASTKRAQKAITEGWFDAEVTPLTVKAGKSETIVSKDEQPLKAKLDKISSLKPAFREGGTVTAANSSSISDGGAALVLMRRSEADKRGCKPIAVIKGHATFSQAPAWFTTAPVGAMKALLEKVNWQAKDVDLFEINEAFAVVTMCAMKDLDIPHDKVNVHGGACALGHPVGASGARIIVTLLAALQKYGLKKGVASLCIGGGEATAMAVELAN

SEQ ID NO: 21218 - protein, 402 aa, uncultured bacterium
MMGDVKKVVLAYSGGLDTSIILRWLQDTYGCEVITFTADIGQGEELEPARKKAEAMGIKQIFIEDLREEFVRDYVFPMFRANTVYEGCYLLGTSIARPLIAKRQIEIAIATGADAVSHGATGKGNDQVRFELGYYALKPDIKVIAPWREWDLKSRSDMVAYAEQHQLAIPKDKRGEAPYSMDANLLHISYEGKALEDPWVEPDEEMFRRSVSPEKAPDKPEYVEIEFEKGDAVAVDGVRLTPAALLERLNQLGGKHGVGRLDLVENRFVGMKSRGVYETPGGSILLPAHRAVESVTLDREALHLKDELMPRYAKLIYNGFWFSPEREALQAAIDATQVYVNGTARVKLYKGNVSVVGRKSPNSLYRLDYVTFEEDSVYNQHDAEGFIRLNALRLRLGKIARG

SEQ ID NO: 21219 - protein, 325 aa, uncultured bacterium
MTQARPSTEAADLESARRVLALEAEALQSLALGLDQAFVRALDLLGAVEGRVVVSGMGKSGHVGRKIAASLASTGTPAVFVHPAEASHGDLGMITPKDAVLALSNSGETAELSDLIAYTRRFAIPLVGITSRANSTLSEAADVALVLPLKTEACPMGLAPTTSTTMMLGLGDALAVTLLERRGFTAADFQMLHPGGSLGRRLLKVADLMHGGDEVPLVAPAQPMAETLLVMTNKRFGCAGVVGPDGRLMGIVTDGDLRRHMADSMLARTAKEVMTLSPKTVRPQMLAAEALRIMNTSAITTLFVVDDGKPVGILHIHDCLRAGVA

SEQ ID NO: 21220 - protein, 566 aa, uncultured bacterium
MNGAQHILEAFHRHNISTVFGYPGGCIMPLYDALVDDVGVEHVLCRHEQGCALAADGYARASGNLGVCIATSGPGATNLITGVANAHRDSIPMLVITGQVPSGLIGTDAFQETDVLGMTLGIVKHSYLIDDADSLPTIMEEAIELAQSGRPGPVWIDIPKDLLLSDVADAPFPQAQPSEPASPDLKEALAMLRAARKPLLYSGGGISLAHAEETFRAFAESSALPAVVTLKGIGNPGKHNPYNLGMLGMHGSRAANKAVDECDLLLVIGARLDDRATGKLDGFAPNARMIHIDADAAEINKLRDADLAIRGDLNHILKSLAGALQADPLAISEWQKQCRTWYTTGGFHAADNEEPLAPITGPAFIRQLSRIAPDDTVIACDVGQHQMWVAQHYDFDHPRHHLTSGGLGTMGFGLPAAIGAQFADRNSTVINVTGDGSFMMNAQELATIRRYNLPVKLIVMDNQCLGMVRQQQELFYNNRESQINLDDNPDFVAMARAFDIPALYIERTDQIRRGIETILAYNGPMLLHVAISREENVWPIVKPGASNTDMIDETARTAKASKEQVA

SEQ ID NO: 21221 - protein, 69 aa, uncultured bacterium
MATTVTGTVKFFNEAKGFGFIQRENGPDVFVHFSAIQGAGFKTLAEGQKVQFTVGQGQKGPQAENVVPM

SEQ ID NO: 21222 - protein, 234 aa, Arabidopsis lyrata
KRIENKINRQVTFSKRRNGLLKKAYELSVLCDAEVALIIFSSRGKLYEFGSVGIARTIERYNRCYNCTLSNNKPEETTQSWCQEVTKLKSKYESLVRTNRNLLGEDLGEMGVKELQALERQLEAALTATRQRKTQVMMEEMEDLRKKERQLGDINKQLKIKFETEGHAFKTFQDLWANSAAGDRNNSEFPVEPSHPISLDCNTEPFLQIGFQQHYYVQGEGSSVSKSNVAGETN

SEQ ID NO: 21223 - protein, 237 aa, Arabidopsis halleri
KRIENKINRQVTFSKRRNGLLKKAYELSVLCDAEVALIIFSSRGKLYEFGSVGNTRTIERYNRCYNCTLSNNKPEETTQSWCQEVTKLKSKYESLVRTNRNLLGEDLGEMGVKELQALERQLEAALTATRQRKTQVMMEEMEDLRKKERQLGDINKQLKIKFETEGHAFKTFQDLWANSAASVAGDPNNSEFPVENSHPISLDCNTEPFLQIGFQQHYYVQGEGSSVSKSNVAGETN

SEQ ID NO: 21224 - protein, 237 aa, Boechera gunnisoniana
KRIENKINRQVTFSKRRNGLLKKAYELSVLCDAEVALIIFSSRGKLYEFGSVGIARTIERYNRCYNCSLGNNKPEETTQSWCQEVTKLKSKYESLVRTNRNLLGEDLGEMGVKELQALERQLEAALTATRQRKTQVMTEEMEDLRKKERQLGDINKQLKIKFETEGHAFKTFQDLWAHSAVSVGGVSNNSEFPVESSHPNSMDCNTEPFLRIGFQQHYYVQGEGSSVTKSNVAGETN

SEQ ID NO: 21225 - protein, 237 aa, Boechera stricta
KRIENKINRQVTFSKRRNGLLKKAYELSVLCDAEVALIIFSSRGKLYEFGSVGIARTIERYNRCYNCSLGNNKPEETTQSWCQEVTKLKSKYESLVRTNRNLLGEDLGEMGVKELQALERQLEAALTATRQRKTQVMTEEMEDLRKKERQLGDINKQLKIKFETEGHAFKTFQDLWANSAVSVGGVSNNSEFPVESSHPNSMDCNTEPFLQIGFQQHYYVQGEGSSVTKSNVAGETN

SEQ ID NO: 21226 - protein, 229 aa, Arabidopsis halleri
KRIENKTTRQVTFSKRKSGLLKKAYELSVLCDAEVSLIIFSNGGKLYEFSNVGIGRTIERYYRCKDNFLDNDTLEDTQGLRQELTKLKSKYESLVRTHRNLVGEDLEGMSVKELQTLERQLEGALSATRKHKTQVAMEQMEELRRKERELGDINNKLKLETEDHDFKGFQDLLLNPVLTAGCSTDFSLQSSHQNYISDCDVGYLLQIGFQQHYEQGEGSSVSKSNARSE

SEQ ID NO: 21227 - protein, 184 aa, Boechera gunnisoniana
KKIENKTSRQVTFSKRKGGLLKKAYELSVLCDAEIALIIFSNSGKLYEFSNVGIGRTIERYYRCKNNFLDNDKLESTQSWRQEMTKLKSKYESLLRTHRHLVGEHLGGMSIKELQTLERQLEGALSTTRKRKTQVIVDQMEEFRRKERELGDINKKLKLVTEDHGFKGFQDLLSNSVVTRGRFH

SEQ ID NO: 21228 - protein, 184 aa, Boechera stricta
KKIENKTSRQVTFSKRKGGLLKKAYELSVLCDAEIALIIFSNSGKLYEFSNVGIGRTIERYYRCKNNFLDNDKLESTQSWRQEMTKLKSKYESLLRTHRHLVGEDLGGMSVKELQTLERQLEGALSTTRKRKTQVIVDQMEEFRRKERELGDINKKLKLVTEDHGFKGFQDLLSNSVVTRGRFH

SEQ ID NO: 21229 - protein, 805 aa, Nicotiana glutinosa
MSHQAESSDSKGAKKDFSTAILERKKSPNRLVVDEAVNDDNSVVALNPATMEKLQLFRGDTILIKGKKRKDTVVIALADETCDEPKIRMNKVVRSNLRVRLGDVVSVHQCPDVKYGKRVHILPIDDTIEGLTGDLFDAFLKPYFLEAYRPLRKGDNFLVRGGMRSVEFKVIETDPGEYCVVAPDTEIFCEGEPVKREDEERLDEVGYDDVGGVRKQMAQIRELVELPLRHPQLFKSIGVKPPKGILLYGPPGSGKTLIARAVANETGAFFFCINGPEIMSKLAGESESNLRKAFEEAEKNAPSIIFIDEIDSIAPKREKTHGEVERRIVSQLLTLMDGLKSRAHVIVMGATNRPNSIDPALRRFGRFDREIDIGVPDEVGRLEVLRIHTKNMKLAEEVDLERISKDTHGYVGADLAALCTEAALQCIREKMDVIDLEDDSIDAEILNSMAVTNEHFQTALGTSNPSALRETVVEVPNVSWEDIGGLENVKRELQETVQYPVEHPEKFEKFGMSPSKGVLFYGPPGCGKTLLAKAIANECQANFISVKGPELLTMWFGESEANVREIFDKARQSAPCVLFFDELDSIATQRGSSVGDAGGAADRVLNQLLTEMDGMNAKKTVFIIGATNRPDIIDPALLRPGRLDQLIYIPLPDEDSRHQIFKACLRKSPLSKDVDLRALAKYTQGFSGADITEICQRACKYAIRENIEKDIEKERKRSENPDSMDEDADDEIAEITPSHFEESMKYARRSVSDADIRKYQAFAQTLQQSRGFGTEFRFAEASGGADATDPFATSNAGADDDDLYS

SEQ ID NO: 21230 - protein, 340 aa, Arabidopsis thaliana
MMHQMLNKKDSATHSTLPYLNTSISWGVVPTDSVANRRGPAESLSLKVDSRPGHIQTTKQISFQDQDSSSTQSTGQSYTEVASSGDDNPSRQISFSAKSGSEITQRKGFASNPKQGSMTGFPNIHFAPAQANFSFHYADPHYGGLLAATYLPQAPTCNPQMVSMIPGRVPLPAELTETDPVFVNAKQYHAIMRRRQQRAKLEAQNKLIRARKPYLHESRHVHALKRPRGSGGRFLNTKKLLQESEQAAAREQEQDKLGQQVNRKTNMSRFEAHMLQNNKDRSSTTSGSDITSVSDGADIFGHTEFQFSGFPTPINRAMLVHGQSNDMHGGGDMHHFSVHI

SEQ ID NO: 21231 - protein, 388 aa, Morus alba
MCGGAIISDFISTPRSTRLTADYLWPDLKKSGSGKRFCKPVRSVIVDIDDDFEADFQGFKDDSDVDNDDDVIDVKPFAFSAREPTFSRGSTTVKYTESDGQAEKSAKRKRKNQYRGIRQRPWGKWAAEIRDPRKGVRVWLGTFNTAEEAARAYDAEARRIRGKKAKVNFPDETPRALPKHPVKESPKRSLPKENSNSTESNLNNQSFNSVNNSDLDYYNAMGFLEEKPLTNQYEHVETLPAKADVGLKSNAPAATTPLYFSSDQGSNSFECSDFGLGEHGSKTPEISSVFSATSENDDSLFLEDTNPTKKLKSDSENAVLPEENHAKTLSEELSAFESQMKFFQMPYLEGSWDALLDTFLAGDSTQDGGNSINLWSFDDFSTVSGEAF

SEQ ID NO: 21232 - protein, 317 aa, Mycoplasma conjunctivae
MKNSIKLAQKISKKTGIPLSEIERTQFADGEVMLKSKETIRNSTVFVIANTSKPVNDNIMELLIFIDSLKRGYARDIIVVLSYYGYARQDRKSSGRQPITARLIANLLENAGVTKVVLVDIHNPSIQGFFNISVDEIHGQYILAQELINRNKEFVVVSPDHGGAVRARVLAEILGPNTQVAIIDKRRTGANQVEVLGLIGDVKNKDCIIIDDIIDTGGTILKAAENLKKYGAKSVIVAATHGVFSVGFDKFEESKNVDQVIITDSIDNQYLVENFSKLLVTSLDDFLSQVIMACIDSTSITNIYEKIKERFKNAKFD

SEQ ID NO: 21233 - protein, 697 aa, Mycoplasma conjunctivae
MNDKFKNLNKYGRNLTQLAKENKLEPVINRDEEIRRIIKILSRKTKNNPVLVGEPGVGKSAIVEGMAFKIIQNQVPQNLKNKQIFELDIASIIAGASFKGEFEKRIKEILKEVEANKDEVIIFVDEIHLLIGTGSSGTDSMDFANILKPAMARGQIKLIGATTNNEYRLYIEKDSALERRMQKVIIEEPSTSDAITILRGIKERFENFHKVKITDDALIAAVKLSNRFINDRFLPDKAIDLIDEACANIKVQMNFQPEELEKKIQKLTYLKMEKISLENEANLPKIEAINQQISQLEQEINKLQSLWSQEKQRAEESGHIAQQIDDLKNLLNQQIANGEYQNASKIKYLQIPSLETQLQKLKENKSSLVNDIVDQNEIAAVVAKMTKIPLEKLIEDEAEKLLHLESRIKQEVRGQDLAISLVSDAILRFKANINDINRPIGSFLFLGPTGVGKTELARSLAKQIFDNSEQIIRLDMSEFMEKHSVSKLIGAPPGYIGFEQGGILTEKVRLNPYSIVLLDEIEKAHPDVINILLQILDSGWLTDSKGKKINFKNTIIIMTSNIAAQKILANQKLDEQTIKKELLQFFKPEFINRIDEIVTFNKLSKQVVEQIIDLELAKLALRIQENNIMINFDNSIKKWILQSAYDQNYGARPIKRFIKQNLETKIAKFIITKQINVNDSYQISYKNEDILVNKQIN

SEQ ID NO: 21234 - protein, 323 aa, Mycoplasma conjunctivae
MKGKNMNYQKELEKSVIDNQKDSGLKTILIIDGEDKRAIKAAELLSKNKLVEPILLTKNKIENTSVKQHIFNETEYQEFVEKFVELRKGKETLEAAQKQMSSLPFYGTMLLKLNKVDGVIGGLNYPTADILRAAFKIIGPTPGIKTISSVMIVHKEEQKFLFSDISVNIAPTVEQLVDIAKNANDFALQLGFDPQLAFLSFSTSRSAVAPQSELVEKASQIYNESATKKALGEIQFDAALDEAVRSQKYKGELPKSNANVLIFPNLDAGNIGYKIAQRLGGYGAIGPIITGIASPINDLSRGATVEDIYNTALITALQAKGDK

SEQ ID NO: 21235 - protein, 401 aa, Mycoplasma conjunctivae
MKKILVINAGSSSIKWQIFTKEDFSLFAQGLIERIGISGGFFKLSGPNGKFELAFDVSDHKSAMAKLIQIWLEQKVVEDVLEIEVAGFRIVHGGSIFRGPTKLDDEKIAQISQLSKFAPLHNPGAVQTIVAIQQILPNVKLAASFDTAFHADIPAINYTYAIDQEFAKKYGIQKYGFHGISHKFITNTLEKVLSTSQVNYVNMHIGNGASLAAIKESKSFDTTMGLTPLAGVMMGTRSGDIDPSIHLFAAQEAHLSIEEFTDMLNKKSGLLGVSGISSDMRDLITAAQSGDQKAKFALELYAQKIVNYLVDYINKVGKNIQALVFTGGVGENSAFMRELIISKVDLPKLNIKIDTKINNKPLGEFAQVELVSSQDSDIPIYVIKTNEELLIAQNAIKSFES

SEQ ID NO: 21236 - protein, 292 aa, Mycoplasma conjunctivae
MAKNCFVSIVGLPNSGKSSLLNTLLDFPVSIVSSKSQTTRDLINGIYNEDNLQIVFVDTPGFHKKINNLSNVLNKAVINSIEDIDVVLFLHPVNWKISNQSQQLVEKIANVKNKIAVLTKLDLIDDQQIIETKVAELKQLGFKKVFGYSTEFKVAKQDLLEEIKSYAYESDLFFEQEDITDQPARFFAKEIIRKQLLLNLKEEVPHQSAIVIERFSEANPKHIEIDAIIYVGRKSHLPIVVGKNGTMLGKIGTAARLELEELLQSKVVLKNKVKISPKWFDNKKTIKKMGYE

SEQ ID NO: 21237 - protein, 416 aa, Mycoplasma conjunctivae
MKFLDQVKIQVEAGKGGNGVISFRREAHVDKGGPDGGDGGSGGSIYFVGDSGLNTLLNFYSLKIIKGNDGENGRSKNRYGAGGSDIFVKVPIGTQVYVENKLMCDVVTTKPYLIAKGGKGGRGNTKFKTAKNKAPRISENGDLGEFYELQLVLKVMADVGLVGKPNAGKSTLLSQISNAKPKIANYSFTTLVPQLGLVKLYDKSFVIADLPGLIEGASQGKGLGFTFLKHIERCRVIAHIIDFGSKEKNPIIDYENICKELNNFNPALSNLPQIIIANKSDLSEFSKNVLSFKKKFPHLEIVEASLLTDSKINEIKAKMYSLLEKNILNTVEQVEESVVEFTLQKPFIINKKSDNLYEVEGLEIKKLVQKIPLNSDDNILRFNNKLKNMGIWDELIKMGIKKGDVVKFFNFELEWI

SEQ ID NO: 21238 - protein, 368 aa, Bacillus anthracis str. Sterne
  misc_feature (1)..(1): Xaa can be any naturally occurring amino acid
  misc_feature (122)..(122): Xaa can be any naturally occurring amino acid
  misc_feature (180)..(180): Xaa can be any naturally occurring amino acid
  misc_feature (227)..(227): Xaa can be any naturally occurring amino acid
  misc_feature (248)..(248): Xaa can be any naturally occurring amino acid
  misc_feature (317)..(317): Xaa can be any naturally occurring amino acid
  unsure (1)..(368): unsure at all Xaa locations
XTETIKCIGCGVEIQTEDKNEVGYAPASSLEKEQVICQRCFRLKHYNEIQDVSLTDDDFLRILNGIGKSDALVVKIVDIFDFNGSWLPGLHRFVGNNKVLLVGNKADLIPKSVKHDKVKHWXRYSAKQLGLKPEDVFLISAAKGQGIAELADAIEYYRGGKDVYVVGCTNVGKSTFINRXIKEFSDETENVITTSHFPGTTLDLIDIPLDEESSLYDTPGIINHHQXAHYVGKQSLKLITPTKEIKPXVFQLNEEQTLFFSGLARFDYVSGGRRAFTCHFSNRLTIHRTKLEKADELYKNHAGDLLSPPTPEELENXPELVKYEFNIREPKTDVVFSGLGWVTVNEPGAKIVAHVPKGVSVSLRKSLI

SEQ ID NO: 21239 - protein, 675 aa, Arabidopsis thaliana
MIFIKENTAKMTRNKAIACLVFLTVLDFLMNIGAALMSSLAIEGEEQKLGTVIGIDLGTTYSCVGVYHNKHVEIIANDQGNRITPSWVAFTDTERLIGEAAKNQAAKNPERTIFDPKRLIGRKFDDPDVQRDIKFLPYKVVNKDGKPYIQVKVKGEEKLFSPEEISAMILTKMKETAEAFLGKKIKDAVITVPAYFNDAQRQATKDAGAIAGLNVVRIINEPTGAAIAYGLDKKGGESNILVYDLGGGTFDVSILTIDNGVFEVLSTSGDTHLGGEDFDHRVMDYFIKLVKKKYNKDISKDHKALGKLRRECELAKRSLSNQHQVRVEIESLFDGVDFSEPLTRARFEELNMDLFKKTMEPVKKALKDAGLKKSDIDEIVLVGGSTRIPKVQQMLKDFFDGKEPSKGTNPDEAVAYGAAVQGGVLSGEGGEETQNILLLDVAPLSLGIETVGGVMTNIIPRNTVIPTKKSQVFTTYQDQQTTVTINVYEGERSMTKDNRELGKFDLTGILPAPRGVPQIEVTFEVDANGILQVKAEDKVAKTSQSITITNDKGRLTEEEIEEMIREAEEFAEEDKIMKEKIDARNKLETYVYNMKSTVADKEKLAKKISDEDKEKMEGVLKEALEWLEENVNAEKEDYDEKLKEVELVCDPVIKSVYEKTEGENEDDDGDDHDEL

SEQ ID NO: 21240 - protein, 1025 aa, Arabidopsis thaliana
MGNFNFLPLVSFASFVVVLVLVCAQDQSGFVSIDCGIPEDSSYYDEKTDIKYISDAAFVESGTIHSIDSKFQKKNLEKQFQKVRSFPEGKKNCYDVQPPQGKGFKYLIRTRFMYGNYDNLGKAPDFDLYLGVNLWDSVTLENSTTIVTKEIIYTLRSDKVHVCLVDKERGTPFLSVLELRLLKNNIYETASDSLMLYRRWDLGATGDLPARYKDDIFDRFWMPLMFPNFLILNTSLMIDPTSSNGFLPPSVVMSTAVAPMNSSIEQIMVYWEPRDPNWKFYIYIHFAEVEKLPSNETREFSVFLNKEQIDTTSVFRPSYLYTDTLYVQNPVSGPFLEFVLRQGVKSTRPPIMNAIETYRTNEFLDLPTDQNDVDAIMKIKTKYKVKKNWLGDPCAPFGYPWQGINCSYTANNPPRIISVNLSFSGLTGQIDPVFITLTPLQKLDLSNNRLTGTVPDFLANLPDLTELNLEENKLTGILPEKLLERSKDGSLSLRVGGNPDLCVSDSCRNKKTERKEYIIPSVASVTGLFFLLLALISFWQFKKRQQTGVKTGPLDTKRYYKYSEIVEITNNFERVLGQGGFGKVYYGVLRGEQVAIKMLSKSSAQGYKEFRAEVELLLRVHHKNLIALIGYCHEGDQMALIYEYIGNGTLGDYLSGKNSSILSWEERLQISLDAAQGLEYLHNGCKPPIVHRDVKPTNILINEKLQAKIADFGLSRSFTLEGDSQVSTEVAGTIGYLDPEHYSMQQFSEKSDVYSFGVVLLEVITGQPVISRSRTEENRHISDRVSLMLSKGDIKSIVDPKLGERFNAGLAWKITEVALACASESTKTRLTMSQVVAELKESLCRARTSGDSGDISFSEPTEMNVSMTVDPGVLPQPRNEYPVTQPDAVNSTDKSVGITKEHNLLHGIVQWFRKLKHTLSSEETSDRKASDATKTSDQWRLKSESDEDSEEPWPVHALTHSGNKYEYVSFLPLVAVELVFQQEPSLVQAGLIGNFAKTNLIEKGQVTATTALKELRKLSNLLSEM

SEQ ID NO: 21241 - protein, 497 aa, Arabidopsis thaliana
MSIITMVWLMKVFVFVTLLSLVFVITESAPESALITKLPGFEGTFPSKHYSGYVTIDKEHGKNLWYYFIESEKNPSKDPVVLWLNGGPGCSSMDGFVYEHGPFNFELPKKNNSLPLLHLNPYSWSKVSNIIYLDSPVGVGFSYSNNKSDYITGDIKTAVDSHAFLLKWFQMFPEFQSNPFFISGESYAGVYVPTLASEVVIGNKNGVKPALNFKGYLVGNGVADPKFDGNAFVPFAHGMGLISDELFENVTKACKGNFYEIEGLECEEQYTKVNDDTNQLNIYNILEPCYHGTSLSAFDIRSLPSSLLQLGKTEKRLPIRKRMFGRAWPVRAPVHPGIVPSWSQLLADVTVPCIDDRVATAWLNDPEIRKAIHTKEESEIGRWELCSGKLSFYHDAGSMIDFHRNLTLSGYRALIYSGDHDMCVPFTGSEAWTKSLGYKVIDEWRAWISNDQVAGYTQGYANNLTFLTIKGAGHTVPEYKPREALDFYSRFLEGSKI

SEQ ID NO: 21242 - protein, 553 aa, Arabidopsis thaliana
MGWLTKILKGSSHKFSDGQCNGRYREDRNLEGPRYSAEGSDFDKEEIECAIALSLSEQEHVIPQDDKGKKIIEYKSETEEDDDDDEDEDEEYMRAQLEAAEEEERRVAQAQIEEEEKRRAEAQLEETEKLLAKARLEEEEMRRSKAQLEEDELLAKALQESMNVGSPPRYDPGNILQPYPFLIPSSHRICVGCQAEIGHGRFLSCMGGVWHPECFCCNACDKPIIDYEFSMSGNRPYHKLCYKEQHHPKCDVCHNFIPTNPAGLIEYRAHPFWMQKYCPSHERDGTPRCCSCERMEPKDTKYLILDDGRKLCLECLDSAIMDTHECQPLYLEIREFYEGLHMKVEQQIPMLLVERSALNEAMEGEKHGHHHLPETRGLCLSEEQTVTTVLRRPRIGAGYKLIDMITEPCRLIRRCEVTAILILYGLPRLLTGSILAHEMMHAWLRLNGYPNLRPEVEEGICQVLAHMWLESETYAGSTLVDIASSSSSAVVSASSKKGERSDFEKKLGEFFKHQIESDSSSAYGDGFRQGNQAVLKHGLRRTLDHIRLTGTFP

SEQ ID NO: 21243 - protein, 244 aa, Shigella flexneri 2a str. 301
MRQLFREFSRDSLHSDKKYILRMVMELYLDTSDVVAVKALSRIFPLAGVTTNPSIIAAGKKPLDVVLPQLHEAMGGQGRLFAQVMATTAEGMVNDALKLRSIIADIVVKVPVTAEGLAAIKMLKAEGIPTLGTAVYGAAQGLLSALAGAEYVAPYVNRIDAQGGSGIQTVTDLHQLLKMHAPQAKVLAASFKTPRQALDCLLAGCESITLPLDVAQQMISYPAVEAAVTKFEQDWQGAFGRTSI

SEQ ID NO: 21244 - protein, 1522 aa, Shigella flexneri 2a str. 301
MRGARMTRKPRRHALSVPVRSGSEVGFPQSLGEVHDMLYDKSLERDNCGFGLIAHIEGEPSHKVVRTAIHALARMQHRGAILADGKTGDGCGLLLQKPDRFFRIVAQERGWRLAKNYAVGMLFLNKDPELAAAARRIVEEELQRETLSIVGWRDVPTNEGVLGEIALSSLPRIEQIFVNAPAGWRPRDMERRLFIARRRIEKRLEANKDFYVCSLSNLVNIYKGLCMPADLPRFYLDLADLRLESAICLFHQRFSTNTVPRWPLAQPFRYLAHNGEINTITGNRQWARARTYKFQTPLIPDLHDAAPFVNETGSDSSSMDNMLELLLAGGMDIIRAMRLLVPPAWQNNPDMDPELRAFFDFNSMHMEPWDGPAGIVMSDGRFAACNLDRNGLRPARYVITKDKLITCASEVGIWDYQPDEVVEKGRVGPGELMVIDTRSGRILHSAETDDDLKSRHPYKEWMEKNVRRLVPFEDLPDEEVGSRELDDDTLASYQKQFNYSAEELDSVIRVLGENGQEAVGSMGDDTPFAVLSSQPRIIYDYFRQQFAQVTNPPIDPLREAHVMSLATSIGREMNVFCEAEGQAHRLSFKSPILLYSDFKQLTTMKEEHYRADTLDITFDVTKTTLEATVKELCDKAEKMVRSGTVLLVLSDRNIAKDRLPVPAPMAVGAIQTRLVDQSLRCDANIIVETASARDPHHFAVLLGFGATAIYPYLAYETLGRLVDTHAIAKDYRTVMLNYRNGINKGLYKIMSKMGISTIASYRCSKLFEAVGLHDDVVGLCFQGAVSRIGGASFEDFQQDLLNLSKRAWLARKPISQGGLLKYVHGGEYHAYNPDVVRTLQQAVQSGEYSDYQEYAKLVNERPATTLRDLLAITPGENAVNIADVEPASELFKRFDTAAMSIGALSPEAHEALAEAMNSIGGNSNSGEGGEDPARYGTNKVSRIKQVASGRFGVTPAYLVNADVIQIKVAQGAKPGEGGQLPGDKVTPYIAKLRYSVPGVTLISPPPHHDIYSIEDLAQLIFDLKQVNPKAMISVKLVSEPGVGTIATGVAKAYADLITIAGYDGGTGASPLSSVKYAGCPWELGLVETQQALVANGLRHKIRLQVDGGLKTGVDIIKAAILGAESFGFGTGPMVALGCKYLRICHLNNCATGVATQDDKLRKNHYHGLPFKVTNYFEFIARETRELMAQLGVTRLVDLIGRTDLLKELDGFTAKQQKLALSKLLETAEPHAGKSLYCTENNPPFDNGLLNAQLLQQAKPFVDERQSKTFWFDIRNTDRSVGASLSGYIAQTHGDQGLAADPIKAYFNGTAGQSFGVWNAGGVELYLTGDANDYVGKGMAGGLIAIRPPVGSAFRSHEASIIGNTCLYGATGGRLYAAGRAGERFGVRNSGAITVVEGIGDNGCEYMTGGIVCILGKTGVNFGAGMTGGFAYVLDESGDFRKRVNPELVEVLSVDDLAIHEEHLRGLITEHVQHTGSQRGEEILANWSTFATKFALVKPKSSDVKALLGHRSRSAAELRVQAQ

SEQ ID NO: 21245 - protein, 298 aa, Oryza sativa Japonica Group
MAREVSSEEEAGGGDELRRGPWTVEEDLLLVNYIAAHGEGRWNALARCAGLKRTGKSCRLRWLNYLRPDVRRGNMTAEEQLLILELHGRWGNRWSKIAQHLPGRTDNEIKNYWRTRVQKHAKHLNCDVNSQQFKDLMRYLWMPRLLERIHRSSQSQSHDADDADLSVSAATSCITSDLVVDAHHPPLAMADSNDSAAMWQQHQAPQMSVAGAPPPTTTMAQHVVLPTAAASCHQMQDQFVCARAAETTTCCWSESESLPGLAGLYYDDAAAALPEFDVETMAMWGPEDDPWYTQMLGL

SEQ ID NO: 21246 - protein, 256 aa, Oryza sativa Japonica Group
MEAKRGKIIPAAQVTNFIRRNNVGFGTSIGRKGAPHTIPHGLHGLGRSSNLTLAREGLVGGWHVALRPNLPKPVAKTMEQERREAKSRTSALPGQRRLRRRVQGEDYLPKEDDFAMASSPLRGPRKPFRPIKPRGYRAGDRQTAHQGPMSPYNIMYPCKCPFLVILTTTVLPSVTLLPRILFIHPTTVMFHMNRTNYQLIDISEDGLFVSLLTESGNTKDDLGLPTETISWGRSRLDLVKARKEEEIYALKDIGTK

SEQ ID NO: 21247 - protein, 638 aa, Shigella flexneri 2a str. 301
MGKIIGIDLGTTNSCVAIMDGTIPRVLENAEGDRTTPSIIAYTQDGETLVGQPAKRQAVTNPQNTLFAIKRLIGRRFQDEEVQRDVSIMPFKIIAADNGDAWVEVKGQKMAPPQISAEVLKKMKKTAEDYLGEPVTEAVITVPAYFNDAQRQATKDAGRIAGLEVKRIINEPTAAALAYGLDKGTGNRTIAVYDLGGGTFDISIIEIDEVDGEKTFEVLATNGDTHLGGEDFDSRLINYLVEEFKKDQGIDLRNDPLAMQRLKEAAEKAKIELSSAQQTDVNLPYITADATGPKHMNIKVTRAKLESLVEDLVNRSIEPLKVALQDAGLSVSDIDDVILVGGQTRMPMVQKKVAEFFGKEPRKDVNPDEAVAIGAAVQGGVLTGDVKDVLLLDVTPLSLGIETMGGVMTTLIAKNTTIPTKHSQVFSTAEDNQSAVTIHVLQGERKRAADNKSLGQFNLDGINPAPRGMPQIEVTFDIDADGILHVSAKDKNSGKEQKITIKASSGLNEDEIQKMVRDAEANAEADRKFEELVQTRNQGDHLLHSTRKQVEEAGDKLPADDKTAIESALTALETALKGEDKAAIEAKMQELAQVSQKLMEIAQQQHAQQQTAGADASANNAKDDDVVDAEFEEVKDKK

SEQ ID NO: 21248 - protein, 504 aa, Shigella flexneri 2a str. 301
MKNEKRKTGIEPKVFFPPLIIVGILCWLTVRDLDAANVVINAVFSYVTNVWGWAFEWYMVVMLFGWFWLVFGPYAKKRLGNEPPEFSTASWIFMMFASCTSAAVLFWGSIEIYYYISTPPFGLEPNSTGAKELGLAYSLFHWGPLPWATYSFLSVAFAYFFFVRKMEVIRPSSTLVPLAGEKHAKGLFGTIVDNFYLVALIFAMGTSLGLATPLVTECMQWLFGIPHTLQLDAIIITCWIILNAICVACGLQKGVRIASDVRSYLSFLMLGWVFIVSGASFIMNYFTDSVGMLLMYLPRMLFYTDPIAKGGFPQGWTVFYWAWWVIYAIQMSIFLARISRGRTVRELCFGMVMGLTASTWILWTVLGSNTLLLMDKNIINIPNLIEQYGVARAIIETWAALPLSTATMWGFFILCFIATVTLVNACSYTLAMSTCREVRDGEEPPLLVRIGWSILVGIIGIVLLALGGLKPIQTAIIAGGCPLFFVNIMVTLSFIKDAKQNWKD

SEQ ID NO: 21249 - protein, 457 aa, Shigella flexneri 2a str. 301
MMEGQQHGEQLKRGLKNRHIQLIALGGAIGTGLFLGSASVIQSAGPGIILGYAIAGFIAFLIMRQLGEMVVEEPVAGSFSHFAYKYWGSFAGFASGWNYWVLYVLVAMAELTAVGKYIQFWYPEIPTWVSAAVFFVVINAINLTNVKVFGEMEFWFAIIKVIAVVAMIIFGGWLLFSGNGGPQASVSNLWDQGGFLPHGFTGLVMMMAIIMFSFGGLELVGITAAEADNPEQSIPKATNQVIYRILIFYIGSLAVLLSLMPWTRVTADTSPFVLIFHELGDTFVANALNIVVLTAALSVYNSCVYCNSRMLFGLAQQGNAPKALASVDKRGVPVNTILVSALVTALCVLINYLAPESAFGLLMALVVSALVINWAMISLAHMKFRRAKQEQGVVTRFPALLYPLGNWICLLFMAAVLVIMLMTPGMAISVYLIPVWLIVLGIGYLFKEKTAKAVKAH

SEQ ID NO: 21250 - protein, 430 aa, Shigella flexneri 2a str. 301
MMNTEGNNGNKPLGLWNVVSIGIGAMVGAGIFALLGQAALLMEASTWGAFAFGGIVAMFSGYAYARLGASYPSNGGIIDFFRRGLGNGVFSLALSLLYLLTLAVSIAMVARAFGAYAVQFLHEGSQEEHLILLYALGIIAVMTLFNSLSNHAVGRLEVILVGIKMMILLLLIIAGVWSLQPAHISVSAPPSSGAFFSCIGITFLAYAGFGMMANAADKVKDPQVIMPRAFLVAIGVTTLLYISLALVLLSDVSALELEKYADTAVAQAASPLLGHVGYVIVVIGALLATASGINANLFAVFNIMDNMGSERELPKLMNKSLWRQSTWGNIIVVVLIMLMTAALNLDSLASVASATFLICYLAVFVVAIRLRHDIHASLPILIVGTLVMLLVIVGFIYSLWSQGSRALIWIIGAILLSLIVAMVMKRNKTV

SEQ ID NO: 21251 - protein, 362 aa, Shigella flexneri 2a str. 301
MPHNPIRVVVGPANYFSHPGSFNHLHNFFTDEQLSRAVWIYGKRAIAAAQTKLPPAFGLPGAKHILFRGHCSESDVQQLAAESGDDRSVVIGVGGGALLDTAKALARRLGLPFVAAPTIAATCAAWTPLSVWYNDAGQALHYEIFDDANFMVLVEPEIILNAPQQYLLAGIGDTLAKWYEAVVLAPQPETLPLTVRLGINNAQAIRDVLLNSSEQALADQQNQQLTQSFCDVVDAIIAGGGMVGGLGDRFTRVAAAHAVHNGLTVLPQTEKFLHGTKVAYGILVQSALLGQDDVLAQLTGAYQRFHLPTTLAELEVDINNQAEIDKVIAHTLRPVESIHYLPVTLTPDTLRAAFEKVESFKA

SEQ ID NO: 21252 - protein, 386 aa, Shigella flexneri 2a str. 301
MTNNPLIPQSKLPQLGTTIFTQMSALAQQHQAINLSQGFPDFDGPRYLQERLAYHVAQGANQYAPMTGVQALREAIAQKTERLYGYQPDADSDITVTAGATEALYAAITALVRNGDEVICFDPSYDSYAPAIALSGGIVKRMALQPPHFRVDWQEFAALLSERTRLVILNTPHNPSATVWQQADFAALWQAIAGHEIFVISDEVYEHINFSQQGHASVLAHPQLRERAVAVSSFGKTYHMTGWKVGYCVAPAPISAEIRKVHQYLTFSVNTPAQLALADMLRAEPEHYLALPDFYRQKRDILVNALNESRLEILPCEGTYFLLVDYSAVSTLDDVEFCQWLTQEHGVAAIPLSVFCADPFPHKLIRLCFAKKESTLLAAAERLRQL

SEQ ID NO: 21253 - protein, 515 aa, Shigella flexneri 2a str. 301
MCSIFGVFDIKTDAVELRKKALELSRLMRHRGPDWSGIYASDNAILAHERLSIVDVNAGAQPLYNQQKNHVLAVNGEIYNHQALRAEYGDRYQFQTGSDCEVILALYQEKGPEFLDDLQGMFAFALYDSEKDAYLIGRDHLGIIPLYMGYDEHGQLYVASEMKSLVPVCRTIKEFPAGSYLWSQDGEIRSYYHRDWFDFDAVKDNVTDKNELRQALEDSVKSHLMSDVPYGVLLSGGLDSSIISAITKKYAARRVHHEIHFTVQEGLDAIRDVIYHIETYDVTTIRASTPMYLMSRKIKAMGIKMVLSGEGSDEVFGGYLYFHKAPNVKELHEETVRKLLALHMYDCARANKAMSAWGVEARVPFLDKKFLDVAMRINPQDKMCGNGKMEKHILRECFESYLPASVAWRQKEQFSDGVGYSWIDTLKEVAAQQVSDQQLETARFRFPYNTPTSKEAYLYREIFEELFPLPSAAECVPGGPSVACSSAKAIEWDEAFKKMDDPSGRAVGVHQSAYK

SEQ ID NO: 21254 - protein, 406 aa, Shigella flexneri 2a str. 301
MSFDSLGLSPDILRAVAEQGYREPTPIQQQAIPAVLEGRDLMASAQTGTGKTAGFTLPLLQHLITRQPHAKGRRPVRALILTPTRELAAQIGENVRDYSKYLNIRSLVVFGGVSINPQMMKLRGGVDVLVATPGRLLDLEHQNAVKLDQVEILVLDEADRMLDMGFIHDIRRVLTKLPAKRQNLLFSATFSDDIKALAEKLLHNPLEIEVARRNTASDQVTQHVHFVDKKRKRELLSHMIGKGNWQQVLVFTRTKHGANHLAEQLNKDGIRSVAIHGNKSQGARTRALADFKSGDIRVLVATDIAARGLDIEELPHVVNYELPNVPEDYVHRIGRTGRAAATGEALSLVCVDEHKLLRDIEKLLKKEIPRIAIPGYEPDPSIKAEPIQNGRQQRGGIRLMNKRKTA

SEQ ID NO: 21255 - protein, 582 aa, Shigella flexneri 2a str. 301
MHNDKDLSTWQTFRRLWPTIAPFKAGLIVAGVALILNAASDTFMLSLLKPLLDDGFGKTDRSVLVWMPLVVIGLMILRGITSYVSSYCISWVSGKVVMTMRRRLFGHMMGMPVSFFDKQSTGTLLSRITYDSEQVASSSSGALITVVREGASIIGLFIMMFYYSWQLSIILIVLAPIVSIAIRVVSKRFRNISKNMQNTMGQVTTSAEQMLKGHKEVLIFGGQEVETKRFDKVSNRMRLQGMKMVSASSISDPIIQLIASLALAFVLYAASFPSVMDNLTAGTITVVFSSMIALMRPLKSLTNVNAQFQRGMAACQTLFTILDSEQEKDEGKRVIERATGDVEFRNVTFTYPGRDVPALRNINLKIPAGKTVALVGRSGSGKSTIASLITRFYDIDEGEILMDGHDLREYTLASLRNQVALVSQNVHLFNDTVANNIAYARTEQYSREQIEEAARMAYAMDFINKMDNGLDTVIGENGVLLSGGQRQRIAIARALLRDSPILILDEATSALDTESERAIQAALDELQKNRTSLVIAHRLSTIEKADEIVVVEDGVIVERGTHNDLLEHRGVYAQLHKMQFGQ

SEQ ID NO: 21256 - protein, 196 aa, Shigella flexneri 2a str. 301
MNEAVSPGALSTLFTDARTHNGWRETPVSDETLQELYALMKWGPTSANCSPARIVFIRTAEGKERLRPALSSGNLQKTLTAPVTAIVAWDSEFYERLPLLFPHGDARSWFTSSPQLAEETAFRNSSMQAAYLIVACRALGLDTGPMSGFDRQHVDDAFFAGSTLKSNLLINIGYGDSSKLFARLPRLSFEEACGLL

SEQ ID NO: 21257 - protein, 192 aa, Shigella flexneri 2a str. 301
MEYRSLTLDDFLSRFQLLRPQINREPLNHRQAAVLIPIVRRPQPGLLLTQRSIHLRKHAGQVAFPGGAVDDTDASVIAAALREAEEEVAIPPSAVEVIGVLPPVDSVTGYQVTPVVGIIPPDLPYRASEDEVSAVFEMPLAQALHLGRYHPLDIYRRGDSHRVWLSWYEQYFVWGMTAGIIRELALQIGVTP

SEQ ID NO: 21258 - protein, 321 aa, Shigella flexneri 2a str. 301
MSDYQMFEVQVSQVEPLTEQVKRFTLVATDGKPLPAFTGGSHILVQMSDGDNQYSNAYSLLSSPHNTSSYQIAVRLEENSRGGSRFLHQQVKVGDRLTISTPNNLFALIPSARKHLFIAGGIGITPFLSHMAELQHSDIDWQLHYCSRNPESCAFRAELVQHPQAEKVHLHHSSTGTRLELARLLADIEPGTHVYTCGPEALIEAVRSEAARLDIAADTLHFEQFAIEDKTGDAFTLVLARSGKEFVVPEEMTILQVIENNKAAKVECLCREGVCGTCETAILEGEADHRDQYFSDEERASQQSMLICCSRAKGKRLVLDL

SEQ ID NO: 21259 - protein, 248 aa, Shigella flexneri 2a str. 301
MLSIKDLHVSVEDKAILRGLSLDVRPGEVHAIMGPNGSGKSTLSATLAGREDYEVTGGTVEFKGKDLLALSPEDRAGEGIFMAFQYPVEIPGVSNQFFLQTALNAVRSYRGQETLDRFDFQDLMEEKIALLKMPEDLLTRSVNVGFSGGEKKRNDILQMAVLEPELCILDESDTGLDIDALKVVADGVNSLRDGKRSFIIVTHYQRILDYIKPDYVHVLYQGRIVKSGDFTLVKQLEEQGYGWLTEQQ

SEQ ID NO: 21260 - protein, 452 aa, Shigella flexneri 2a str. 301
MSHNVTPNTSRVELRKTLTLVPVVMMGLAYMQPMTLFDTFGIVSGLTDGHVPTAYAFALIAILFTALSYGKLVRRYPSAGSAYTYAQKSISPTVGFMVGWSSLLDYLFAPMINILLAKIYFEALVPSIPSWMFVVALVAFMTAFNLRSLKSVANVNTVIVVLQVVLIAVILGMVVYGVFEGEGAGTLASTRPFWSGDAHVIPMITGATILCFSFTGFDGISNLSEETKDAERVIPRAIFLTALIGGMIFIFATYFLQLYFPDISRFKDPDASQPEIMLYVAGKAFQVGALIFSTITVLASGMAAHAGVARLMYVMGRDGVFPKSFFGYVHPKWRTPAMNIILVGAIALLAINFDLVMATALINFGALVAFTFVNLSVISQFWIREKRNKTLKDHFQYLFLPMCGALTVGALWVNLEESSMVLGLIWAAIGLIYLACVTKSFRNPVPQYEDVA

SEQ ID NO: 21261 - protein, 571 aa, Shigella flexneri 2a str. 301
MSSMTTTDNKAFLNELARLVGHSHLLTDPAKTARYRKGFRSGQGDALAVVFPGSLLELWRVLKACVTADKIILMQAANTGLTEGSTPNGNDYDRDIVIISTLRLDKLHVLGKGEQVLAYPGTTLYSLEKALKPLGREPHSVIGSSCIGASVIGGICNNSGGSLVQRGPAYTEMSLFARIDEDGKLTLVNHLGIDLGETPEQILSKLDDDRIKDDDVRHDGRHAHDYDYVHRVRDIEADTPARYNADPDRLFESSGCAGKLAVFAVRLDTFEAEKNQQVFYIGTNQPEVLTEIRRHILANFENLPVAGEYMHRDIYDIAEKYGKDTFLMIDKLGTDKMPFFFNLKGRTDAMLEKVKFFRPHFTDRAMQKFGHLFPSHLPPRMKNWRDKYEHHLLLKMAGDGVGEAKSWLVDYFKQAEGDFFVCTPEEGSKAFLHRFAAAGAAIRYQAVHSDEVEDILALDIALRRNDTEWYEHLPPEIDSQLVHKLYYGHFMCYVFHQDYIVKKGVDVHALKEQMLELLQQRGAQYPAEHNVGHLYKAPETLQKFYRENDPTNSMNPGIGKTSKRKNWQEVE

SEQ ID NO: 21262 - protein, 759 aa, Shigella flexneri 2a str. 301
MDDQLKQSALDFHEFPVPGKIQVSPTKPLATQRDLALAYSPGVAAPCLEIEKDPLKAYKYTARGNLVAVISNGTAVLGLGNIGALAGKPVMEGKGVLFKKFAGIDVFDIEVDELDPDKFIEVVAALEPTFGGINLEDIKAPECFYIEQKLRERMNIPVFHDDQHGTAIISTAAILNGLRVVEKNISDVRMVVSGAGAAAIACMNLLVALGLQKHNIVVCDSKGVIYQGREPNMAETKAAYAVVDDGKRTLDDVIEGADIFLGCSGPKVLTQEMVKKMARAPMILALANPEPEILPPLAKEVRPDAIICTGRSDYPNQVNNVLCFPFIFRGALDVGATAINEEMKLAAVRAIAELAHAEQSEVVASAYGVQDLSFGPEYIIPKPFDPRLIVKIAPAVAKAAMESGVATRPIADFDVYIDKLTEFVYKTNLFMKPIFSQARKAPKRVVLPEGEEARVLHATQELVTLGLAKPILIGRPNVIEMRIQKLGLQIKAGVDFEIVNNESDPRFKEYWTEYFQIMKRRGVTQEQAQRALISNPTVIGAIMVQRGEADAMICGTVGDYHEHFSVVKNVFGYRDGVHTAGAMNALLLPSGNTFIADTYVNDEPDAEELAEITLMAAETVRRFGIEPRVALLSHSNFGSSDCPSSSKMRQALELVRDRAPDLMIDGEMHGDAALVEAIRNDRMPDSPLKGSANILVMPNMEAARISYNLLRVSSSEGVTVGPVLMGVAKPVHVLTPIASVRRIVNMVALAVVEAQTQPL

SEQ ID NO: 21263 - protein, 396 aa, Shigella flexneri 2a str. 301
MLDAQTIATVKATIPLLVETGPKLTAHFYDRMFTHNPELKEIFNMSNQRNGDQREALFNAIAAYASNIENLPALLPAVEKIAQKHTSFQIKPEQYNIVGEHLLATLDEMFSPGQEVLDAWGKAYGVLANVFINREAEIYNENASKAGGWEGTRDFRIVAKTPRSALITSFELEPVDGGAVAEYRPGQYLGVWLKPEGFPHQEIRQYSLTRKPDGKGYRIAVKREEGGQVSNWLHNHANVGDVVKLVAPAGDFFMAVADDTPVTLISTGVGQTPMLAMLDTLAKAGHTAQVNWFHAAENGEVHAFADEVKELGQSLPRFTAHTWYRQPSEADRAKGQFDSEGLMDLSKLEGAFSDPTMQFYLCGPVGFMQFTAKQLVDLGVKQENIHYECFGPHKVL

SEQ ID NO: 21264 - protein, 301 aa, Shigella flexneri 2a str. 301
MSIDKSYCGFIAIVGRPNVGKSTLLNKLLGQKISITSRKAQTTRHRIVGIHTEGAYQAIYVDTPGLHMEEKRAINRLMNKAASSSIGDVELVIFVVEGTRWTPDDEMVLNKLREGKAPVILAVNKVDNVQEKADLLPHLQFLASQMNFLDIVPISAETGLNVDTIAAIVRKHLPEATHHFPEDYITDRSQRFMASEIIREKLMRFLGAELPYSVTVEIERFVSNERGGCDINGLILVEREGQKKMVIGNKGAKIKTIGIEARKDMQEMFEAPVHLELWVKVKSGWADDERALRSLGYVDDL

SEQ ID NO: 21265 - protein, 447 aa, Shigella flexneri 2a str. 301
MTTILKHLPVGQRIGIAFSGGLDTSAALLWMRQKGAVPYAYTANLGQPDEEDYDAIPRRAMEYGAENARLIDCRKQLVAEGIAAIQCGAFHNTTGGLTYFNTTPLGRAVTGTMLVAAMKEDGVNIWGDGSTYKGNDIERFYRYGLLTNAELQIYKPWLDTDFIDELGGRHEMSEFMIACGFDYKMSVEKAYSTDSNMLGATHEAKDLEYLNSSVKIVNPIMGVKFWDESVKIPAEEVTVRFEQGHPVALNGKTFSDDVEMMLEANRIGGRHGLGMSDQIENRIIEAKSRGIYEAPGMALLHIAYERLLTGIHNEDTIEQYHAHGRQLGRLLYQGRWFDSQALMLRDSLQRWVASQITGEVTLELRRGNDYSILNTVSENLTYKPERLTMEKGDSVFSPDDRIGQLTMRNLDITDTREKLFGYAKTGLLSSSATSGLPQVENMENKGQ

SEQ ID NO: 21266 - protein, 390 aa, Shigella flexneri 2a str. 301
MKFVDEASILVVAGDGGNGCVSFRREKYIPKGGPDGGDGGDGGDVWMEADENLNTLIDYRFEKSFRAERGQNGASRDCTGKRGKDVTIKVPVGTRVIDQGTGETMGDMTKHGQRLLVAKGGWHGLGNTRFKSSVNRTPRQKTNGTPGDKRELLLELMLLADVGMLGMPNAGKSTFIRAVSAAKPKVADYPFTTLVPSLGVVRMDNEKSFVVADIPGLIEGAAEGAGLGIRFLKHLERCRVLLHLIDIDPIDGTDPVENARIIISELEKYSQDLAAKPRWLVFNKIDLLDKAEAEEKAKAIAEALGWEDKYYLISAASGLGVKDLCWDVMTFIIENPVVQAEEAKQPEKVEFMWDDYHRQQLEEIAEEDDEDWDDDWDEDDEEGVEFIYKR

SEQ ID NO: 21267 - protein, 341 aa, Shigella flexneri 2a str. 301
MKKMMIATLAAASVLLAVANQAHAGATLDAVQKKGFVQCGISDGLPRFSYADADGKFSGIDVDVCRGVAAAVFGDDTKVKYTPLTAKERFTALQSGEVDLLSRNTTWTSSRDAGMGMAFTGVTYYDGIGFLTHDKAGLKSAKELDGATVCIQAGTDTELNVADYFKANNMKYTPVTFDRSDESAKALESGRCDTLASDQSQLYALRIKLSNPAEWIVLPEVISKEPLGPVVRRGDDEWFSIVRWTLFAMLNAEEMGINSQNVDEKAANPATPDMAHLLGKEGDYGKDLKLDNKWAYNIIKQVSNYSEIFERNVGSESPLKIKRGQNNLWNNGGIQYAPPVR

SEQ ID NO: 21268 - protein, 278 aa, Shigella flexneri 2a str. 301
MKKNRAFLKWAGGKYPLLDDIKRHLPKGECLVEPFVGAGSVFLNTDFSRYILADINSDLISLYNIVKMRTDEYVQAARELFVPETNCAEVYYQFREEFNKSQDPFRRAVLFLYLNRYGYNGLCRYNLRGEFNVPFGRYKKPYFPEAELYHFAEKAQNAFFYCESYADSMERADDASVVYCDPPYAPLSATANFTAYHTNSFTLEQQAHLAEIAEGLVERHIPVLISNHDTMLTREWYQRAKLHVVKVRRSISSNGGTRKKVDELLALYKPGVVSPAKK

SEQ ID NO: 21269 - protein, 425 aa, Shigella flexneri 2a str. 301
MKPMHIAMALLSAAMFFVLAGVFMGVQLELDGTKLVVDTASDIRWQWMFIGTAVVFFFQLLRPAFQKGLKSVSGPKFILPAIDGSTVKQKLFLVALLVLVVAWPFMVSRGTVDIATLTMIYIILGLGLNVVVGLSGLLVLGYGGFYAIGAYTFALLNHYYGLGFWTCLPIAGLMAAAAGFLLGFPVLRLRGDYLAIVTLGFGEIVRILLLNNTEITGGPNGISQIPKPTLFGLEFSRTAREGGWDTFSNFFGLKYDPSDRVIFLYLVALLLVVLSLFVINRLLRMPLGRAWEALREDEIACRSLGLSPRRIKLTAFTISAAFAGFAGTLFAARQGFVSPESFTFAESAFVLAIVVLGGMGSQFAVILAAVLLVVSRELMRDFNEYSMLMLGGLMVLMMIWRPQGLLPMTRPQLKLKNGAAKGEQA

SEQ ID NO: 21270 - protein, 532 aa, Shigella flexneri 2a str. 301
MTGIPGGSILPVYDALSQSTQIRHILARHEQGAGFIAQGMARTDGKPAVCMACSGPGATNLVTAIADARLDSIPLICITGQVPASMIGTDAFQEVDTYGISIPITKHNYLVRHIEELPQVMSDAFRIAQSGRPSPVWIDIPKDVQTAVFEIEAQPAVAEKAVAPAFSEESIRDAATMINAAKRPVLYLGGGVINAPARVRELAEKAQLPTTMTLMALGMLPKAHPLSLGMLGMHGVRSTNYILQEADLLIVLGARFDDRAIGKTEQFCPNAKIIHVDIDRAELGKIKQPHVAIQADVDDVLAQLIPRVEAQPRAEWHQLVADLQREFPCPIPKACDPLSHYGLINAVAACVDDNAIITTDVGQHQMWTAQAYPLNRPRQWLTSGGLGTMGFGLPAAIGAALANPDRKVLCFSGDGSLMMNIQEMATASENQLDVKIILMNNEALGLVHQQQSLFYEQGVFAATYPGKINFMQIAAGFGLETCDLNNEADPQAALQEIINRPGPALIHVRIDAEEKVYPMVPPGAANTEMVGE

SEQ ID NO: 21271 - protein, 330 aa, Shigella flexneri 2a str. 301
MKTAYIAKQRQISFVKSHFSRQLEERLGLIEVQAPILSRVGDGTQDNLSGCEKAVQVKVKALPDAQFEVVHSLAKWKRQTLGQHDFSAGEGLYTHMKALRPDEDRLSPLHSVYVDQWDWERVMGDGERQLSTLKSTVEAIWAGIKATEAAVNEEFGLAPFLPDQIHFVHSQELLSRYPDLDAKGRERAIAKDLGAVFLVGIGGKLSDGHRHDVRAPDYDDWSTPSELGHAGLNGDILVWNPVLEDAFELSSMGIRVDADTLKHQLALTGDEDRLQLEWHQALLRGEMPQTIGGGIGQSRLTMLLLQLPHIGQVQCGVWPAAVRESVPSLL

SEQ ID NO: 21272 - protein, 548 aa, Shigella flexneri 2a str. 301
MNGAQWVVHALRAQGVNTVFGYPGGAIMPVYDALYDGGVEHLLCRHEQGAAMAAIGYARATGKTGVCIATSGPGATNLITGLADALLDSIPVVAITGQVSAPFIGTDAFQEVDVLGLSLACTKHSFLVQSLEELPRIMAEAFDVASSGRPGPVLVDIPKDIQLASGDLEPWFTTVENEVTFPHAEVEQARQMLAKAQKPMLYVGGGVGMAQAVPALREFLAATKMPATCTLKGLGAVEADYPYYLGMLGMHGTKAANFAVQECDLLIAVGARFDDRVTGKLNTFAPHASVIHMDIDPAEMNKLRQAHVALQGDLNALLPALQQPLNINDWQQHCAQLRDEHSWRYDHPGDAIYAPLLLKQLSDRKPADCVVTTDVGQHQMWAAQHIAHTRPENFITSSGLGTMGFGLPAAVGAQVARPNDTVVCISGDGSFMMNVQELGTVKRKQLPLKIVLLDNQRLGMVRQWQQLFFQERYSETTLTDNPDFLMLASAFGIPGQHITRKDQVEAALDTMLNSDGPYLLHVSIDELENVWPLVPPGASNSEMLEKLS

SEQ ID NO: 21273 - protein, 810 aa, Shigella flexneri 2a str. 301
MSVIAQAGAKGRQLHKFGGSSLADVKCYLRVAGIMAEFSQPDDMMVVSAAGSTTNQLINWLKLSQTDRLSAHQVQQTLRRYQCDLISGLLPAEEADSLISAFVSDLERLAALLDSGINDAVYAEVVGHGEVWSARLMSAVLNQQGLPAAWLDAREFLRAERAAQPQVDEGLSYPLLQQLLVQHPSKRLVVTGFISRNNAGETVLLGRNGSDYSATQIGALAGVSRVTIWSDVAGVYSADPRKVKDACLLPLLRLDEASELARLAAPVLHARTLQPVSGSEIDLQLRCSYTPDQGSTRIERVLASGTGARIVTSHDDVCLIEFQVPASQDFKLAHKEIDQILKRAQVRPLAVGVHNDRQLLQFCYTSEVADSALKILDEAGLPGELRLRQGLALVAMVGAGVTRNPLHCHRFWQQLKGQPVEFTWQSDDGISLVAVLRTGPTESLIQGLHQSVFRAEKRIGLVLFGKGNIGSRWLELFAREQSTLSARTGFEFVLAGVVDSRRSLLSYDGLDASRALAFFNDEAVEQDEESLFLWMRAHPYDDLVVLDVTASQQLADQYLDFASHGFHVISANKLAGASDSNKYRQIHDAFEKTGRHWLYNATVGAGLPINHTVRDLIDSGDTILSISGIFSGTLSWLFLQFDGSVPFTELVDQAWQQGLTEPDPRDDLSGKDVMRKLVILAREAGYNIEPDQVRVESLVPAHCEGGSIDHFFENGDELNEQMVQRLEAAREMGLVLRYVARFDANGKARVGVEAVREDYPLASLLPCDNVFAIESRWYRDNPLVIRGPGAGRDVTAGAIQSDINRLAQLL

SEQ ID NO: 21274 - protein, 441 aa, Shigella flexneri 2a str. 301
MTHDNIDILVVDDDISHCTILQALLRGWGYNVALANSGRQALEQVREQVFDLVLCDVRMAEMDGIATLKEIKALNPAIPVLIMTAYSSVETAVEALKTGAQDYLIKPLDFDNLQATLEKALAHTHSIDAETPAVTASQFGMVGKSPAMQHLLSEIALVAPSEATVLIHGDSGTGKELVARAIHASSARSEKPLVTLNCAALNESLLESELFGHEKGAFTGADKRREGRFVEADGGTLFLDEIGDISPMMQVRLLRAIQEREVQRVGSNQTISVDVRLIAATHRDLAAEVNAGRFRQDLYYRLNVVAIEVPSLRQRREDIPLLAGHFLQRFAERNRKAVKGFTPQAMDLLIHYDWPGNIRELENAVERAVVLLTGEYISERELPLAIASTPIPLGQSQDIQPLVEVEKEVILAALEKTGGNKTEAARQLGITRKTLLAKLSR

SEQ ID NO: 21275 - protein, 470 aa, Shigella flexneri 2a str. 301
MVDQVKVVADDQAPAEQSLRRNLTNRHVQLIAIGGAIGTGLFMGSGKTISLAGPSIIFVYMIIGFMLFFVMRAMGELLLSNLEYKSFSDFASDLLGPWAGYFTGWTYWFCWVVTGMADVVAITAYAQFWFPDLSDWVASLAVIVLLLTLNLATVKMFGEMEFWFAMIKIVAIVSLIVVGLVMVAMHFQSPTGVEASFAHLWNDGGWFPKGLSGFFAGFQIAVFAFVGIELVGTTAAETKDPEKSLPRAINSIPIRIIMFYVFALIVIMSVTPWSSVVPEKSPFVELFVLVGLPAAASVINFVVLTSAASSANSGVFSTSRMLFGLAQEGVAPKAFAKLSKRAVPAKGLTFSCICLLGGVVMLYVNPSVIGAFTMITTVSAILFMFVWTIILCSYLVYRKQRPHLHEKSIYKMPLGKLMCWVCMAFFVFVVVLLTLEDDTRQALLVTPLWFIALGLGWLFIGKKRAAELRK

SEQ ID NO: 21276 - protein, 396 aa, Mycobacterium leprae
MAYLDHAATTPMHPAAIEAMTTALGTVGNASSLHTSGRVARRRIEESRELIADKLAARPSEVIFTAGGTESDNLAVKGIYWARRDAQPCHRRIVTTEVEHHAVLDSVNWLVEHEGAEVTWLPTAADGSVSAFGLREALQQHNDVALVSVMWANNEVGTVMPVVELAAVAAEFGVPMHSDAIQAVGQLPVKFGVSGLSAMSVAAHKFGGPPGVGALLLRRDISCVPLLHGGGQERDIRSGTPGVASVVGMAAAAQIAVDGLEINSIRLQVLRDRLIEGVLATIDDVALNGARDRMRLPGNAHFIFRGCEGDVLLMLLDANGIECSTGSACTSGVPQPSHVLIAMGADPASARGSLRLSLGHNSVEVDVEEVLRVLPGAVDRARRASLAAAGAGGVGV

SEQ ID NO: 21277 - protein, 342 aa, Bacillus subtilis
  misc_feature (1)..(1): Xaa can be any naturally occurring amino acid
  misc_feature (19)..(19): Xaa can be any naturally occurring amino acid
  misc_feature (56)..(56): Xaa can be any naturally occurring amino acid
  misc_feature (73)..(73): Xaa can be any naturally occurring amino acid
  misc_feature (85)..(85): Xaa can be any naturally occurring amino acid
  misc_feature (199)..(199): Xaa can be any naturally occurring amino acid
  misc_feature (210)..(210): Xaa can be any naturally occurring amino acid
  misc_feature (246)..(246): Xaa can be any naturally occurring amino acid
  misc_feature (284)..(284): Xaa can be any naturally occurring amino acid
  misc_feature (286)..(286): Xaa can be any naturally occurring amino acid
  unsure (1)..(342): unsure at all Xaa locations
XFVDQVKVYVKGGDGGNGXVAFRREKYVPKGGPAGGDGGKGGDVVFEVDEGLRTLXDFRYKKHFKAIRGEHGXSKNQHGRNADDXVIKVPPGTVVTDDDTKQVIADLTEHGQRAVIARGGRGGRGNSRFATPANPAPQLSENGEPGKERYIVLELKVLADVGLVGFPSVGKSTLLSVVSSAKPKIADYHFTTLVPNLGXVETDDGRSFVXADLPGLIEGAHQGVGLGHQFLRHIERTRVIVHVIDXSGLEGRDPYDDYLTINQELSEYNLRLTERPQIIVANKXDXPEAAENLEAFKEKLTDDYPVFPISAVTREGLRELLFEVANQLENTPEFPLYDEEEL

SEQ ID NO: 21278 - protein, 471 aa, Pseudomonas resinovorans
MSDKHHSGELKRGLKNRHIQLIALGGAIGTGLFLGSAGVLKSAGPSMILGYAICGFIAFLIMRQLGEMIVEEPVAGSFSHFAHKYWGGFAGFLSGWNCWVLYILVGMSELTAVGKYIHFWWPEIPTWATAAVFFVVVNAINLTNVKLFGETEFWFAMIKVVAIVGMIVLGCWLLFSGSGGEQATVANLWAHGGFFPNGVSGLVMAMAFIMFSFGGLEMLGFTAAEADKPKQVIPKAINQVIYRILIFYVGALVVLLSLSPWDALLASINSAGDPYSGSPFVKIFALIGSDTAAHLLNFVVLTAALSVYNSGTYCNGRMLLGLAEQGDAPRALAKVDKRGVPVRSILVSAVVTFLAVVVNYVVPQNALELLMSLVVAALVINWAMISYSHLKFRQHMDKGGQRSSFRALWYPMGNYLCLAFVLFILGVMLMIPGIQVSVYAIPVWLLVMWGCYRLKLSAKAQAAKVAGAEAA

SEQ ID NO: 21279 - protein, 486 aa, Fibrobacter succinogenes subsp. succinogenes S85
MKFEELPLANPLQRAVRAVGYETPTPIQERSIPSLLEGKDLLGIAQTGTGKTAAFALPILQRLLDSGKFRSPKTCRALILLPTRELAIQVEDCFREYAQFTAISTACIFGGVNDNPQKQKLIRGVDVLVATPGRLLDLIGQKAISLKKLEFFVLDEADRMLDMGFIHDIRKVVAMLPQDRQNLFFSATMPEEISKLAATILRPNPVRVEVAPQSTPIERIRQELYRIDKRRKGALLKELLAEHPEMKKVLVFCRTKHGADKIVRVLEKAGIKCAAIHGNKSQNRRQEALGNFKCEQIRVLVATDIAARGIDVDDVSHVFNYDLPNEHETFVHRIGRTARAGKEGVAISFCSPDEESDLRGIEKLTRVKIPEGDQSIYENLPPPQKETAESMMRNSRGRMSREEAQARAAETRNNRGNRKGNHGKQNSNNAPHNSEQISRNPAQNVTVQNAPADNTPNPQNGGRRHRRNRPGSRARRRMRESQSQQQ

SEQ ID NO: 21280 - protein, 802 aa, Fibrobacter succinogenes subsp. succinogenes S85
MAEDLSCGPEIDIPENNDNSKLQLEADAFLNAIAGGADEDQADEAAFFAANPDGIVVDDNGEVLESGANSKIKKGEKVEFINDDETTSEQEKPAEAEDATAATDSANLNEDPADEEDVGDESLVTFDDLGLSPEVLEAVKLAGYETPSPIQAKAIPALLQGANLLGTAQTGTGKTAAFSLPLLSRINFNGRETSMLVLTPTRELAIQVSDAIQQYAVKMQNVTVVPVYGGQDIAIQLRALKRKASIVVATPGRLIDHIKRGSISLGAVKAIVLDEADEMLDMGFMEDVETILKEIPADAQRALFSATMPDSVKKIIDQHLGEYEEARIEGKTTTVENICQRYLLVKNEHKIEALARVLEGEEFDGVLIFVRTKQNTTEVAEKLESRGFNVAPLNGDLAQSMRERTINRLKMGKLDIVVATDVAARGIDVDRISLVVNYDIPYDTESYVHRIGRTGRAGRSGNAILFITPREKRMLKTIEKATRQPIDVMEMPTSEQISKKRVDAFKAKVKSVVSYGELDQFKELVRALAAEGCNMKDGVALEDGSVNEMTAEDIAAAVIKMYQKKQPLFPNLPPLEAPKERREKVRTGRDFLGESRNEDFGLNSEEQKRMRKERKEGLNGVEEGFLRYYLGVGRIDHVTPRDIVGAIAGEANINSSNIGRIKLFDKFSTVELPNTLPQDVLDILSEMTIRGNDARFRVMTDEPPEGPAPGTRPHASREERRSFHRDRKGGFHDDERRGGFRKNREGGDRFGDKPFENRKARRERQFADRKPSKFEDKPFRKDRDERSFGDKPFRKTRRFGRV

SEQ ID NO: 21281 - protein, 513 aa, Fibrobacter succinogenes subsp. succinogenes S85
MTIVVFILYLLMMLGIGAYFSRKANSLNAYYLGNRGMNKWVVAMSAQASDMSGWMLMGLRGAVFVSGFSEAWIGIGLVIGTYFNWKIVGRRLRKYSHFCGDSITLPDFFSNRFRDNKGIIRVIASIFILAFFLFYTVSGFVASAKLFGTIFGLDYTTGLILGAVVVVSYTFMGGFFAVCWTDFIQASMMLIAVLVIPLMIMSGSGGFASTMDAVNAQNPYLMSLFTNATTGKSIGLIALISSLSWGLGYFGMPHILVRFMSIKNAEEIKDSRRIAMTWVIICLAAVVMIALLGRYYVTAHGITVDDPERIFMILCQALCHPAIAAILMAAILAAIMSTADSQLLVSASAFSNDLYKHLFRKNASNKEVMWVSRGVVVVITLIAVIVAMQGAPSADGVKHGKSFLDVVMSLVSFAWGGFGATFGPIMLLALFWKRTTLPAAVAGMLVGGLTTFIWKFYLSGFSAEIFQIYELVPGFILSFVTIVVVSLLTKEPSAEIQLEFDRVESTRLSDMKL

SEQ ID NO: 21282 - protein, 855 aa, Fibrobacter succinogenes subsp. succinogenes S85
MSDFTNDAEKVLAKAQSLRDRCSHSYLGAAHLAVGLVEGPDATLKKLYKSKGVKPNELRGRLEPFVQKIPRMEGVNPDVEPDSDLNRILRAAVQAARQVSRMVTPGDLLVALMKFSGDRGLAKVFEDALGSTEVVETWLSDPFAGAANAEEQSPLKLYGRELVEMAADGKLSPVIGREEEIRRVILILSRKTKNNPCLVGEPGVGKTAIVEGLAERIYRGDVPDALKGKKVFALDLSALMAGAKYRGDFEERLKSVIDAIEEDGNTLMFIDELHNIVGAGKTEGSMDLGNMLKPKLARGELHCIGATTTQEYRKYIEKDSALERRFQPVQVSEPSEDEAISILRGIKDGFDAHHGVRLHDNALVAAVKLSNRYISDRFLPDKAIDLIDEAASLVKTQMDTVPEALDTLQRKELQMKIEEQALSKETDEASVKRLKELREDLAVTDAAVKQMQERWQDRRAAFAEVQDLKKALKAAKDEMEQAEARYDLNRAAELKYNKIVNIEKELAQKTEALRKSAEEGGLSEEVTEETIALVVSRWTGIPVTKLCEGEKAKLLHLDERLHARVIGQDEAVEAVSEAILRNRSGLSRENAPIGSFLFLGPTGVGKTELAKALAVELFDSENALVRIDMSEYMEKHSVSRLIGAPPGYVGYEEGGQLTEAVRTHPYCVILLDEIEKAHPDVFNTLLQVLDDGRLTDGKGRTVNFKNTLILMTSNLGAEKFRLSAANAKNGEPPQVALADVEADLHAFFRPEFLNRLDEVLVFQSLSKKQIREIVKLKFADLANRAARQDLVLTLSDAALDAIAEGAYQPEFGARPIQRYIERNIERPLSHAILSGTVSAAKPAVVDYKDGMFVVK

SEQ ID NO: 21283 - protein, 433 aa, Fibrobacter succinogenes subsp. succinogenes S85
MRRRLLSEGAKELSYEIREIVKKANQLKALGLPIHWENIGDPIEKKCQVPDWIKDIVVDLVRTNRSYGYCPSKGMLETREFLVKENNKLGGAQINVDDILFFNGLGDAIATIYGLLSMNTRIIGPAPAYSTHSSAEAAHAHTAPITYRLQPENHWYPDLEELENKVKYNPSIAGILILNPDNPTGMVYPLDILQKIVDIAKRYGLFIICDEIYNKITYNGAHAYALAEYIGDVPGIALKGISKEYPWPGARCGWAEYYNRDKDEQFDAFCRAIDNAKMVEVCSTTLPQMTIPRVLGDKRFMEHRKALNEKIGRRSAIINEILSDIPELYFNPTYGAFYNTIIFREGTLNNHQTLKIDNPIIKKKVEEWCSKTTNLDYRFVYYLLGAKGICVVPSTSFCTDLKGFRVTLLEEDEDELRSVFTTIHDAIIEYLHS

SEQ ID NO: 21284 - protein, 633 aa, Fibrobacter succinogenes subsp. succinogenes S85
MGKIIGIDLGTTNSCVAVMEGGKPVVIANAEGFRTTPSIVAFGKNGERLVGHVAKRQAITNPEKTIYSIKRFMGRTAGECSAAEKNMPYKLVGTGSDPVRVQIDDKQFAPPEISAAVLQTMKKIAEDYLGQSVSQAVITVPAYFNDSQRQATKDAGKIAGLEVLRIVNEPTAAALAYGLDSKKSEKVAVYDLGGGTFDISILEIDDGMFSVKATNGDTMLGGDNFDEVIIDWINDEFKKENPGIDLKKDKMALQRLKDAAEKAKIDLSATTSTNINLPFITADASGPKHLDLTLSRAKFDQLTAHLVERSMEPCRKAIKDSGLSLSEIDEVILVGGSTRIPAVQEAVKKFFGKEPNKTVNPDEVVAIGAAVQGAVLSGDSAVKDVLLLDVTPLSLGIETLGGVMTKLIDRNTTIPTKKSQVFSTAEDNQPAVTIHVLQGEREFARDNRTLGKFDLTDLPKKPRGVPQIEVTFDIDANGIVHVSAKDKETGKEQSIKITSSSGLSEDEINKMVKDAEANAAKDKEQRELVDIKNQAEQMAYQAEGQLKEFGDKLPADTKSQLQAAIDDIKAKKDNGTKEEIKAAMDKLQGMISSMAQAAGANQAQPGPQPGASEQPKNDKKGDGPEVVDAEVVD

SEQ ID NO: 21285 - protein, 207 aa, Fibrobacter succinogenes subsp. succinogenes S85
MINFIKSIYSGLCIGLGGTVYLSCDNKILGSFLFGLGLFTILNFGFNLFTGKVGYFVNNKINYWGFLGIVWLGNFIGTFVFAKLIAATRYGAALQAKANALCVIKNGDGFASLLVLGIFCGMLMFIAADGYKTVENQVGKVLIVFLPVMVFILSGFEHCIADMFYFSLAGDFSMTMLKALVAITIGNSIGGGLIPLMQKLNAKSAKA

SEQ ID NO: 21286 - protein, 161 aa, Fibrobacter succinogenes subsp. succinogenes S85
MYSIVETGGFQYKVELGKAYKVPTIDAAVGSELELKSVLLFSGKEVQVGTPVLNDASVKVEVLAHGKEDTIIVFKKKRRTRYERRNGHRQGYTEVLVTELRSGAESAVVDPQVITRNRARVAALAKQKVQNKPLTRKEKIAQGLPKPAKVKKNSLRKAKEA

SEQ ID NO: 21287 - protein, 396 aa, Fibrobacter succinogenes subsp. succinogenes S85
MKTLSDRTQNIAASLTVAIDTMAKQMIADGKDVVSLGAGEPDFGTPTPIQDAAIDAIRAGKTRYTAPVGILDVRKAVAKKLEEENGLHYNASQIIMTSGAKHAVFNALAALINPGDEVIIPAPYWVTYPELVKWLGGTPVFVEAGIEKNFKIDAEDLRKACTPRTKAILLNNPCNPTGAVYSKRELEALAKEIVAQDIYCISDEVYEYFVYDTEFTSAAVFPGMAERTIVINGFSKSHCMTGWRIGYDAAPAPIAKIIGKIQGQATHHPSNVAQYAALGALNMDKSNVHAMQAAFRKRRAYMLERTSFLSTKPRAPEGAFYLFAPVSDYYGKKTPDGKVIAGSIDFCSALLESKGLAIVPGAAFGDDTCVRFSYAASDENLAKACDRFEAFVKELS

SEQ ID NO: 21288 - protein, 333 aa, Fibrobacter succinogenes subsp. succinogenes S85
MFLDEKNIEVRSGRGGDGICSFHREKFVPLGGPDGGDGGRGGHVILQVNEQYTTLLDMGNTHIYKAKSGQPGGAKRCSGASAEDLIISVPRGTIVKDEQGHILTDLTEPGQKWIAARGGKGGMGNQHFATPKVQAPRKCTPGEKGEVRQLFLELKLMADVGLVGFPNAGKSSLVNKISSGRPKVGDYPFTTLEPVLGIVQVNGHSFVVADIPGLLEGASEGKGLGHQFLKHIERTHTLLFVIDGFAENAYEQFKVLKEELKAFHPKLAEKNFVVALNKSDLGIENAIKEFKKHRQKVVITSAVTGEGCAELQQALDAAVPHMHKKSIGWSKKA

SEQ ID NO: 21289 - protein, 555 aa, Fibrobacter succinogenes subsp. succinogenes S85
MEIPESSNFIQDIIVNDLQTGKRDHVLTRFPPEPNGYIHIGHAKSICLNFGTAKKFGGFTNLRFDDTNPTKEDVEYVDSIREDVKWLGFEWKEEFFASDYYDQIYAFAEKMIEMGKAYVEDLTRDEMQEYRGNDAGKPSRPSPYRDRSVEENMKLFHEMRDGKYADGEKCLRAKVDLASPNMNMRDPVIYRIKHCTHHRTGDKWCIYPMYDFAHPISDWIEGITHSICTLEFEAHRPLYDWFLIELGLQNRPQQIEFARLNLTYTMMSKRKLLELVQTKAVLGWNDPRMPTVCGFRRRGFTPSSIREFCSRIGVSKADSMVDVNLLYFCIREELNQTANRVMAVIDPVKLVIDNWEAGKVEMIEVENNPNDPNAGTRKVPFSGELYIEADDFMEEPPKKYFRLKPEGEVRLKGAYFVTCKSVEKDDDGKVKVIHCVYDPLSKGGESPDGRKVKGTIHWVSAAHAVDAEVRLIDNLFTLEDPAQVPEGEDWHDYLNPNSMVIKQAKVEPALADAKLEDRFQFMRQGYFCLDSEDSKPGHLVFNRTVGLKDSFNPTK

SEQ ID NO: 21290 - protein, 373 aa, Fibrobacter succinogenes subsp. succinogenes S85
MSYFDYTANTPACEEALQRFCEVERRFIGNANSNHEAGHAAKAFLAQVTDSIAKLLGVNPDEIIYTSGASESNNTAIRGIVQAKHHVGKHIITNPLEHSSVSATLTALQEAGYEIEMVKIGTDGKIDLEDLRSLLRKDTVLVTVNAVDSELGTVQPLESISKIVREFPNCSLHVDATQAIGKTPINLNLADTASIGAHKFYGLSGSGFLYKKSGIVMEPLIYGGASTTIYRSGTPTLALDASLETALSLAMEHFEERFARVKELRKILQEKLCGYPKVRINSPADAVPHILNLSVAGVRGNIFQKALSDKGIYVSVKSACSVDALPSRAVFAVSRDRKNALNSWRISLSHLTTEKEINEFMAAFDSCYKELCK

SEQ ID NO: 21291 - protein, 118 aa, Fibrobacter succinogenes subsp. succinogenes S85
MQLELLKAKIHRATVTDANLNYEGSITIARDLMDAAGILPFEKVGVLDVNNGSRLDTYVIEGKAGSGVICLNGAAARLVQPGDLVIIVAYATMSPEEAKTWKPTVIRVNGKNEIIEKI

SEQ ID NO: 21292 - protein, 249 aa, Fibrobacter succinogenes subsp. succinogenes S85
MLSIKNLKASIEDGTQILKGINLEVKPGEVHAIMGPNGSGKSTLSKVIAGHPAYHVDGGSVELDGKNLLEMEINERANSGLFISTQYPTEIPGVNNVEFLKMALNSKRAFLGQPEMSDEDFKKLCEEKMDLLEMDERYRERGVNDGMSGGEKKRNEILQMAILDPKVSFLDETDSGLDIDALRIVANGINHIMSPEKAVILVTHYQRLLDYIKPTYVHVLRHGKIILSGGPELALKLEDQGYDWIEEAK

SEQ ID NO: 21293 - protein, 634 aa, Fibrobacter succinogenes subsp. succinogenes S85
MSDIHAKESVKQYLTGVVSTITPEIVRSIKRGYTRKDFTSDLMSGLIVGILALPLAIAFAIASGVGPEQGLYTAIIAGFIISLLGGSRFQIGGPTGAFIVIVYGIVSQYGYDGLASATLLAGIFLVIFGLAKFGAIIKFIPYPVTVGFTAGIAIIIALGQVPNFFGLTFAGADPADAVGKIKLYVSSFGSMNVYSVIVGVVALAVCILWPKITTKVPGSLIAIIVATVMVKVLGWDDPVNGHGVVTIGMKNHIPSGFPVPHLPNISLEMMQKVFQPALTIAMLGAIESLLSAVVADGMTSTKHRSNTELFGQGVANILSPIFGGIPATGAIARTATNIRNGAVSPISGLVHAVVLLLIMLVLGKYAEMIPMAALAAVLFQVAFNMCGYRSVIKMFKAPKSDVTVMLVAFFLTVIIDLTVAIEVGVLLAAVLFIKRMSDVAEVEAVSSALKDDDDEAARNTLGRQVPKGVLVYELAGSLFFGAVDKFKETMNRISEKPKILILRMRSVSSIDAAGINMIEDLLKRCKSEGTQLLLSGVHAQPVVALTRAGVLAQLGEENALGNIDAALNRARELLGLPIVDASQEEQKAPTVSWEKSLDKPWMPEESNAAVAEETPEVIAERMMDEPIKKIEDRK

SEQ ID NO: 21294 - protein, 422 aa, Fibrobacter succinogenes subsp. succinogenes S85
MAKTESKKKVVLAYSGGLDTSIIIPWLKETYDVEVIAFAADLGQNDFPNAKALEEKALKTGASKCYVLDLKKEFLEEYVWPTVRAGAKYEGTYLLGTSFARPLIAKYQVKIAEKEGAYAVAHGATGKGNDQVRFELTYAALNPKLEVIAPWKDPRWTFHSREDAIDYAAAHKIPLNGISKKKIYSEDGNLWHLSHEGGVLEFPEQEHKYEFLKHTNTYEKAPNKADHVTISFEKGNPVAINGKKMGAVELLEFLNEIGGKNACGLLDIVENRLVGLKSRGVYETPGGTLLYKAHECLQQLVLDKETLFEAQKMSMTYANLVYNGQWFTPLRQAMDAFFNEVNKVVTGEVTLKLYKGNIIPAGIKSPYSLYDMGLGGFTDVDMYDQKDATGFIRCYGLPLKTRALLLGKKTNVDFGGVPSLKK

SEQ ID NO: 21295 - protein, 324 aa, Fibrobacter succinogenes subsp. succinogenes S85
MPKILHTYRYTGKPWEILKSVVPAGFEIKTLDEPTQEQLIKEAVDADYFLVSGRLLINEEVLTAAKNLKMIQRTGVGTEMLDKAAIKARKIPVYVNAGINARSVAEHTVTLILNCLKNIPLISSNVKKGVWKKQETGVSCNELFGKTVAMVGMGNIGRITAGILHAFGANIIYTDIFRQNEDVEKTLGISFRASFDELLPDADILSFHCPLTADNQKILNAVALEKMKDGAIVVNTARGKLIDEDALYKALVSGKIRSAGLDVHYEEPMLADDPLKTLDNVILTPHIAGLSFETFQGMMRGAVENIAAFDRGELDRIKNKKFVI

SEQ ID NO: 21296 - protein, 572 aa, Fibrobacter succinogenes subsp. succinogenes S85
MANKTLSGAEVIIECLKREGVDTIFGYPGGSAIPMFDAILDSSIKVVLSRHEQGATHMADGYARQTGKVGVALVTSGPGATNTFTGIYTALMDSSPIVVLTAQTTTPNLGKDAFQECDTSGMTFATVKHSYLVKDTNDLPRVMKEAFHIARSGRPGPVLIDLPKDVTAGPCTAPFTDQMDLPGYKIPTYASTESVEKAAEYLKNSKKPLLLVGHGAMISGAHRQVKELAEKLGAPVCCTMLGLGAFPTDHELSLGMLGMHGTIYANKAVLECDLILSIGSRWDDRITGKLSEFCKNAVKMHIDIDPAEEGKVLQPDVFMCGDAKLVLEQLLPMVNKLDTADWIKTCQTWKKRYPLTYAKQGGLRMQHIVATVSELTQGKAIVTTDVGQHQMWVAQFFHINYPRQLHSSGGAGTMGFGFPAAIGAAFGNETGWPVCSFSGDGGFQMTEAELATAAIHKLPIKIFVMDNKYLGMVRQWQELFYDHRYSSVDMRGNPDFVKLAEAYGIPGLRIKRPADAERVIQKALDYNDGPILIHCECEKEDNVFPMIPAGAPITSMITEQPKTQLEKPTGST

SEQ ID NO: 21297 - protein, 696 aa, Fibrobacter succinogenes subsp. succinogenes S85
MNQPKKPAPFKNKNFIIVLIMLLMLFVMFPMTGKDSSKDITRTEFLAMMGDSTKIITELTLQKTPDGVIIEGAYEMSPEEIAEAKKSQSALARFTRNSTDTKNKHFKSHMLDISNEQISTWEAFKGVKVKVIHESTTWIDTLVAFLPAILLIAFFYIMMSRQMGGGGKSPFSFGKSQVRQLNSQKKTTFNDVAGCDEAKQDLQELVEFLKDPKKYDKLGGRIPKGALLVGPPGTGKTLLARAVAGEAGVPFFSMSGSDFVEMFVGVGASRVRDLFETGKKNAPCILFIDEIDAVGRQRGAGLGGGHDEREQTLNQLLVEMDGFTANEGVILIAATNRPDVLDKALLRPGRFDRQIVVGLPDLKGREEILKVHLKKRKVPLGDDVDVKAVAKGTPGLAGADLENLVNEAALLAARFNNKKVTMLDFEEARDKLSMGAERRTLLMTDEEKRHTAYHEAGHALMTLLCKHSDPLHKITIIPRGRALGVTMSLPERDQVSYSREYAEERIMIMMSGRLAELIFFNHQSTGASNDIQRATELARKMVTEWGFDEEIGPVCYSRADGEVFLGREISKPKEMSEMMAEKIDNAINNLIKRMDNKARELLEENKDKLTDLAEALFEFEVLDREEIDKVMAGEKLTGTKKSRQYKAMEELAKKREEENTPPPDPGDQPPVAPIADVQPAPAAGNETATNSVKGNE

SEQ ID NO: 21298 - protein, 546 aa, Fibrobacter succinogenes subsp. succinogenes S85
MNTAEVLIKSLESEGVKYIFGIPGEETLELMEAIKKSSIKFITVRHEQGAAFMADVYGRLTGKAGVCLSTLGPGATNLVTGVADANSDGAPLIAITGQVGTERMHLTSHQYLDLVNMFTPITKRSKQVVRPDTVNEIVRIAFKYAEMEKPGACHIDLPCNIAAMEVEGEVAQTPLKHHRENTVYASTDAILAAGGVFANAKRPVVLVGHSAVRNHASEALRAFVSSSKIPVVCTMMAKGVIPTCEKYFMGCIGLPQRDYPNIVMEQADLVIAVGYDVVEYAPAKWNPNGDKMIIHIDETPNHVNKFYQPDEEIIGDISASLDALCSVCPNSWEPEWAMQIRAMMVAEHSRYDHDTSFPPTPQKVLHDIRLVLDEEDILISDVGAHKMWIARQYNCDHPNTCIISNGFATMGIAVPGAIAAKLLNPKKKVLAVTGDGGFMMNSQELETAYREHIPFVTLIFTDGGYGLIKWKQEERYGDSYAVEFTNPDYVKYAESLHLKGYRIERTEDLPSTLREAFRQDVPSIIECPVDYSANMELSQYLKNLKI

SEQ ID NO: 21299 - protein, 248 aa, Fibrobacter succinogenes subsp. succinogenes S85
MEPEVTTKNFEVRFSDCDHHSRLKLSNLFLFMEETAIADAEQNGFGIWKMMKAGYTTVITRLKIRLLHHPVWGEKLSISTWAKDIIKDKVCLKDYSILDAQGHSIAQATSSWLLVNMKTGKAENPANAPYPIPLIQGKNALPEMMDILDPQVDPQIVATEIAKYSDLDMNKHVNHCRYVDWVTNSLDPQELKSRRIRSIQINYISQIPLGGKVNIVRFKNTNHHAYIFGTNADDMTQCHFQARIGFAD

SEQ ID NO: 21300 - protein, 616 aa, Fibrobacter succinogenes subsp. succinogenes S85
MNKNTLIGSILIAVIVIWWMAVNNANAEAQAAARAAQAKAKTEKQVAADSAKSLVIPSKTPEIKAAPVLGGTDERRETKDESVDSAKVAPKAEIAERSVTVETDKFIMTLTNKGAKVKSIIVKALPDSTGKFPELIQDTTLGAFDLKLDNADLSEAMFELGNTPAKIVVNDSAKVQFAFQDANGNQVIRSYGFTKEGPAVRQENKFIGFQPTAYELAWKGGLKETEDIPKSKGIMGIGGGGTYYFSEVVFNDRYSVEREMPREQASFNATEGKIVWAGLRRKYVAMTVQFDEAVPAVLKTKPMKVEDSEVDPGTYKLTIADDFRGAQSLSYDLMILPLKWDELSALNKDYEKIIVSGWSWCGADVWFVWICKMLLKLLNLFYSIIPNYGVAIILVTLIVRGVTTPFTVKQIKSTRGMAALKPQLDEINVKYRTDPQKKQAAMMELYSKNNINPLASCTGGCLPMLIQMPIFMGLFFVLGRAIELRGAPAFLWISDLSRSDVVWNGISIPIIMPSGLAILPWLMVATTYFQTKVTMGANAGMDPAQQKMMVWMMPAMMLLFSAVMPSGLVLYWIIGNIWSIAQYKYIYSKFPPVNGNKPAASSKLKGKNVKDAEIVK

SEQ ID NO: 21301 - protein, 421 aa, Fibrobacter succinogenes subsp. succinogenes S85
MNEVATVATVNDAIFMTENIWIMISAMLVFIMGLGFACVEAGLVRAKCSANVAFKNIAVPAIGITMYALLGFGLMYPGTFNGILGFAGFGIGDWANPANFTAAYNGHFTLFTDWLFQAMFAATAATIVSGAVAERVKLNSFLVFTIAYVALVYPVVGSWTWGGGWLSTFGAHGFHDLAGSTLVHSVGGWAALAGVMILGPRIGKYVGGKVHAIPAHNIPLATIGVFMLWFGWWGFNAGSALNGDPKATSWILVTTNLAAVAGIITATLTSWIVSKKPDATMALNGCLAGLVAITAGADVVTPLSSWIIGAIAGVLVVGAVFMFDRLHLDDPVGALSVHLVNGVWGTLAVGIFDITGDYTLGTQAVGVLAYAVPCFAAASLIFFIIKKTMGLRVTEKQELRGLDQAEHGQEAYSGFQIFSNM

SEQ ID NO: 21302 - protein, 773 aa, Fibrobacter succinogenes subsp. succinogenes S85
MGKDLKEMALQYHSMGKPGKIEIVPTKPHSTQTDLGLAYTPGVASPCLEIEKDQNLAYEYTGKGNLVAVISNGTAVLGLGDIGALAGKPVMEGKALLFKIYAGIDVFDIEINEKDPKKFIEIVKGIAPTFGGINLEDIKAPECFEIEDTLKAELDIPVMHDDQHGTAIISSAGLLNAIEVAGKSIRNVKMVVNGAGAAACACTRLYLSLGLKKENLVMCDSKGVIRKDRKGLTEAKAFFATERTDIETLEDAMKGADVFVGLSKGNILTREMVRSMADQPIVFALANPTPEISYEEAMASRGDLIFATGRSDYPNQVNNVIGFPYIFRGALDVRATTINEHMKHAAVRAIAALAHKPVPDVVNIAYNSQRFTFGKEYLIPKPLDPRLLTEVSIAVAKAAIESGVARKPITDWDAYYDRLRDMMGYDNKLIRQFSDTARSNPKRVVFAESNLNMLKAAVQAQAEGIAHPIMLGNPERIQMIAQREQLDLTGIKIVNPRSPEEFERRRNYAAIYAEENGRNGVTFEEARDDMFEPNHFGMMMVKVGDADALISGGYSKYSETIELAKEIIGIRPEYKHFGAMHILSTKKGTFFLADTLVNRDPDAETLVDIVKLTHDAVRFFAHEPVMAMLSYANFGSDKEAARGTVNKVREAVKTIHEQYPDYVLDGEMQVNVALDKDLRDTKYPFNKIKGQTVNTLIFPCLSSANTTCKMLLEMGVGESIGPVQMGLNKPVHFTDSDASVHDIFNLTVAAVIDAIVQEKKDEEKNKKKFDKIW

SEQ ID NO: 21303 - protein, 467 aa, Fibrobacter succinogenes subsp. succinogenes S85
MNRVYLVATAASNMEAKVQELVDAVTKAGLIATVYKPLEVFNAADSVAEIKAGKSAVLMEKICADFLKQDFDDVDAVVVEGATGMNDVIAHKFNDDLASALDAKIFADGEDAELFCPKRLLRCEKCVAGDLAAPAAERRVSQAMFRASLLSKASKCVKRIVLPEGSEPRTVQAACLAVERNIAVPVLIGKKADIEATAKSVGVKLPANIEIIEPSAELAEKYVPTLVELRKAKGMTPESARAALSDNVMLATMMLKFGEVDGLVSGAIHSTADTLRPALQIIRTAPGVKSVSSVFFMCMKDKTYIYGDCAINLNPLAEELADIALQCDDTAKAFGLPSRVAMLSYSTINSGKGPDADLVVAATAAAKAARPEMLIDGPLQYDAATVPSVGALKAPNSPVAGKATVFVFPDLSAGNIGYKAVQRSAHGTIAIGPMLQGLAKPVNDLSRGALVEDIVYTIALTAVQAQA

SEQ ID NO: 21304 - protein, 439 aa, Fibrobacter succinogenes subsp. succinogenes S85
MSRIVCKFGGSSVADAGQFKKIKAIVESDKNRKVIVVSAPGKRNPKETKLTDLLYSTYDLASKGLDFSTPWNLIRQRYDEICKDLGLEDKLTEDLDSLEDKLKNHPESVSTDFLVSRGEFLCARLMAKYLGANFVDSYPLITFDDKYRIAPKTYEEIAKALGDENQLYVLPGFYGSNLRGEVKTFSRGGSDITGAILANGIDAAKYENWTDVSGMLMADPRIVESPLPIEYVSYREIRELAYSGASVLHDESIAPCRAKKIPINIRNTNRPEDAGTIIGPTPENAKLPITGVAGRKGFSMIYIEKSMMNKEVGFGRRVLAVLESEGLSYELCPSAIDSMSIVVDSKALDAVQDVVLEDITQQMRPDRIKIFPGIALIATVGHGMTNKIGVAAKLFTALAENKVNVRIIDQGSSQINIITGVDEADTEKAIKAIYAAFVK

SEQ ID NO: 21305 - protein, 393 aa, Fibrobacter succinogenes subsp. succinogenes S85
MRVLVLNCGSSSVKFAVIDTKTQESIASGLVENIGVNGHTKAKGPEGKIDFNFDCPTHAEAVDQVKKFLDAQKLTDTIEAIGHRVVHGGKYIKSEKVSQEVIDYIRSITLFAPLHEPAHATGMECATKFFPGLPQVAVFDTAFHQTMPQKAYLYGIPYKFYENDGIRRYGAHGTSHRFVTAEACKVLGTKPEETCLITAHLGNGSSCSAILNGQCVDTTMGFTPLEGLIMGTRSGSLDPAILFYIAKKYGEEYGTIDKLDHLVNKESGLLGLSGLSNDMRTLTQAASEGNKRAQIALDVFCYRLTREIGGIAMALPRIDAIVFTGGIGENSFYVRKQALDNLKLLGYQVDEERNLKSGKESNHLITKDGTPKAIVVATNEELLIALDTEALVK

SEQ ID NO: 21306 - protein, 135 aa, Escherichia coli
MGSSHHHHHHSSGLVPRGSHMSTTIEKIQRQIAENPILLYMKGSPKLPSCGFSAQAVQALAACGERFAYVDILQNPDIRAELPKYANWPTFPQLWVDGELVGGCDIVIEMYQRGELQQLIKETAAKYKSEEPDAE

SEQ ID NO: 21307 - protein, 247 aa, Rosa hybrid cultivar
MGRGRVQLKRIENKINRQVTFSKRRTGLLKKAHEISVLCDAQVALIVFSNKGKLFEYATDSCMENILERYERYSYAERQLVEPDLESQGNWTFEHARLKVKVELLQRNLRHYLGEDLDSLSIKEIQSLEQQLDNSLKQIRSRKNQLMHESISELQRKEKAMQEQNNFLSKKIKEKEKNVAEAQEVHNWEQQQQQQNHGLNLVAQAPLPCLNMGGTQQDDQFLQVRRNQLDLTLEPSLYSCHLGCFAS

SEQ ID NO: 21308 - protein, 247 aa, Rosa hybrid cultivar
MGKGRVQLKRIENKINRQVTFSKRRTGLLKKAHEISVLCDAQVALIVFSNKGKLFEYATDSCMENILERYERYSYAERQLVEPDLESQGNWTFEHARLKVKVELLQRNLRHYLGEDLDSLSIKEIQSLEQQLDNSLKQIRSRKNQLMHESMSELQRKEKAVQEQNNLLSKKIKEKEKNVAEAQEVHDWEQQQQQQNHGLNLVAQAPLPCLNMGGTQQNDQFLQVRRNQLDLTLEPSLYSCHLGCFAS

SEQ ID NO: 21309 - protein, 257 aa, Rosa hybrid cultivar
MGRGKVQLKRIENKISRQVTFSKRRTGLLKKAHEISVLCDAEVALIVFSTKGKLFEYATDSSMEGILERYEQYSYAERQSMGVPASESQGNWSMEFPKLTARIEILQRKIRNYTGEDLDPLSLRELQSLEQQIDTALKRVRARKNQVMHESISEMQKKHRTLQEQNNSLAKKLKENEKLLQEEPNNNQQPNPSTLVLMPPLQATSPPALLSSLTIGGAFQGRGDAMDEDAEDHQGSAQTRPASNTLMPPWMVRHLNK

SEQ ID NO: 21310 - protein, 174 aa, Calluna vulgaris
EVNHHSAGLELEQSSYREYLKLKGKHEALQRHQRQLLGEDLGPLNIKELENLEHQLEGSLTQIRSIRTQSMLDQLYELQTKEQLWVEANKGLERKLDDIYRENHLQSTWACGEQSNTFGNPQHHPQSQGFFQPLECNPNLQIGYNPQVSNQLTPAATTHGQGQNVSGMIPGWML

SEQ ID NO: 21311 - protein, 327 aa, Sorghum bicolor
PTPVEEEEEEEEEEEEEGGGRSSRQQRIVSSHLMVSSTSHSQNSNNSPPPPPPVHLSTGIVGFLARRRAAMATTHHPSSFQFQQPRVAAAPLDSPGSSTSSVDSSAPWSCMAQAQQQHRAPPAPVLPFDSNDTDEMALLDMIAGQGQEEAGLVLATSKQEEAEANNGTGGAVGPGAGAGAGGRPYRGVRKRPWGKFAAEIRDSTSNGVRVWLGTFDSAEAAALAYDQAAFAMRGAAAVLNFPVERVRQSLEGMGMGTGTDSGSPVVALKRRHSMRMRVRRPASRSRKAKAATRSEVMELEDLGADYLEALLGATEESESLCRTHHSI

SEQ ID NO: 21312 - protein, 155 aa, Sorghum bicolor
MQMTRLEDLTPAPSMTLPIEHSSRPTLGFPLGTALLLLVIFALSGMFSCCYHWDKLRALLRSRHPALFQESEHTAISIASTPSKTTSDHKLEKVGKECGLPVIMPGDKIPKFFARPCPHETCLPEADKTEVPLETKCSDHEPSVSICIHESTVSC

SEQ ID NO: 21313 - protein, 504 aa, Sorghum bicolor
MSEAEPSPAESSVLVQGDTAPLVCALQSTARQDVSCFHFPGHNRGKAAPSSLSKLIGPGAFLHDLPELPELDDLFSPKGVILDAQIRAAQLFGSSKTWFLVNGTTCGIQASVMATCSPGDYLIVPRNCHISVISALVLSGVVPKYIIPEYNSRWDIAGGIAPLQLDEAVKELEEDGKRVGAVLVTSPTYHGVCSNVQGIVSVCHPRGIPVIVDEAHGAHFRFHDRFPSTAIEQGADLAVQSTHKVLCSLTQSSMLHMAGDLVDVDKVSQCLQLLQSSSPSYLLMSSLDAARDQLSKNTNIFDEPLAIASETKYQLMRIPGISVLDLPCFASDFPAIDPLRITLSASDLQLSGYEADDILYEDHQIVSELVGTRAVTFAVNLGTRVQDVDKLVQSAKHLSEKYFFANSSKHMEENRVCGPLENISVHLTPREAFFTKKRRVRIEDSLGEICGELICPYPPGIPVLIPGEVVTHDSLSYLMSVRRQGITISGAVDAELNSILVCNL

SEQ ID NO: 21314 - protein, 470 aa, Sorghum bicolor
MAAPCHLHLHLHLPGCPQTLALPLPSPRGFSARPGLRSRSRLRLRPVAALGPADAGDLLGRVEAFLYTVADAAVSAADPVVTAADGGTKEAAGDWLSGITNSMETVLKNLAKVESALAMRSLQPQVKAIQERYAGDQERIQLETARLYKLSGVDPLAGCLPTLVTIPVWIGLYRALSNVANEGLLTEGFFWIPSLAGPTTIAARQNGQGISWLFPFTDGHPPLGWSDTLAYLVLPVLLVISQYISTQVMQPPQSNDPSQQGAQAVTKFLPLLIGYFALSVPSGLGLYWLTNNILSTAQQVWLQKLGGAKNPVKEYIDVLSREESTTVQKNESTVQIEPLPKLSKPQPSQEPKPSGPQRGERFRKLKEEESRRKEVLGQAKQSEQSSSESSFLDETQNSDMSSGDKKDQQESHENGPIVTNSNGGVNHSRNEKAQNLSSEKEAADDHSSVSKPVSPDARKLTDQENGNDAV

SEQ ID NO: 21315 - protein, 173 aa, Sorghum bicolor
MYPAKPTAAAASAPVVGMAPPVTGVPISSPGPVAATEWSSGLCACFDDCGLCCLTCWCPCITFGRIAEIVDRGATSCGAAGAIYTVLACFTGCQWIYSCTYRSKMRAQLGLPDVGCCDCCVHFCCEPCALCQQYRELKARGFHPDLGWDVNAQKAAANAAAGMYPPAAQGMGR

SEQ ID NO: 21316 - protein, 158 aa, Sorghum bicolor
MYPSKPSEQAGAAPVTGIPVGGPAAAASQWSSGLFDCFDDCGLCCLTCWCPCITFGRMAEIVDRGATSCGTAGALYTLLAYFTGCQWIYSCTYRAKMRAQFGLPDTPCCDCCVHFCCEPCALCQQYKELKARGYDPVLGWDQQGAAAMHPPAAQGMGR

SEQ ID NO: 21317 - protein, 382 aa, Sorghum bicolor
MLGPLLRLLSACGGVWPTSPAPGAAGAAASASSSSGDDSEGRDGLLWWRDLARCHAGDVSVAVAQANQVLEDQCRLDSAPPLGTVVGVFDGHGGPDAARFACDHLVPNLREASSGPRGVTADAIREAFLATEEGFLALVSSLWEAQPDIATAGTCCLVGVVHNRTLFVANLGDSRAVLGKKVGRAGQITAEQLCSEHNANQEAVRQELKAQHPDDAQIVALKHGVWRVRGLIQVSRSIGDVYLKHAKYNTERIKPKFRLSESFSKPLLSADPAIISRNLEPNDCFIIFASDGLWEHLSNQEAVEIVHNHQHAGSARRLIKAALQEAARKREMRYSDLTKIDKKVRRHFHDDITVIVLFINHDLLLKGAPQGQPLSIRCALDY

SEQ ID NO: 21318 - protein, 1131 aa, Sorghum bicolor
MSSSRPAHSSSSSSRTRQSSQARILAQTTLDAELNAEYEESGDSFDYSKLVEAQRSTPSEQQGRSGKVIAYLQHIQRGKLIQPFGCLLALDEKSFRVIAFSENAPEMLTTVSHAVPNVDDPPKLGIGTNVRSLFTDPGATALQKALGFADVSLLNPILVQCKTSGKPFYAIVHRATGCLVVDFEPVKPTEFPATAAGALQSYKLAAKAISKIQSLPGGSMEALCNTVVKEVFELTGYDRVMAYKFHEDEHGEVFAEITKPGIEPYLGLHYPATDIPQAARFLFMKNKVRMICDCRAKSVKIIEDEALSIDISLCGSTLRAPHSCHLQYMENMNSIASLVMAVVVNENEEDDEPGPEQPPQQQKKKRLWGLIVCHHESPRYVPFPLRYACEFLAQVFAVHVNKEFELEKQIREKSILRMQTMLSDMLFKEASPLSIVSGSPNIMDLVKCDGAALLYGDKVWRLQTAPTESQIRDIAFWLSEVHGDSTGLSTDSLQDAGYPGAASLGDMICGMAVAKITSKDILFWFRSHTAAEIKWGGAKHDPSDKDDNRRMHPRLSFKAFLEVVKMKSLPWSDYEMDAIHSLQLILRGTLNDALKPVQASGLDNQIGDLKLDGLAELQAVTSEMVRLMETATVPILAVDGNGLVNGWNQKVAELSGLRVDEAIGRHILTLVEDSSVSIVQRMLYLALQGKEEKEVRFELKTHGSKRDDGPVILVVNACASRDLHDHVVGVCFVAQDMTVHKLVMDKFTRVEGDYKAIIHNPNPLIPPIFGADQFGWCSEWNVAMTKLTGWHRDEVIDKMLLGEVFDSSNASCLLKSKDDFVRLCIIINSALAGEEAENAPFGLFDRNGKYIECLLSVNRKVNADGVVTGVFCFIHVPSDDLQHALHVQQASEQTAQRRLKAFSYMRHAINKPLSGMLYSRETLKSTGLNEEQMRQVHVADSCHRQLNKILADLDQDNITDKSSCLDLDMAEFVLEDVVVSAVSQVLIGCQGKGIRVACNLPERFMKQKVYGDGIRLQQILSDFLFVSVKFSPVGGSVDISSKLTKNSIGENLHLIDFELRIKHQGAGVPAEILSQMYEEDNKEQSEEGLSLLVSRNLLRLMNGNIRHLREAGMSTFILTAELAAAPSAVGQ

SEQ ID NO: 21319 - protein, 368 aa, Sorghum bicolor
MATGEEHVAAAAAAVEETPEKKETSTTELLAPSGWTKKLVLTRVGRFEVLFVSPTGEEIKSKRQLTQYLKAHPGGPASSEFDWGTSDTPRRSARLSEKVKATWNPEGEKTPKRGRSSSKRGKKEEKEDVNEAGEDGASEEGKGTDVEMKDAENAEDEKKEAPSADAAEKTEEGEDKKEEAPAVDVAEKTEEGEDKKEEAPAVDAAEKTDDKEVAPVVDSAEKADDKEVAPAVDAAEKTEQSTEGQAQPNNVAAPESEDKGDGKPAESESAPPAIVDEEKKEEKTENGQAAESVVPSLASSEGEKKENGGATEPAAPLVAETKTDAPPAEAEKGAENSGQVNTAPQEPTAANCDNKGQIQPGASAMRCT

SEQ ID NO: 21320 - protein, 356 aa, Sorghum bicolor
MGGLRSRILRTLQSFPNAAAQSSNLLLALPLGAGTSPQPPAAPCGGHLQEPAPQEPPLVDEAGAASEVPGGGGDDDDDKENVSPGVTPRKAKKMKLSSDHHGEEPADGATRYRRPDLASATLFDPDLLAAFRRAVDAYAQALEAAKRRDDDDIDDGEDGDGDGGGGGGEGGGPGVADPLEAFELRCPPGGERAVVLYTTSIRGVRKTFEDCARVRRLLEGLRVAFLERDVSMHAPYREELRALLMCCGQGQENDDGGGARAFPLPPRLFVDGRYLGGAEEVVALHERSQLRPVLRRAARRGAGEGPCAVCGGAWFVVCVGCSGSHWLHDAGGAAAASRVPCSACNENGLMPCPLCS

SEQ ID NO: 21321 - protein, 595 aa, Sorghum bicolor
MAVGGEGVRQRQRGCSCTKADFFPEESFSSWSAYGRALRSTVSRLADRVTSRSLETTELHEVRARSGADMKRDLTWWDLAWFGVGAVIGAGIFVLTGQEAREDVGPAVVISYVVSGVSAMLSVFCYTEFAVEIPVAGGSFAYLRVELGDFMAFVAAGNILLEYCIGGAAVARAWTSYFATLLNHQPSDFRIHASGLDANYSELDPIAVVVIALVCIFASASTKGTSRFNYVLSVVHIAVIIFIIVAGLTKADAANMRDFMPFGVRGIFSASAVLFFAYIGFDAVSTMAEETKNPARDIPIGLVGAMTLTTALYCVLAVTLCLMQPYSSIDADAPFSVAFSARGMDWAKYIVAFGALKGMTTVLLVSAVGQARYLTHIARTHMMPPWLAQVHPRTGTPVNATVVMLVATAVIAFFTDLGILSNLLSISTLFIFKLVAVALLVRRYYVAGETTTANRNKLAACIAAILATSTATATCWGVDINGWVPYAVTVTAWFVSTVCLWAFVPQARAPKLWGVPLVPWLPSASIAINVFLLGSIDSKSFMRFGYWTAALLVYYLFVGLHASYDTAKALAAESAIAKVENGDDKPARGAVHNGV

SEQ ID NO: 21322 - protein, 239 aa, Sorghum bicolor
MALARTASSSLLLLLVLSCWCGATTARPAPTSDAAGTGAGAGAGFVKSWCAGTEYPALCDATLASYAAEVGTSAARLSWAALTVTLDGARDATAAMKGMAAAGHLAPVAAEAARDCVSMLGDAVDMLRQSVETMARLGEEEEEKQQGQPGSSSRRNVRFQVDSVQTWASAALTDDDMCMEGFKGEAAVVREAVRGHVVGVAHLTADALAIVNAMGKSMGVDICRGSCKSTPTPPPATAP

SEQ ID NO: 21323 - protein, 223 aa, Sorghum bicolor
MARSRALLLFLLALSCCWSWWCGAVVVTARPTPSTTTTAGGGGGGGFIASWCAGTDYPALCNATLAPYAAEVGASPARLSLAALTVTLGGARKATAAMKAMAAGASRSSPVAAEAAEDCVGMLEDAVGLLRQSVEAMERIGKEEEEPSGSSGQQGGSGSSRSVRFQVNSVQTWASAAMTNDDMCVEGGQAAVVREAVRGNVAGAMHLTANALAIVNAMAKQIS

SEQ ID NO: 21324 - protein, 720 aa, Sorghum bicolor
MKIPFVSKRTHRSSEAAGPSNPPPAVPQQPRSPARSASSSPPGAVTGAAGEDFISQEEEYQMQLAMALSASASVLGSGGAGDPDGEQIRKAKLMSLGSGESGAAGDRGGIDSPESLSRRYRDYNFVDYNEKIIDGFYDIFGLSAELSRQKNIPSLAELQMSIGDLGFEVIVIDHKFDNALREMKEVAQCCMLGCVDISVSVRRIAEVVAEHMGGPVIDANEMFTRWLGKSIEQRTSHQTSLLPIGRIDIGLSRHRALLFKILADTVGIPCKLVKGSHYTGVEDDAINIIKMGNDMEYLVDVMAAPGTLIPAYFFNSKGTSLKPHQTLIQNQSNMDNEPVALHSECKHNQLHMPSNINWVSGNHSGYEKTTASSAQDPWAAMLPVSAGCSASAPCALTTQQPSDQTLSAGALSKQKEDMELLPDPQDNVSTKIFSGLNPVRAIGSGKSSVALKRLENRNNEFQRRRENVAPVPARSQQPLVIKNWSAFNDISNNKQYNFAEGLVPHRNTVDNAPSSSQVGWSAAQHYNSNAVEHNNKSYVAPVHKYNNGTIVTSDVTTASTSTERLDGSNMEAASDYDMIGTPSVNTSCMYGIGSVVIKGPCGDVEKCPMHSRYDSQLSVNADGFGLQVNENKENYGKPDHKQLYPDPRKSSERSMGAPKQHLGSVSPSQVGSNRVGIVLEDVSECEILWEDLVIGERIGFGSYGEVYHADWNGTVSSFAF

SEQ ID NO: 21325 - protein, 254 aa, Sorghum bicolor
MEQEEVGLALGLSLGSGHHQQLKEQPPPSSHPCALLEPTLSLSSLPAKDGLTTTPMRRIAAVKRELQVEEDDEATDRALIYSVASSAVVTADDDEGCNSRKKLRLSKEQSALLEDHFKEHSTLNPKQKAALARQLNLRPRQVEVWFQNRRARTKLKQTEVDCELLKRCCETLTEENRRLHRELQQLRALSHPHPAAAFFMPAAAALSICPSCERIATGASAAATTTGADRPNKAGGGPVRAPHLFSPFTKSAAC

SEQ ID NO: 21326 - protein, 435 aa, Sorghum bicolor
MAGWTNSTGSGSGSGGGRGSGGRGFMNLHYNNDMFHDSTNAGGGRGRFIGGRSRGRPPQQHHYRFRRVDAVHRDSPPASLSDQQAASSNSSRHARLTHPISTADKSSTSGTAAPPSNREPDDKAIRNAANFECNVCFDIAAEPVVTKCGHLFCWECLYQWLHVHSHHRECPVCKGQVADDAIIPIYGRGGSAASVNNAPPRPTGARVESSRQQQPTLRPFEFPSLNMNPRMTSLREAFLSLMTNSIVDVEMDNSDAMTYFDDGEFYPGVNELDMEVDRYGDPDDDEVYEYDYHFGGVPLFGSAGTEASNPSSSQAHADMINIRDYTVSTTTGGYHHQEFGYSGTRPNYNRGRRGRRNRSRASTDHLLSADEMMVMPGSSGFVHNNNGSSSNVSAGAAFQPNHGWTERRGRSNRNSNSGGGRGGMQDRRRQRTHYN

SEQ ID NO: 21327 - protein, 298 aa, Sorghum bicolor
MSASASSAACRVCGGGVGECACHHGHGGIGGGARCGVAVADLNRGFPGMWHHQHQPEEEPGGVVVGSGAAAAAAGLHEFQFFGHDEDHDSVTWLFNDPAPHLHRGPAPAATVGNGVAAEAAEQPRAPPPLFDGYAHAHAPYGQLPGHGLTFDVPLGRGGEVQASAAVLEAGLGLGGGGGGGGSNPATTSSGATIMSLCGSTFTDAASAVPGDAANGSASGADPAVDREAKVMRYKEKRKRRRYEKQIRYASRKAYAEMRPRVKGRFAKVPDGDAPAPPAPAAAAGYKPGRLDLGWFRS

SEQ ID NO: 21328 - protein, 388 aa, Sorghum bicolor
MPPAPLPPAAQHQKQQRPPGLPPTPPSAPASHSQSLHADSMCMDDSSAPAGRAGGLPPRKAHRRSRSDVAYGYFQPLPPPSPKMEAAGGWVLAPAAAGAGGGGDDLFNAYMSMEGMDGLNNSDGDSRGSSGMRTNGADSSENESEDYGGGGGGDSQFLLWGGDGGGKKKRNASGEPAAAPAPPPARHARSHSMDSIMGKLSFSSANGEPGKFSLEFGGGEFTPAEMKRIMADEKLAEMAMADPKRVKRVLANRQSAARSKERRMRYIAELEQKVQILQTEATTLSAQLTLLQRDSAGLATQNNELKFRLQAMEQQAQLRDALNEALTGEVQRLKLGDTGSSGNNLSQQMQLRCQNNQMVELNKQQQQGEQIPFYQLEQNGASRNHEPK

SEQ ID NO: 21329 - protein, 344 aa, Sorghum bicolor
MERYEVIRDIGSGNFGVAKLVRDVTTKELFAVKFIERGQKIDEHVQREIMNHRSLKHPNIIRFKEVVLTPTHLAIVMEYAAGGELFERICNAGRFSENEARFFFQQLISGVSYCHSMQVCHRDLKLENTLLDGSVAPRLKICDFGYSKSSVLHSQPKSTVGTPAYIAPEVLSRKEYDGKVADVWSCGVTLYVMLVGAYPFEDPDDPKNFRKTITRILSVQYSIPDYVRVSTECRHLLSRIFVGNPEQRITIPEIKNHPWFLKNLPVEMTDEYQQSMQQLADMNTPGQSLEEVMAIIQEAQKPGDAVSLAGQLPSCLGSMDLDDIDLDDIDDIDIENSGDFVCAV

SEQ ID NO: 21330 - protein, 302 aa, Sorghum bicolor
MMATTAYIDDSCSEVIDPPKTEVLDVVELPGDHTQHPPKPNVVVSSSVRELLECPVCLSAMYPPIHQCSNGHTLCSGCKPRVHNRCPTCRHELGNIRCLALEKVAASLEVPCKYQSFGCSGIYPYYSKLKHESQCQYRPYSCPYAGSECTVVGDIPYLVNHLKDDHKVDMHNGCTFNHRYVKPNPHEVENATWMLTVFSCFGQYFCLHFEAFQLGMSPVYIAFLRFMGDDAEAKNYSYSLEVGGTGRKMIWQGVPRSIRDSHRKVRDSYDGLIIQRNMALFFSGGDRKELKLRVTGRIWKEQ

SEQ ID NO: 21331 - protein, 345 aa, Sorghum bicolor
MAAASVSVQTIVLLLLAVAAVASAQLSATFYDSSCPRALGTIRSAVTAAVNRDPRMGASLLRLHFHDCFVQASPRSSSSLPLARSLSSRTYSVPWRAQGCDASVLLSDRGSFTGEQNAFPNRGSLRGFDVVDSIKAQVEAVCPRTVSCADILAVAARDSVVTLGGPPYTVLLGRRDSTTASLSQANSDLPSPGSSLASLISGFARKGLTTTDMVALSGAHTVGQAQCTNFRSRLYGESNLNQSDAAALRANCPQSGGDGNLAPMDLATPNTFDAAFFRGLLSQRGVLHSDQQLFSGGSTDALVQSYASNAGQFRNDFAAAMVRMGSIGVLTGSQGQIRLSCSSVN

SEQ ID NO: 21332 - protein, 334 aa, Sorghum bicolor
MAHERDASSEEEVMAGELRRGPWTVEEDLLLVNYVAAHGEGRWNSLARSAGLKRTGKSCRLRWLNYLRPDLRRGNITPQEQLLILELHSRWGNRWSKIAQHLPGRTDNEIKNYWRTRVQKHAKQLKCDVNSQQFKDVMRYLWMPRLVERIQAAAANASAGGAPPQPGAAADTPLSSSWQQGGADDGLYASPEELPTDACSWPPADCYYPAAVGDGDHHQLLMMNNPAVGPELSSTTAGSSSPSSDSGAGAQPCWLVAPVGGAEWFTTACDASSAVLAGQQQQQQQSSCLLGETTTWASSELPELGVADFEIGSFDVESIWSMDDNLWFTQAQGV

SEQ ID NO: 21333 - protein, 610 aa, Sorghum bicolor
MDTHVGSVNGSAAAPASNDTVGCPASAPGCPMASTPAQPASTLSAGEASLGRHLARRLVQVGVNDVFAVPGDFNLTLLDHLIAEPGLRLVGCCNELNAGYAADGYARARGVGACAVTFTVGGLSVLNAIAGAYSENLPVICIAGGPNSNDYGTNRILHHTIGIPDFSQELRCFQTVTCHQAVVTNLDDAHEQIDTAIATALRESKPVYLSISCNLPALPHPTFSRDPVPFFLAPRMSNKMGLEAAVEATVEFLNKAVKPVLVGGPKLRVAKAGKAFVDLVDASGYAYAVMPSAKGLVPETHPHFIGTYWGAVSTAFCAEIVESADAYLFAGPIFNDYSSVGYSFLLKKDKAIIVQPERVIIGNGPAFGCVMMKEYLSELAKRVKKNTTAYENYKRIFVPEGQPLESQPNEPLRVNVLFKHIQKMLTGDSAVIAETGDSWFNCQKLKLPEGCGYEFQMQYGSIGWSVGALLGYAQGANQKRVIACIGDGSFQVTAQDVSTMLRCEQNSIIFLINNGGYTIEVEIHDGPYNVIKNWNYTGFVDAIHNGEGKCWTSKVKCEEELTAAIETALAEKKDCLCFIEVIAHKDDTSKELLEWGSRVSAANSRPPNPQ

SEQ ID NO: 21334 - protein, 299 aa, Sorghum bicolor
MAQEDVHHLDDAGLALGLSLGGGGASDAVRHGTSSSRLSMEAVARLPSPRPQLEPSLTLSMPDEATATATGSGGGGGGAAHSVSSLSVAGVKRERVDDAEGERASSTTAAAAARAVSAGAEDDDDGSTRKKLRLTKEQSALLEDRFKEHSTLNPKQKVALAKQLNLRPRQVEVWFQNRRARTKLKQTEVDCELLKRCCESLTEENRRLQRELQELRALKFAPLHPQAAQAPPSSAAQAAGVPAPPQPFYMQMQLPAATLSLCPSCERLAGPAAAAKAEPDRPKAATHHFFNPFTHSAAC

SEQ ID NO: 21335 - protein, 357 aa, Sorghum bicolor
MASLTDLVNLDLSDCTDKIIAEYIWIGGSGIDLRSKARTVKGPITDPSQLPKWNYDGSSTGQAPGEDSEVILYPQAIFKDPFRKGDNILVMCDCYTPQGEPIPTNKRYNAAKVFSHPDVAAEVPWYGIEQEYTLLQKDVNWPLGWPVGGYPGPQGPYYCAAGADKAFGRDVVDAHYKACLYAGINISGINGEVMPGQWEFQVGPSVGISAGDEIWVARYILERITEIAGIVLSLDPKPIQGDWNGAGAHTNYSTKSMREAGGYEVIKKAIEKLGKRHTEHIAAYGEGNERRLTGRHETADINTFKWGVANRGASIRVGRDTEREGKGYFEDRRPASNMDPYVVTGMIAETTILWNGN

SEQ ID NO: 21336 - protein, 660 aa, Sorghum bicolor
MEASSASAVESTATVSVFDVSSNKQRPDTAKLVLNSPSPPSLREELVGVVGKAFRPRPPGGGGRAPRCPWILTALQCVFPVLQWGRTYTLKSFRSDVMAGLTLASLGIPQSIGYANLAKLDPQYGLYTSVVPPLIYAVMGTSREIAIGPVAVVSLLLSSMIQKVVDPAADPATYRSLVFTVTFLAGVFQVSFGLFRLGFLVDFLSHAAIVGFMGGAAIVIGLQQLKGLLGLSHFTNSTDVVSVVKAVCSALHDPWHPGNFLIGCSFLIFILTTRFIGRRYKKLFWLSAISPLLSVILSTAAVYATRADKHGVKIIQKVHAGLNPSSAKQIHLNGPHATECAKIAVICAVIALTEAIAVGRSFASVRGYKLDGNKEMLAMGFSNVAGSLSSCYVATGSFSRTAVNFSAGARSTVSNIVMSITVFVALELFMKLLYYTPMAVLASIILSALPGLIDIKEACNIWKIDKMDFLICLGAFVGVLFGSVEIGLAVALAISFAKIIIQSIRPQVEVLGRLQGTNIFCSVRQYPVACQTPTVLPIRMDTSFLCFINATFIKERIIEWVREEVENPNGKARERIQAVVLDMSSVVNIDTSGLTALEEIHKELVSLGIQMAIASPGWKAVQKMKVSRVVDRVGEDWIFMTVGEAVEACLAAHKGTALEC

SEQ ID NO: 21337 - protein, 612 aa, Sorghum bicolor
MEFMASKSYIPKRADFAELVLQGPEPPSLWYVLIGMLRKTVHYQSADKHFALSVCAMSILHGLFPILEWWKSYSLKSFRSDLMAGLTLASLSIPQSIGYANLAKLDPQYGLYTSVVPPLVYAVMGTSREIAIGPVAIVSLLLSSMAQKIADPVIDPAFYRKTVFTVTCFTGIFQFAFGLFRLGFLVDFLSHAAITGFMGGAAIVIGLQQLKGLLGLSHFTSSTDVVSVIRAVWVSVHEPWHPENFYIGCSFFLFILGMRFIGRKNKKLFWVSAIAPVLSVALSTLMVYMTRADKHGVKIIQKVDAGINASSIKQINFNGSYVSECAKIALICAVIALTEAIAVGRSFSVINGYKLDGNKEMLAMGFMNVAGSMSSCYVATGSFSRTAVNFTAGCKTTMSNVVMAVTVMVALELLTKLLYYTPVSILASIILSALPGLINFQEVCILWKVDKLDFLTCMGSFLGVIFGSVEIGLSVAIVISFAKIVVHSVWPQVEILGRLQGTNIFCNMEQYPMVCQTPAVLAIRISTSFLCFINGNSIREKITGWVIDKRDAICLVVLDMSNVVNIDTAGLAALEELRQELVSCGIQVHALTLAHLSLHKRGNTTIRSFLVK

SEQ ID NO: 21338 - protein, 324 aa, Sorghum bicolor
MCGGAILAELIPSTPARRGGGGGGAAWPGGKGSQRKADDFEAAFREFHEDSDEDEEMTEVVESKPAFIFSAPSSPATKPRAARQEQPIRRRKAAQQYRGVRRRPWGKWAAEIRDPVKGVRVWLGTFPSAEAAALAYDHAALDVRGPRAKLNFPSSSAAAAGAPASRKRARASDAAFIDLVDQEEQEQLTAAATTALKHEAAEEAAGESSGALPDFSWQGVLSAYDESPAVDVEAGQSGDKKRPRTEPESTEDEASPRASSGSEPDALFDALLFGDQFAFFDAGAYESLDSLFSADAVQSNAAADQGMPLWSFDDGCLVEDNLSF

SEQ ID NO: 21339 - protein, 243 aa, Sorghum bicolor
MRQNGTVMIQFGHQMPDYDSPATQSTSESHQEVSGMSEGSLNEHNDHSGNLDGYSKSDENKMMSALSLGNPETAYAHPKPDRTQSFAISYPYADPYYGGAVAAYGSHAIMHPQLVGMVSSSRVPLPIEPAAEEPIYVNAKQYHAILRRRQLRAKLEAENKLVKSRKPYLHESRHLHAMKRARGTGGRFLNTKQQPESPGSGSGGGSSDAQRMPMNGGGLFTKHEHSLPPGDRHHYHARGGGGA

SEQ ID NO: 21340 - protein, 233 aa, Sorghum bicolor
MVRGKTQMKRIENATSRQVTFSKRRNGLLKKAFELSVLCDAEVALVVFSPRGKLFEFASGSVQKTIERYRTYTKDNASNKTVQQDIEQVKADAEGLAKKLEALDAYKRKLLGERLEECSIEELHSLEVKLEKSLHCIRGRKTLLLEEQVNKLKEKEMNLRKSNEDLREKCKKQPPMLMAPPPPPVPAVMTVEDDHPEPKDDGVDVETELYIGLPGRDYRSNKDKAAVAVSRSG

SEQ ID NO: 21341 - protein, 172 aa, Sorghum bicolor
MAASATAARPLAGAAAVPLPLPARPRTARVALLPLTPVPGQRLALGRAGQERLPARGRSVRCLAALSPEMRATLDKVVGSSKVVLFMKGTKDFPQCGFSHTVVQILRSLDVPFDTLDVLANEALRQGLKEYSSWPTFPQLYIDGEFFGGCDITVEAYKSGELQETLEKAMCS

SEQ ID NO: 21342 - protein, 566 aa, Sorghum bicolor
MAEALRFPGVVAGESLDAPIAASKLGRERHSVSASARPGAQCWRRRKGLAVSCQTGAAPAVLRTEETTAAAAAGSNAQAEFTVVMKFGGSSLASAERMREVADLILSFPDETPVVVLSAMGKTTNNLLLAGEKAVSCGAPKASEIPELAVIKDLHLRTVDELGLDRSIVSGLLDELEQLLKGVAMMKELTLRTRDYLVSFGECMSTRIFAAYLNKLGKKARQYDAFDIGFITTDDFTNADILEVTYPTVAKRLHRDWMDNPAIPIVTGFLGKGCKSCAVTTLGRGGSDLTATTIGKALGLREIQVWKDVDGVLTCDPNIYANAIPVPYLTFDEAAELAYFGAQVLHPQSMRPARDGDIPVRVKNSYNRHAPGTVITKSRDMSKSILTSIVLKSNVTMLDIVSTRMLGQYGFLAKVFSIFEDLGISVDVVATSEVSISLTLDPSKLWSRELIQQELDHVVEELEKFSVVHLLQRRSIISLIGNVQRSSLVLEKAFNVLRRNGVNVQMISQGASKVNISLVVNDSEAKQCVQALHSAFFENGFLSEVEGADVPQNGSSLNSNGAIYAN

SEQ ID NO: 21343 - protein, 483 aa, Sorghum bicolor
MASSGTMPLAYQTTAASPDWLNKGDNAWQLTAATLVGLQSFPGLVVLYGGVVKKKWAVNSAFMALYAFAAVWICWVTWAYNMSFGDKLLPLWGKARPALNQGYLIGQADLPATVHYFANGSTIETAAAEPLYPMATVVYFQCVFAAITLILVAGSLLGRMSFAAWMLFVPLWLTFSYTVGAFSVWGGGFLFQWGVIDYCGGYVIHLSAGFAGFTAAYWVGPRAQKDRERFPPNNILFTLTGAGLLWMGWAGFNGGGPYAANVVASMSVLNTNICTAMSLIVWTCLDVIFFKKPSVVGAVQGMITGLVCITPAAGVVQGWAAIVMGVLAGSVPWYTMMILHKRSRLLKHVDDTLGVIHTHGVAGLLGGILTGLLADPTLCALFLPVTNSRGAFYGRAAGGAQLGKQLAGALFIIGWNVVVTSIICVAINAVVPLRMTEDKLEVGDDAVHGEEAYALWGDGEVYDVTEHGPRGAAAVAPVSTTPN

SEQ ID NO: 21344 - protein, 505 aa, Sorghum bicolor
MALLLHPRLPSHPLRAAAHHHHAISDASCVLTLPGPGRKRTLLAAVTCCAARVKEPAPSAGALPPPPQALAKEAHKYFDHAVVTVRAGDGGHGAVLAMPPPPSADAAKPRGRFNRGEKKSKKVSYKRNYDGSVALPMGGHGGDVVVYADEAEETLLRFHEKARYCAKRGGNVGAAGGTLSSRMHSGFAGETLRIPVPVGTVVKRKKGAVLADLAHPGDEVLVARGGQGGISLIDVPEYRRRKAMALSPNIMRDTSDKVLTHGQPGEEVSLELILRVVADVGLVGLPNAGKSTLLSAITLARPDIADYPFTTLMPNLGRLGGDPALGALQFSSEATLADLPGLIEGAHLGKGLGRNFLRHLRRTRVIVHVVDAAADDPVNDYKIVREELRMYNPQYLERPYVVVLNKIDLPKANDRLSSLALEISSIGCEEGHDQSGSKDNLHGHVSNHQVLSEAKVEGGEKELGDYPRPQAVVAASVLRHIGIDEMLKEIRAALRKCFDHKLPEP

SEQ ID NO: 21345 - protein, 287 aa, Sorghum bicolor
MSTREEWSMSDFEIGKYIGEGKFGKVYLAREKQSGYVVALKVIFKAKLEKYRFHAHLRREIEIQHSLDHPNVLRLFTWFHDEERVVLVLEYAARGELYKVLRAAGRFTERTSATYVASLAGALAYCHKKQVIHRDIKPENLLLDIEGRLKIADFGWAARSNAKRHTLCGTIDYLAPEMVEKKAHDHAVDNWTLGILCYEFLYGSPPFEADEQDDTLRRIVKVDLAFPSTPHVSSEAKDLISKLLVKDSSKRLCLEDIMKHPWIKKNADPSGSCIKQKDVTRAKVSDK

SEQ ID NO: 21346 - protein, 648 aa, Sorghum bicolor
MGKHMRIKTAPKGNRAPLLGDGETSRGLTDLEEGSNVQPANVGFCRVIKLAKHDAGKLVLATMALLVASLSNLLVPKYGGKIIDIVSRDVRRPEDKAQALEDVKGTILYIVTIVLVGSVCTALRAWLFNSASERVVARLRKDLFSHLINQEIAFFDVTRTGELLSRLSEDTQIIKNAATTNLSEALRNLTTTAIGLGFMFSTSWKLTLLALVIVPVISVAVRKFGRFLRELSHQTQAAAAVASSIAEESFGAIRTVRSFAQESHEISRYGGKVEETLKLGLKQAKVVGLFSGGLNAASTLSVVIVVIYGANLTINGYMTTGSLTSFILYSLTVGSSVSALSGLYTTVMKASGASRRVFQLLDRVSSMTNSGDKCPINEKDGEVELDDVWFAYPSRPSHMILKGITLKLAPGSKVALVGPSGGGKTTIANLIERFYDPLKGRILLNGVPLVEISHQYLHSKVSIVSQEPTLFNCTIEENIAYGLEGKANFADVESAAKMANAHNFICTFPDQYKTVVGERGIRLSGGQKQRIAIARALLMNPRVLLLDEATSALDAESEYLVQDAMDSLMKGRTVLVIAHRLSTVKSADTVAVISDGLIVESGTHDELLDHNGIYTALVKRQLQGPKFEATSSINDASEIEAEPSRNGQ

SEQ ID NO: 21347 - protein, 1135 aa, Sorghum bicolor
MSSPLNNRGTCSRSSSARSRHSARVVAQTPVDAQLHAEFESSQRNFDYSSSVSAAIRPSVSTSTVSTYHQTMQRGLYIQPFGCLLAVHPDTFTLLAYSENAPEMLDLTPHAVPTIDQRDALAVGADVRTLFRSQSSVALHKAATFGEVNLLNPILVHARTSGKPFYAILHRIDVGLVIDLEPVNPVDVPVTAAGALKSYKLAAKAISRLQSLPSGNLSLLCDVLVREVSELTGYDRVMAYKFHEDEHGEVISECRRSDLEPYLGLHYPATDIPQASRFLFMKNKVRMICDCSATLVKIIQDDSLAQPLSLCGSTLRASHGCHAQYMANMGSVASLVMSVTISNDEEEDVDTGSDQQPKGRKLWGLVVCHHTSPRFVPFPLRYACEFLLQVFGIQLNKEVELAAQAKERHILRTQTLLCDMLLRDAPVGIFTQSPNVMDLVKCDGAALYYQNQLLLLGSTPSESEIKSIATWLQENHDGSTGLSTDSLVEAGYPGAAALREVVCGMAAIKISSKDFIFWFRSHTTKEIKWGGAKHEPVDADDNGRKMHPRSSFKAFLEVVKWRSVPWEDVEMDAIHSLQLILRGSLQDEDANRNNVRSIVKAPPDDTKKIQGLLELRTVTNEMVRLIETATAPVLAVDIAGNINGWNNKAAELTGLPVMEAIGRPLIDLVVVDSIEVVKRILDSALQGIEEQNLEIKLKAFHEQECNGPIILMVNSCCSRDLSEKVIGVCFVGQDLTTQKMIMDKYTRIQGDYVAIVKNPSELIPPIFMINDLGSCLEWNKAMQKITGIQREDVIDKLLIGEVFTLHDYGCRVKDHATLTKLSILMNAVISGQDPEKLLFGFFDTDGKYIESLLTVNKRINAEGKITGAICFLHVASPELQHALQVQKMSEQAATNSFKELTYIHQELRNPLNGMQFTCNLLEPSELTEEQRKLLSSNILCQDQLKKILHDTDLESIEQCYMEMNTVEFNLEEALNTVLMQGIPLGKEKRISIERDWPVEISRMYLYGDNLRLQQVLADYLACALQFTQPAEGPIVLQVIPKKENIGSGMQIAHLEFRIVHPAPGVPEALIQEMFRHNPEVSREGLGLYICQKLVKTMSGTVQYLREADTSSFIILIEFPVAQLSSKRSKPSTSKF

SEQ ID NO: 21348 - protein, 676 aa, Sorghum bicolor
MRTTKPTILALVLLSLLCSGYLTGLADGAEARKGKKASGPGPGPVIGIDLGTTYSCVGVYRNGHVDIVANDQGNRITPSWVAFTDEERLVGEAAKNQAPLNPQRTIFDIKRLIGRRFDDEEVQRDVRYLPYKVVNKGGKPYVEVPMKGGERKTFSPEEISAMILSKMRETAESYLGHRVADAVVTVPAYFNDAQRQATKDAGTIAGLNVPRIINEPTAAAIAYGLDKKGAEMMNVLVYDLGGGTFDVSVLSLDHGVFEVLATSGDTHLGGEDFDQRVMDHFIRLVKRKHGKDISKDGRAMGKLRRECERAKRALSSQHQVRVEIESLFDGVDFSEQLTRAKFEELNMDLFKKTLGPVKKAIADAKLKKSDIHEIVLVGGSTRIPKVQELLTEMFDGKEPTKGINPDEAVAYGAAIQASIISGEGGAETKDILLLDVTPLTLGIETAGGVMTKLIPRNTRIPVKKSQVFTTYEDHQTTVSIKVFEGERSLTKDCRELGRFDLTGIPPAPRGVPQIEVTFEVDENGILHVTAADKAGGRSKSITITNDKGRLSQEEIDRMVREAEEFAEEDRRVRERVDARNRLENYVYRVRATVRDAGGMARKIGDEDRERMEAALAEALEWLEEQDGAAGRTAEKEEYEEKLREVEEVCGPIIKQVYEKSAGSDAAADEEDDVNEL

SEQ ID NO: 21349 - protein, 759 aa, Sorghum bicolor
MENRDSFPRPPAPSYAPATRAVKGIAVPAGGDTAATKLTSSSGSSSSLTLSPPRFMQELHAAVKRQRPFGPMQSKLPRATRVLVSGGECGNKVGASASVAKHPEQKVTQTQRGLLVPSRLPNATPDQSTPKLGSSTPDELMLTSSSSVLKGTIDTHAQSVGQKNNEANLLIDTEKSALEALPSQTTSCNALIGESFKKGQLDLDGNPQLTSQSDNIGITVDSRMDSMLSYLHDVSLTAGDNFPANQGAQYDHQQNHQELEIVGAPNLSRRGIDEARNHNHGEPMTRFSAIGSSVTAISLHSGPTVQSSQTPQVSRYTSPVQMPESAVESSKGVLGHGSQKEHGGATGVGDWNPHNQQVQNLGNGATDKAVSSIGRLRSEGLLANDQSTSARDGGASQPNKGQKERHKKNYDPNVFFKVNGKLYQKLGKIGSGGSSEVHKVISSDCIIYALKKIKLRGRDYPTAYGFCQEIEYLNKLKGKSNIIQMIDYEVTDKSLLLESSVPPRDGRIKDDHFIYMVLEYGEIDLANMVALKWKERHNCNMKIDENWLRFYWQQMLEAVSTIHEERIVHSDLKPANFMLVRGSLKLIDFGIAKAIMNDTTNIQRDAQVGTLNYMSPEAFMCNDTDSGGNVIKCGRPSDIWSLGCILYQMVYGKTPFADYKTFWAKYKEVTDRNHKIMYEPVDNPWLIDLMQRCLAWDRNERWRIPQLLKHPFLNPPVPKDLPPSDNDPCRLLMERIRVHWDNPVVQKFHSLIQELDGDQ

SEQ ID NO: 21350 - protein, 229 aa, Sorghum bicolor
MSANVDESTSGGSSSDAAGGSFECNICFELPQEPIVTLCGHLFCWPCLYRWLHIHAHSPECPVCKALVEEDKLVPLYGRGKDRVDPRSKNMPEGEIPHRPTGQRPATAPQADANNFANANANANPWFMGTGVPLANARWGNYAFSAAFGGLFPMLSFQVHGFPDAAAYAQPAGFHYGYGHGHGFHGGHMGHTHGVHRQAPLGQQQQADIYLKALLFMIGILVIASLLAF

SEQ ID NO: 21351 - protein, 129 aa, Sorghum bicolor
GIGANIKDLHCSHRKIVLDCLSGSNGKESIAKAANLLCSAYFNGDAHGDGKRKPTFTEADMASALKAVGCGEPEPDLLLMYGPARCHLGFPAWRLRYTEIMYMGPLKPMKYGAIVKALYNCSKKYQNFG

SEQ ID NO: 21352 - protein, 317 aa, Sorghum bicolor
MEPHHANKPKPKLSMKHSKFIFCKLYISETRNTMAMDTIEHASKSDAQVVVVSQLGDHHYNRFRYTLVSYIVDDSSTGEVIYSPIRKVLLAMIEAAFATINLESQSGTHPRIGVVDDLSFHPVGQATIEDAASLAKQVASDIGNGLQVPVFLYAAAHPTGKSVGAIRRELGYYRPNYKENQWLGSVLPDVLPVKPDVGPTHVSHKRGATTVGVTPWIEGYNIPVLSKDVPAVRRITRRVTGRSGGLPTVQALALFHGDDCTEIACLLDPDHVSAYQVQTVVEQIAGEQGLEVEQGYYTDITKDAALDKYLKIACTDD

SEQ ID NO: 21353 - protein, 626 aa, Sorghum bicolor
MGTTTTTPVAGAVVLSLKYLDTVKRSMLPLVLATLTTVLLLGPVSDRGAAFASPPPDPVQCSSGGGTSDCTVSSAYGVFPDRSTCRAAGAAFPTSEDELVRAVARGAASGTKMKAATRYSHSIPPLACPGAGDGQGLVISTRRLDRVVSVDAASGHVTVESGVTLRQLVAEAAKAGLALPYAPYWWGLTVGGMLGTGAHGSSLWGNGSAVHEYVVGMRIVTPAPAAEGYAKVRVLTAGDPELDAAKVSLGVLGVISQVTLALQPLFKRSVTFTERDDDDLAEQVAKFGYQHEFADISWFPGHRRAVYRIDDRLPLTAPGDGAMDFIGFRATPALVIQATRLAEDLFERAGNGSGKCLTSRVTHAALSAAGYGLQRRSGGLFTFTGYPVVGAQHRMQASGGCVTGPEDALLTACPWDPRVRGGTFFHQTTFSLPLRRAAAFVAEVKRLRDMADPRALCGVELYDGILMRYVKASTAHLGKPPPPSSSSGDMVDFDITYYRSRDPARARLFEDVLEEIEQMGVFKYGGLPHWGKNRNLAFVGAARKYPGLPQFLRVKDAYDPDGLFSSDWSDMMLGIGGRSPTTDAPGCALEGMCVCSRDEHCAPEQGYVCRPGKVYKDARVCTRVAS

SEQ ID NO: 21354 - protein, 440 aa, Sorghum bicolor
MSSPARAGGAPEDQAEADVEEETGRGTWRHAAFHVATTIATPAAYAPLPFAVASLGWPLGVCSLVIGTLVTWCSSLVVASLWRWNGEKHTNYRLLAESIFGPWGYWYVSFFQQVASVGNNIAIQIAAGSSLKAVYKHYHTADDGAMTLQQFILVFGALELLLSQLPDIHSLRWVNAICTASTVGFAGTTIGVTIYDGYRIERTGISYSLQGSTATKIFRAFNALGTIAFSFGDAMLPEIQSTVREPVRANMYKGVSSAYTIIVVSYWTLAFSGYWAFGSQVQPYILSSLTAPRWATVMANLFAVIQIAGCFQIYCRPTFAHFEERVQAKKNRSCRSCLCRLTYTSAYMAMITLVSAAMPFFGDFVSVCGAVGFTPLDFVLPALALLKTRTMPDNPGLQCAVKMISAAVAILFSIIGALACIGAIRSIALDVKTYKFFHDM

SEQ ID NO: 21355 - protein, 346 aa, Sorghum bicolor
MEMAVNARDEEKKYDGDDNHLGLGLSLSLGIATTAATPVEVDPPPRQQQQQRAISVAPISSLPAPQWWNGPAGLFFSPSSGMKMDPSLERKHQHQQQQQQQAAATSYSHDMPFLRGIDVNRRATAGETRRGRSCSEDEEPGASSPNSTLSSLSGKRAAPARSSGEVDREADGHTPRAGGGGSDDEDSGAGGGSRKKLRLSKDQAAVLEDSFKEHNTLNPKQKAALAKQLNLKPRQVEVWFQNRRARTKLKQTEVDCEFLKRCCETLTEENRRLQREVAELRALKLVAPHHYARMPPPTTLTMCPSCERLASAPADEAVAGRTAAPTGPWGPLPVRPVFVDGPARRS

SEQ ID NO: 21356 - protein, 226 aa, Sorghum bicolor
MPIVLAFLLVVAAACQPAASASSSAPASSLALPAPAPAPVPDASGHGSRRAAQAEAEAAEFVRASCGRTLYPRLCYAGLAPYAASVRSSHARLALASANLTLAALDALAARIPSPSPGSGSGSGALSDCADAVASAEDQAARAAERLGGVEQAVGGRPELLWRVDDALTWLSAAMTYEDSCADSLGPRKSAPAPVRAELRARVRRAKQFTSISLALVNILVSNPRS

SEQ ID NO: 21357 - protein, 344 aa, Sorghum bicolor
MTPLDCDMPPAASCKKRLSPSRPLPNRCLLILIVALAAAAAVASAQLSSEDYYDASCPAALFTIRTAVSTAVLLDRRMGASLLRLHFHDCFVQGCDASVLLDDTASFTGEKGAGPNAGSLRGFDVIDNIKMLLELLCPQTVSCADILAVAARDSVAQLGGPSWSVPLGRRDATTASASLANSDLPGPTSNLNGLLNAFSNKGLSSTDMVALSGAHTVGRAQCKNIRSRIYNDTDIDATYAASLRASCPAQAGGASDGALEPLDDATPDAFDNAYFGNLLSQRGLLHSDQALFGGGGATDGLVSTYASSADQWGSDFAAAMVKMGNISPLTGTDGEIRVNCRRVN

SEQ ID NO: 21358 - protein, 309 aa, Sorghum bicolor
MLLREMDGDPFHPMPNYDFLSGNGYSLKQLVRSNSDIDSSSSKSEQSRQDLSDSSLNGQRTPTQSDNNDICGKRDQGMVKSLLSFGSPEAAFSPHKFDYSQSFACASYTADPYHGGVLAGYTSNGSVHPQINGAANTRVPLPVGPAAEEPIFVNAKQYNAILRRRQIRAKLEAQNKLVKGRKPYLHESRHRHAMKRVRGPGGRFLNKKELQEQQQQQQKALPSLQTPTGRVSISKMAFGRDLCTESSTSHSPSTSSGISSVSNGSGMLAHQEHISFASANFLPSMNFRVENGGEKMAVNGVRHHTPVVR

SEQ ID NO: 21359 - protein, 1178 aa, Sorghum bicolor
MASGSRATPTRSPSSARPEAPRHAHHHHHHHSQSSGGSTSRAGGGGGGGGGGGGTAATATATATESVSKAVAQYTLDARLHAVFEQSGASGRSFDYSQSLRAPPTPSSEQQIAAYLSRIQRGGHIQPFGCTLAVADDSSFRLLAFSENAADLLDLSPHHSVPSLDSAAPPPVSLGADARLLFSPSSAVLLERAFAAREISLLNPLWIHSRVSSKPFYAILHRIDVGVVIDLEPARTEDPALSIAGAVQSQKLAVRAISRLQALPGGDIKLLCDTVVEHVRELTGYDRVMVYRFHEDEHGEVVAESRRDNLEPYLGLHYPATDIPQASRFLFRQNRVRMIADCHATPVRVIQDPGMSQPLCLVGSTLRAPHGCHAQYMANMGSIASLVMAVIISSGGDDEQTGRGGISSAMKLWGLVVCHHTSPRCIPFPLRYACEFLMQAFGLQLNMELQLAHQLSEKHILRTQTLLCDMLLRDSPTGIVTQSPSIMDLVKCDGAALYYHGKYYPLGVTPTESQIKDIIEWLTVCHGDSTGLSTDSLADAGYLGAAALGDAVCGMAVAYITPSDYLFWFRSHTAKEIKWGGAKHHPEDKDDGQRMHPRSSFKAFLEVVKSRSLPWENAEMDAIHSLQLILRDSFRDAAEGTSNSKAIVNGQVQLGELELRGINELSSVAREMVRLIETATVPIFAVDTDGCINGWNAKIAELTGLSVEEAMGKSLVNDLIFKESEEIVEKLLSRALRGEEDKNVEIKLKTFGSEQSNGAIFVIVNACSSRDYTQNIVGVCFVGQDVTGQKVVMDKFINIQGDYKAIVHNPNPLIPPIFASDENTSCSEWNTAMEKLTGWSRGEVVGKFLIGEVFGSFCRLKGPDALTKFMVVIHNAIGGQDYEKFPFSFFDKNGKYVQALLTANTRSKMDGKSIGAFCFLQIASAEIQQAFEIQRQQEKKCYARMKELAYICQEIKNPLSGIRFTNSLLQMTDLNDDQRQFLETCSACEKQMSKIVKDATLQSIEDGSLVLEKSEFSFGDVMNAVVSQAMLLLRERDLQLIRDIPDEIKDASAYGDQFRIQQVLADFLLSMVRSAPSENGWVEIQVRPNVKQNSDGTDTELFIFRFACPGEGLPADIVQDMFSNSQWSTQEGVGLSTCRKILKLMGGEVQYIRESERSFFLIVLELPQPRPAADREIS

SEQ ID NO: 21360 - protein, 664 aa, Sorghum bicolor
MTSHEQRNHQLLTNPLVNFKQPKRRAEMVFQKRSSSEMESCGGGQVAEMPRVPKSARGKRSVRKKEAQSPAQMSAFDLLATVAGKLLDEGVGSLGNMSAGASALAACAKDVRVKQEQCDEEMKQFKHEVTDQDSCNESAILPHIAFQRAVNNARTEDPKAKSEAQDKESSMISCTKAELGCNFGVIADRWSPESVESGAFTGDAVASLMPTAPAGFHKNAPEMYNLLDSMDVDAKPPPLVSSDSTGEMPLYGDKIHRSTSLPRGPKGVGGFAVDRDDDDDKSSGCTHPSTTTNRDFRSNCTAEYSRVRKLLTSKYRKVAPARIHKSDLSYSDVERKPSFRNKKMHYTRQRTQRSTFKRRKLFDRHSVLASEFGAANGKGSTKVTGRDSHAEVFPMQKTVLEAVTAILGGGLRVGVLHHGKKVRDDSKTLIQAGIGQDDMLDNLGFSLEPNCTQNPQVQVPEDISFLETIDTTEPLARIAPADSCSKHGEVDVSQELALTPLAMNYQGSDHDSVHSPRGVSSPDKVSTHSRALVPVPAADPNAGAVVPANKSKRSPEQGQRRIRRPFSVAEVEALVLAVEKLGTGRWRDVKLRAFDNAKHRTYVDLKDKWKTLVHTASISPQQRRGEPVPQELLDRVLAAQAYWSQQQAKLQPKTPPLAEARLLT

SEQ ID NO: 21361 - protein, 260 aa, Sorghum bicolor
MAAASTSLSLGFSSHHRPTPRIRFQPQSQPQPPNAKPHKPLRLSLTLTPATAKPRLAAAPDDVAVADIVEKDWSFLESAGANLQRALAAGALSPASRVLALTPTVSFVSSLLASSPCELLVAAHESMYVLAGVKEAHDEARCFHLEGGGGGRGGGVVEAVPERFDDFDVVFVCYFPGMGVSAAALLKSLAKRCSKGARVVMFLDQGRQNFEQQRREHPDVVTSDLPSKAFLEKAASGNKYELTEFVDEPSFYLAVLQFQG

SEQ ID NO: 21362 - protein, 392 aa, Sorghum bicolor
MRGLRRWLPFCGGGCCCCGEGGAGRGGGVADGLVWDVALKAHASGDYSIAVAQANESLEDQAQVLAAPAATLVGVFDGHGGPEAARFVNRRIFSHIQGFAAENGGLSAEVLQKAFGATEEEFIGLVQKSWPSQPRIVSVGSCCLVGAIEGGTLYVANLGDSRAVLGRRGGGGKGNRRVVAERLSQDHNVADEDVRREVAEMHPDEPHIVLNSHGVWRIKGIIQVSRSIGDVYLKKPDICRNNPALQQSLCPFPLRRPVMSAVPSITTRELRPGDRFLIFASDGLWEQLSDEAAVGVVASSPRKGVAMRLVRAAQLEAARKKEVKYDKIRTIEKGQRRHFHDDITVVVLFLDKCRGAARSGPEDIDGTYAPLDVFSYSPAGDHEDPTKPVLRR

SEQ ID NO: 21363 - protein, 1005 aa, Sorghum bicolor
MKSLFKSKIRWQHRSTDPASPAGQQASGPPSPSPASSPSGTAPAPALSVSTAVSSSPPSAAATPTGAAAAAAAAAPAPAGAGAGAGGEDYISSEEEFQMQLAMALSASSNGDFVGDLDGEQIRKAKLMSLDRFAAHRDEGHTAELLSRRYWDYNFLDYHEKVIDGFYDIFGSSMESSRQGKMPSLADLQTGIGDLGFEVIVVNRAIDSTLQEMEQVAQCILLDFPVANIALLVQRIAELVTDNMGGPVKDANDMLTRWLEKSTELRTSLQTSLLPIGCIKIGLSRHRALLFKILADSVGIPCKLVKGSNYTGGDDDDAINIIKMDNEREFLVDLMAAPGALIPADILSWKGNSLNSNRKLALNQTVGSSSTVDSNMDPTVLPLEPKGGQLPLFSSGDWISDSGSGYEAAETAGSTQTSSGATSSVPAGNVFDSSWLLVNHDQSDGPSTSAGTSSQQKVVPQSEHQQNLNRLPDLQEIPESKNLFADLNPFGDMKSKKKSVPFKGPDHRNNELQKRRENVVPNAGRPQQRLVMKNWSPYNDVSNNKQYNYVEDSFARRNVGNNAASSSSQMPRPASRSNLNSGLRNDASYHNYDSIMAGTSAMKITSTAETGKVPERVLRGDLDKGQTNYRLEDQHVVVQPPQERLPWGNPAEGRFPMNRVQSPAKQHIENMDVKQDHKKMLPDPKKSPLDRFMDTSLPSRNMDMRSQRLDFDDVSECEIPWEDLVIGERIGLGSYGEVYRADWNGTEVAVKKFLDQDFYGDALDEFRSEVRIMRRLRHPNIVLFMGAVTRPPNLSIVSEYLPRGSLYKILHRPNCLIDEKRRIKMALDVAKGMNCLHTSVPTIVHRDLKSPNLLVDNNWNVKVCDFGLSRLKHSTFLSSKSTAGTPEWMAPEVLRNEQSNEKCDVYSFGVILWELATLRMPWSGMNPMQVVGAVGFQDRRLDIPKEVDPLVARIIFECWQKDPNLRPSFAQLTSALKTVQRLVTPSHQETQSPHVHQEISVNLTP

SEQ ID NO: 21364 - protein, 422 aa, Sorghum bicolor
MMQQALGMSLPMAQFLPDQGSAKLTRPPGLPPTPPQAFAALQRGDVCMEAVVDPAAQQQGPRKAHRRSRSDVPFGYFPPASGGGGHGHHQLPPPKVEAGWGGGHLHGGGGGDEDLFNAYLNLEGLDGLNSSDDRHDDGDSRGSSMKTNGADSSENESDECAADSRAGIRLWSEAAVAAAADRREGLKRTAAGEPAAAPLPRHARSLSMDSLIGKLNFSAGATGAASGVIPGPNMFKLEFGSGEFTPGEMKKIMADDKLAEMALADPKRVKRVLANRQSAARSKERKMRYIAELEQKVQILQTEATTLSAQLTLLQRDSAGIATQNNELKFRLQAMEQQAQLRDALNEALTGELQRLKVATAELGDSCSSNNLAQQIQISVQEQMFQLHQHQQQQQQQATPIPFYQLQQAQQNGAGMKHESKE

SEQ ID NO: 21365 - protein, 388 aa, Sorghum bicolor
MAVAGANASCSIAAGACPSSSGSSSLFPHHRPSRPRRHGRIGIATIMCTSSSMHGYGYDSSSLPSLSLPFPIPAPRGVTSTGSGSRLRIFSGSANPVLAQEIACYLGMELGKIKIKRFADGEIYVQLQESVRGCDVFLVQPTCPPANENLMELLIMIDACRRASAKNITAVIPYFGYARADRKMQGRESIAAKLVANLITEAGAHRVLACDLHSGQSIGYFDIPVDHVYGQPVILDYLASKTICPNDVVVVSPDVGGVARARAFAKKLSDAPLAIVDKRRQGHNQAEVVNLIGDVRGKVAVMVDDMIDTAGTISKGAELLHKEGARAVYACSTHAVFSPPALQRLSSGLFQEVIITNTVPLTVLSVANLLGETIWRVHDDCSLSSIFK

SEQ ID NO: 21366 - protein, 585 aa, Sorghum bicolor
MAAMASGGDETTTTTLDGTTDHSGKPAVRSKTGTWRACPFILGNECCERLAYYGMSSNLVNYMIDRLHQGNAAAANNVSNWSGTCYVMPLLGAFLADAYLGRYRTIAAFMALYILGLTLLTMSAAVPGLRPPPDGAGAVTAGQSAAFFVALYLIAVGTGGIKPCVSSFGADQFDDADPRERQSKSSFFNWFYMSINVGALLASSVLVWVQMNVGWGWGFGIPAAAMAVAVASFLMGSKLYRHQKPGGSPLTRMLQVVVAAWRKGKQPVPADASLLHEASSASASAIQGSRKLEHTEQFRWLDRAAVVTSTDEDGKNNPDPWRLCTVTQVEELKSVIRLLPVWASGIVMSAVYSQMSTMFVLQGNTLDPRMGSGAGAFKIPSASLSIFDTLSVIAWAPAYDRLVVPAARRWTGHPRGFTQLQRMGIGLAVSVLSMLAAGALEVARLRVAASHGMLDDSTNYLPISIFWQVPQYFIIGAAEVFTFIGQIEFFYDQAPDAMRSMGTALSLTSSALGSYLSALLVSVVTAITTRNGGLGWIPDNLNRGHLDYFFWLLSVLSVINFVVYLWIAKWYRYKQATTSYELSSV

SEQ ID NO: 21367 - protein, 338 aa, Sorghum bicolor
MELQFSSSYYYGHDAGAVSAAYAHCDYGLQRYDDSPYYSTSAMASSGFFQPSSAAYYDDDAAIAYSGDGDHHPSSSSTVWGASSSSDATPSHHQQQLLHFGGGADEYYSYQQDGMGAVDMDQFSVLMGATCISTTSSSSSASTTTNTPLAYPSPATTTVQSSAVVHGASPCDYLQQEAASGGDRDAPLIGVRKRPWGKFAAEIRDSTRNGERVWIGTFDTPEAAALAYDQAAYSMRGPAAVLNFPVEHVQESLRALGLISDGAADDSPVLALKRRHCIRKRLPKNKKAAAGKEQTKAATSSHGHGHAKQKPQAASCVLELEDLGADYLEQLLALSDHQ

SEQ ID NO: 21368 - protein, 633 aa, Sorghum bicolor
EGSWTPTAELPLQQGTPGGEVEEHGGGSAAAAAATTATAAATTDGSVGWNGKPCRRDRSGGWFAGFLMLANQALVTFAVNCVGINLVTFMSVVMRLDNANAANKASNWNGTTYVFSIIGAIVSDSYWGRYKACTIFQLIFVAGLVELAVACHVFLDKSCHFGDGGGRQEHCKPPTTVQAAVFYISIYQIALGNGAYQPAVTTFGADQFDETDARERKSKSAFFGYFFVANNLGGILAVTALAYMEDKGEWVQAFWIATAAALLGYLLFAVGTLRYRHFLATGNALVSVCQVVVAAVRNRRVRAPVREQDLYDPDAADGGHVETGVRKMVHTPEYRCLDKAAVIKDPASGLQLQVRPADHEPNPWRLCTIKQVEELKCILRLVPIWLCSILFSTSYSQMTSVFIEQAQAMDDSLWKLTIPPAGMDVFEILGVTAFVFIYRFCIVKVMTKVSHEPTELQRMGTGLVISTAAMITSGVVEQQRLMRATGGVGVGVDASSTLSILWQIPQYLLIGASEVFMYVTMTEFFNDQLPEGLRSLGSAMSVASMSAGSFASSLLVTLVMTITCRGGRPGWIPQDLNKGHVDWFFYLIAALNAVDLLAFVVFAKRYRPAPVVIHGADENGNGVEKGQDGEECI

SEQ ID NO: 21369 - protein, 378 aa, Sorghum bicolor
MATTPAPQTASRVASGRLIFGEPRLRGVRSFGNGGASGRRVSVEAVNGAVRPNGAAAVADVRLVPAPPPASVEGDDGGDAFRLGKFVEGTLVYRQQFVIRSYEIGPDRTATMETLMNLLQETALNHVMCSGLAGDGFGATLQMSLRKLIWVVTRINIQVDKYSRWGDVVEIDTWVASSGKNGMRRDWIIRDRNTKNMIARATSNWVMMNRETRRLSKIPDEVRQEVLPFYLERSIIAADATGSGRKIEKLTDSTAEHIRSGLAPRWSDMDVNQHVNNVKYIGWILESVPLDVLEDYHLTSITLDYRRECRQSQLLESLTSMAMAMTSSPPAEPPLASSLCGSDLHSTHLIRQQDDKAEIVRACAEWRRKEHRGSMEQL

SEQ ID NO: 21370 - protein, 458 aa, Sorghum bicolor
MAAPALRTTPRLGLALDGATAARRRGALAPAAVPAAPCLRKATVRCQRAVSAAAIVEKKDASVAAAQERGGDGELTVVMKFGGSSVASAERMREVADLILSFPEERPVVVLSAMGKTTNKLLMAGEKAVGCGATKVSELEELSFVKELHLGTLDQLGLDRSIIYGLLDELEQLLKGIAMMKELTLRTRDYLVSFGECMSTRIFAALLNKIGVKARQYDAFDLGFITTDDFTNADILEATYPAVAKRLHGDWINDPAIPIVTGFLGKGWRSGAITTLGRGGSDLTATTIGKALGLREIQVWKDVDGVLTCDPNIHPKAKPVPYLTFDEAAELAYFGAQVLHPQSMRPAREGDVPVRVKNSYNRRAPGTLITKARDMSKTVLTSIVLKSNITMLDIVSTRMLGQYGFLAKVFSIFEDSGMSVDCVATSEVSISLTLDPSKLWSCELVQHRNVCSLLISCQ

SEQ ID NO: 21371 - protein, 329 aa, Sorghum bicolor
MWKEGSLEEERRRKQQQQLEHRGSDASRACRIQPPYVTRERGACHVPPQRLAFSVDPAGVMEEYASYMFSGSMHSYGGVGGGAMATDAALDTGGDDMQHLLNALMLDMAAESDSFSDDMEAASSESSSSACSANSHEASRRPPPPQQQQQPDDGDRTTSDDNNKCSKKQQQQPFIGVRKRPWGKFAAEIRDSTRKGARVWLGTFDSPEAAAMAYDQAAFSVRGAAAVLNFPVERVQESLRALALSSAAASAPGGSPVLALKRRHSIRKRSPNKNKRQQEQQQQHQQVAVAAAPQQQPPPCPGGNVVELEDLGADYLDELLRVSSEFDWQ

SEQ ID NO: 21372 - protein, 629 aa, Sorghum bicolor
MAMVTTSPATLQPSSSSCKHASRGVARCCPAPPPPLLSWKRRSSGQQQVTTTRATAASSRGQPTIGVAGVAGGEEEGDSIRRLQNGSDVRGVALEGEKCRAVDLTPLAVEAIAESFGEWLREEELRLRGEEPQQQLRVSVGRDPRLSGPRLGAALFAGLASAGCSVFDMGLATTPACFMSTILPRFNYDASIMLTASHLPYTRNGLKFFTKRGGLTSGDVETICDRAAQKYVARRKMGLGDTPPPPPVVMRVDLMSAYAQHLRDIIKQRVAHPEHYDTPLRGFKVVVNAGNGCGGFFTRDVLEKLGADTTGSLHLDPDGRFPNHMPNPEDATAMSLTRGAVLAQGADLGVVFDTDVDRSGVVDAGGAAINGDRLIALMSAIVLGEHGGTMVVTDARASDGLTRFIESRGGRHCLYRVGYRNVIDKGVQLNDDGVETHLMMETTGHGALRENYFLDDGAYMVVKIIIEMVRMKLAGVEGGVGSLIADLEEPAESVLLRMDVLGEPKHAKQRATQAVEAFKKYIMEDKLSGWVLDDCGDCSVSEGCLEDSNDRPIDVDAYMYRAKLYDENERALGMVHLRQSVHNPNIALNMQSYVPGGCKSMAKDLHQRFLLASGLNEFVDISEVEKFIK

SEQ ID NO: 21373 - protein, 444 aa, Sorghum bicolor
MPTLSAFLVLFLPLLLSAAGATELTGGGGGFGFKATLTHVDADAGYTEEQLLARAVRRSRARVATLQSLATLAPGDAITAARILVLASDGEYLMEMGIGTPARFYSAILDTGSDLIWTQCAPCLLCVDQPTPYFDPANSSTYRSLGCSAPACNALYYPLCYQKTCVYQYFYGDSASTAGVLANETFTFGTNDTRVTLPRISFGCGNLNAGSLANGSGMVGFGRGSLSLVSQLGSPRFSYCLTSFLSPVRSRLYFGAYATLNSTNASTVQSTPFIINPALPTMYFLNMTGISVGGNRLPIDPAVLAINDTDGTGGTIIDSGTTITYLAEPAYYAVREAFVLYLNSTLPLLDVTETSVLDTCFQWPPPPRQSVTLPQLVLHFDGADWELPLQNYMLVDPSTGGLCLAMATSSDGSIIGSYQHQNFNVLYDLENSLLSFVPAPCNLM

SEQ ID NO: 21374 - protein, 469 aa, Sorghum bicolor
MNLAAFPSSSTTTTTLATPATLPWHEMPLINSSATTSSLLLRRSLCASLRRISHMASYAASPTSAPAATASTENGAAKATEQRPVQVAKRLEKFKTTIFTQMSMLAIKHGAINLGQGFPNFDGPDFVKEAAIQAINAGKNQYARGFGVPELNSAIAERFLKDSGLQVDPDKEVTVTSGCTEAIASTILGLINPGDEVILFAPFYDSYEATLSMAGANVKAITLRAPDFAVPLEELEAAVSKNTKAIMINTPHNPTGKMFTREELEFIATLCKENDVLLFSDEVYDKLSFEADHISMASIPGMYERTVTMNSLGKTFSLTGWKIGWAIAPPHLTWGLRQAHSFLTFATCTPMQAAAAAALRAPDSYYEELKRDYSAKKAILLEGLEAAGFIVYPSSGTYFIMVDHTPFGFDNDIEFCEYLIREVGVAAIPPSVFYLNPEEGKNLVRFTFCKDEDTLRGAVERMKTRLRKK

SEQ ID NO: 21375 - protein, 481 aa, Sorghum bicolor
MASVTRRALSRGCCRRLAVVLALAVVAAAADDEGSGPNWHVVSVAALLPDAVCTPKRAAASNSSALSVVHRHGPCSPLQARGGEPSHAEILDRDQDRVDSIHRLAAARPSSTADDPSSASKGVSLPARRGVPLGTANYIVSVGLGTPKRDLLVVFDTGSDLSWVQCKPCDGCYQQHDPLFDPSQSTTYSAVPCGAQECRRLDSGSCSSGKCRYEVVYGDMSQTDGNLARDTLTLGPSSSSSSSDQLQEFVFGCGDDDTGLFGKADGLFGLGRDRVSLASQAAAKYGAGFSYCLPSSSTAEGYLSLGSAAPPNARFTAMVTRSDTPSFYYLNLVGIKVAGRTVRVSPAVFRTPGTVIDSGTVITRLPSRAYAALRSSFAGLMRRYSYKRAPALSILDTCYDFTGRNKVQIPSVALLFDGGATLNLGFGEVLYVANKSQACLAFASNGDDTSIAILGNMQQKTFAVVYDVANQKIGFGAKGCS

SEQ ID NO: 21376 - protein, 500 aa, Sorghum bicolor
MDEDRTADPARRGRLLSPMTSGQAPQTPPPQTQPQLPMDLASQYQRRFAPTVFLPPMAPPRLASSSSGFSAFSTYQSLPTLAPPAPGAGSHLARSLPKPPLFSVDSLAPLPYSTAPAAGAAAAVPRSPPSPGGSEQQVPSASVLPPRGAGHRRSRSDFLVGFSRPNQLPPLPMTTPAAGDYSRSRDASVLEELFRSYRDPNLLVSSGSGGSKNERNDHLSSSQRGWSPADSSENEAESWAASGNGNGSGNGNADSSSASHPRHCRSLSVDSIMSNLNFGGPGQVPLRLPPASPVAVAGGSLSRAGSGASGSAVATASSELINGEFTESEMKKIMANDRLAEIALADPKRVKRILANRISAAKSKERKVKYMGELERKVRVLQMETSTLSSKAASSQRECEALKTMNSEMKIRLQAMEQQAQLKDALNEALTAEVHRLKQIAGEASDPHVPNGSHHHMNRQILEQQLLQLQQKQPSDAQQAQQQQQQESEQFKAQQKQWNH

SEQ ID NO: 21377 - protein, 576 aa, Sorghum bicolor
MAARSLLLYALLLALATAAPSHGLTQADVAKRLKEELSQRNRGHEMLESWNGDPCSPSTWEGFSCEPKDGGQVVVKLNFSSKNLQGPIPAAIGNLTELNEIYLQYNNFTGFIPASFSALGHLQKLSVICNPLLSYKQPDGFSSGVNFSHGGCATQEYYSSPAEEYQSPPAVASQRVFVIGGVAGGSLACTVALGSFFVCFNKRERRSPKKDCSSTTNPVFQECSVDTTNPAVQQFSFKSIQTATGSFKTLIGEGGFGSVYRGALANGQEVAVKVRSTSSTQGTREFNNELRLLSAVWHENLVPLIGYCCEKDQQILVYPFMSNGSLQDRLYGEASKRKVLDWPTRLSVCIGAARGLVYLHNFAGRCVIHRDIKSSNILLDHSMCGKVADFGFSKYAPQEGDSNPSMEVRGTAGYLDPEYYSTQVLSTRSDVFSFGVVLLEIVTGREPLDVKRPRAEWSLVEWAKPYITEYKIEEMVDPGIKGQYCSEAMWRVLEVASVCTEPFSTFRPTMEDVLRELEDALIIENNASEYMRSIESTGTLGSNRYQSIDRKMFASGSARIDSTKGHLQTMPPSLPR

SEQ ID NO: 21378 - protein, 325 aa, Sorghum bicolor
MAAARSSHRFRHSKLSVLILALATVVAAARAQLSPTFYASSCPAALVTIKTAVRAALVLDRRMGASLLRLHFHDCFVQGCDASVLLDDTGNFTGEKSAGPNAGSLRGFGVIDTIKALLEALCPRTVSCADILAVAARDSVVALGGPSWTVQLGRRDSTTASLSTANTDLPSPASSLSTLLAAFARKGLSSTDMVALSGAHTAGQAQCQNYQARIYNDANINAAFAASLRAGCPAGGGGGANAPLDASTPNAFDNAYYGDLVAQQGLLHSDQELFNGGSTDGLVRSYAASSARFSSDFAAAMVKMGGIGVITGSSGEVRRNCRRVN

SEQ ID NO: 21379 - protein, 302 aa, Sorghum bicolor
MASVTYIDDSLAEVIDPPKNEEMLDVTELVGDHIQHSPKPNVASYGNVRELLECPVCLSAMYPPIHQCSNGHTLCSGCKPRVHNRCPTCRHELGNIRCLALEKVAASLELPCKYQNFGCLGIYPYYCKLKHESQCQYRPYTCPYAGSECTVAGDIPYLVNHLKDDHKVDMHNGSTFNHRYVKSNPHEVENATWMLTVFSCFGQYFCLHFEAFQLGMAPVYIAFLRFMGDDAEAKNYSYSLEVGGNGRKMTWQGVPRSIRDSHRKVRDSYDGLIIQRNMALFFSGGDRKELKLRVTGRIWKEQ

SEQ ID NO: 21380 - protein, 745 aa, Sorghum bicolor
MAPPAVAASAFPFRLFTAEARRNTKSGRGKRSAARPLKSSPPPRPPSSVSGGGVAATTFTRLPLRDAPESVEVTLDRFPTAPANPGAPALTRGSVQRLDGEEEFEAGLGPNSVARIPLRDSTDGVELTIGQFEARAAGRKSTGGRGFTRQMVERLGDGSEGEELVVSSLDVFEVKRGRRARALVPEVLDDDDDVVVFDPDYGVDSDEEEEEFEMFPFDQRHHEEAGAVPRADLGEVEYGEGEDDDEVVVFHPDYDEDEGDVDDDGYDDEEAEAGEGEAKEKGVPAVMRCFDTAKIFAKAGDGGNGVVAFRREKYVPYGGPSGGDGGRGGDVYVQVDGEMNSLLPFRKSVHFRAGRGAHGMGQQQAGAKGEDVVVKVPPGTVVRTSDGGVELLELMRPGQRALLLPGGRGGRGNAAFKSGANKVPRIAEKGEKGPEMWLELELKLVADVGIVGAPNAGKSTLLSVISAAKPAIANYPFTTLLPNLGVVSLDFDATMVVADLPGLLEGAHRGYGLGHEFLRHSERCSVLVHVVDGSAQQPEYEFEAVRLELELFSPSLVDKPYVVVFNKMDLPEASERWNTFREKVQSEGIEPFCISAINRQGMQDVIHAAYKLLQKERQRMKETEGWSGPENLNHVSDAIKKERRAPMNEFEVFHDKGTNTWNVVGAGIERFVQMTNWQYSDSLKRFQHALEACGVNRALSKQGVKEGDTVIIGEMEMVWNNETDRARPSKTMNTQDDAVRWPEFG

SEQ ID NO: 21381 - protein, 318 aa, Sorghum bicolor
MAAASSLSVLVLLCLAAVASAQLSATFYSRSCPRALATIKSAVTAAVAQEPRMGASLLRLHFHDCFVQGCDASVLLNDTATFTGEQTANPNVGSIRGFGVVDNIKAQVEAVCPGVVSCADILAVAARDSVVALGGPSWRVLLGRRDSTTASLALANSDLPAPSLDLANLTAAFAKKRLSRTDLVALSGAHTIGLSQCKNFRAHIYNDTNVNVAFATLRKVSCPAAAGDGDGNLTPLDTATSTAFDNAYYTNLLSRSGLLHSDQQLFNGGGATDGLVRTYASTPTRFNRDFTAAMIRMGNISPLTGRQGQIRRACSRVN

SEQ ID NO: 21382 - protein, 319 aa, Sorghum bicolor
MASSSVSALLLFLCLAAVASAQLSPTFYDTSCPNALSTIKSAVNAAVQKENRMGASLLRLHFHDCFVQGCDASVLLADNAATGFTGEQGALPNAGSLRGFDVIANIKTQVEAICKQTVSCADILAVAARDSVVALGGPSWTVPLGRRDSTTASLSLANSDLPPPSFNLEQLIKAFGNKGFTATEMATLSGAHTIGQAQCQFFRDHIYNDTNINSAFATSLKANCPRSTGSGDGNLAPLDTTTPYKFDNAYYSNLLNQKGLLHSDQELFNGGSTDNTVRNFASNSAAFSSAFAAAMVKMGNLSPLTGSQGQIRLTCSKVN

SEQ ID NO: 21383 - protein, 313 aa, Sorghum bicolor
MAASASCLAFLVAAAVASVASAQLSSTFYDTSCPNALSTIKSGVDAAVMQEARTGASLLRMHFHDCFVHGCDGSVLLNDTSGEQSSPPNKGSLRRFDVIDSIKAQVEAVCPGVVSCADILAVAARDSVVALGGPSWTVLLGRRDSTASFPSETTDLPAPTSSLQQLLSLFSNKNLDATDMVALSGAHTIGQAQCSNFNDHIYNDTNIDAAFATSLQANCPASGSTSLAPLDTMTPTTFDNDYYTNLMSQKGLLHSDQELFNNGSTDSTVSNFASSASAFTSAFTAAMVKMGNLSPLTGTDGEIRLACGIVNSS

SEQ ID NO: 21384 - protein, 321 aa, Sorghum bicolor
MESSSRLSLLVVAILALATAATAQLSSTFYDTSCPKALATIKSAVTAAVNNEARMGASLLRLHFHDCFVDGCDASVLLADTGSFTGEQGAIPNKNSLRGFSVIDSIKTQVEAVCNQTVSCADILAVAARDSVVALGGPSWTVLVGRRDSTTASKDNAERDLPPPSFDLANLTRSFANKNLSVTDMVALSGGHTIGQAQCRFFRDHIYNDTNINSAFAASLQANCPRPANGSGDSTLAPLDAASPTAFDNAYFSNLMSHKGLLHSDQQLFNGGSTDSTVRSFASSASAFSNAFATAMVNMGNIAPKTGSQGQIRVTCSKVNS

SEQ ID NO: 21385 - protein, 571 aa, Sorghum bicolor
MSKGAIIGASTVLVVAVVAAVCVVSFKGNNSSKGDGDENMSMSVKSVKAFCQPTDYKQTCEAELSKAAGNASTPSDLAKVIFGVTSDKIHKAISESETLKELKNDQRTSGALKDCNELLEYAIDDLKSSFDKLGGFEMTNFKKAVDDLKTWLSAALTYQDTCLDGFMNATSTEASGKMKKALNASQELTEDILAVVDQFSDTLGGLSVGRRLLDDAATPTPSWVSEADAGRQRLLADSAGAGSPDFKPNVTVAADGSGDVKTIKEALAKVPPKNKDLYVVHVKAGTYKEYVSVARPQTNVAFIGDGAEKTIITGSKNFKMNLTTKDTATMEAIGNGFFMRDIRVENTAGAENHQAVALRVQSDQAVFYQCTFDGYQDTLYTHAQRQFFRDCRVTGTIDFIFGNSQVVLQNCLIQPRKPMPNQANIITAQGRRDKRSVGGTVLHNCTIEPHPDFKADAGGKIATYLARPWKEYSRTLYIQNDIGGFIDPKGWLEWNGDFGLETLFYAEVDNRGAGADMSKRAKWGGIKTVTYEEAQKEFTVETFIQGQQFIPKWGVPFIPGLLPQEQQGRTH

SEQ ID NO: 21386 - protein, 480 aa, Sorghum bicolor
MVSERQQQQGKVAAFNLAESGFGDQADLLDDDGRERRTGTLVTASAHIITAVIGSGVLSLAWAIAQLGWVIGPVVLLAFSAITWFCSSLLADCYRAPDPVHGKRNYTYGQAVRAYLGVSKYRLCSLAQYINLVGVTIGYTITTAISMGAINRSNCFHSKGHSADCEASNTTNMIIFAGIQILLSQLPNFHKLWWLSIVAAVMSLAYSSIGLGLSIAKIAGGVHVKTSLTGATVGVDVTATEKIWKTFQSLGDIAFAYSYSNVLIEIQDTLRSSPPENVVMKKASFIGVSTTTMFYMLCGVLGYAAFGNDAPGNFLTGFGFYDPFWLIDVGNVCIAVHLIGAYQVFCQPIYQFVEAWARSRWPDSVFLNAEHTVAGGLFSVSPFRLVWRTAYVVVTALVAMVFPFFNDFLGLIGAVSFWPLTVYFPIQMYMAQAKTRRFSPAWTWMNVLSYACLFVSLLAAAGSVQGLVKDLKGYKPFKVS

SEQ ID NO: 21387 - protein, 284 aa, Sorghum bicolor
MSTSGGAGARSWSPPRRASRYESQKRRDWHTFTRYLAAHRPPLELCRCSGAHVLEFLRYLDRFGKTRVHAPLCAAYGGGGGGPALVAAAPCQCPLRQAWGSLDALVGRLRAAFEERHGARGSGTIWTSSQSQSQSQQPAVVDGDAANPFAARAVRLYLRDVRDAQSRARGISYSRKKKKRSKQQDGAAAAAAGCARPHVNGATSLMHAAAPPPAPPPPPPPPPPPPYCLAGVPFEFCDYGTVLGGVTANGAPGFYLPSLFNTFGKLLIIYLLRSKTYYLFISLR

SEQ ID NO: 21388 - protein, 602 aa, Sorghum bicolor
MISLLRRALASSPAATCRRPLLAALLSPPSAPPGPCQAPTPGSPAPPRRALHGSPNPLGFRSTPASWTRPGPGEGVGVDTGAEEGLEIARLWISPRIVEKLAARGITKLFPIQRAVLEPAMQGKDMIGRARTGTGKTLAFGIPIMDKILSHNEKNGNGRNPLAIVLAPTRELARQVEKEFRESAPLDTLCVYGGVPINQQMRVLNYGVDIVVGTPGRIIDLLRRGVLNLSQIQFVVLDEADQMLAVGFDEDVEVIMEQLPQNRQSMLFSATMPSWIRKISNKYLNDPVIIDLVGDSDQKLPEGISLYSIASDNFGKQSILGPLIKEHANGGKCIVFTQTKRDADRLAYVMGRSYPCQALHGDISQNQRERTLSGFRDGRFNILVATDVAARGLDIPNVDLVVHYEIPNTSELFVHRSGRTARAGKKGSAILIYTYEQTRAVRVIEQDIGCRFTELPKMPVSDEAADMFNVTRDTRSRSAGSRRTGGPFSREGYGGFGDHRSSSFGDFGGSSDRSGGFRDSGSRYRGGSGGLRRSSSELGRPSFSRSDRFGDFGDSDFSRRGNTDFGRSRSSDDSGSSRYGRGSSGFGTSGSGNLGGFKDSKR

SEQ ID NO: 21389 - protein, 539 aa, Sorghum bicolor
MSVAMALAAILAAVYVLRYLLSPTPSGTGRPKSSSSLNLPPGPRGWPVIGSLGALAGALPPHRALAALAARHGPLMHLRLGSYHTVVASSADTARLVLKTHDFAFADRPATAAGEVASYGYLGIVHTPYGAYWRMARKLCATELFSARRVDSFERVRAQEMRALARGLLAECAGGAVAVREHVAGATLRNILRMAVGEKWSGCYGSPEGEAFRRTLDEAFAVTGAVSNVGEWVPWLGWLDLQGCVRRMKRLRAQYDRFFEQILADHEKTRRRRGRPGAGGDDSAAGDDLVDVLLQLAEEHENRPEPGAGSGRLTRDGVKAFVQDIVAGGTESSAVTIEWAMSELLRHPETMAAATAELDRVIGHGRWVNESDLPSLPYVDAVVKETMRLHPVGPLLVPHHAREDTVVAGYDVPSGARVLVNVWAIGRDPASWPDAPGAFRPERFLSGGSGHGVDVRGAHFELLPFGAGRRMCPACGLAMKLVAAGVANLVHGFAWRLPDGMAPEDVSMEEQFGLSTRRKVPLVAVAEPRLPAHLYAAID

SEQ ID NO: 21390 - protein, 340 aa, Sorghum bicolor
MEPQFCNSFYYGHHAGAAAYAHSDNSHYGLQHYDDSLVVDSSCYSNSAMASSGSGFQQPSSYYDPITTYSGDHYSSSSSTAWAASSWGADTPSRHHYQQQLLHFGGGADEYYSYQQDGTGAVDMDQFSALMGATCISTTSSSSSASTTNTPLAYPSPATTTVQSSAVVHGASPCDYLLQQEAASGGDAPLIGVRKRPWGKFAAEIRDSTRNGERVWIGTFDTPEAAALAYDQAAYSMRGPAAVLNFPVEHVQESLRALGLISDGAADDSPVLALKRRHCIRKRLPKNKKAAAGKEQTNAATSSHGHGHAKQKPQEASCVLELEDLGADYLEQLLALSDHQ

SEQ ID NO: 21391 - protein, 317 aa, Sorghum bicolor
MDYARSMISSSAVPFRAAGDGDGGGQVFLFGGRGGGGFLRGLPLVGGASAAAGAAADGRRKRAFQLTTAHEEPQLELGDDELCGGFDYELLHGPQQQERTKRRLTAEQVRELELSFEEEKRKLEPERKSELARRLGIAPRQVAVWFQNRRARWRTKQLEQDFDRLRAAHDDLLAGRDALLADNDRLRSQVITLTEKLQAKESSASEPEEFTVATQETAYALFEEDKLCLCSEIATGSTAAAAPGSNDSPESYFAGACSPPSSPEDDGCGGADDRTFFLPDALLATGVEESLERAAEEDDGAGTQLNNWAWLWNDQQY

SEQ ID NO: 21392 - protein, 369 aa, Sorghum bicolor
MELGLSLGETMADAGRDLVLGLGMGVVGVRREEEAAERGSRRDRDARRELEFGTTGWCGARSSPEPPAVRLTLLPGLVPRLGGLPWPPPPPPPPPSSETNRHLEASTTRGFDVNRAPSLSVAGAAAAEEDEEHDEAGAAAASSSPNNSAGSFPTDFSAQGGQVAPGGGGDRGACSRASDDDDGGSARKKLRLSKEQSAFLEESFKEHATLNPKQKLALAKQLNLRPRQVEVWFQNRRARTKLKQTEVDCEYLKRCCETLTEENRRLQKELAELRALKTVHPFYMHLPATTLSMCPSCERVASNSSAPAVAPVAPASSPSPAATGIAASSAPSEQQRPSSFAALFSSPLNRPLVAAQAQPQPRPQAPASS

SEQ ID NO: 21393 - protein, 173 aa, Sorghum bicolor
MSRGRDPLALSQVIGDVLDPFIKSATMRINYGDKEITNGTGLRASAVFNAPHVEIEGHDQTKLYTLVMVDPDAPSPSKPEYREYLHWLVTDIPEARDIRFGNEIVPYESPRPPAGIHRIVFVLFKQQARQTVYAPGWRQNFNIRDFSAIYNLGAPVAALYFNCQKESGVGGRR

SEQ ID NO: 21394 - protein, 374 aa, Sorghum bicolor
MGRAPCCEKSGMKKGPWTPEEDEKLIAYIKKHGQGNWRTLPKNAGLARCGKSCRLRWTNYLRPDIKRGRFSFEEEETIIQLHSILGNKWSAIAARLPGRTDNEIKNYWNTHIRKRLLRMGIDPVTHAPRLDLLDLSALLKPAAAAYYPTQADLDTLRALEPLANYPDLLRLASTLLSSGPPAIGDHHQNGQLLPWILQAQMAQQAAAAMAQQVAPPPQQQAEQFMQAGAACQMPDLVHMNSNPTTVQQQLAAAHQDMAAAACHSMQPPNNTGYEVDSLDVPALMQMVQAADASNLQQWSSTVTSSSNNNNNNNNNVGSGVSTPSSSPVARLNHSTSTTTTTYGGASASTSNDAAAAAALFNMQLSELLDVSDYM

SEQ ID NO: 21395 - protein, 301 aa, Sorghum bicolor
MPVLLREMEDHSVHPMSKSNHGSLSGNGYEMKHSGKKVCDKDSSSESDQSHQEASAVSESSPAEHTSTQSDNDEDHGKDNQNTMKPVLSLGKEGSAFLAPKLDYSPSFAYIPYTADACYGGVGVLTGYAPHAIVHPQQNDTTNSPGILPVEPTEEEPIYVNAKQYHAILRRRQTRAKLEAQNKMVKGRKPYLHESRHRHAMKRARGSGGRFLNTKQLQEQNQQYQALSSSMCSKIIGNSLISQSGPTCTPSSDTAGASTASQDRSCLPSVGFRPMTNFSEQGGGGSKLIVNSMQQRVSTIR

SEQ ID NO: 21396 - protein, 320 aa, Sorghum bicolor
MCGGAILSDLYSPVRQKVTANHLWTESGSSKSGKNWKRKSSWEFGEDDFEADFEGFEDGDSEEDVDFVHEGQEFQTNSSNLVVGSNVHTAKVASRKRRTQYRGIRRRPWGKWAAEIRDPRKGVRVWLGTYSTAEEAARAYDTAAWRIRGKKAKVNFPSAITNPEKRRRGRVARPRKKIASQETLKLNDASDDHVISAGSSTDDATAVKLELPESASPPPMSSAWLDAFELNQVNELSYLEVEETVGETRVTDTVFGNGEVRPADDFVYYDPFPDFVQLPYLEGNSYENIDVLFNGDTVQEGVNIGGLWSFDDVPMDHGVY

SEQ ID NO: 21397 - protein, 541 aa, Sorghum bicolor
MRRFAADRARRAVATSLRGAASRSAAPSPHAPAPRHPAAPVGAAAMAAAMARAMSTAAVGAPPVSLNTINPKVLKCEYAVRGEIVTHAQNLQQELQKNPESLPFDEILYCNIGNPQSLGQQPVTYFREVLSLCDHPALLDKSETHALYSSDAIERAWQILEKIPGRATGAYSHSQGVKGLRDEIAAGIAARDGFHASGDNIFLTDGASPAVHMMMQLLISSEKDGILCPIPQYPLYSASIALHGGSLVPYYLDEETGWGLEVDELKKQLEEARSKGITVRALVVINPGNPTGQVLAEENQKKIVEFCKNEGLVLLADEVYQENVYVEDKKFHSFKKIARSLGYTDDDLPLVSFQSVSKGFYGECGKRGGYMEITGFSPEVREQIYKVASVNLCSNVSGQILASLVMNPPKAGDESFESFMLERDGILSSLARRAKALEEAFNSLEGITCNKAEGAMYLFPRLHLPQKAIGAAQAAGTAPDAYYAKRLLEATGIVVVPGSGFGQVPGTWHFRCTILPQEDKIPAIISRFKEFHEKFMDEFRD

SEQ ID NO: 21398 - protein, 266 aa, Sorghum bicolor
MVPRDRAHSATTATAAPAENLVQGPILNNKCEKKAPKKVHKSEREKRKRDKQNDLFGELGNMLEPDRQNNGKACILSDTTRILKDLLSQVESLRKENNTLKNESHYVALERNELLDETNVIRGEISELQNELRMRLEGNPIWSHDTSRSNITAPHPATTVFTLQHSAHPQVIATMALPLQQPAVVEQSYAAPRRELQLFPEAAPTEDTEPPQNQGISNNVMRPQARYPPVVTTLPVHVYPVLPRMEDEQCSSGTTSSREEGGVGNR

SEQ ID NO: 21399 - protein, 1500 aa, Sorghum bicolor
MALGCMEHRGGCGADNDSGDGAGLMSAIPWDLFDDWANKQGLAPFDRRNTGVGMVFLPQDEKSMEEAKAATEKVFVDEGLEVIGWRPVPFNVSVVGRNAKETMPNIQQIFVKVAKEDNADDIERELYISRKLIERATKSFSWADELYFCSLSNRTIVYKGMLRSEVLGQFYLDLQNELYKSPFAIYHRRYSTNTSPRWPLAQPMRLLGHNGEINTIQGNLNWMRSRETTLQSPVWRGREHEICPFGDPKASDSANLDSTAELLLRSGRSPAEALMILVPEAYKNHPTLSIKYPEVIDFYDYYKGQMEAWDGPALLLFSDGRTVGATLDRNGLRPARYWRTSDDFVYVASEVGVIPMDESKVVMKGRLGPGMMITVDLQTGQVLENTEVKKTVALASPYGTWLQERTRSIKPVNFLSSTIMDNETVLRHQQAFGYSSEDVQMVIESMASQGKEPTFCMGDDIPLAVLSQRPHLLYDYFKQRFAQVTNPAIDPLREGLVMSLEVNIGKRGNILEVGPENADLVALSSPVLNEGELETLLKDPKLKPKVLSTYFDIRKGLDGSLDKTIQALCEEADAAVRSGSQLLVLSDRSEAPEPTRPAIPILLAVGAIHQHLIQNGLRMSASIVADTAQCFSTHHFACLIGYGASAVCPYLALETCRQWRLSNKTVNLMRNGKMPTVTIEQAQRNFTKAVKLGLLKILSKMGISLLSSYCGAQIFEIYGLGQEVVDLAFCGSVSKIGGLTLDELGRETLSFWVKAFSEDTAKRLENFGFIQSRPGGEYHANNPEMTKLLHKAIREKRDNAYTVYQQHLASRPVNVLRDLLELKSDRAPIPIGKVEPATSIVERFCTGGMSLGAISRETHEAIAIAMNRIGGKSNSGEGGEDPIRWNPLTDVVDGYSPTLPHLKGLQNGDTATSAIKQVASGRFGVTPTFLVNANQIEIKIAQGAKPGEGGQLPGKKVSAYIARLRNSKPGVPLISPPPHHDIYSIEDLAQLIYDLHQINPKAKVSVKLVSEAGIGTVASGVSKGNADIIQISGHDGGTGASPISSIKHAGGPWELGLTETNQTLIQNGLRERVVLRVDGGFRSGRDVLMAAAMGADEYGFGSVAMIATGCVMARICHTNNCPVGVASQREELRARFPGVPGDLVNYFLFVAEEVRATLAQLGYEKLDDVIGRTDLLKPKHVSLVKTQHIDLGYLLSNAGLPKWSSSQIRSQDVHTNGPVLDETILADPEIADAIENEKEVSKAFQIYNVDRAVCGRVAGVIAKKYGDTGFAGQLNITFNGSAGQSFGCFLTPGMNIRLVGEANDYVGKGMAGGELVVVPVDKTGFVPEDATIVGNTCLYGATGGQVFVRGKAGERFAVRNSLCQAVVEGTGDHCCEYMTGGCVVVLGKAGRNVAAGMTGGLAYILDEDDTLLPKVNKEIVKMQRVNAPAGQMQLKSLIESYVEKTGSEKGATILREWEAYLPLFWQLVPPSEEDSPEACAEFERVLAKQAKQATTQLSAK

SEQ ID NO: 21400 - protein, 599 aa, Sorghum bicolor
MPRPPKRAAAAAAKLPLTATFLSLSLSLLLLPLGFVATHRAFSGGVAAASTPTAKRVLLEDDGHANAAAAEHAAAVERHCAGTLHRDVCASTLSAIPDLAQKPVRDVISAVVARAAAAVRASASNCSAYLRRPAGAGALRVRDRLALSDCVELLQHTLAQLGTAEAELSAANSSTSTSTSTDEESVAGVQTVLSAALTNQYTCLDGFAGPSASEDGRVRPYIQGRIYHVAHLVSNSLAMLRRLPQRRRRRGREALELEGYGRVRRGFPSWVSAADRRRLQQQQVVPDLVVAKDGSGNFTTVGEAVAAAPNNSESRFVIYIKAGGYFENVEVGSEKTNLMFVGDGMWKTVIKASRNVVDNSTTFRSATLAVVGTGFLARDLTVENAAGPSKHQAVALRVNADLAAFYRCSFAGYQDTLYAHSLRQFYRDCDVYGTVDFVFGDAAAVLQGCSLYARRPGPGQKNVVTAQGREDPNQNTGIVVQGGKVAAAADLVPVLGNVSSYLGRPWKLYSRTVFVQTKMEALVHPRGWLEWNGTFALDTLYYAEYMNRGPGADTSARVAWSGYHVLTNATDAANFTVLDFIQGDLWLNSTSFPYTLGFT

SEQ ID NO: 21401 - protein, 324 aa, Sorghum bicolor
MAASSRMGALLVVYLTLMAAALGVRAELTADYYSETCPLALSTIKVLVGTAIVGEPRMGASLVRLHFHDCFVNGCDGSILLDDTDDMVGEKTAKPNNNSVRGYEVIDTIKSAVNTVCLGNVVSCADILAVAARDSIVALGGTSYDVVLGRRDATTASMDDANNVIPNPFMDLPALQASFESLGLSLHDLVVLSGGHTLGYARCLFFRGRLYNETATLDPTYAASLDERCPLSGDDDALSALDDTPTTVDTDYYQGLIQGRALLHTDQQLYQGGGDAGDLVKYYADNPTKFWEDFGAAMVKLGNLSPLTGDQGEVRENCRVVNQA

SEQ ID NO: 21402 - protein, 255 aa, Sorghum bicolor
MAARDRRELSSDEESAAAAAGDLRRGPWTVEEDMLLVNYVAAHGEGRWNALARCAGLRRTGKSCRLRWLNYLRPDLRRGNITAQEQLLILELHSRWGNRWSKIAQHLPGRTDNEIKNYWRTRVQKHARQLNCDVNSQLAAVSPPPPPPPAVASAAFGESNNDGSYYGIDNSNTAMSMWDTLCQPPHSTTAQLAGAGTCGWSDESLLVVPSGLLGDGGVYADMGFPDLCDTDTMTMWAAGAGSSADDLWYTQTMGL

SEQ ID NO: 21403 - protein, 485 aa, Sorghum bicolor
MESLGVLLLHPVNAYLEQELDRRCRLYRFWESPREEFLRAHAGAVRAVVGNANYGADAALIDALPALEIVASFSVGIDRVDLAKCRERGIRVTNTPDVLTDDVADLAVGLAIAVLRRIPQADRYVRAGLWKSRGDYTLTTRFSGKRVAILGLGRIGLAIAKRAESFGCSISYNSRSEKPFPNYKFYANVVDLAANCDVLIVACSLNAETHHIVNREVIDALGPEGVLVNVGRGAHVDEPELVSALVEKRLGGAGLDVYEHEPVVPERLFGLDNVVVVPHVGSDTEETCRAMADLVLGNLEAHASNEPLLTPFSGKRVGIIGLGRIGQAVARRVEAFDCPVSYYQRTEQASVYPNYTYYPSVVELASNSDVLVVACPLNASTRHIVSREVMEALGPKGVLINIGRGPHVDEPEMVAALADGRLGGAGLDVFEDEPNVPEALLAMDNVVLVPHVGSGTYETRKAMADLVLGNLEAHVLSKPLLTPVV

SEQ ID NO: 21404 - protein, 993 aa, Sorghum bicolor
MPASRIPLKRCTAAVPGVGEPGPTVSMPPAKRRRDRVVPSRFRDSMPPPAKKRAVVVSLPAPGGGLGVEKRDGEVYNVEVIMAEPKGDSFGPVETAVWTPARPAPTDADLYRACRNISKSGSFGGAASGSVLTSVSNAASDGGAGGNGTTVRVSNAASDGGAGGKGTTVRVSNAALEGGADGNGGLEGRPVVVECKPKREASDKKEDFYWPEDFVLGDVVWARSGKKSPTWPALVIDPMQHAPEVVLNSCVPGALCVMFFGYSANGHGRDYGWVKQGMIFPFVDYLDRFQGQPLYKLRPSKFRAAIEEAFLAERGFFDLEMDGVCSPRKSVNKQSDPNGFQEEAASNNEQECQSDNQVVGKLALSCDSCGNRLPSKVSKKRKQGGEQVLCRHCEKLLQSKQYCGICKKIWHHTDGGNWDLEKADYYCPDCKSKRKTVPATEKMNTSNSSECASTTKEKLTAMIAVCCNGEEALYVPEKHMILCQCKSCKERMMSLNEWEKHTGSRKKNWKMSIRQKSTGEPLINLLDDIPCGASKSSNPGIKKEELLQLQANAYSPVCAKWTTERCAVCRWVEDWDYNKIIICNRCQIAVHQECYGARAVQDLTTWLCRACEFPQQKRECCLCPVKGGALKPTDIEGLWVHVTCAWFQPKVSFPVEETMEPAMGIMSIPVEYFKKTCVICKQIHGACTQCHKCSTYYHAMCASRAAYRMELQCSERSGRHTIKMVSYCDFHSTPDPDNVLIVKTPEGVFSTKFFLQNGEKQTAARLVRKENHQEKVLPSIVSDCLVAKCLTYEMSKYKKEPGEAIAHRIMGPRHHSQDFIDGLNACMDRKDDQSFSTFKERLGYLQKTENLRVSCGRSGIHGWGLFAARNIQEGQMVIEYRGEQVRRCVADLREAQYHREKKDCYLFKISEDVVIDATDKGNIARLINHSCMPNCYARIMTVSGDRNQIILIAKRDVSAGEELTYDYLFDPDESEDCKVPCLCKAPNCRGYMN

SEQ ID NO: 21405 - protein, 221 aa, Sorghum bicolor
MARRGSLLAVAAALLVAVVAAAVPPTCERIECPAYEVVDSANGFEIRRYTDAMWITTAPIEDISFVAATRTGFLQLFNYIQGKNLYNETIEMTAPVLTQVSPSDGPFCASSFTVSFYVPAKNQADPPPAEGLRVDRWAGARYAAVRRFGGFVADADVGEQAAQLDASLQGTRWAAAVNDARRADPASPYTVAQYNSPFEFSGRVNEIWMLFDDAAAAATSM

SEQ ID NO: 21406 - protein, 347 aa, Sorghum bicolor
MGDSSGSVSVDVERLFFGGKEHRVRTRHGPLSVSVYGDEDKPALVTYPDVALNHMSCFQGLFFCPEAVSLLLHNFCVYHITPQGHELGAAPISADVPLPSVDDLADQVADVLDFFSLGSVMCLGVTAGAYVLTLFATKYRERVLGLILVSPVCKAPSWSEWLYNKVLLNLLYYYGTRGLVKESLLQRYFSMDVRGNGQDPESEIVQACRSLLDERQGTNVWRFLQAINRRHDLTESLKKLQCRTLIFVGDNSQFHADAVHMTTKLDRRYCALVEVQACGSLVTEEQPHAMVIPMEYFLMGYGLYRPSQQESSPRSTLSPFCISPELLSPESMGVKLKPIKTRISLNV

SEQ ID NO: 21407 - protein, 350 aa, Sorghum bicolor
MTPYLLAALRQYLPCNDAAAGAEADDEDAAAMAAGVDGYGCDEFRMYEFKVRRCARARSHDWTECPFAHPGEKARRRDPRKYHYSGTACPDFRKGGCKRGDNCDFAHGVFECWLHPARYRTQPCKDGTACRRRVCFFAHTPDQLRVLPTTQHQQSSPRGAAACSPLADSYDGSPLRRQAVESFRTKSIMSSSPTSTLMSPPKSPPSESPPLSPDGAAAFRRGSWPGVGSPVNDVLATLRQLRLSKANSSPSGGWGGYPASAVGYASPTAGGFYSLPTTPTTLATASGYMANMEPLDVSFCGDEEPVERVESGRALRTKVFERLSRDGAVSGDATAGISGPDVGWVSDLIN

SEQ ID NO: 21408 - protein, 796 aa, Sorghum bicolor
MGTGGDGDKAGPALPLEALLALGLDQRTAENALVNSKVTANLAAVIAEAGIKECDKSVGNLLYAVATKYPTNALVHRPVLISYVLSTKIKNPAQLDAALSFLTNTGPDSLDVGKFEEACGVGVVVSIEEIKSTVTDVLEENMEAIKEQRYHINVGMLCGLVRKRHPWGDAKAIKEEIDKRLVEILGPKTEADNIKPVKKKKEKPAKVEEKKVAVATAAPPTEEELNPYTIFPQPEENFKVHTEIFYSDGNIWRAHNTKEILEKHLKATGGKVMTRFPPEPNGYLHIGHAKAMFIDFGLAKERNGHCYLRFDDTNPEAEKKEYIDHIQEIVHWMGWEPYKVTYTSDYFQALYEHAVELIRKGLAYVDHQTAEEIKEYREKKMNSPWRDRPIEESLKLFEDMRRGLIAEGTATLRMKQDMQNENKNMSDLIAYRIKFTPHPHAGDKWCIYPSYDYAHCMVDSLENITHSLCTLEFDIRRPSYYWLLVALGLYQPYVWEYSRLNISNTVMSKRKLNRLVTEKWVDGWDDPRLLTLAGLRRRGVSSTAINSFIRGIGITRSDNSLIRVDRLEYHIREELNKTAPRTMAVLRPLKVVITNLEEGKVLDLDGKMWPDASDTDASSHYKVPFSRTVYIEKTDFRLKDSKDYYGLAPGKSVMLRYAFPIKCTDVIYGDSPDDVVEIRAEYDPLKTSKLKGVLHWVSEPAPGVEPLKVEVRLFEKLFMSENPAELEDWLGDLNPHSKEVIKDAYAVPSLATAVLGDKFQFERLGYFAVDTDSTPEKLVFNRTVTLRDSFGKAGPK

SEQ ID NO: 21409 - protein, 196 aa, Sorghum bicolor
MAAQEQEHEKQQAKTSTTSSLPSSSERSSSSAPNNLREGGAESDEEIRRVPEMGGASASASSGAGADERPKEDGGKQGGQLAAAAGAQPPAAAGKKRGRTAGDKEQNRLKRLLRNRVSAQQARERKKAYLTELEAKAKDLEVRNAELEQRVSTLQNENNTLRQILKNTTAHASKRSSGGGGGKGGDGGKKHHFAKS

SEQ ID NO: 21410 - protein, 591 aa, Sorghum bicolor
MDTAIGSVPASSDGAAQAASGSAPRDATLGRHLARRLAEVGARDVFTVPGDFNLTLLDELEAEEGVRLVGCCNELNAAYAADGYARARGGGVGACAVTFTVGGLSAINGVAGAFSENLPVVCIVGGPNSNDYGSNRILHHTIGLPDFTQELRCFQTVTCYQAVVNNLEDAHEQIDTAISTAIKESKPVYISISCNLPSIPHPTFSRHPVPFFLSPRLSNHMNLEAAVEAAVAFLNKAVKPVLVGGPKMRVSKACKAFVELADACGYPVAAMPSAKGLVPEHHSRFIGTYWGAVSTPFCAEIVESADAYLFAGPIFNDYSSVGYSLLIKKEKAIIVQPERVVIGHGPAFGCVLMKDFLHALATRLKKNTAAYENFRRIYVPPGEPLASEPGEPLRVNILFKHIQAMLSGNTAVIAETGDSWFNCQKLKLPEGCGYEFQMQYGSIGWAVGATLGYAQAAKDKRVIACIGDGSFQVTAQEVSTMLRWEQNTIIFLINNGGYTIEVEIHDGPYNVIKNWNYTGLVEAFHNGEGKCYTAKVRTEEELKEALKAALGPKKDCLCFIEVIVHKDDTSRELLEWGSRVSAANSRPPNPQ

SEQ ID NO: 21411 - protein, 436 aa, Sorghum bicolor
MYSNFKEQAIEYVKQAVQEDNAGNYVKAFPLYMNALEYFKTHLKYEKNPKIKEAITAKFTEYLRRAEEIRAVLDEGGAGPGSNGGDAAVATRPKTKGKDNGDGGNGGDDSEQSKLRAGLNSAIITEKPNVKWNDVAGLESAKQALQEAVILPVKFPQFFTGKRRPWRAFLLYGPPGTGKSYLAKAVATEADSTFFSISSSDLVSKWMGESEKLVANLFQMARENAPSIIFIDEIDSLCGQRGEGNESEASRRIKTELLVQMQGVGHNDDKVLVLAATNTPYALDQAVRRRFDKRIYIPLPDLKARQHMFKVHLGDTPHSLTESDFESLARRTDGFSGSDIAVCVKDVLFEPVRKTQDAMFFFKADGDMWMPCGPKQPGAVQTTMQELASKGLAAKILPPPISRTDFEKVLSRQRPTVSKKDLEVHERFTKEFGEEG

SEQ ID NO: 21412 - protein, 389 aa, Sorghum bicolor
MSQRKGASMAAAVTSSKHHEDQEMMMELRRGPWTLEEDNLLMNYIACHGEGRWNLLARCSGLKRTGKSCRLRWLNYLKPDIKRGNLTPEEQLLILELHSKWGNRWSRIAQHLPGRTDNEIKNYWRTRVQKQARQLRVDANSAVFRDAVRCYWMPRLLEKMAATSTAHDLHGELLPPAPPLHPSHVVAGMASSSSPIHGSHDHEQDPTSNAPAGSGYYHQRYPVDPSPSTSTTSGSTSAAALPPVPCFSELSWVDQYGYGPYSYTTDLDGAAGVSSFDDDSAALESLGLDGLDLGPAEADSDVLYSDTTLLDYLNSTCAGGGTMMTMMGGGVGGGSVVHNSCGGAMGGCGDDVAEYGRPTSSSSWRTDELVFQASARKLGDHQHQWGGGI

SEQ ID NO: 21413 - protein, 336 aa, Sorghum bicolor
MAASMSHRCHMLLLCVVLLAGAVRGHPWGGGLFPQFYDHSCPKAKEIVRSVVAQAVARETRMAASLVRLHFHDCFVKGCDASVLLDNSSSIVSEKGSNPNKNSLRGFEVVDQIKAALEAACPGVVSCADILALAARDSTVLVGGPSWDVPLGRRDSLGASIQGSNNDIPAPNNTLPTIVTKFRRQGLDVADVVALSGGHTIGMSRCTSFRQRLYNQTGNGMADATLDVSYAAQLRRGCPRSGGDNNLFPLDLATPARFDNLYFKNILAGRGLLSSDEVLLTKSAETAALVKAYAADVNLFFQHFAQSMVKMGNISPLTGPQGEIRKNCRRINGNHY

SEQ ID NO: 21414 - protein, 334 aa, Sorghum bicolor
MTTSMGSLVLLCLVSTLLFPSAVLGHPWGGLFPQFYDHSCPKAKEIVQSIVAQAVAKETRMAASLVRLHFHDCFVKGCDASVLLDNSSSIVSEKGSNPNRNSLRGFEVVDQIKAALEAACPGTVSCADILALAARDSTSLVGGPYWDVPLGRRDSLGASIQGSNNDIPAPNNTLPTIITKFKRQGLNVVDVVALSGGHTIGMSRCTSFRQRLYNQTGNGMADSTLDVSYAAQLRQGCPRSGGDNNLFPLDFVTPAKFDNFYYKNLLAGKGLLSSDEVLLTKSAETAALVKAYAADVNLFFQHFAQSMVNMGNISPLTGSQGEIRKNCRRLNNSH

SEQ ID NO: 21415 - protein, 306 aa, Sorghum bicolor
MDALWKQGSSSLCDWPAAEAELLRRGPWTVDEDALLAGYVAAHGEGRWNELARAAGLRRTGKSCRLRWLNYLRPGVRRGDFTPREQLLILDLHARWGNRWSKIAAHLPGRTDNEVKNYWRTRVQKHAKQLGCDVGSHRFHDAIRNLWMPRLIERIHADETSATAAAAAAAADNVSRYYSSTSPSHELSSSQPAAAYGNAVPVGNCARAPSPDASSSVTGSSWSREASPPSQLQSSSCSTMAGCSTSTDQCHNNGCSSATSVVDMFDESWSELLARANHDDTEFGFGLGETGDNWWSLEDIWEQPLY

SEQ ID NO: 21416 - protein, 293 aa, Sorghum bicolor
MTTTTTRVASSRSCGGDDEPAVRKGPWTLEEDLILVSYISQHGEGSWDNLARSAGLNRNGKSCRLRWLNYLRPGVRRGSITAGEDTVIRELHARWGNKWSKISKQLPGRTDNEIKNYWRTRIQKKKKQHQAPMATTTSTQQQQQEQEPSTTTVSSGGATGDYYWCTKPADPDLQQQQAYYCQKAAMAAAATTNNVNAVAVSSEGAGASSPAALTMSQDSSTAAGDWYTQHQQTTTYPYYCSELSLVAGGGHGETTAGLDALTMQFLSSHFTASFWTNGSVDDFWETKPITDAF

SEQ ID NO: 21417 - protein, 1051 aa, Sorghum bicolor
MIFKRNQRSEILALRRCNAAGGGGEDEGGGDPRPRKRRRGDEFFPVELLGDVPASAIPYAAFGLRWSEESAEAPAEAAQPVPAARPPVVRTSRGRTQVLPSRFNDSVLIDPWKKEKPANPPPAAAPPVKTEHLVRKNGLLHSKAAIFGRSFALSEVHDNDEEEAMVEGYRARRNFGDSRKYLASGSTLTSVHDEPYSNYHRKEVMLRHYYEEEDEEDEEDEQEEDEGYEEEDKEEIFHCTEQLVYGDIVWAKLGKRQPMWPGVLIDPTQQVAADAMPPQPRRVAVLCVMLFGWCTEFSDEKKYVWVRQGLIFPFSDYMDRFQGQTELSSCKPADFRRAVEEAFLADQGFSEVVIDCSTKGQPVVCHSFPDDLHEVTGSNELEYQPQIKRCRRALQCESCGNCFPNKDTNKMVHVMEQLACRLCAGILALKKYCGICLKSLQHKYGGRWVCCHGCESWVHAECDENCSNLKDLQDNSYRCPYCRVKMNSTLPGKNTKFSDVRKDSSAQKGGKPDKVALVCFDLEGTYQPDLELISCHCGPCKGQKFLFNEWERHAGCRSKNWRSSIKLKGSLMPFGKWIDRHQPGVCPTNPSKRLSQKMKKQKLIDLLNDPYDPVNVKWTTERCAVCRWVEDWDYNKIVICNRCQIAVHQECYGVTGKQDFTSWVCRACEKPEQKRECCLCPVKGGALKPTNVDNLWVHITCAWFQPQVAFASDELMEPAVGILNIQPLLFMKMCVICKQIHGSCTQCYRCSTYYHAICASRAGYRMELQCLEKNGKQTTKKISYCAQHRSPNPDNVLIIQTPAGTFSSKKLVQSNGKVAASRLIRKDIPLDLPLEVEISENLSAARCRIYVRKDLKRSREGAIAHRVRGPCQHRWDEIDILNPPREERDPESFCTFKERLCYLQKTEHGRVCFGRSGIHRWGLFARRDIQEGEMVLEYRGEQVRRSVADLREEKYRVQGKDCYLFKISEEVVVDATDKGNVARLINHSCTPNCYARIMSVGHDESRIVLIARKNVCAGDELTYDYLFDPDEADERKVPCLCQTANCRKFMN

SEQ ID NO: 21418 - protein, 783 aa, Sorghum bicolor
MEPSRGAAGGGRRWGDAEAEAEGDAADEGRRGEDGGEVSLREWLDRPGRAVEAAECVHVFRQVAEAVAVAHAQGVAVGSARPSCFVVSPPFARVAFIESASGSDASGSCSGSDASEDADRDASPPRRRDGAGRGEERAGKSFPLKSVLAMELNWYTSPEEADDSAATFASDVYRLGVLLFELFCTFETMEDKMRAMANLRHRVLPPQLLLKWPKEASFCQLLMHPVPETRPKMSEVLQSEFLNQSRNSLEEREAALRLREEIEEQELLLDFLQQLQKRKQDIADSLQDTVAFLSSDINEVLHQQSALGHCVNFSTDLDKEVCSGTVEDQSDCGSRKRFRPELQGVDMEENNRTVEECSRTVPSSELIQESVLSKSSRLMKNFKKLETAYFLTRSKLAKQAGNQISNHQIVKRATGSAIGTEGSSIDDFSLERQYGRRQRGWVNSFLEGLCKYLSFSKLKVRAELKHCDLLNSSNLVCSVGFDRDREFFATAGVNKKIKVFDYNMIVNEHRDIHYPVVEMSNRSKLSCICWNSYMKSHIASSDFEGIVQVWDVTRSQVFVEMREHERRVWSVDFSIVDPTKLVSGSDDGSVKLWDMNQAGSIGTIRTRANVCSVQFQPDTSRSIAIGSADHKIYCYDLRNIRAPYCTLVGHTKTVSYVKYLDASTIVSASTDNSLKLWDLSMSRGRIIDSPIQTFTGHTNTKNFVGLSISDGYIATGSETNEVFVYHKEFPMPVLAYKFSVTDPISGQEIDDQSQFISCVCWRGQSSTLLSANSSGNIKILEMD

SEQ ID NO: 21419 - protein, 915 aa, Sorghum bicolor
MNPNKFTHKTNEALALAHNIASEAGHAQITPLHLAAALIADRPGVLRQAIAHASGGNDVAAADSFERVLASTLKRLPSQSPPPDTVPASTALVKVIRRAQSAQKVRGDSHLAVDQLLVGLLEDPQVWDALKEAGVVAARVKAEVDKLRGGDNRRVESASGDTSFQAVKTYGRDLVEVAGKLDPVIGRDEEIRRVVRILSRRTKNNPVLIGEPGVGKTAVVEGLAQRIVRGDVPSNLLDVRLVALDMGALVAGAKYRGEFEERLKAVLKEVEESDGKVILFIDEIHLVLGAGRTDGSMDAANLFKPMLARGQLRCIGATTLEEYRKYVEKDAAFERRFQQVYVAEPSVSDTVSILRGLKEKYEGHHGVRIQDRALVIAAQLSSRYIMGRHLPDKAIDLVDEACANVRVQLDSQPEEIDNLERKRIQLEVELHALEKEKDKASKARLVEVRKELDNLRDKLQPLQMRYRKEKERIDEIRKLKHRREELLFSLQEAERRMDLARVADIRYGALQEIDAAIAKLEGETGENLMLTETVGPEQIAEVVSRWTGIPVTRLGQNDKERLVGLADRLHRRVIGQHEAVNAIAEAVLRSRAGLGRTQQPTGSFLFLGPTGVGKTELAKALAEQLFDDEKLLVRLDMSEYMEKHSVSRLIGAPPGYVGHEEGGQLTEQVRRRPYSVILFDEVEKAHVAVFNTLLQVLDDGRLTDGQGRTVDFRNTVIIMTSNIGAKHLLAGMVGNNSMKAARDLVMLEVRKHFRPELLNRLDEIVIFDPLSHEQLRMVARLQVKEVAYRLAERGVALAVTDAALDLILSLSYDPVYGARPIRRWIEKKVVTELSKMLIKEEIDENSTVSIDASPSKDELIYKVDMNGGLVNAQTGHKSDILIQVPNGGINGGAAHTVKKMRLMEDDQDDDDMEEE

SEQ ID NO: 21420 - protein, 282 aa, Sorghum bicolor
MVMEEAVDGEMSLSNMVLGFMEDFERDHQRRLENDDDDDEGSSGGDTAESKAFWQTQHSQLHEALAKTSPAESRIRADTEEAVKSMRAAAACSCTGRGRPAARDCRLCMLRHVADRLRDAGYNSALCKSKWTRSPDIPSGEHSYVEVVVQTRSGKAVRVVVELSFRAEFEVARASAGYRALVTALPEAFVGRADRLRGVVKVMCAAAKQCMKENNMHMGPWRKHKYMQAKWLGTPERTAPAAVAATPVVVPSVTVVGSPEKQTKFRASMLTFDFGRNAVEVA

SEQ ID NO: 21421 - protein, 177 aa, Sorghum bicolor
MTDVEPLVLAHVIRDVLDSFTPTIPLRIAYNNRLLLAGVELKPSAVVNNPRVDVGGTDLRVFYTLVLVDPDAPSPSNPSLREYLHWMVIDIPGTTGANFGQELMFYERPEPRSGIHRMVFVLFRQLGRGTVFAPDMRHNFNCKNFARQYHLDIVAATYFNCQREAGSGGRRFRPESS

SEQ ID NO: 21422 - protein, 613 aa, Sorghum bicolor
MAPMATAAAAAAVGRVTALGVAACERDVEKLEFIEDKTKNFDAEQVRVLAEILARNNGAEYLRRHGMEGRTDRQAFKARVPVVTYEDLRPEIDRIANGDRSNIISSHPITEFLTSSGTSAGERKLMPTIEDELNRRQMLYSLLMPVMNLYVPGLDKGKGLYFLFIKSETKTPGGLPARPVLTSYYKSDHFKHRPYDPYNVYTSPTAAILCTDSFQSMYSQMLCGLVARTEVLRVGAVFASGLLRAIRFLQLHWKELAHDLRTGTLSARVVEPSIRDAVAEVLTKPDAGLADLVEAECGKDNWEGIITRVWPNTKYLDVIVTGAMAQYIPTLKYYSGGLPMACTMYASSECYFGLNLRPMCDPSEVSYTIMPNMGYFELLPHDPEDKPAVSSSSAASAMDHDRLLVDLADAEVGKEYELVITTYAGLCRYRVGDILHVTGFHNAAPQFRFVRRKNVLLSIDSDKTDEAELQSAVERASRLLAPYDARIVEYTSQADATTIPGHYVVYWELMVRDGGASPEPDVFERCCLEMEEALNAVYRQGRNGDAIGPLEIRVVRGGTFEEVMDYAISRGASINQYKAPRCVSFGPIIELLNSRVVSRHFSPACPTYSPHKK

SEQ ID NO: 21423 - protein, 242 aa, Sorghum bicolor
MAPRVADKSPLPPATGLGLGVGGVVGGVGMGPHYRGVRKRPWGRFAAEIRDPAKKSRVWLGTYDTAEEAAKAYDAAAREFRGAKAKTNFPFPSQCAVAAGGAGSPCSNSTVDSSGGASGCAVQAPMQAMPLPPALDLDLFHRAAAVNAVTAGGMRFPFKGYPVARPTPHQYFFYEQAAAAAAAAAGYRMLKVAPPPVTVAAVAQSDSDSSSVVDHTPSPPAVTAKKEVGFELDLNWPPPAEN

SEQ ID NO: 21424 - protein, 585 aa, Sorghum bicolor
MTTSSSGSIEAPAASSRPGSFSFASTSFTDMLGGSADAAAGGASRYKAMTPPSLPLTPSSFFSNIPGGLNPADFLDSPALLSSSVSKHRRTPCSGAHCRPQVPGMLMRFCTFQIFPSPTTNAFASQQFSWLTTPGAEQGVKEEQRQSYPDFSFQTAPTTQEAVRTTTTFQPPIPAAPLGEEAYRSQQQQQQPWGYQQQQQQPAGMDAGSSQAAYGGAFQAGSSDAGAMAPHVPASGGYSHQAQRRSSDDGYNWRKYGQKQVKGSENPRSYYKCTFPSCPTKKKVERSLDGQITEIVYKGTHNHAKPQNTRRNSGAAAQLLQGGDASEHSFGGTPVATPENSSASFGDDEVGVGSPRAANAAGDEFDEDEPDSKRWRKDGDGEGISMAGNRTVREPRVVVQTMSDIDILDDGYRWRKYGQKVVKGNPNPRSYYKCTTAGCPVRKHVERASHDLRAVITTYEGKHNHDVPAARGSAALYRPAPPPPPSADNAGHYLAAQPGMAYQTGQQQYGFGGQGSFGLSGGAGAPAQSSGSFAFSSAGFDNPMGSYMSQHQQQQRQNDAMHASRAKEEPRDDMSFFPQSMLYTD

SEQ ID NO: 21425 - protein, 401 aa, Sorghum bicolor
MASDMSKNVRALDEQEVTSQQRAGRTSAAATEEQDPLARQSSIMSLTLEELQNSLCEPGRNFGSMNMDEFMANIWNAEEFQAATGTGGCSKEGTEREPMMMPVAAAAAGTGENGAGASGLVRQGSFALPPPLSRKTVEEVWAEINQDPADSQANANATPQAVVQPQMGSGGVGGVAGSGRQVTLGEMTLEDFLVKAGVVRGAFAGHGGQAVGMVPAGPMGMQHAAAPMMYQVAAPVPHNAVYPVMGDGMGYHNGYPGGMAVVPPPPPSQCVAAAAVSPGSSDGMSAMTQAEMMNCIGNGGMVRNGGGGGARKRDSPEDGCTEKTVERRQRRMIKNRESAARSRARKQAYTVELEAELNHLKEENERLRAEELVEKMMEQARENVSAKKGGRGLRRWGSAMW

SEQ ID NO: 21426 - protein, 416 aa, Sorghum bicolor
MAVVRAEAVDTSISPRVSALRPSKTMAITDQAMALRQAGVPVIGLAVGEPDFDTPPAIAEAGMNAIRDGYTRYTPNAGTLELRKAICAKLQGENGISYLPDQVLVSNGAKQCITQAVLAVCSPGDEVLIPAPYWVSYPEMARLADATPVILPTNISENFLLSTELLAEKINEKSRLLILCSPSNPTGSVYPKELLEKIADIVKKHPRLLVLSDEIYEHIIYQPAKHTSFASLPGMWERTLTVNGFSKAFAMTGWRLGYLAAPKHFVAACGKIQSQFTSGASSISQMAGLAALNLGYAGGEAVSNMVKAFQERRDYLVKNFKELPGVKISEPQGAFYLFIDFSAYYGSEVQGFGTIKNSESLCIFLLEKAQVALVPGDAFGDDKCIRISYAASLTTLQTAMAKIKEAVALLKPCVAA

SEQ ID NO: 21427 - protein, 667 aa, Sorghum bicolor
MAARGGWTKLLFALLVAGLLPVVAPTRTYAAAAAEGGGARGTVIGIDLGTTYSCVGVYRNGRVEIIANDQGNRITPSWVAFTDGGERLIGEAAKNQAAANPERTIYDAKRLIGRQFDDAVVQRDMKLLSYDVVERNGKPHVRVQVREGDVRELSPEEVSAMVLTKMKETAEAYLGEKVTDAVVTVPAYFDDAQRQATKDAGTIAGLNVRRIINEPTAAAIAYGIDDKGPEKKVLVFDLGGGTFDVSILAIDNGVFEVLATNGDTHLGGEDFDQRVMDYFIKLIKRRHGRDISGDARALGKLRRECERAKRALSNQHQVRVEIEALFDGVDISEQLTRARFEELNSDLFRKTMVPVKKAMADARLQKSDIDEIVLVGGSTRIPKVQQLLKDYFNGKEPSRGINPDEAVAYGAAVQGGILSGHGESMLVIDVTPLTLGIETVGGVMTKLIPRNTVIPTKKTQVFTTYQDRQTTVSIMVFQGERSMTKDNELLGKFDLSGIPPAPKGTPQIEVTFEVDVNGILHVKAADKGTGRSEKVTITSDARRVSQEEMDRMVHEAEEFAEEDRKARERVDARNKLETYVYQVKSAVVDDSNMADKMNADEKEKVEEAVREANEWIEVNSDADKEDYEEKLKELEDVCSPVISAVYQRSGGGAPADDTYDEDDHDEL

SEQ ID NO: 21428 - protein, 442 aa, Sorghum bicolor
MAGSSSMDTEAAGQQLKHGSGYSIPATAHAVDTDSWQQVGLLMVIGFNCAYVLSFSNLMMVPLGWAWGVACLLLVGAAAWYANWLLAGLHFVDGQRFIRYRDLMGFVFGRNMYYITWFLQFTTLLLCNMGFILLGARALKAINSEFTHTPARLQWFVTATGFIYFAFAYFVPTISAMRNWLATSAALTLAYDVALLAILIRDGKSNKQKDYNVHGTQAEKVFNALGAVAAIVVCNTSGLLPEIQSTVREPAVRGMRRALLLQYTAGAAGYYGISVAGYWAYGSAVSEYLPNELGGPRWAAVLINATAFLQSIVSQHLFTVPIHEAMDTRLQRLDEGMFSRYNLTRRLCARGLVFGFNVFVTALFPFMGDFVNLVGSFALVPLTFTFPSMAILKIKGKSGGRCNRLWHWGIIVFSSVLCVATTAAAVRLIFNNARIYHFFADM

SEQ ID NO: 21429 - protein, 569 aa, Sorghum bicolor
SSPSLTALRFHRVDAKLSPPLLAACHGPPGGFRGYGDSGGSDGGDGGSGGGGGRGMDSPEPGDGWWRRWFQALHPEFLLLFLLLQSGAASALAEALGNSGDDAGGVWEVRGGTRTRLVPDSTWTSYLIAGDDGSKREDEDGKVGDGPEGLAALRRQLGRSWRRCADVAVQLLLPDGYPHSVSSDYMNYSLWRGVQGVASQISGVLSTQALLYAVGLGRGAIPTAAAVNWVLKDGLGYLSKIMLSKFGRHFDVNPKGWRLFADFLENMAYGLEILTPVFPHLFVPIGAAAGASRSAASLIQAATRSCFYAGFAVQRNFAEVIAKGEAQGMVSKFVGIGLGIALANQIGSSVPLALISFAGITAVHMYCNLKSYQSIQLRTLNPYRASLVFSEYLLSGQVPSVKEVNDEEPLFFNLSLGASCQQSKILSAEAKDAADRICRRLQMGSKLSEIIESKEDACALFDLYKNEQYLLMDYKGKFCIVLKEGSSPEDMLKSLFHVNYLYWLERYMGFKPSNVASECRPGGRLEVSLDYAQREFSHVKHDGSDGGWVMDGLIARPLPVRIRIGDGAP

SEQ ID NO: 21430 - protein, 595 aa, Sorghum bicolor
MAHITLGLPEPPPSSSQHGCRRRLLTILVSIVISVALAVAVSLAIYFAVRPAPGDGPSLMATTEAITRTCGPTLYPALCVSELAALPGAAAARDADLLVPMSLDATRRRVADALADATELVAARAPLDRSAGAGGYGISDCLEMLEAAADLLSRSVAAVTAPAAAAAAIAHDDVMTWLSAALTYHDTCRDGLHEEVDADGKDDGRAVKAQMLGSLGNLMEHLSNSLAIFKAWGAPVVSGGLPVQKRQLLSARSGHGDLTFPAPSWVKHSDRRLLEVPTGDMVPDMVVAMDGSGTHQRIGDAVEAAPVRSARRVVIYIKAGVYGENVKVARNKTNLMLVGDGAGQTVVVGRRSVADGLRTFDTATLSVSGDGFMMRDLTVENRAGPREHQAVALLVTADRAVAYRCAVVGYQDTLYAHAQRQLYRECEVAGTVDAVFGNAAAVLQNCTLRARRPLPGQKNTVTAQGRADPNQSTGFSVHACRLVPAPEYPASSTYLGRPWKPYARVVYMMSYVGEHVDAAGWLAWDASAGAPDDTVYYGEYQNYGPGAALEGRVAWPGHRVITMAEEAMEFTVRWFIAGYSWLPATGLPFVGGLTA

SEQ ID NO: 21431 - protein, 313 aa, Sorghum bicolor
MKFHRLTTARSGSAACIGLSTPTPTPTGMDAGRFPTPLAAHGCARISSTTTDDDNSITQACPITTSRGTSTPPPPAGPPGPHLPPRPLCLLARSRSSISRKHPHRQESLCSGLERRRTTTTTTRQRGSRERRRSSDRAATMQRGDPLVVGRIIGDVVDPFVRRVPLRVAYAAREISNGCELRPSAIADQPRVEVGGPDMRTFYTLVMVDPDAPSPSDPNLREYLHWLVTDIPATTGVSFGTEVVCYESPRPVLGIHRMVFLLFQQLGRQTVYAPGWRQNFSTRDFAELYNLGLPVAAVYFNCQRESGTGGRRM

SEQ ID NO: 21432 - protein, 337 aa, Sorghum bicolor
MGPRSAMGCSSLPSSRALWLTTAVVAALAAGAQASLSPGFYDATCPGLQPIVRRVVARAVQMEPRMGASLLRLFFHDCFVNGCDASVLLDDVPGSFVGEKNAGPNANSLRGFEVIDAIKAQVEASCNATVSCADIVALAARDAVNLLGGPRWSVPLGRRDARNTSANAANANLPPPDASLPTLLSMFGAKGLDARDLTALSGAHTVGRARCVVFRSHIYNDTATTNATFAAELRSTVCPYTGGDANLAPLKLQAPDVFDNGYFRDLVTRRVLLRSDQALYDGGNGTTDALVRAYAANGTAFAADFAAAMVRMGNLGPPAGSAAAAATEVRLNCRRVN

SEQ ID NO: 21433 - protein, 548 aa, Sorghum bicolor
MEVAVERPPPAPQVKAEEKRPDAKPEIAARPPMVGSALPIVFESFPSTQRDAAGGINVKQEERRLEAARAEMGEVREENERLKSMLSRIVSQYQSLQMHFLDVVKVQEQASSAAKVAEKKLPVAPAPAPNPGTDDDGPDDLVSLSLGTRANSGGAPRRKGHERSSSSSGTAETTTAADADDQGHHQLSLGLGFARGNGLPSSTTTATDDDKASHASTAPVLNLTSDSSGSADDNDDAKPALAAAGTARKSPSAGAGAGDRSADDEVQQQAKKARVSVRVKCDTPTMPDGCQWRKYGQKISKGNPCPRAYYRCTVAAHCPVRKQVQRCAEDTSILITTYEGAHNHPLTPAATAMASTTSAAVAMLTSGSTTSAASASLVHGHGHPLPAAAGLFGPTTMVSTAASCPTITLDLTSPAAPHSLMHSSPYAAAAAAAAAAGFESKAFPAAWSNGYLAYGGAHPSYYSKSSTSPALGHLFGGSLGVPSRPEQLYAQSYLQRASSLGGGHGAVAPAAVTDTLAKAITSDPSFQSALAAAITSVMGRGGAAAAQK

SEQ ID NO: 21434 - protein, 107 aa, Sorghum bicolor
MSGVWVFKNGVVRLVENGAAAGGEAVRRRKALVHTPSGQVVRSYAELESELRALGWERYYEDPALYQFHKRGSLDLISLPADFNRFSSVHMYDIVIKNRDSFRVVDV

SEQ ID NO: 21435 - protein, 408 aa, Sorghum bicolor
MAAQRGKADLPCPALPCSVCRRAQIGPPRASPEATRPTPKSGKGPSKRQAHVTWLIPLSLSPRIHPPSSKQQQPSAMAAAAFLSARAAPALLSPLRSRRLYRRLVASSSSAGGQGGGGGVEFQGKVGFLGLGIMGAPMASNLISAGCDVTVWNRTKSKCDPLLSLGAKYEPSPAQVASSCDVTFAMLADPQSAAEVACGSSGAAEGLAPGKGYVDVSTVDGATSKLIAERITSTGASFLEAPVSGSKKPAEDGLLIFLTAGDESLYKRVAPLLDVMGKSRFYLGDVGNGAAMKIVVNMVMGSMMVSFSEGLLLSEKVGLDPNTLVEVISQGAISAPMFSLKGPSMVKAAYPTAFPLKHQQKDMRLALALAESVSQSIPTVAAANELYKAAKSLGLSDHDFSAVIEALK

SEQ ID NO: 21436 - protein, 468 aa, Sorghum bicolor
MAPAAAFDAEAGATNGNGVSHGHGTKPGLTAVGDAGAAFVLESKGTWWHAGFHLTTAIVGPTVLTLPYALRGTGWALGLTLLSAMAAVTLYEYSLMSRVLDHCEARGRRHIRFRELAADVLGSGWMFYFVVTVQTTINTGVSIGAILLAADCLEIMYTSLAPHGPLKLYHFIIMVAVVLAFLSQLPSFHSLRHINFVSLLLSLGYTILVSAACIRAGLSKNAPVKDYSLSSSKSEQTFDAFLSISILASVFGNGILPEIQATLAPPAAGKMMKALVLCYSVVVFTFFLSSITGYWAFGSHVQSNVLKSLMPDSGPALAPTWLLGVAVLFVLLQLLAIGLVYSQVAYEIMEKSSADAAQGRFSRRNLVPRLLLRTLYLAFCALMAAMLPFFGDIVGVVGAIGFIPLDFVLPVLMYNMALAPPRRSPVFLANTAVMVVFAGVGAIGAFASIRKLALDADKFKLFSNNVVD

SEQ ID NO: 21437 - protein, 230 aa, Sorghum bicolor
MGSTSPSGLELTMAVPGLSSSSGSEGFGCNNNGNGNGNNMRDLDMNQPASGGEEEEFPMGSVEEEEDERGGAGGRGPHRSKKLRLSKEQSRLLEESFRFNHTPTPKQKEALAGKLQLRPRQVEVWFQNRRARTKLKQTELECEYLKRCFGSLTEENRRLQREVEELRAMRVAPPTVLSPHSRQPLPASALTMCPRCERITAATAARTPRPAAAAAAGSNPFHPRRPSAAF

SEQ ID NO: 21438 - protein, 158 aa, Sorghum bicolor
MAERRIGVAMDFSPSSKKALRWATDNLVCKGDTLVLLHIRHHRKDEAKNTLWSRTGSPLIPLEELMDPPVRQRYDMPEDPEVFDTLSAVARQKELCVVIKMYWGDPREKVCDAVEELHLESLVMGSRGLGSVQRILLGSVTNYVLSNASCPVTVVKSK

SEQ ID NO: 21439 - protein, 461 aa, Sorghum bicolor
MGMGAVAATTREDEEAKKMEAGEDTVGQKLDAGALFVLQSKGSWLHCGYHLTTSIVAPALLSLPFAFASLGWAAGIICLVIGAVVTFYSYNLISLVLEHHARQGRRQLRFRDMATDILGPGWGKYYIGPIQFMVCFGAVIGCTLLAGQSMKAIYLLANPGGTIKLYVFVAIFGVFMVILAQLPSFHSLRHVNLISLLLCLAYSFCAVAGSIYLGNSDKAPPKDYSVSGDTQNRVFGVFNAIAIIATTYGNGIIPEIQATVAAPVTGKMFRGLCLCYAVVVTTFFSVAISGYWAVGNQAQGTLLSNFMVDGVAVIPKGLLLVTQLFTLLQLSAVGVVYLQPTNEVLEGLLSDAKQGQYAPRNVLPRLVSRTVAVALATTVAAMLPFFGDMNSLIGAFGFLPLDFAVPALFYNVTFKPSKKGFLFWLNTTIAVVFSGLAVIASVAAVRQIALDAKTYKLFANV

SEQ ID NO: 21440 - protein, 408 aa, Sorghum bicolor
MASAPAGEVPSHFLCPISLQLMREPVTLPTGISYDRAAISRWLAAPAPAGGRTCPVTRVPLPPQPQLTPNHTLRRLIHAWLASLSPEAEVDEDVAALRRPVPGAEVAALLSHAAAAQVEALKRLRELVAECEDNRAVLESQDGVFDALSRVVSSADACSTAREEAVGVLASLRIPEPELAAVVARHSNLGEALTAVLRSSNVKSRANAALLVRSLSEAAWPAWVIGLSQELLAEVVRVVRDRVSTQATKAALHALAALCPYGRTRVKIVGAGSVPAIVDLLLDDPERRVNEVALVALDRLCTCAEGRAELVAHAAGLAVVGKKVLRVSEAASERAVRVLRSVARHAATPAVLQEMAQSGVVAKLCAALRSEQCGVRTKERAHEVLKLHSRTWRSSPCLSPKFLELYPS

SEQ ID NO: 21441 - protein, 466 aa, Sorghum bicolor
MDKSGAAADDVERGDYEQEHDRRGTVWTATAHIVTAVIGSGVLALAWSVAQLGWVAGPLALAGFACVTYYTSTLLANAYRAPHPVTGDRNRTYMDAVRSYLSPREVLMCGIAQYVNLWGTMVGYTITATISMAAIRQSDCFHRNGAGARCDASGTVLMLAFSVVQVVLSQFPGLEHITWLSVVAAVMSFAYSFIGLGLSVGQWVSHGGGLGGRIAGATAASSTKKLWNVLLALGNIAFAYTFAEVLIEIQDTLKSPPPENKTMKKAAMYGIGATTIFYISVGCAGYAAFGSNAPGNILTAGGLGPFWLVDIANMCLILHLIGAYQVYAQPIFASVERWAASRWPEAKFINSAYTVSIPLMQRGSVTVAPYKLVLRTVIVTATTLVALMIPFFNAVLGLLGAFSFWPLTVYFPISMHIAQGKITKGTKWYLLQALSMICLMISVAVGIGSVTDIVSSLKVSSNPFKL

SEQ ID NO: 21442 - protein, 470 aa, Sorghum bicolor
MDMEKVERKEVEVDDDGRVRTGTVWTATTHAITAVIGSGVLALPWSVAQMGWVLGPIALIGCAYITYYTAVLLSDCYRTPDPVHGKRNHTYMDVVRSCLGPRNVVVCGLAQYAILWGTMVGYTITTATSIMAVARTDCHHYSGHDAACVSSGTMYMVAFGLVEVVLSQFPSLEKLTIISVVAAVMSCTYSFVGLFLSAAKLASNHGARGTLLGVKIGAAAGVSASTKTWHALQALGNIAFAYTYSMLLIEIQDTVKAPPSENVTMKRASFYRIGVTTIFYVSLGCIGYAAFGHAAPGNVLTGFDEPFWLVDVANVAVVIHLVGAYQVYAQPIFACYEKWLGARWPDSAFVHREYAVRLPLVGGGRAVRFTMCKLVLRTAFVAATTVVSLMLPFFNAVLGLLGAIAFWPLTVYFPVTMYIAQAKVAPGSRKWVALQALNVGALVVSLLAAVGSVADMVQRLGHVTIFQTQL

SEQ ID NO: 21443 - protein, 491 aa, Sorghum bicolor
MAENVVATYYYPTAAPAAMEVCGAELGKGASDKCFDDDGRPKRNGTMWTASSHIITAVIGSGVLSLGWAIAQLGWVAGPAAMLLFSLVTYYTSSLLADCYRSGDPSTGKRNYTYMDAVNANLSGIKVQICGFLQYANIVGVAIGYTIAASISMLAIRRANCFHQKGHGNPCKVSSTPYMIIFGVAEIFFSQIPDFDQISWLSILAAVMSFTYSSIGLGLGIVQVIANRGVQGSLTGISIGVVTPMDKVWRSLQAFGDIAFAYSYSLILIEIQDTIRAPPPSESTVMKRATVVSVAVTTLFYMLCGCMGYAAFGDGAPGNLLTGFGFYEPFWLLDVANAAIVVHLVGAYQVYCQPLFAFVEKWAAQRWPDSAFVTGEVEVPLPATRRRSCKVNLFRATWRTAFVVATTVVSMLLPFFNDVVGFLGALGFWPLTVYFPVEMYVVQKKVPRWSPRWVCLQMLSLGCLVISVAAAAGSIAGIASDLKVYRPFKSY

SEQ ID NO: 21444 - protein, 555 aa, Sorghum bicolor
MATPVRSAAAPRRLVPSIPPASSGHVQQLACFGTRTEPCGARGLSMVVADSTRRRAKLGDGGDGVLGASVLGGLGMAGLGDQLSVVMKFGGSSVASAARMAEVAGLILTFPEERPVVVLSAMGKTTNNLLLAGEKAVGCGVIHVSEIEEWNMIKDLHIKTVDELGLPRSVIQDMLDELEQLLKGIAMMKELTPRTSDYLVSFGECMSTRIFAAYLNKIGVKARQYDAFDIGFMTTDEFGNADILEATYPAVAKRLHGDWILDPAIPVVTGFLGKGWKSGAVTTLGRGGSDLTATTIGKALGLREIQVWKDVDGVLTCDPNIYPHAKTVPYLTFEEATELAYFGAQVLHPQSMRPAREGDIPVRVKNSYNPKAPGTLITKQRDMDKVVLTSIVLKSNVTMLDIVSTRMLGQYGFLARVFAIFEDLGISVDCVATSEVSVSVSLDPSKIWSRELIQQELDNVVEELEKIAIVHLLQQRAIISLIGNVRQMSLILEKTGHVLRKSGVNVQMISQGASKVNMSLIVHDSEAKALVEALHQAFFQDDVLAQVEVENLLVG

SEQ ID NO: 21445 - protein, 368 aa, Sorghum bicolor
MAAVTAAAVSLSSSSSPAAAAAKAKAAASPSSPCSHLQFLSLYPQRRTRAVRMRVQVSSTETAEAEAVKKEKVSKKQDEGVVTNKYRPKEPYVGRCLSNTRITGDDAPGETWHMVFSTEGEVPYREGQSIGIIADGEDKNGKPHKLRLYSIASSALGDFGDSKTVSLCVKRLVYTNDQGEIVKGVCSNFLCDLKPGSEVKITGPVGKEMLMPKDPNATIIMLATGTGIAPFRSFLWKMFFEEHEDYKYTGLAWLFLGVPTSDTLLYKEELEKMKEMAPENFRLDFAVSREQTNAAGEKMYIQTRMAEYKEELWELLKKDNTYVYMCGLKGMEKGIDDIMVDLAAKDGIDWMEYKKQLKKGEQWNVEVY

SEQ ID NO: 21446 - protein, 292 aa, Sorghum bicolor
MQIRQPPDHLMVMATAAAAMDVDAPAPAPVPDGNAAANKQGRRGRREMRRIEDSTSRQVTFSKRRSGLLKKAYELSVLCDAEVALIVFSPRGRLYQFASAADLQNTIDRYLKHTEGTLANGKVETGIEKWKYEATTLGKKIDAIETYKRKLLGENLGSCSVQELKELEAQLEKSLSIIRQRKERKLMDQILELREKEQKLLMENAMLRDQCKALPLLELNDNKEHDHHMDGAGDGGEDDEAAAAKEDVETELAIGIIGSRRLTTQAPAPRLHQQPAPAPAPAGDHIDLRAPA

SEQ ID NO: 21447 - protein, 546 aa, Sorghum bicolor
MASPHLPFLSFPKTLPPPPPPLKPHAHRTSLAVAAAPAPPPAPPDGAGPAAPTRGDRFLGRQLATEAAARVLAPDDADRRRRRKEKRRALSRKPSGLASCYGCGAPLQTAEEAAPGYVDPDTYELKKRHHQLRTVLCGRCKLLSHGHMVTAVGGHGGYPGGKQFVSAEQLREKLSYLRHEKALIVKLVDIVDFNGSFLARVRDFAGANPIILVITKVDLLPRDTDLNCIGDWVVESVVKKKLNVLSVHLTSSKSLVGITGVISEIQQEKKGRDVYILGSANVGKSAFISAMLRTMAYKDPVAAAAQKYKPIQSAVPGTTLGPIQIEAFLGGGKLYDTPGVHLHHRQAAVIHADDLPSLAPQSRLKGRCFPANDTDVELSGNSLFWAGLVRIDVVKALPRARLTFYGPKKLKINMVPTTEADQFYETEVGVTLTPPTGKERAEGWQGLQGVRELKIKYEERDRPACDIAISGLGWISVEPSGVPSNSSDDNVEEEYDGGELHLVVHVPKPVEVFVRPPLPVGKAASQWYQYQELTEEEEELRPKWHY

SEQ ID NO: 21448 - protein, 178 aa, Sorghum bicolor
MQADAVAMASLTTALLPRAGVPLLRAPSVFRIAASSSGSGSKKKSKKPKSGSKGKDTKALEPPAPVVRRAPAGSASIFQQQQEAASKSGGADGKGPTEEELRQRQANENAFLLAWLGLGIIILVEGIALAASGFLPEEYDSFFVKYLYPSFTPTVVLFLAGTVGYGVLKYFESEKSKS

SEQ ID NO: 21449 - protein, 306 aa, Sorghum bicolor
MPGGEDVRKVSRQDIQLVQNLIERCLQLYMNQKEVVDTLSFQAKIEPSFTELVWQKLEEENRDFFKAYYVRLMLMNQIMAFNKLLEQQYQIMTKDHPSGMPSMPPAAPNGSNSNTLNQNVPFLPDTIPSTAMQDNLLHNGGSSSIVNGAPSNDQFIYAGKVVHGLPGGMDASSSLLAAHNSTVGQFNGHNGATIKTESGYSSNSDFGFGNENVFLEQSVGDVSGGSFSSSELNGQPLGDPILDMDSSSYGFLSQIPQILENYGRSPFIPSEANNFPESTTGEHTEIGNRRLDTISEGVHFEDFGSE

SEQ ID NO: 21450 - protein, 259 aa, Sorghum bicolor
MSSLTTAGSSMEEQYYSVSVSVSMSPEEVGTHLSLGIGSGGGGGEARSLRLAPPPPTRTVQLFGEVLSVQDDDRDGDEAQALHHHQRGRPTAASRKKKRDAAAAGGGTAAAADSHQSKKAKSTCGDDGGGGRKKLRLTAAQATMLEDSFRAHNILSHGEKQELSRRVGLSARQVEVWFQNRRARTKLKQTEVDCDLLRRWCDRLTDDNARLRRDLADLRRAAASTSLGAGAAVCASCGGGTDDKRQPAGAAAAGGNMLA

SEQ ID NO: 21451 - protein, 345 aa, Sorghum bicolor
MGSLPVPASAECAPQGRATVSASDLAPLFSAQRRHLDHFFDSLDMSQAAAFAQALIDAPGAVFFTGVGKSGIVACKIAQTLASLGFARAGFLAPVDALHGDIGALFPGDVLVLISKSGASDELLALAPCARAKGAYLISLTSAASGAECPLAAACDLNVHLPLQGEVCPFGLAPVTSTAIQMVFGDTVIAAIMEARRLSRDQYASNHPAGKIGKTLIFKVKDVMKKQNELPLCKEGDMIMEQLTELTSKGCGCLLVVDEEHHLIGTFTDGDLRRTLKASGPAIFSLTVGEMCNRNPRTITAEAMAVEAMEKMESPPSPVQFLPVINDNNIVCGIITLHGLVSAGL

SEQ ID NO: 21452 - protein, 348 aa, Sorghum bicolor
MGDSGGSVVSVDVERISFGGKEHHIQTSHGPVSVAVYGDHDKPALVTYPDIALNHMSCFQGLLFCPEAASLLLHNFCIYHISPPGHELGAAPISPNAPIPSVDDLADQVADVLDFFGLGSVMCFGVTAGAYILTLFATKYRERVLGLILVSPLCKGPTWTEWLYSKVTSNLLYYYGMCGLVKECLLQRYFSKEVRGFSELPESDIVQACKSLLDQRQSMNVWRFVQTMNERYDLTEQLKQLQCRTLIFVGENSQFHTEAVHMTSKLDKRYCALVEVQACGSLVTEEQPHAMLIPMEYFFMGYGLYRPSQLDCSPRSPLSPFCISPDLLSPESMGVKLKPIKTRVRLEV

SEQ ID NO: 21453 - protein, 564 aa, Sorghum bicolor
MASDPSSFSPIGVVEAMGGGYFMAGGSNSYGGTGGGIMSAEVPHFHPGMLLDHGGGFGFGGLGDAAVCGAGAATATDLVGAHYAANNIVLASFASQLFASTTAQPQDDRTGGRTPPEEMDDEVYGVPGSDSRVVAASLRCPSQSGPMAVWSSSKKPYGVWTGAGGPVAVPANDPYHLAGAEFHPDAGGSFHYYPLAVAACSGANASAAAASELSLTLCSNSISSSDSAALNAAEQCSSGASRSALTELPRARSGSRMAPHFAVVVARSRYAAVVQEVLNDVVGHMLDGVADVADDSCSGVDGGGSVGAPSAVSSNRFMVASSADAGARWGEAQRVRSKLLKTLQLMDQKYNQCLDEIQSTTAKFNTLMHSPSGAGNGGSICAPFAHRAVSAMYRGLRRRLAGEIMAAASRASCWGESSSSVTATAAGGDVERSWESAFIQKHWSAQQLRRAEKQCWRPQRGLPEKSVAVLKAWMFENFLHPYPKDHEKDVLAARSGLSRNQVSNWFINARVRLWKPMIEEMYQDLKGSSGAGGGGGQRPPAMELLQHQHMSKRRIICELEDGGQ

SEQ ID NO: 21454 - protein, 182 aa, Sorghum bicolor
MANDSLVTARVIGDVLDPFYSSIDLMVLFNGMPIVSGMELRAPTVSERPRVEIGGDDYRVAYTLVMVDPDAPNPSNPTLREYLHWMVTDIPASTDDTYGREVMCYEAPNPTTGIHRMVLVLFRQLGRETVYAPSWRHNFSTRGFARRYNLGAPVAAMYFNCQRQNGSGGRRFTGAYTGGRHG

SEQ ID NO: 21455 - protein, 325 aa, Sorghum bicolor
MAPASLLLTRVAAATVAVACVVALGAMAQQLSPTFYDASCPNLQSIVRSGMAAAVQQEPRMGASILRLFFHDCFVQGCDASVLLDDSATLTGEKNAAPNANSLRGFEVIDAIKSQVEAACPGTVSCADILALAARDGVNLLSGPTWAVQLGRRDTRTASQSAANSNLPSPSSSAAALVSAFASKGLDSRDLVALSGAHTIGAARCASFRSRIYNDSNINAGFAAKRKQICGPQSGGTDGNLAPLDAMSSVKFDNGYFRDLVSQFGLLHSDQELFGAGVVDSVTARYARNGAAFSSDFVTAIVKMGNISPLTGSSGEIRANCRKPN

SEQ ID NO: 21456 - protein, 278 aa, Sorghum bicolor
MIKALLAERRMGASLVRLFFHDCFVQGCDGSILLDDVGSFVGEKGAGPNVNSVRGFDVIDQIKTNVELICPGVVSCADIVALAARFGTFLLGGPSWAVPLGRRDSTTASLTLANSDLPSPASGLATLVTAFGNKGLSPGDLTALSGAHTIGFSQCQNFRGHIYNDTDIDAAFAALRQRSCPAAPGTGGDTNLAALDVQTQLVFDNAYYRNLLAKRGLLHSDQELFNGGSQDALVRQYSSNPALFASDFAAAMIKMGNISPLTGTAGQIRANCRVVNSS

SEQ ID NO: 21457 - protein, 323 aa, Sorghum bicolor
MASSTTTGHCMFFALILLSSAAYGQLSTSFYDTSCPSLESTVRSVVSGVINNGNRRMGASLLRLFFHDCFVQGCDASILLDDVPGTFVGEKNAGPNANSVLGYDVINNIKTAVEANCPGVVSCADIVALAARDGVNLLGGPTWSVSLGRRDSTTASQSQANSDLPSPASSLSTLIAAFASKGLNATDMTALSGAHTVGMAQCKTYRSRIYSDANINKQFANTLKGNCSATQGGSTDTNLAGLDVQTQVVFDNAYFGNLMKKKGLLHSDQELFNGGSQDALVQQYDADPGLFASHFVTAMIKMGNISPLTGSQGQIRANCGRVN

SEQ ID NO: 21458 - protein, 240 aa, Sorghum bicolor
MQEGYVYVYSRRALLLAPLHSYGENAAASQVVAGQQEAPASDGVRSGGGSSSSSSSSSSSFDANVVMILAVLLCALICALGLNSIVRCALRCTSRTSPGGGAQRQPAAGAGEPGLSVVRLAQAGARRKALRAMPTLVYSPGMLPLQAAGGGGPVCAICLAELEPGERVRVLPKCNHGFHVRCVDRWLLVRSTCPTCRQPLFGAPHKGSGCTDDAGAGAEPPVRAFLVPLRPDGFITPYDF

SEQ ID NO: 21459 - protein, 333 aa, Sorghum bicolor
MAQNGPHGHQVDAAPPTTVAVFSLTSAGPNGNGGSSAGNMENLDASGMGKKNLIPDLNMEERDDSAGGSKDKPRSEAKVEVAAADADADADADKGKSIAAAGDDDGEPNVNIALERERRKRMKDLFRSLQDLMPHVPQKTDKATLVGEAITYIKVLEEKADMLGKQALAARQAAARGEASSSSSLLSLRAMPPTAQGMAALCSWNAPRGWGGVPVQPAAPAVPASTSPMRCKTWAGPNMVLTVANDNAYISVWAPRRANTLTMVMSVLDNHGIDVITAQISSDRVRALFMIYAHVTGIGGENRRSSEEVYQRAVSEIVYRLHNNNNNNNNNNG

SEQ ID NO: 21460 - protein, 322 aa, Sorghum bicolor
MAQNGPHGHQVDAAASDDGHRAPPTTVAFSLTSAGPYGNAGSSAGNMENLDASASKGKNLIPDLNMEERDDSAGGSKDKPRSEAELVVPAADADADAGADKGKSVAAADDGEPTVNIALEPEKRKRMKDLFRELRDLMPHVPRKTDKVALMGEAIKYIRALEEKAAMLGKQVLARPPPAAARGEASSSSSSSLTAAMMPDVPRGWGGVPAVPPAGPAVPASPPLRCNTWTWPNVALTVANENACISVCVPRRANNTLSMLMSVLDNHGIDVITSQISSDRARDMFMIYGHVTGIGGENRRSAEEVYQRAVSEIKCRLNNSNT

SEQ ID NO: 21461 - protein, 295 aa, Sorghum bicolor
MEVGFLGLGIMGKAMAANLLRHGFRVTVWNRTLAKCQELAALGATVGETPASVVSKCRYTIAMLSDPSAALSVVFDKDGVLEQIGSGKGYVDMSTVDAATSTKISEAVKQKGGAFLEAPVSGSKKPAEDGQLVILAAGDKPLYDGMVPAFDVLGKKSFFLGEIGNGAKMKLVVNMIMGSMMNALSEGLCLADKSGLSPQTLLDVLDLGAIANPMFKLKGPTMLQGSYNPAFPLKHQQKDMRLALALGDENAVAMPVSAAANEAFKKARSLGLGDQDFSAVYEVVKGAGGSGSGQA

SEQ ID NO: 21462 - protein, 455 aa, Sorghum bicolor
MADASPLLPPAPGKSPATAARFARCASSANDELRSFRACLAWLCVDHSSSPRVAAVGSWAVFLLLAVAAPAAVRLLLLLPLVADDPPPRPFDGQVQVSLTLAASLAYVSLRALLHRAGGLRRLLYLDSLRRDSEDVQAGYAAQLARSFRVLACFVLPCALAEAAYKAYWYHAAAAYGGGSRRRRWCWAAAACAVEVASWVYRVALFFMVCVLFRVICYLQILRMVGFAREFGRFADVAAVLQHHRRIREQLRKISHRYRKFIVCSLVLVSASQFAALLATTRPHAVVNLATAGELALCSMSLVAGLLMCLYSAAKITHKTQAMTSVAAAWHADATVHAFDNDQENPDPDLPPTAGYYLAPANAYRVAAGDESGSGGDDDDDSRSECSSLDDPKYVPFQANNISFQKRQALVTYLENNRAGITVYGFVVDRAWLHALFMIEFSLVMWLLGKTVGIS

SEQ ID NO: 21463 - protein, 753 aa, Sorghum bicolor
MGRRSSRACSLLGSAQLLLLLLSLALGSAAAQKGSTWKTLSGKAPVIVAKGGFSGLFPESSLYAYQILGSLSSPDTVMWCDVRLTKDGGGICLPSIDMDNCTTIANFFPQGKKTYNVNGVSTVGWFSVDYTSTDLLNVSLKQSVLSRTGVYDGIFPIIPVENVYTQFNPVAVWLNVQQDSFYSQFKLSMRSYILSLLKNFVVDYISSPEVNFLTSISGRVSKKTKLVFRFLDERSIEPSTNQTYGSMLKNLTFVKTFASGILVPKSYIWPVTPDNYLLPYTSVVDDAHKAGLEIYAADFANDFTISYNYSYDPLAEYLSFIDNGAFSVDGVLSDFPITPSEAVDCFSNLNNSKIDHAKPLVISHNGASGDYPDCTDQAYEKAVADGADVIDCPVQVTKDGILICMSSVDLMNATTVAKSQFASQVTTINDLKAGPGVFTFNLTWDDISKNLKPMISNPAIGFNQYRNPRNKNAGNFMRLSDFLTFAKGKDLSGIMITVEHAAFMAEELGFGVVDAVIKALDDSGYSKQTAQSVMIQSTNSSVLVKFKQETKYNLVYMIEENVRDAAPSSLADIKKFASAVSVSTTSVFPEDHYYLTNQTNNLVKSLKSAGLQVYAYVLMNEFGTQPNDFFADATVQINAYVHVRGANVDGVITDFPGTAHRYKLNSCTSMGKNAPPFMSPPKPGDLLTTMPPFAQPPAAAPMPLLTDADVAEPALPPVSNTTTPASPSDAALMMRTDVSILITLLMLCASLLI

SEQ ID NO: 21464 - protein, 115 aa, Sorghum bicolor
MALEKAKEIVASSPVVVFSKTYCPFCARVKQLLAQLGASYKAIELDVESDGADLQSALAEWTGQKTVPNVFVKGERIGGCDATMAMHDGGKLVPLLTEAGAIVTASATATTTPSL

SEQ ID NO: 21465 - protein, 489 aa, Sorghum bicolor
MATCATTLAPLLGPAAANATEYLCNQFADTTSAVDSTYLLFSAYLVFAMQLGFAMLCAGSVRAKNTMNIMLTNVLDAAAGALFYYLFGFAFAYGTPSNGFIGKHFFGLKRLPQVGFDYDFFLFQWAFAIAAAGITSGSIAERTQFVAYLIYSAFLTGFVYPVVSHWVWSADGWASPTRTSGNLLFGSGIIDFAGSSVVHMVGGIAGLWGALIEGPRIGRFDHAGRSVALRGHSASLVVLGTFLLWFGWFGFNPGSFLTILKSYGPAGSIHGQWSAVGRTAVTTTLAGSTAALTTLFGKRLQTGHWNVVDVCNGLLGGFAAITAGCSVVDPWAAVICGFVSAWVLIGLNALAARLRFDDPLEAAQLHGGCGAWGVLFTALFARREYVEQIYGTPGRPYGLFMGGGGRLLAANVVMILVIAAWVSVTMAPLFLALNKLGLLRVSAEDEMAGMDQTRHGGFAYAYHDEDMSLSSRPKGAQSTQIAAASSGEF

SEQ ID NO: 21466 - protein, 304 aa, Sorghum bicolor
MQEFQSIPGLAGRLFGGAGAGDLRRAQAHAQQGPGARCGGVSPAAPPEVVKCPRCESTNTKFCYYNNYNLSQPRHFCKSCRRYWTKGGVLRNVPVGGGCRKTKRASSSSSATSSVPSTPTSGSGDAAANKNPRRASASSPRSTNSGSASPTAAAATTPTPAPTTPATPSSNSSVAVFTTSSHHHSSPFSTIDVVAPPAPIFADQAAARASLFAPPPPPPLPVFTFAAQPKQEEAPTTTSELQLVAGLSAAAPSSSSVVSEDMAPFASLDAAGIFELGDAASAAAYWNAGSCWTDVVQDPSMYLP

SEQ ID NO: 21467 - protein, 580 aa, Sorghum bicolor
MDPTTIDSKWTSPITEDGSMDRRGNPAVKTTTGGWRSAILLLANYGLATCAFFGVGVNLVVFLRRVLHQGNAEAANNISKWTGTVYIFSLIGAFLSDSYWGRYVTCAIFQIIYVTGLVILSLASWFLLVKPSGCGGVKVHCDEPSAPGVALFYLSTYMIAFGNGGYQPSIATFGSDQFDETDPKEGRSKVAFFSYFYLALNVGSLFSNTVLVYYEDSGRWVMGFWVSAAAAALALVLFLLGTPNYRHFKPSGNPLTRVAQVFVAAFRKWHAEVPRGELLHEVEGEDPKISGIRKILHSDELRFLDKAATITEGEKMENPWRLCTVTQVEEVKCILKMLPIWLCTIVYSVVFTQMASLFVEQGATMDTNIGSFHFPAASMSLFDVLSVLAFIAIYRRVLVPVMARLSGNPQGLTELQRMGVGLVIGMAAMVVAGVVEVERLKRVAAPDQPSSLSVLWQVPQYALIGASEVFMYVGQLEFFNGQAPDGVKSFGSALCMASISLGNYVSIMLVSVVTSLTAGEKRPGWIPGNLNSGHLDRFYFLLAALSLVDLAVYIACAMWYKGIKLDGGDGDDSRKVSAHV

SEQ ID NO: 21468 - protein, 606 aa, Sorghum bicolor
MKMRAIVVEGGEMSAPTPTPKQDKCCEYTLDGSVDIKGRPAVKGKSGGWLAGALILVNQGLATLAFFGVNVNLVLFLTRVLGQSNEDAANNVSKWTGTVYMFSLIGAFLSDSYWGRYKTCAIFQAIFVLGLALLSVSSHLYLIRPDGCGMEHAPCGPHSGKELGIFYIALYMIAFGNGGYQPNIATLGADQFDEDDPAEAHSKVSFFSYFYLALNLGSLFSNTFLSYLEDKGSWALGFWASTAAAATALLLFLSGTLRYRYFQPGGNPIGRICQVAIAASRKWKAGASTTGVVSLYEGDEKADAAGGRKLLHTQGFSFLDRAAHADTDSKLGARDPWKLCTVTQVEEVKSILRLLPIWLCTILYSVVFTQMASLFVVQGAAMRRTTPFSGFSVPPSSMSAFDILAVATTIFLYRRAICPFLARLTGRPAGPTELQRMGLGLVVGALAMATAGTVEHFRKARATAAMSSDLHIMWQVPQYALIGVSEVMMYVGQLEFFNGQMPDGLKSFGSALCMMSMSLGNYFSDVIVSAVTRLTTTRGRSGWIPADLNEGHLDKFYFLLAVLAVADFAVYLVCASRYGSGKVDGRSSDDEEEGAAGQVTSLPAYA

SEQ ID NO: 21469 - protein, 221 aa, Sorghum bicolor
MGFPVGYSEMLLPRVLLQVLLLLGHLHRFLLWAFHAVGLGDLIDLGCNYYPPPPPTPTAQEHQDAAAAAPLQHRRPEFRPVPSVLIEEALPVVRFDELGGTACGDGDCDCAVCLSGIGARDEVRRLSNCRHAFHRACLDRWMLAHDQRTCPLCRAPLIPGAGAAAADPWAAAGGVAPWPDAGDYDMSYPSSLPSTPLLTALPTPTLLRPHELLLTGLGGFQ

SEQ ID NO: 21470 - protein, 707 aa, Sorghum bicolor
MDFGDDVMDGGSDAQRRKKRYHRHTPRQIQQLEAMFKECPHPDENQRMQLSRELGLEPRQIKFWFQNRRTQMKAQHERQDNCFLRAENDKIRCENIAMREALRTVICHTCGGPPVTDDYFDEQKLRMENARLKEELDRVSSLTSKYLGRPITQLPPVQPLSMSSSLDLSVGGLGSPALGPSLDLDLLSGGSSGYPPFHLPMTVSEMERPMMAEMATRAMDELIRMAQAGEHLWVKTAGGGPDGREVLNVDTYDSIFAKPGGSFRGPDVHVEGSRDSGLVFMSAIGLVDMFMDSSKFTEFFPAIVSKARTMDVLVNGMAGRSDSLVLMYEELHMMSPVVPTREFCFLRYCRQIEHGLWAIADISVDLQQRDARFGAPPSRSCRLPSGCLIADMADGSSKVTWVEHMEIEDRVPIHLLYRDLILSGAAFGAHRWLAALQRACERCACLATAGMPHRDIAAAGVTPEGKRSMMKLSQRMVSSFCASLSASQLHRWTTLSGPNDVGVRVMVHRSTDPGQPSGVVLSAATSIWLPVPCDRVFAFVRDEHTRSQWDVLSHGNPVQEVSRIPNGSHPGNCISLLRGLNASQNSMLILQESCTDASGSLVVYAPIDIPAANVVMSGEDPSAIPLLPSGFTILPDGRPGASSSSSSAAGGTLGATAAAGSLVTVAFQILVSSLPSSKLNAESVATVNSLISTTVEQIKAALNCASH

SEQ ID NO: 21471 - protein, 174 aa, Sorghum bicolor
MTELFDTAVTSLLHLPEVLDRLAAADGDRRSGGHHAAHHHGHARVHGLGGGGGGGAPVDIVETPGEYTFVLDVPGLSKSDIQVTLEEDRVLVMKGGSGKRKREEEEEEGEGEGCRYIRLERGATPRSFVRKFRLPEDADTGGVAARCENGVLTVTVKKLPPPEKKTKSVQVTIA

SEQ ID NO: 21472 - protein, 576 aa, Sorghum bicolor
MRSSVSERSLIIESDDDDNDDRPQSQPSAAAARSRRRHHQHEEGSGSGSGSGSDSDSGSSSSSCATPRGHAQATASSYTQQWPQSYRQSINILSSVQSPNLSFLGTPTLSRLSNSFITNSFRGKTPEIISNLVKPLLRPTTSDDLQQQHEERKSSQYLLPSRKPSLQQIPEDQKPVPVAHEVSPYHKCSYTQAVVNGINVLCGVGILSTPYAIKQGGWLGLVILCLFAILAWYTGVLLRRCLDSKEGLETYPDIGHAAFGTTGRIAISIILYVELYACCIEYLILEGDNLSKLFPNAHLTIGSLTVNSHVLFAILTTIIVMPTTWLRDLSCLSYLSAGGVIASILGVICLFWVGVVDNVDFENKGTALNLPGIPIAIGLYGYCYSGHGVFPNIYSSLKNRNQFPSILFTCIGLSTILFAGAAVMGYKMFGEATQSQFTLNLPENLVVSKIAVWTTVANPITKYALTITPLAMSLEELLPPNQQKYSNIVMLRSALVVSTLLIALSVPFFGLVMALVGSLLTMLVTYILPCACFLAILRRKVSWHQVAACSFIIMVGVCCACVGTYSSLSKIIQNYT

SEQ ID NO: 21473 - protein, 210 aa, Sorghum bicolor
MAMATQGLADQADQQHGRSESEPTNTTSHHGAAATSIATNRWGPYSGAGDFASNMAVILAALLAALALGLALNAAVRYLLRRARRAGSGGSNRQGNISISISSAVEEDPEKPPPPPALVYSAAGTKLAGAAPECAICLAEFADGDAVRVMPACRHGFHARCIERWLAGGRRSSCPTCRAPAAAGAAAAAAQPADESATPTPTPTPSSSSS

SEQ ID NO: 21474 - protein, 251 aa, Sorghum bicolor
MAAAARQRGTVKWFNDTKGFGFISPEDGSEDLFVHQSSIKSEGFRSLAEGEEVEFSVSEGDDGRTKAVDVTGPDGSYVKGGSGGGGGGGGGYGSRGGGGSGGGGRSYGGSWGGGRRSGGGGGAGACYKCGEPGHMARDCPSADGGGGGYGGGGGGYGGGGGGCFKCGEPGHMARDCPSGGGGYGGGGGGGYGGGGGGGACYNCGQTGHMARDCPSGGGGGGGRFGGGGGGGGDRSCYNCGEAGHIARDCPT

SEQ ID NO: 21475 - protein, 295 aa, Sorghum bicolor
MRPVFCGNLDYDVRISEVERLFGKYGRVERVDLKTGFAFVYMEDERDAEDAIHRLDGIDFGRKGRRIRVEWTKEDRTAGRRGSSRRSPTQARPTKTLFVINFDPINTRIRDLERHFDKYGRVANVRIKKNFAFVQFEVQEDATRALEGTNGSHFMDRVISVEYALRDDDEKGERGNGYSPDRRGRERSPGRRRSPSPYGRGRERGSPDYGRSKERGSPDYGRGGRSPDNGRGGHSPENGRGVSPANGGRGDHGRGGRSPDYDRERREASPRRERREASPGYDRSPSRSPGRDERD

SEQ ID NO: 21476 - protein, 398 aa, Sorghum bicolor
MPLCCSPTSAAAAAAASPGVARSGGLLRRSRPVPGVVRCKKIDSLRAINGALPCIPVSDRSLLTPVNLPVFRDPNMRNDTRLRIFSGTANPSLSQEIASYLGLELGKINIKRFADGEIYVQLQESVRGCDVFLVQPSCPPANENLMELLIMIDACRRASAKNITAVIPYFGYARADRKSQGRESIAAKLVANMITEAGANRVLVCDLHSSQAMGYFDIPVDHVYGQPVILDYLASKTICSNDLVVVSPDVGGVARARAFAKKLSDAPLAIVDKRRQGHNVAEVMNLIGDVRGKVAVMMDDMIDTAGTIAKGAELLHQEGAREVYACCTHAVFSPPAIERLSSGLFQEVIITNTIPLKEEKTFPQLTILSVANLLGETIWRVHDDCSVGHEPYSSLDID

SEQ ID NO: 21477 - protein, 782 aa, Sorghum bicolor
MGAAPVLVLLLIAAAAALPRRARAVTDAGDVSAINGLYVALGSPKLPGWSASGGDPCGESWQGVTCTGSSITSIVFNAANLGGQLGSLGNFASITEINLSNNNIGGTIPEDLPVTLQNLFLSDNQLTGSIPMSLSKLHSLTAMSLNDNHLDGKLPDAFDSLTGLVNLDISSNNFSGSLPPSLGSLTSLTTLHMQDNKLSGTLNVLQDLPLKDLNVENNMFSGPVPPKLLNIPNFKNDGNPFNTSIAPSTSPSSTPTGSTPTQTPSSSSSPSGSPPPSSAASNSSSGSTARNSNSPSSKKSKSSTLRTVGYVLLAIVLFIVLVLLVIFCLSKYQERQSRRDYSAAQLGRVHQRIEEPKSKQASVQSKHEAKKGSSEVPERKKPREINLAVPVALEKPPDKRKEHVINLERTESEIFAAAPPPPPPPPPPPPPPPPPPPPPTPPPPPPRPPSPPPVEKVTVNPIVRSEKRVSTPPRTGPSTSATSFSVASLQQYTNSFQEQNLIRESRLGKVYLAELPGGKLLEVMKIDNANGRIPVDDFLELVARISDIRHPNILELVGYCAEYEQRLLVYNHFSRKTLHDVLHEGEDLDEPLSWNARLQIALHAAKALEYLHDTCEPPVVHQNFEPSNVLLDNRCSVRVAECGLAELTASGSVTQLSGRMRALLNYEAPEIHESEPFTHRSDVYSFGVVMLELLTGRKPYDSSRPRAEQHLVRWADSQFHDMESLSKMVDPSIQGECSMILLSRFADIISGCIRPEPELRPAMSQIVQDLARIVGASGEVSE

SEQ ID NO: 21478 - protein, 214 aa, Sorghum bicolor
MRRGGGVAAAAEADGDVESRFRGVRKRPWGRYAAEIRDPAKKARVWLGTFDSAEDAARAYDAAARMLRGPKARTNFPLPAAAAHHHLHMPAAAAAAAAPYTTYPNATGVSTPPVARPACSSLSSTVESFGGARPRPVLPPRPLPPPIPDGDCRSDCGSSASVVDDDCTDAAASPSCPVPLPFDLNLPPGGGGCGAGVGLYADEEDELRLTALRL

SEQ ID NO: 21479 - protein, 168 aa, Sorghum bicolor
MQEQPASSRPSSSERSSSSAHHMDMEVKEGMESDEEIRRVPELGLELPGASTSGREVGPGAAGADRALAQSSTAQASARRRVRSPADKEHKRLKRLLRNRVSAQQARERKKAYLTDLEVKVKDLEKKNSEMEERLSTLQNENQMLRQILKNTTVSRRGSGSTASGEGQ

SEQ ID NO: 21480 - protein, 321 aa, Sorghum bicolor
MACSFRALLHCLLALSLCSTAYGGQLTPTFYALSCPALEPIVRTTMTKAIINDRRMGASLLRLFFHDCFVLGCDGSILLDDAGSFVGEKTALPNASIRGYEVIDQIKANVEAVCPGVVSCADIVALAARDGTVLLGGPTWAVPLGRRDSTTASLSQANSDIPAPTLNLDSLILAFGKKGLSPADMTALSGAHTIGYAECEDFRGHIYNDTNVDPAFAALRQRNCPAESGSGDTNLAPLDVQTRYVFDNAYYRNLMVRQGLLHSDQELFNGGSQDALVQQYSTDPGLFASHFVAAMIKMGNIGTLTGSQGQIRADCRVVNSR

SEQ ID NO: 21481 - protein, 418 aa, Sorghum bicolor
MEVSSSSAAAEVPHYFLCPISLEVMRDPVTLATGITYDRASIERWLFADGHATCPVTRRALAPAEMDATPNHTLRRLIQAWCAAHQVERFPTPRPPLDSCRVAALLDEGRHGGDRQAAAALREIKAVVAESERNRRCVEATPGAVDFLASLVAKHSSKRASSQQDAADDFLAGGDALGVLYSLKPSERSLAQILERDGDFLDTLACVLRRPSYRSRAYGILLLKAMTAVMTPARLTTVSADLVQEVVRVVSDRVSSKAVRAALHVLCRLCPWGRNRVKAVEAGAMAALVELLLDAGGRRVTELAVVAIDHLCGCAEGRSELVAHPAGLAVVSKKVMRVSTAATESAVRALHAVARHSPTPSVLQEMLAVGVVAKLLLVLQVNAGERAGLRAKEILKTHARVWKDSPCLQTYMRDSYPC

SEQ ID NO: 21482 - protein, 424 aa, Sorghum bicolor
MEVSSSSAAAEVPHYFLCPISLEVMRDPVTLATGITYDRASIERWLFADGHATCPVTRRALAPAEMDATPNHTLRRLIQAWCAAHQVERFPTPRPPLDSCRVAALLDEGRHGGDRQAAAALREIKAVVAESERNRRCVEATPGAVDFLASLVAKHSSKRASSQQDAADDFVLDSPTSTSSPAEDALGVLYSLKPSERSLAQILERDADFLDTLACVLRRPSYRSRAYGILLLKAITAVMTPARLMTVSADLVQEVVRVVSDRVSSKAVRAALHVLCRLCPWGRNRVKAVEAGAVATLVELLLDEGGRRVTELAVVAIDHLCGCAEGRSELVAHPAGLAVVSKKVMRVSVVATESAVRALHAVARHSPTPSVLQDMLAVGVVAKLLLVLQVNAGDRAGIRAKDMLKTHARVWKDSPCLQRDSYPC

SEQ ID NO: 21483 - protein, 318 aa, Sorghum bicolor
MELELSLGDSRAPAKSTFMPALTPIHAGEGEGHELVLELGVGTAKRAEQDNQKTVVQAEAVQEEEEETCSYNESPVELSLVCPLLPASTEIEVCGRGSDVNTVLVDGDTAQGRSLSTSSLALEVPVRQTADQEAAEDAEISGVGGGTRKKLRLSMEQSAFLEDIFKAHSTLSPKQKSDLANRLSLRPRQVEVWFQNRRARTKLKQTEVDCEYLKRCCENLAQENRRLQREVAELRAQRISNTAAYTFYGHHLPASGFSTARVCPSCDKNKGTAHYTAISAPSAVVTPPSAVSTTLFARPHFGPFTIHPLLRRQPSATS

SEQ ID NO: 21484 - protein, 181 aa, Sorghum bicolor
MYPKADEGAQPLATGIPISGGRGGYYQAGGATAAFAVQAQAAPVAAWSTGLCDCFDDCSNCCVTCLCPCITFGQIAEIIDRGSTSCGTSGALYTLVMLLTGCQCVYSCFYRAKMRAQYGLRESPCADCCVHCCCECCALCQEFRELKKRGFDMNIGWHANMERQGRTAATMPPLMHPGMTR

SEQ ID NO: 21485 - protein, 174 aa, Sorghum bicolor
MSRDPLVVGNVVGDILDPFIKSASLRVLYNNRELTNGSELKPSQVANEPRIEIAGHDMRTLYTLVMVDPDSPSPSNPTKREYLHWLVTDIPESTNVSYGNEVVSYESPKPSAGIHRFVFVLFRQSVRQTIYAPGWRQNFNTRDFSAFYNLGPPVASVFFNCQRENGCGGRRYIR

SEQ ID NO: 21486 - protein, 498 aa, Sorghum bicolor
MTVGGKRFNQPEANPAAQKSYQLLNLKNPRPCGRTAPGVGPLSWRGTSVRGERLSMAPSPPQQLSLALADLRALSVLGQGARGVVFHVVPVAAAAGDSTAAAGAGEPMALKAMSRAAARHKGAGPGGTCHGGGGDGHRRIWFERDVLLSLRHPLLPSLRGVVATDTVVGFAITRCPGGDLKSLRRRWRAQTTFPESVIRFYAAELVLALEHLHGLGVVHRDLKPENILIQDSGHIMLVDFDLSTTLPPPEPEATPARVTSLSPSSSHSHHHRRKNKKAAMVLACFSHSRHAASPEPSSRSPSSTSMTASSASASSSSCCSPGARTPAKSNSFVGTEDYVAPEIIAGRGHDYAVDWWGLGVVIYEMVYGRTPFRGRSRRETFHRVLTAPPELPGEATPLRDLITRLLEKDPGKRLGARGVKRHAFFRGVDWDRVLDVARPPFIPSPDGNDANAGAVVEAEALDVEKVVHELFGSSGAGETRLVKVCSHGGTDDDFSIFF

SEQ ID NO: 21487 - protein, 288 aa, Sorghum bicolor
MEGQFGWGREEGGWRKGPWTAQEDKLLVEYVRQHGEGRWNSVAKLTGLKRSGKSCRLRWVNYLRPDLKRGKITPQEESVILELHALWGNRWSTIARSLPGRTDNEIKNYWRTHFKKGKPSKNIERARARFLKQRREMQSQLLLQGQDHHQQKEKQPDHHHDDDDDDDKDTSRDREAAAPAAVSLAQQNEEDLRMLQQDMDDLLFQFCPMASCTSSSCLLPGGGSCASVVSASASEEGSSGDHQLDGGATWGWGSLWNLDDVVDDVDGGACGWDDSSFPLLQDQGLAFY

SEQ ID NO: 21488 - protein, 399 aa, Sorghum bicolor
MVVAVASSQSSSTPLSPYSSSPSLRSFIRDAPPYSTQTPPQVQTAGVGGGGGNGKISPAVLFIIVILAVIFFISGLLHLLVRILMKKQHGRGAAMGESAPSPHRTGARDAAMDRQLQQLFHLHDSGLDQAFIDALPVFAYREIIGGSKEPFDCAVCLCEFDGEDRLRLLPVCGHAFHLQCIDTWLLSNSTCPLCRGTLFVPGMTIDNMLFDDFDERLEEEPLPEECEDGHQVSRHKPMDEEQPVAEKRVFPVRLGKFKNVGNQGAIGGVAGNGNEAGIVSREAGESSSSSLDARRCFSMGTYQYVLGASELRVALQTGRGGNGASSRFKGRVAGLCPVNADIMEGKRICARSKGESFSVSKIWQWSSVKGKLPAPPDTCSDTGSLPWMKINAAGDKSNM

SEQ ID NO: 21489 - protein, 406 aa, Sorghum bicolor
MASLCDFCGKQRSMIYCRSDAASLCLSCDRNVHSANALSRRHTRTLLCDRCGSQPASVRCLEDNASLCQNCDWNGHDAASGASGHKRQAINCYSGCPSSAELSRIWSFIMDIPTVPAEPNCEDGLSMMTIDDSDVTNHHDASDDKRLLEIANTTLMSDPPSADKPKPLISSSSGDGFDVLPLATDQPAGSVSVTPKVPYARDDDNFNDGMYEDLCVDDADMTFENYEELFGTSHIRTEELFDDAGIDSYFEMKETQPFDFNEEPKTMQLECSNVVSADCGMLNPGARADSSLCIPVRQVRSSISHSLSGLTGESSAGDHQDCGVSPMLLMGEPPWHSPGPEGSVAGGSRDSALTRYKEKKKRRKFDKKIRYASRKARADVRKRVKGRFIKAGEAYDYDPLSQTRSY

SEQ ID NO: 21490 - protein, 470 aa, Sorghum bicolor
MGSSGGGGSDGGGDRQAQPLLGKLSESESSYSSSDEHLVNRTGTVWTAMAHIITAVIGSGVLSLAWSVAQLGWVGGPAAMVFFAGVTAVQSTLIADCYISHDPERGVVRNRSYVDAVRLYLGEKSHLFCGFFLNFSLFGTGVVYTLTSATSMRAIQKANCYHKEGHDAPCSVGGDVYYMLVFGLAQVVLSQIPDFHEMAGLSVFAAAMSFFYSFVGVGLGIAKVIANGVIMGGIGGIPMVTTTRKVWRVSQAVGDILFAYPFSLVLLEIEDTLRPPETETMKTATRASIGITTLFYLCCGCFGYAAFGDATPGNLLTGFGFYEPYWLIDLANLCIVLHLLGGYQVYTQPVFAFLDRKFGGGATVVVVEVPLLGTRRVNAFRLCFRTAYVAATTALAVWFPYFNQVIGLLGAFTFWPLAVYFPVEMYLTRNKVAPWSNQWLAVHGFSLVCLLISAFASVGSAVGVFGSETS

SEQ ID NO: 21491 - protein, 384 aa, Sorghum bicolor
MAMRRAAQQAARFAMGPHVPHTAPAARSLHASAGSKKIVGVFYKGGEYADRNPNFVGCAEHALGIRGWLESQGHQYIVTDDKDGPNCELEKHIADAHVLITTPFHPAYVTADRIARAKNLELLLTAGIGSDHVDLPAAAAAGLTVAEVTGSNTVSVAEDQLMRVLVLMRNFLPGHHQAISGEWDVAGVAHRAYDLEGKTVGTVGAGRIGRLLLQRLRPFNCKLLYHDRLRIDPALEAETGAQFEADLDAMLPKCDVVVLNMPLTEKTRGMFDKERIARMKKGVIIVNNARGAIMDTQAVADACATGHIAGYGGDVWHPQPAPKDHPWRYMPNNAMTPHISGTTIDGQLRYAAGVKDMLERYFKGQDFPVQNYIVKEGNLAGQYQ

SEQ ID NO: 21492 - protein, 426 aa, Sorghum bicolor
MGFGMGNNNGASSSSSRLDPAPLLPHHGSGSREVGLSSQPKTFANVFIAVVGAGVLGLPYTFSHTGWAAGTLLLFSVAALTFYCMMLLVACRRRLADEHPKIASFGDLGDAVFGAHGRFAVDVMLVLSQVSFCVGYLIFISNTMAHLYPITAPSSSALLSPKALVIWAMLPFQLGLNSIKTLTLLAPLSIFADVVDLGAMGVVLGQDVAAWVAKPVPVAAFGGPAALLYGLGVSVYAFEGVGMVLPLEAEAANKKKFGVTLGLSMAFIAVMYGLFGVMGYVAFGDATRDIITTNLGAGWLSAAVQLGLCINLFFTMPVMMNPVYEVAERLLHGKRYCWWLRWLLVIVVGLAAMYVPNFTDFLALVGSSVCVLLGFVLPASFHLKVFGGEMEWPGVVSDVLLVVIGLSLAVFGTYTSLLQIFHSSSA

SEQ ID NO: 21493 - protein, 126 aa, Sorghum bicolor
MALVRLAFPVFFLLAAAEFAAATRSPSAFVQNAIYSNRITIFSKTYCPHSMRAKRIFRDLKEDPYVVELDTREDGRDIQNVLLDLVGRRTVPQVFVNGQHVGGADDTVNALSNGQLEKLLGKSQSQ

SEQ ID NO: 21494 - protein, 454 aa, Sorghum bicolor
MKQARPPPPMEMRPPPTREMRPPSPMEDEAIDGWLPINARRNAKWWYSAFHNVTAMVGAGVLGLPYAMSQLGWEVGITVLILSWIITLYTLWQMVEMHEMVPGRRFDRYHELGQHAFGEKLGLWIVVPQQLVVEVGLNIVYMVTGGQSLQKFHDVVCDGKCKDIKLTYFIMIFASCHFVLSQLPNFHSISGVSLAAAVMSLCYSMIAWVASAHKGKSPEVHYGLRATTTPGKVFGFFGALGDVAFAYAGHNVVLEIQATIPSTPDKPSKKPMWKGVIVAYIIVAACYFPVSLVGYWAFGNSVNENILVSLRKPKWLVAMANMMVVVHLIGSYQLYAMPVFDMIETVLVRRFRFRPSLMLRLIARSVYVGFTMFVAITFPFFSALLSFFGGFAFAPTTYFLPCIMWLTICKPRAFSISWFTNWICIVLGVLLMVLSPLGGLRQIILTAKTYNFYQ

SEQ ID NO: 21495 - protein, 593 aa, Sorghum bicolor
MASSASLQRFLPPSSHAATASSSRRRTGRARAAVSMPPSSPPATGEVPAERLEPRVEEREGGYWVLKEKYRTGLNPQEKVKLEKEPMGLFMEDGIKDLAKIPMEEIDAAKLTKDDVDVRLKWLGLFHRRKHQYGRFMMRLKLPNGVTTSEQTRYLASVIEAYGADGCADVTTRQNWQIRGVTLPDVPAILDGLRAVGLTSLQSGMDNVRNPVGNPLAGVDPHEIVDTRPYTNLLSSYITNNSQGNTTITNLPRKWNVCVIGSHDLYEHPHINDLAYMPAVKDGKFGFNLLVGGFISPKRWAEALPLDAWVAGDDVVPVCKAILEAYRDLGFRGNRQKTRMMWLIDELGMEVFRSEVEKRMPNGVLERAAAEDLVDKTWERRDYLGVHPQKQEGLSYVGLHVPVGRLQAADMFELARLADEYGTGELRLTVEQNIVLPNVSNERVDALLAEPLLRQRFSPEPSLLLKGLVACTGNQFCGQAIIETKARALQVTREVEKRVSVPRPVRMHWTGCPNSCGQVQVADIGFMGCLTKDSDGKIVEAADIFVGGRVGSDSHLADVYKKSVPCKDLVPIVADLLVERFGAVPREREEDEE

SEQ ID NO: 21496 - protein, 346 aa, Sorghum bicolor
MNFPGGSGRRQQQEPEHLPPMTPLPLARQGSVYSLTFDEFQSSLGGAAKDFGSMNMDELLRSIWSAEEIHNVAAANASAADHAHAARASSIQRQGSLTLPRTLSQKTVDEVWRDLVCVGGGPSAEAAAPPPPAQRQPTLGEITLEEFLVRAGVVREDMTAPPPVLPAPVCPPPPPQQTMLFPHGDVFAPLVPPLQFGNGLVSGAVGQQQGGGPAAPAVSPRPVTASGFGKMEGDDLSSLSPSPVPYVFGGGLRARKPPAMEKVVERRQRRMIKNRESAARSRQRKQAYMMELEAEVAKLKEMNDELQKKQVEMLEKQKNEVLERMRRQVGPTAKRICLRRTLTGPW

SEQ ID NO: 21497 - protein, 368 aa, Sorghum bicolor
MCGGAILDDLREPELRRVTDRDIWQKKKPKRGGGGGRRSFAAEDHEDFEADFADFEADSGDSDLELGEGADDDVVEIKPFAAKGTFSGDGLSTMTTADYDAPVARSAKRKRKNQYRGIRKRPWGKWAAEIRDPQKGVRVWLGTFNSPEEAARAYDAEARRIRGKKAKVNFPDAPAVGQKRRSGSASAKAPKSSVEQKPVVKAPMTNLANTNASFYQSVNYPSNNPFVQHANMPFVPAMNFTASVEDPIMNLHSDQGSNSFGCSDLAWENDTKTPDITSIAPISTIAEGDESAFVNSNSNSSMLPPVLENSAVDFTDGLTDLESYMRFLLDGGASDSVDSLLNLDGSQDVGSNMDLWSFDDMPIAGDFF

SEQ ID NO: 21498 - protein, 608 aa, Sorghum bicolor
MDKAALVSESTDDVGPAGGGSSSSFSGLRAYGRALAQTPRRLARRACAATAPHEEMSRVRARSGTRMARALRWWDLVGLGLGGMVGAGVFVTTGRAARLYAGPGLVVSYAIAGLCALLSAFCYTEFAVDMPVAGGAFSYLRVTFGEFAAFLTGANLIMEYVFSNAAVARSFTAYLGTAVGVDAPSKWRIPVPGLPEGFNQVDLVAVGVILLLSVCICYSTKESSVVNLVLTGVHVAFILFIIVMGFVHGDARNLSRPADPVHNPGGFFPHGAAGVFNGAAAVYLSYIGYDAVSTMAEEVERPDRDIPAGVSGSVVLVTALYCLMAASMSMLLPYDAIDPEAPFSGAFKGRDGMAWVSNVIGAGASLGILTSLMVAMLGQARYLCVIGRSGVVPAWLARVDRRTATPVNASAFLGLLTAALALFTELDVLLNLVSIGTLFVFYMVANAVVYRRYVGDPCPAGTGTAHETRAWPTLAFIGAFSLIALSFTLLWQFAPGGAAKAVMLSATAAAAVAVVAAFQALVPQAREPEVWGVPGMPWVPAASVFLNVFLLGSLDRPSYARFGFFSAAVVLVYVLYSVHASYDAEEGGAAADGGAGAGDKLQDHGCEV

SEQ ID NO: 21499 - protein, 456 aa, Sorghum bicolor
MSFRSIVRDVRDGFGSLSRRGFEVRFLSPRRGKSHGAVHELHDPVPVVQSSCWASLPPELLRDVIERLETSEDTWPSRKHVVACAAVCRTWREMCREIVKSPEVSGKITFPVSLKQPGPRDGTIQCFIKRDKSTQVYSLYLSFSSAVPAEDGKFLLSAKRNCRPTYTEYTISINSGDISRSTSNNTYIGKLRSNFLGTKFVIYDTQPPYNATSPTVAGKTNQRFYSKKGGSTKGSCSRYSIGQVSYELNVLGTRGPRRMNCVMHSIPASCLEAGGSVPCQPDSIVAHSVGEMFSSIPLSKSSTMDHSMHFSSSRFSDAITADAIVSGGQALSNADDEESTDTPLVLRNKAPRWHEQLQCWCLNFRGRVTVASVKNFQLVAAVMTQPAVGAPTPSQAAPLPLPAPAPGPPLPDQEKVLLQFGKVGKDIFTMDYCYPLSAFQAFAICLSSFDTKLACE

SEQ ID NO: 21500 - protein, 486 aa, Sorghum bicolor
MATKAAGHAGREAALEVSSVEAGNRADAAAARLDDDDGRPRRTGTMWTASAHIITAVIGAGVLSLAWAMAQLGWAAGTAMMLLFAGISYYTSTLLAECYRCGDSGKRNYTYTEAVRNILGGAKVRLCGVIQYANLVGIAIGYTIAAAISMRAIKRADCFHVRGHHNNKKNPCRSSSNPYMVLFGAVEVVFSQIPDFDQIWWLSIVAAAMSFTYATIGLALGIAQTVANGGFKGSLTGVAVGDGVTPMQKVWRSLQAFGDISFAYSYAYILIEIQDTIKAPPPSEATVMKKATMVSVATTTVFYMLCGCMGYAAFGDDAPDNLLTGFGFYEPFWLLDIANAAIVVHLVGAYQVFCQPLFAFVEKRAAARWPGSGFMAREVRLGPCFVLGVFRLTWRTAFVCVTTVVAMMLPFFGDVVGLLGAVSFWPLTVYFPVEMYIAQRGVRRWSTRWVCLQTLSAACLLVSVAGAVGSTAGVIDAVKLHRPFSG

SEQ ID NO: 21501 - protein, 481 aa, Sorghum bicolor
MVAKKQAPFDELSLVEARGGGGGGGDDAEWRDDDGRPRRTGTVWTASAHIITAVIGSGVLSLAWAIAQLGWAAGPAVMILFAVVIYYTSTLLAECYRSGDPVAGKRNYTYMDAVRSSLGGAKVTLCGSIQYANLFGVAIGYTIAASISMLAIKRADCFHVKGHRNPCRSSSNPYMILFGVAEVVFSQIPDFDQIWWLSIVAAVMSFTYSTIGLVLGVMQTVANGGFQGSLTGISIGAGITPTQKVWRSLQAFGNIAFAYSYSIILIEIQDTVKAPPPSEAKVMKRATMVSVATTTVFYMLCGCMGYAAFGDGAPDNLLTGFGFYEPFWLLDIANVAIVVHLVGAYQVFCQPLFAFVEKWAAATWPDSAFIARELGAVGPFKLSAFRLAWRTAFVCLTTVVAMMLPFFGDVVGLLGAVSFWPLTVYFPIEMYVVQRGVRRGSTHWICLQMLSVACLVVSVAAAAGSIADVIGALKVYRPFSG

SEQ ID NO: 21502 - protein, 231 aa, Sorghum bicolor
MAAPQPRALTTHHHHLLLLLLIVVFTMASAHTTAAPAPRAAAAAAESPSPAAMSFLRARCATTLYPALCYDSLLPYASEVQDNPARLARVAADVAAARLRALSARVKDILRHVGGDPAEGAAALRDCASTVSAAASLARQSSAELTKLEPDAGRVVTTSAGDGMSSSRQARWEVSNAKTWLSAAMANEGTCADGLVEAGAAAAAGKEVTAGVAAVKQYTSNALALVNGIPL

SEQ ID NO: 21503 - protein, 188 aa, Sorghum bicolor
MTDDASSRGATAFFIGVRPRPWGTFAAEIRDSTRRGARVWLGTFDTAEAAALAYDQAAFAAPGAAAVFNFPVDCVRESLAPLELAATLGSPVLALKRRHCKRKHRRRRRRKSSSSSRSSPLPSAHRGALPPTASSSSSMLPECSDEVSSSSSNVSMAAPPQQQVISQCCSSIIELEDLGADYLDELLR

SEQ ID NO: 21504 - protein, 883 aa, Sorghum bicolor
MAAAALLLPVHFHLLLLLVSPSAAQPGFISLDCGGARDHTDAIGIQWTSDATFVSGGGQTAQLLVQNGPQQQQQQLTTVRYFPADNRKYCYTMNVRNRTRYLVRATFLYGNFDNSNVYPKFDISIGASPWSTIVVDDATTPVVEEAIILAAAPTLSVCLSNASTGQPFISTLELRQFNGSLYYTTDETRFFLGLSARINFGAESNDSVRYPDDPFDRIWESDSVRRANYLVDVAPGTERISTTKPIFVGTNEEPPEKVMQTAVVGQDGSLNYRLDLEGFPANAWGVSYFAEIEDLAPNETRKFKLEVPGMQALSKPTVDVEENAQGKYRLYEPGYTNLTLPFVFSFGFRKTNDSSKGPILNALEIYKYVQITMGSQDANIMASMVSRYPQEGWAQEGGDPCLPASWSWVQCSSEASPRVFSITLSGKNITGSIPVELTKLSGLVELRLDGNLFSGQIPDFSECHNLQYIHLENNQLTGELPSSLGDLPNLKEFFSGNSGLHIVSNGISHTIIVICVVIGAIVLLGVAIGCYFITCRRKKKSHEDTVVIAAPAKKLGSYFSEVATESAHRFSLSEIEDATDKFERRIGSGGFGIVYYGKLADGREIAVKLLTNDSYQGIREFLNEVTLLSRIHHRHLVTFLGYSQQDGKNILVYEFMHNGTLKEHLRGADNVKITSWLKRLEIAEDSAKGIEYLHTGCSPTIIHRDLKSSNILLDKNMRAKVADFGLSKPAVDGSHVSSIVRGTVGYLDPDEFLISAEAKALDARSHIESGNIHAIVDESLDRGYDLQSVWKIAEVAIMCVKPKGAQRPPISEVLKEIQDAIAIERGPQEMQRSTIQQQLLVSNSNRSMGGASSSVNNNSGSVAVDLEQNGASFDELLMRPGLR

SEQ ID NO: 21505 - protein, 584 aa, Sorghum bicolor
MCGILAVLGEASHGKNKRGRVLELSRRLKHRGPDWSGLRQMGDCYLSHQRLAIIDPASGDQPLYNEDQSVVVAVNGEVYNHQDLRSRLSTAGHRFRTGSDCEVIAHLYEEHGEEFVDMLDGVFSFVLLDTRHGHGDRASSFMAARDAIGVTPLYIGWGIDGSVWISSEMKALNDECEHFEIFPPGHLYSSNNKTGGGFSRWYNPRWFDEAITPSVPYNPLALRKAFEKAVVKRLMTDVPFGVLLSGGLDSSLVAAVAVRHLAETEAATRWGTKLHSFCVGLEGSPDLKAAREVADYLGTLHHEFHFTVQDGIDAIEDVIYHTETYDVTTIRASTPMFLMSRKIKSLGVKMVISGEGSDELFGGYLYFHKAPNKEEFHQETCRKVKALHQYDCLRANKATSAWGLEARVRPDLGRIEKWVLRKAFDDEEQPFLPKHILYRQKEQFSDGVGYSWIDGLKAHAASNVTDKMLSNAKFIFPHNTPTTKEAYYYRMIFERFFPQKPAILTVPGGPSVACSTAKAIEWDAQWSENLDPSGRAALGVHLAAYEHEQDPKHVPDTIAAGGSKKPRTIRVAAAPPPPGVAIEG

SEQ ID NO: 21506 - protein, 331 aa, Sorghum bicolor
MAPASAATKCSSSCSASGLALLLLLVLMAAGTSSAQLSTSFYSSSCPGVYDSVKSAIQSAIATEQRMGASIVRLFFHDCFVQGCDASLLLDDTASFQGEKMATPNNGSVRGFEVIDAVKSAVEKVCPGVVSCADILAIAARDSVVILGGPSWDVKVGRRDSTTASFSGANNNIPPPTSGLANLTSLFAAQGLSQKDMVALSGAHTIGQARCTNFRAHVYNDTNIDGTFARTRQSGCPRTSGSGDNNLAPLDLQTPTVFENNYYKNLVCKKGLLHSDQELFNGGATDAQVQSYISSQSTFFSDFVTGMIKMGDITPLTGSNGQIRKNCRMIN

SEQ ID NO: 21507 - protein, 328 aa, Sorghum bicolor
MAMATTDRASSSSAAALLLLLLALAVAGTSSAQLSTGFYSYSCPGVYGAVKSVMKSAIANEKRMGASIVRLFFHDCFVQGCDASLLLDDTATFQGEKMATPNNGSVRGFEVIDAVKSAVEKVCPGVVSCADILAIAARDSVVILGGPSWDVKVGRRDSTTASFSGANNNIPPPTSGLANLTSLFAAQGLSQKDMVALSGAHTIGQARCTNFRAHIYNDTDINSAFAKTRQSGCPSTSGAGDNNLAPLDLQTPTVFENNYYKNLLSKKGLLHSDQELFNGGATDTLVQSYVGSQSTFFTDFVTGMIKMGDITPLTGSNGQIRKNCRRVN

SEQ ID NO: 21508 - protein, 317 aa, Sorghum bicolor
MASHKPLTCSVLALFFAASLVSSQLNANFYDKSCPNALYTIQTAVRSAVARENRMGASLLRLHFHDCFVNGCDGSVLLDDTPTFTGEKTAVPNNNSLRGFDVIDSIKAQLERICPQVVSCADIVAVAARDSVVALGGPTWAVNLGRRDSLTASLDAANNDIPAPTLDLTDLTKSFSNKGLSASDMIALSGGHTIGQARCVNFRDRIYSEANIDTSLATSLKTNCPNKTGDNNISPLDASTPYVFDNFYYKNLLNKKGVLHSDQQLFNGGSADSQTTTYSSNMAKFFTDFSTAMLKMSNISPLTGSSGQIRKNCRRVN

SEQ ID NO: 21509 - protein, 371 aa, Sorghum bicolor
MGSITEQQQCTDQQGLLDAQLELWHSTFAFIKSMAFKSALQLGIADAIHCHGGTATLTQIATKAALHPSKTPCLRRLMRVLTVAGIFSIAAKTSSDDDDDDDGGDHVYGLTPASRLLVGSSQNLTPTLSLILDNVFVSPFLDLGTWFEHELPAADLPLFELSHGKNVWDVVGHDPSMSQLFNAGMVADTSFLMDIAIRECGGVVFQGISSLVDVGGGHGAAAQAISVAFPGIQCTVMDLAHVVATAPACAGLSFVAGDMFEAIPPANAVFLKWIMHDWSDTECVTILRNCKKAIPPRDAGGKVIIVDTVVGAGPPNLKNRETQVMSDIFFMIVNGTERDEQEWRKIIFEAGFSDYKIIPVLGVRSIIELYP

SEQ ID NO: 21510 - protein, 169 aa, Sorghum bicolor
MAPRARGHAMATLVTRVITLAILAASVVVMATTARTEYDLIYLLDEDFGQIHDMSFQDLYTYVLSVAAIGCAYTLVLISVAAIAVVQGQRIGGTGFAWFLIFMDVVLCALLTSGGAAGLGLVVDNQRINGKSFDSGHRKFYTSFDASCGLLLAAAVCTVVMIMISVSSK

SEQ ID NO: 21511 - protein, 167 aa, Sorghum bicolor
MAAFSERALAAVSLALRVLTLLLLIASLIIMVTDKIYVGPFSAVEDPPNFTFRDRLAYRYVVSAAVIGCAYTLLVLPFAVIHLAQGRKIGRGGATVVLIFTDVVFAMLIATGAAAGLGLTVEAQRFPEFLDSDSKKFLNMVDLSCGLMLGATVCMVFMITISAHLLI

SEQ ID NO: 21512 - protein, 166 aa, Sorghum bicolor
MAFSDSERAAATASLLLRILTLLLLVASIVILVTNKIYAPFRNVVDPPNITFRDFFAYRYVLSAAVIGGAYTLLVLPFTAIHVAQERRIGRDRHAIALLIFTDVVFAVLIATGAAAGLGLTVESQRFPQGPDLSNFFKLVDVSCVLMLVASLCMVVIVMLSVRSIN

SEQ ID NO: 21513 - protein, 194 aa, Sorghum bicolor
MASRTVLLPSAVLILRLLSLGLLAASLALIAADKLNVDSDPPQRYTFRDVYAYRYVLAVAVIGCAYTLLQLPLAAVSIIASGNNKRGIGAGGGSVAVALLVLVLLADVVFALLLATGAAAGFAFTYDVKRYLDGQFDDDSIGTPEVDKLHRDMDKFFDLAYAAAGLMLAAAACMALVIMLSVYSLARQVRSDYI

SEQ ID NO: 21514 - protein, 319 aa, Sorghum bicolor
MEQPQFCTAYAHSDGHYGLQYYDDSLLQPSSAYDDPIAYTGESAGDHYPSSSSTAWASSSGAATPSIHHHHHHQQQQQLHFGGGRVDEHYSYQEDGTGVVDMEQISALMGAACISTNTPAAYSSSASTTTTTTTATMQPSAVHGPSPCGFGHQQKAAADAPLIGVRRRPWGRFAAEIRDSTRNGQRVWIGTFDTAQAAALAYDQAAYSMRGSAAVLNFPVEHVLESLRALGIRGDAAGEGDSPPLALKRRHCIRKRLHRNKKATGGKEQKVVATSSHGHDGHAVKLKPKQQGAAASCVLELEDLGADYLEELLATSDRQ

SEQ ID NO: 21515 - protein, 273 aa, Sorghum bicolor
MVADTESADSLPGSSNAASETPAHGSIHQKSQENPSKKTHKAEREKLKRDQLNDLFVELGSMLDLDRQNTGKATVLGDAARVLRDLITQVESLRKEQSALVSERQYVSSEKNELEEENNSLKSQISELQNELCTRLRNSSLNQNSLGMSLPVANTVGPDLATHPMPQQIWSNIPNLSSVSMAHPTNAATLLHSRDHSADAGQGYAPQPRELQLFPGASSSPERGCSGLGSDQPASSSLTDSLPGQLCLSLPQSSQEGSSSGVVPRSRKEQRNG

SEQ ID NO: 21516 - protein, 362 aa, Sorghum bicolor
MVLQQSQSAGGGAGMFPGVAAAACRRGPSRPAATAPMMAKQEQVVADEQDQQQAAGEEEGAGDELRRGPWTVDEDLTLINYIADHGEGRWNALARAAGLKRTGKSCRLRWLNYLRPDVKRGDFTADEQLLILDLHSRWGNRWSKIAAHLPGRTDNEIKNYWRTRVQKHAKQLNCDVNSKRFKDAMRFLWMPRLAERATAAAHHHPPSPSLTTCVLGGGMAASSSSSALMKMLDDATVSNRSSCSPSSAVTCSSSSCSSLTSVDTAHDDGGARPHAASAAVAFTAADDDDYWGAATATTTTMQQQQQQNDQHYDFWSTASALQHLCTAADHDITGWVQGFSDGGILSGSSSFWSLDDIWRMPQ

SEQ ID NO: 21517 - protein, 340 aa, Sorghum bicolor
MGGAAAGTKWIHHIQRLSAAKVSTEAVERGQSRVIDASLTLIRERAKLKAELLRALGGVKASASLLGVPLGHNSSFLQGPAFAPPRIREAIWCGSTNSSTEEGKELNDPRVLTDVGDVPIQEIRDCGVEDDRLMHVISESVKTVMEEEPLRPLVLGGDHSISYPVVRAVSEKLGGPVDILHLDAHPDIYDCFEGNTYSHASSFARIMEGGYARRLLQVGLRSITKEGREQGKRFGVEQYEMRTFSKDREKLENLKLGEGVKGVYVSVDVDCLDPAFAPGVSHIEPGGLSFRDVLNILQNLQGDVVAADVVEFNPQRDTVDGMTAMVAAKLVRELTAKISK

SEQ ID NO: 21518 - protein, 335 aa, Sorghum bicolor
MAGGGGEQRVDPVPAVLFIRRPGAPFCDAMHQRFRVLELATRASTEQAAAFLAAAAAEPDPPRAAVVMGGRSVRADAAFLDAVPSVRCLLSTAAGVDHIDLAECARRGVAVANSGTVYSADVADHAVGMLVDVLRRVSAAERFVRRRLWPLQEGGYPLGSKLGGKRVGIIGLGNIGSLIAKRLEAFGCVIYYNSRRPKDSVSYRYFPNVHDLASESDILVVACALNKETRHIVDKDVLEALGKDGIVINIGRGANIDEAALVSALKDGRIAGAGLDVFENEPKVPVELLSMDNVVLTPHSAVFTAESRSDLCEHLICNLEAFFAGKPLITPVLLP

SEQ ID NO: 21519 - protein, 333 aa, Sorghum bicolor
MASSELPTLLVFRVRELRFHAALRERYRVLDFLTSGEPLPAFLAAAAAADPPRAALVVGGDSARVDAAFLDAVPSLRFVFSTGAGLDHIDLAECARRGVAVANSGTVYSTDVADHAVGMLIDVLRRVSAAQRFLRRGLWPLHHHQGNDYHHHPHGHPLGTKVGGKRVGIIGLGNIGMLIAKRLEAFGCVISYNSRKPKESVVSYRYFASVHDMASESDVLVVACALSKETRHVVNKDVLDALGKDGVVINIGRGLNVDEAELVSALEEGRIAGAGLDVYEKEPKVPAELFAMDNVVLTHHCAAFTMESRSDLRDVAIGNLEAFFSGSRAMVAM

SEQ ID NO: 21520 - protein, 338 aa, Sorghum bicolor
MMASGGEPPATKVVLLLVPHMDASFHAALRGRFRVLDFFASSERSPLPAFLAAAAAAPEPPRAAIVVGAGLIPVDAAFLDAVPSLRCVTCLAAGVDFIDLDECARRGVVVANSGRVFSADVADHAVGLLIDVLRRVSAAERFVRRGLWRVQGDGYPLGSKIGGRRVGIVGLGNIGSQIAKRLQALGCTVFYNSRTRKDSVPYRYFTSVHDLAAESDVLVVACALNKATRHIVGKDVLEALGKDGVIVNISRGANVDQAELVRALQEGRIAGAGLDVFENEPGAPGELFSMDNVVMTPHVAVFTAESMSDLRDHTIANLEAFFSGEPLLTPVLPHSPVM

SEQ ID NO: 21521 - protein, 157 aa, Sorghum bicolor
MGFISFVGRVLFASLFLLSAYQEFIEFGNDGGPAAKTLKPKFNLFVKLVSKNTGLGVPHIDIKTVIAATMFLKGFGGLLFIFSSSFGAFLLLIYLAFMTPIVYDFYNYEMESEQFVQLFFKFTQNLAFIGALLFFLGMKNSIPRRRSKGRTTKTKTN

SEQ ID NO: 21522 - protein, 185 aa, Sorghum bicolor
MAANDSLVTAHVIGDVLDPFYTTVDMMILFDGTPIISGMELRAPAVSDRPRVEIGGDDYRVAYTLVMVDPDAPNPSNPTLREYLHWMVTDIPASTDNTYGREMMCYEPPAPSTGIHRMVLVLFQQLGRDTVFAAPSRRHNFNTRAFARRYNLGAPVAAMFFNCQRQTGSGGPRFTGPYTSRRRAG

SEQ ID NO: 21523 - protein, 263 aa, Sorghum bicolor
MEYPRRTLLHTPFSGHPSSPSHPLDGAAATDSGAPGSNFDANIVMILAVLLCALICALGLNSIVRCALRCSSQIVVGPEPNQATRLAQSGMRRKALRAMPILVYSAGLKLNAANPMCAICLSDFEAGEHVRVLPKCKHGFHVRCIDRWLLARSTCPTCRQSLSRVQQKASGCSEASRAEPEPASARPVLVPLRPEGREKCRLLLENVPWTIPVALVGLFVNHRFNCCTTTMVIGDQALAATSDFSGNGIFYAIMKRSGVQQGL

SEQ ID NO: 21524 - protein, 504 aa, Sorghum bicolor
MLHDYDNSKAGSHAGVDNNAARSEVASPAVLHAGDGNNGGSKIASPAVPQAIVENPTGSKLDSPAVLHADEHNNAGFKVPNPAVLHASKDMDNNTERPKFGSSLLLHAGKDNKARTKLAIQAMSHASGNAGSSRLTRSAAAALHAAKSNASNLAIQVAPRHHAGKDNIAGSSKAARPAAVGAGAGESNAKEGKNNIARGQQRALEADVGGGSGKGNAAALEDTDHDLHIFTERERRKKMKNMFSTLHALLPDLPDKADKATIVGEAVTYIKSLEGTVEKLEKMKLQRKRALAAQQQLQQHGQQLLVGAGSGSSRASSARHPAPALPAPAAPAPAPAASSSREASLADMVHSLEVQQASVAAANRALAVAAAAAAAGGSGSGSSSGAAAANALSLPRGAVPFPAPATGFQTWSGQNVVVSVANNEAYINLHCPREPGTLTKVLFVLERHSIEVVTTTISAHDGFRMYGIHARANPASASARFPQNLGAEDRFKLAVSEIVQLINI

SEQ ID NO: 21525 - protein, 443 aa, Sorghum bicolor
MDSVMAAVPDSPPQTVVLVSAGASHSVALLTGNVLCSWGRGEDGQLGHGDAEDRLVPTVLSGFDAPGITSVICGADHTTAYSEDELQVYSWGWGDFGRLGHGNSSDVFTPQPVKALQGLKIKQIACGDSHCLAVTMAGQVQSWGRNQNGQLGLGTTEDSLLPQKIQAFEGVCVKMIAAGAEHTAAVTEDGDLYGWGWGRYGNLGLGDRNDRLLPEKVSSVEGEKMVLVACGWRHTITVSDSGNLYTYGWSKYGQLGHGDFEDHLVPHKLEALKDSTISQISGGWRHTMALTSEGKLYGWGWNKFGQVGVGNNDDHCSPVQVHFPEDQKISQVACGWRHTLALSEKKNVFSWGRGTSGQLGNGEIVDRNTPVLIDALSTDGSGCKKLESSTAAPFAAKVWVSPSERYAIVPDENVPKAGEGTARGNGADANVPENDVKRMRVQS

SEQ ID NO: 21526 - protein, 411 aa, Sorghum bicolor
MSHARDELSSFRSGLRWMCVDPSEAGAGPAVSWLVFAALGVAVPAAAHAATTPGHAYDTQVQVSLTLSAALAYATLYSLVRRRGLRRLLYLDRLRHDSQDVRAGYIVQLAGSFRLLACFVLPCFLADAGYKVFWYCANAPFPPWWSAAACALEMASWMYRTAMFFMACVLFRTICYLQILRMTGFARDFGQCADVAAVLRQHRRIRVQLQRISHRYRRFILYSLILVTASQFTALLAATRPHAQVNFATAGELALCSVSLVTGLLVCLHSAAKITHKTQAITSVAAAWHADATINSLDRDQENPRTPSKGCLQQQQQAPTSPFPMGNASSGEESDDDEWRSEDSVDTSRFTSFHATNISFQKRQALVTYLENNRAGITVFGFVVDRTWLHALFMIEFSLVMWLLGKTIGIS

SEQ ID NO: 21527 - protein, 461 aa, Sorghum bicolor
MTAVAAPPPPRQLSLEDLKAVSVLGRGAKGVVFHVVHAPGGEQDGEAGAAAMALKAVSREAARHKKAAGGDGDGHRRIWFERDVLLALRHPLLPSLRGILATDAVVGFAIDRCGGGDLNSLRRRQTEKMFSDSVIRFYAAELVLALEYLHSLGIVYRDLKPENVLIQDSGHIMLVDFDLSTRLPAPPQEPDAPATSPKPVAPVAAPLPSRGRARKPAGAALCFPFRTGSAARPAAKPAADSPSPLSTSRTASSSSSSSTATTASSSAASPGARTPAKSNSFVGTEDYVAPEIIAGRGHDFAVDWWGLGVVLYEMLYGRTPFRGQNRKETFYRVLAKQPELVGEQTPLRDLIARLLEKDPEKRVGARGVKAHPFFRGVDWDRILQVARPPFIPTPSPQDEGGDEALDVEKVVHEVFASNEAEAATKAGEGGKASPVADGGRVGGDGDGRRDQSKDGDFSVFF

SEQ ID NO: 21528 - protein, 174 aa, Sorghum bicolor
MSRDPLVVGHVVGDILDPFIKTASLKVLYNNKELTNGSELKPSQVANEPRVEIGGRDMRNLYTLVMVDPDSPSPSNPTKREYLHWLVTDIPESANASYGNEIVSYENPKPTAGIHRFVFVLFRQSVQQTVYAPGWRQNFNTRDFSALYNLGPPVAAVFFNCQRENGCGGRRYIR

SEQ ID NO: 21529 - protein, 403 aa, Sorghum bicolor
MEPERGLIAYEEPAPESTDLLSSAWCSSAIQVVHSGPKECSMALVEHPVMALGNDRNDMLAKSDRSLVVDNSSFSTTQQWKYDDLKSWIWLQKAIHPELDYDLCLKKKWLPRKMAPWNGISLKKWVKERKQKRKEEARLQRAEVHAAVSVGGVAAALAAIATEKASPPRAPGMRETPVASAAALVAAQCAKVAEAAGASRDQVAAAVDAARASTDAGSVITLTAAAATSLRGAATLRGRRSTSGGGHGQNERVEHSGSALSQDDLDFDFNHARSRAALAKGDEMLVAMPDGKWKLHTVSAASNKRGEIVLRIKKTNLVMAFSHAKESVIRDVRPCAPEKPSHDEGATYPVEVTTNKGKVELRADDYGVYKRWVATLSHMLVMSTAVSVSVSTRHEPPRPARRD

SEQ ID NO: 21530 - protein, 128 aa, Sorghum bicolor
MGIASSSSSNPESRAMALAKAKEIVASAPLVVFSKTSCPFCVRVKQLFEKLGASYKAIELDVESDGPELQNALKEWTGQRTVPNVFINGKHIGGCDDTMALNNDGKLVPLLTEAGAIAGSTSKTTVTA

SEQ ID NO: 21531 - protein, 533 aa, Sorghum bicolor
MSTCAADLAPLLGPAAANATDYLCGQFADTASAVDATYLLFSAYLVFAMQLGFAMLCAGSVRAKNTMNIMLTNVLDAAAGALFYYLFGFAFAFGTPSNGFIGKQFFGLQHLPKTGFDYDFFLYQWAFAIAAAGITSGSIAERTQFVAYLIYSAFLTGFVYPVVSHWFWSADGWAAASRTSGPLLFGSGVIDFAGSGVVHMVGGIAGLWGALIEGPRIGRFDHAGRSVALKGHSASLVVLGTFLLWFGWYGFNPGSFTTILKSYGPAGTVNGQWSAVGRTAVTTTLAGSVAALTTLFGKRLQTGHWNVVDVCNGLLGGFAAITAGCSVVEPWAAVVCGFVSAWVLIGANALAARLKFDDPLEAAQLHGGCGAWGVLFTGLFASQKYVEEIYGSGRPYGLFMGGGGKLLAAQIIQILVIAGWVSCTMGPLFYALKKLDLLRISADDEMSGMDLTRHGGFAYVYHDEDPGDKSGVGGFMLKSAQHRVEPAAATATSNQRSLEVARTSIRLTYQSIDEGSCWVGRAHQLPSAAAGYR

SEQ ID NO: 21532 - protein, 636 aa, Sorghum bicolor
MAALAPAFSTYAPGWRRPVHVKAPVMLTYAARGGAYIGAAAHNITRSALVLAHLDHRLAAEIMAADPSSSSMAQQTADIRAAPPEDSRQMAMSGPLNVRGDRRPPPMQRAFSRQVSLGSGVTVLGMDRGGRNGGGRGQRALPRSGRSLGVLNHSGGLGQAGGDGAARRGGGGDFSMFRTKSTLSKQNSLLPTRIRESDLDLPTHVEDQSAGRTAEDPLNKSVPAGRYFAALRGPELDEVRDYEDILLPKDEVWPFLLRFPIGCFGVCLGLGSQAILWGALAASPAMRFLHVTPMINVALWLLAVTVLVATSVTYVLKCVFYFEAIRREYFHPVRVNFFFAPWIAAMFVTIGLPRAYAPERPHPAVWCAFVLPLFALELKIYGQWLSGGKRRLCKVANPSSHLSVVGNFVGAILAARVGWAEAGKLLWAIGVAHYIVVFVTLYQRLPTNEALPKELHPVYSMFIATPSAASLAWAAIYGSFDAVARTFFFMAIFLYLSLVVRINFFRGFRFSLAWWSYTFPMTTASLATVKYAEAVPCFASRALALSLSLMSSTMVSLLLVSTLLHALVWRSLFPNDLAIAITKDRQNGAAKPNGRGKRASKRVHDIKRWAKQAPLSLVSSITKSHSADKEEEERTD

SEQ ID NO: 21533 - protein, 231 aa, Sorghum bicolor
MAPKNALPAASAVTDGMMEPRFRGVRKRPWGRYAAEIRDPARKARVWLGTFDTAEAAARAYDAAALHFRGPKAKTNFPVAFAAAAHAQALALPLPLPPPPKKLAVSPSSSTVESSSRDSPATPPRARSPSPAPTVMPAPSLDLCLGMPAMVAAQPFLFLDPRLAVTVAVPAPVACRPTAVAAGAKKQTAPTSCGGDEEQSDTGSSSSVVDASPEAVCVGFDLNMPPPAEVA

SEQ ID NO: 21534 - protein, 215 aa, Sorghum bicolor
MAEERVTGTVKWFNVDKGFGFITPDDASEDLFVHQSSIKCDGYRSLKEGEAVEYTVGSGQDGRTKAMDVTAPGGGNLAGGERPDGGHGGGGRYGGGGGDRGYGGGGDRGYGGGGGYGGGGDRGYGGGGDRVYGGGGDRGYGRGGGGGYGGGGGGGRGCFKCGEEGHMARDCSQGGGGGGYGGGGGGGYGGGGGGRECYNCHQEGHISRDCPEKMR

SEQ ID NO: 21535 - protein, 620 aa, Sorghum bicolor
MAAPSQTTAAATTHHRALLPSPRGTRAAAAPSAVRLPLRAQPHAHAQRARLSVPVATAAPAASTASPESPAAGAVAGKPTVLVAEKLGAAGLALLREFANVDCSYGLSPEDLRAKISLCDALIVRSGTKVGRDVFEASGGRLRVVGRAGVGIDNVDLAAATEHGCLVVNAPTANTVAAAEHGIALLTAMARNIAQADASLKAGQWQRNKYVGVSLVGKTLAILGFGKVGSEVARRAKGLGMHVIAHDPYASADRARAIGVELVSMEEAMTTADFISLHMPLTPATNKMLNDEAFAKMKKGVRIINVARGGVIDEEALVRALDSGIVAQAALDVFTKEPPAPDNKLVLHENVTVTPHLGASTVEAQEGVAIEIAEAVIGALKGELAASAVNAPMVPAEVLSELAPFVVLAEKLGRLAVQLVAGGGGIKSVKVTYASARAPDDLDTRLLRAMITKGLIEPISSVFVNLVNADFTAKQRGVRITEERILLDGSPETPIDYIQVQIANVESKFPSAISESGEITVEGRVKDGVPHLTKVGAFQVDVSLEGSLILCRQVDQPGMIGSVGSVLGEENVNVSFMSVGRIAPRKHAVMAIGVDEEPSKATLTKIGEIPAIEEFVFLKL

SEQ ID NO: 21536 - protein, 476 aa, Sorghum bicolor
MAHHHGSHSLEVAAAAGGPGPELDDDGHAARTGNIWTCFAHIITAIIGAGVLALSWSVAQLGWVGGPIAMLCFAFVTYLSAFLLSHCYRSPVHSDDGSQKRQRNYTYMDAVRTHLGEKRTWLCGLLQYLNLYGTAIAYTITTATCLRAIVRANCYHSRGHDAPCGAGGDHLYMLLFGAAQVVLSFIPNFHNMAWLSVVAAVMSFTYSTIGLGLGLAKTIENGAIKGSVTGVPMSTPAQKVWRVAQAIGDIAFAYPYTIVLLEIQDTLKSPPPESETMQKGNVIAVLATTFFYLAVSCFGYAAFGNAAPGNLLTGFGFYEPYWLIDFANACIVLHLLGGYQMFSQQIFTFADRSLAARFPNSAFVNKSYAVKVPGVPASWSYRLNLQRVCFRTAYVASTTGLALLFPYFNEVLGVLGAVVFWPLAIYLPVEMYCVQRGVRPWTRTWVALQAFSAVCFVVGTFAFVGSVEGVIRKRLG

SEQ ID NO: 21537 - protein, 214 aa, Sorghum bicolor
MTLPRRRHLVLLAGLLVLVVVAATATASTDSSSTTAVAVDFVRRSCRSTEYPRVCETTLVPCAASVGRSPRRLARAALVVGADRARNCSAYIHGSRSGSGGAMKDCAELARDAEDRLRQSAAEMERMGRAGTPRFAWSLSNVQTWASAALTDTSTCLDSLAQHKDRGRGGKGSDGDDDAVRVKRRVVAVAQATSNALALVNRLQPATHRQRLLL

SEQ ID NO: 21538 - protein, 338 aa, Sorghum bicolor
MASDAVAATAGEEPLALPALLLIRRVDAPFAAALHQRFRVLDFFASGSPPLKAFLAAAAAIQEPPRAAVVMGGGGPARVDAEFLDALPSLRCVVSTAAGIDHIDLHECARRGVAVANSGSVYSADVADHAVCMLIDVLRRVTASQRFVRRGLWALHGDYYCLGSKLGGKRVGIIGLGNIGSLIAKRLEAFGCVISYHSRKPKDLVSYNYFSNVQELASESDVLVVACALNKQTSHIVNNDVLDALGKNGVVINIGRGANVEEAEMVRALKEGRIAGAGLDVFEDEPNVPPELLAMDNVVVTPHVAVFTSESRSDLRDHTIANLEAFFAGKQLLTPVLP

SEQ ID NO: 21539 - protein, 330 aa, Sorghum bicolor
MASAATRAAKPGLLLLRRTDATFTAALRARFRIHDFYASGAPLPAFLTAAAAEADPPRAALVLAGGAIQVDAAFLDAVPSLGCVVTTGAGVDHVDLAQCARRGVVVACAGEIFSVDVADHAVGLLIGVLRRVAAADRYVRAGLWPAQGNYPLTTKLSGKRVGIIGLGSIGSRIAKRLQAFGCAISYHSRAPKASVPYRYFPDVHALAADSDALIVACALNDATRRIVGRRVLDALGPEGVLVNIARGGNVDEQELVLALQDGRIAGAGLDVFQNEPHVPPELGDMDNVVLTAHEAVFTEESAADLRELMIGNLEAFFSGKPLLTPVLSRP

SEQ ID NO: 21540 - protein, 416 aa, Sorghum bicolor
MSVRSSLIDPDGGALVELVAPPDRVPSLRAEADALPRVRLAHVDLQWAHVLAEGWASPLRGFMREHEYLQSLHFNCVRLPDGGLVNMSLPIVLAIGDADKDQIGGNPDVALQGPDGGVVAILRRVEIYPHNKEERIARTFGTTAPGLPYVDEAIASAGNWLIGGDLEVLEPIKYNDGLDHYRLSPRQLRNEFDKRGADAVFAFQLRNPVHNGHALLMNDTRRRLLEMGYKNPILLLHPLGGFTKADDVPLPVRMEQHSKVLEDGVLDPETTIVSIFPSPMHYAGPTEVQWHAKARINAGANFYIVGRDPAGMGHPTEKRDLYNPDHGKKVLSMAPGLEKLNILPFKVAAYDTVAKEMAFFDPSRSQDFLFISGTKMRTFAKNGENPPDGFMCPGGWKVLVDYYNSLQAEEATPVPV

SEQ ID NO: 21541 - protein, 602 aa, Sorghum bicolor
MTHSHPSQRHTTTSHAAVLALAAPSLPVPSAAPTAPSPPPAMGVLTSTELNFLVFRYLQESGFIHAAFTLGYEAGIHKGGIDGNAVPPGALITIVQKGLQYIELEANNDENDDEVERDFALLEPLEIITKDVEELQQIVKKRKLERSQTEHEKDKGKEKERNEEHERRPVGERERERHDKEKEQVREKDRSEKDKDHDKEKEKEKERERQHAERIDKVKHEDDSLAGGGPTPMDVSTTAQEISNTDVTVLEGHSSEVFACAWSPTGSLLASGSGDSTARIWTIPDGPCGSNMQSSPPGVHVLKHFKGRTNEKSKDVTTLDWNGEGTLLATGSYDGQARIWSRDGDLKQTLFKHKGPIFSLKWNKKGDFLLSGSVDKTAIVWDTKTWECKQQFEFHSAPTLDVDWRNNNSFATCSTDNMIYVCKIGEQRPVKTFSGHQNEVNAIKWDPTGSFLASCSDDWTAKIWSMKQDKCLFDFKEHTKEIYTIRWSPTGPGTNNPNQQLLLASASFDSTIKLWEVEHGRLLYSLSGHRQPVYSVAFSPDGEYLASGSLDQCLHIWSVKEGRILKTYRGSGGIFEVCWNKEGSKIAACFSNNTVCVMDFRM

SEQ ID NO: 21542 - protein, 401 aa, Sorghum bicolor
MERSPAPAPVEVPKFFVCPISLEVMRDPVTLSSGITYDRDSIERWVFTDGHGDCPVTKLPLGADDLEPTPNHTLRRLIQSWCAAHAVERFPTPRPPVDADRKHAATTSSSSSKPLLGGCGSQSHSQEESTCGGVPGSPKACSPEEAALSILHSLKLSEASLKRVLDSSDDFVDALASVLRRWPSYRARTYAMHLLKAALSAMQPSRLSSTASTELVEGVVKVVADRTLSPKAIKVALHVLCRLCPWGRNRIKAVEAGAVAALVELLLGDGCGAGGGRSNGKRAWELAAVAIDHLCGCAEGRLELVAHPAGLAVVARAATRLSATATESAVRALHAVARHSATPAVLQEMLAVGVVARLLYLVQAGAAGDRPRERAREMLKMHARVWRGSPCLAAHMASYPC

SEQ ID NO: 21543 - protein, 563 aa, Sorghum bicolor
MAKALLGGLSAILVVAVVVGVVATVTRSGKKAGDNFNVPGDASLATSGKSVKSLCAPTLYKDSCEKTLSQATNGTENPKEIFHSVAKVALESVKTAVEQSKNIGEAKASDKMTESAREDCKKLLEDAVDDLRGMLDMAGGDIKVLFSRSDDLETWLTGVMTFMDTCIDGFVDEKLRADMHSVLRNATELSSNALAITNSLGGILKKLDLDMFKKDSRRRLLSSEQDEKGWPVWMRSPERKLLAAGNQPKPNAVVAKDGSGQFKSIQQAVDAMPKGQQGRYVIYVKAGVYDEIVMIAKDKVNIFMYGDGPKNTRVTGQKSFADGITTMKTATFSIEAAGFICKNMGFHNTAGAAKHQAVALRVQGDLAAFYNCRFDAFQDTLYVHARRQFFRNCVISGTIDFIFGNSAAVFQNCLIITRRPMDNQQNSVTAHGRTDPNMKSGIVIQNCRLVPDQKLFADRFKIPSYLGRPWKEFSRLVIMESTIADFIKPEGYMPWNGDFGIKTLFYAEYNNRGPGAGTSKRVNWPGFHVITRKDAEQFTAGPFIDGALWLKFTGTPHILGFKS

SEQ ID NO: 21544 - protein, 190 aa, Sorghum bicolor
MKRLVSTALATRGLLRSRGAPSTTAVMSRPAFQQFMNYSSPQGGDPNASTNSTAARIAADPDTHQDFEPKSRSSDMSLNDIVAQDIKENPVLIYMKGFPESPMCGFSALAVKVLQQYGVPICGRDILGDLKLKESVKAHTNWPTFPQIFIKGEFVGGSDIILSMHQKGELKDLLGDIAQRAEQKADAHDS

SEQ ID NO: 21545 - protein, 466 aa, Sorghum bicolor
MALGEGRDHGAALPLIADQAKHGAGGIVRSGSMWTAAAHVITAVIGSGVLSLAWSIAQLGWVAGPGAMLVFAAVTALQSTLFADCYRSPDPEHGPHRNRTYAKAVDRNLGSSSSWVCMLLQHTALFGYGIAYTITASISCRAILKANCYHKHGHDAHCDYGGSYYMLVFGAAQLLLSFIPDFHDMAWLSVVAAVMSFSYAFIGFGLGLATTIANGTIKGSITGVQMRTPMQKVWRVSQAIGDIAFAYPYSLILLEIQDTLKSPPAENKTMKRASMISILVTTFFYLCCGCFGYAAFGSDAPGNLLTGFGFYEPYWLIDFANACIILHLLGGYQVYSQPIFQFADRFFAERFPDSGFVNDFHTVRLGCLPACRVNLLRVCFRTLYVASTTAVAVAFPYFNEVLALLGALNFWPLAIYFPVEMYFIQRNVPRWSARWVVLQTFSVVCLLVSAFALVGSIEGLITQKLG

SEQ ID NO: 21546 - protein, 431 aa, Sorghum bicolor
MYGVGGGGGGFNAPSTTAGRRRNPGDEEEDEEEEGGEGRVLEAWERAYADERSWESLQEDESGLLHPIDTKALVHSQYRRRLLLRSAAAAAARIQKGLIRYLYIVIDLSRAASEMDYRPSRMAVVAKHAEAFIREFFDQNPLSHVGLVTIKDGIAHRLTEIGGSPESQIKALMGKLECSGDSSLQNALELVHGYLDQVPSYGHKEVLILYSALNTFDPGDIMETITKCKKSKIRCSVIGLAAEIFICKHLCEETGGSYTVALDESHFKELLLEHAPPPPAIAEYAAANLIKMGFPQRGAEDLISICSCHKKIKSGAEGYICPRCKVNVCELPTECRTCGLTLVSSPHLARSYHHLFPVAPFDEVTPVPNRIQRGGQICFSCQQSLFNPDGQSNLHVRCPKCNQHFCLDCDIYIHESLHNCPGCESQRNITL

SEQ ID NO: 21547 - protein, 353 aa, Sorghum bicolor
MELGSAVSAHRCSSYYTATYTHCSIGFSPRVRATSCWIRAAAEGDDGGADRRRRGASFGDDRPKVVEVTAELAMWDKLGAVVRLSYGIGIYGAMALTGRFICQMAGIDCTGGFHPSLTALVEGLGYAAPPIMALLFILDDEVVKYSPHARAIRDVEDEELRSFFYGMSPWQFILIVAASSIGEELFYRAAIQGALADIFLRSTELMKDARGIASLSGIVPPLVPFAQTFAAVITAALTGTLYYIATAPKDPTYVVTPAMRSRTGRENLKKLFAAWYERRQMRKIYSPLLEGILAFYLGFEWIQTDNILAPMITHGIYSTVVLGHGLWKIHDHRRRLRQRIQQVRSQESSSDTL

SEQ ID NO: 21548 - protein, 576 aa, Sorghum bicolor
MALRDVLLSIAQTPHRLRRRALVTWTPAQELNEVRDRSGPRMKRRLEWYDLVGLGVGGMLGAGVFVTTGRVARDTAGPAVFVSYVIAGVSALLSSFCYAEFSVRVPVAGGAFSYLRVTFGEFVGFFGGANILMEYVLSNAAVARSFTDYLASTFGVTEHNAWRIVVDGIADGYNALDVPAVGLILLITVCLCYSTKESSMLNMVLTVFHLLFFAFIIAAGLWNGSARNLVRPHGLAPYGVAGVLDGAAIVYFSYIGYDSACTMAEEIREPSRALPVGIAGSVLVVSALYCLMSVALCVMLPYTEVTMHAYAGGVARSRSRPVARSISEAAPFSSAFREKVGWRWASSVVGAGASIGIVASLLVAMLGQARYLCVIARARLVPLWFAKVHPSTGTPMNATIFLALALFTELQIVFEMISIGTLLVFYLVANALIYHRYVKIGTNRPLHVLLFLLLLTLSSLGFSLSRKIDEWCRWGMALFGAISIAITTIFHCTARQDITGPPLEWSVPLMPWPAAASVFLNVFLITTLKVRSFQRFGIWSLVIIVFYVCYGVHSTYSAEENEIVNAMIHHANLDIS

SEQ ID NO: 21549 - protein, 293 aa, Sorghum bicolor
MLLNPASEALVLDTIRQHLLEEPAAAAAGDESFGSLVADQWSGSLPFRTDDADDMVVFGALQDAFAYGWLPDGSFAHVKPEPALSPDSHSYSYSYDGSSCCFGGLLLDPAEPLTPSSEAAATPRREAAAAAVARGKHYRGVRQRPWGKFAAEIRDPAKNGARVWLGTYDTAEDAALAYDRAAYRMRGSRALLNFPLRIGSEIAAAATAGDKRPSPEPATSSSDSSFSSCSSTTSSSSTSGSPKRRKRGEAAAANMAMALVPPPSQLNRPAQPWFPAAPVEQAAMAPRVEQLVI

SEQ ID NO: 21550 - protein, 233 aa, Sorghum bicolor
MMERVEDLGLSLSLSSSLASPRTHHVATMLLRAPPEKRFLEMPLLLPAKRSELATGEEGLRGGGSDEEDGGCGIDGSRKKLRLSKDQSAVLEDSFREHPTLNPRQKAALAQQLGLRPRQVEVWFQNRRARTKLKQTEVDCEYLKRCCETLTEENRRLHKEVQELRALKLVSPHLYMHMPPPTTLTMCPSCERVSSSNASNANSAAADRKAGAGVADGGAIVCHRPIAVRPQQS

SEQ ID NO: 21551 - protein, 532 aa, Sorghum bicolor
MSSSKQDAISEVESAPPTPRPPTTPPVVSTPPSQIHSPRGPASGGRSPLHAMASPLRAMASPLRAMATPLASPVRKAVAGVKAVGNITRLADPRDAWLPITESRSGNAYYAAFHNLSSGIGFQALVLPVAFASLGWTWAIICLTLAFGWQLYTLWLLVRLHEPVAGAARYSRYMHLANTVFGERWAKILALFPVMYLSAGICTALIIVGGGSMKSLFSLACGESCLAHNLTTVEWYLVFICAAVLLSQLPNLNSIAGVSLVGATAAVAYCTMIWVVSVSKGRVAGVSYDPVKSNNDVDAALSILNGLGIIAFAFRGHNVVLEIQGTMPSTLKHPSHVPMWKGVKVAYGIIALCLYPIAIGGFWAYGNQIPSGGILTALYQFHSRDVSRLVLGTTTLLVIINCLTTYQIYAMPVYDNMEAGYVHKKNRPCPWWLRSGFRAFFGGINFLIAVALPFLSQLAGLMGGISLPITLAYPCFMWVAIKKPRKGTATWNVNWALGILGMAISVVLIVGNLWGLVQTGLRLNFFKPDNMQ

SEQ ID NO: 21552 - protein, 429 aa, Sorghum bicolor
MEFDKEASSSSSRLDAAPLLPQYGLHCGGAGAGAGGHLSSQPKTFANVFIAVVGTGVLGLPYTFSRTGWAAGTLLLLAVAALTFHCMMLLVATRRRIADEHTKIASFGDLGHGIYGAPGRHAVDAMLVLSQVSFCVGYVIFISNTMAHLYPIVADSPASPLLTAKALFIWAMLPFQLGLNSIKTLTLLAPLSIFADVVDLGAMGVVLSQDASIWLANKPPVFAFAGPAELLYGLGVAVYAFEAIGMVLPLEAEAADKRRFGATLALSMAFIAVMYVLFGAMGYLAFGSATRDIITTNLGTGWFSVLVQLGLCISLFFAMPVSMNPVYEVAERLICGRRYAWWLRWILVVVVGLLAMLVPNFADFISLVGSSVCVVLLFVLPAAFHIKVFGAEIGWTGLVGDVTVIVIGIALAVFGTWTSLVQIFSSSNV

SEQ ID NO: 21553 - protein, 496 aa, Sorghum bicolor
MSTTLLKERSTALPPPPTASASTKRESARHEIPKIPHFCGHQLATPHSQSPPQLVPCSVRLIQRLNPQTTMGFDKEASSSSSRLDAAPLLPQHGLHGGGGGGGHLSSQPKTFANVFIAVVGSGVLGLPYTFSRTGWAAGTLLLLAVAALTFHCMMLLVATRRRIADEHPKIASFGDLGHAVYGAPGRHAVDAMLVLSQASFCVGYLIFISNTMAHLYPIGAESPASPLLTAKALFIWAMLPFQLGLNSIKTLTLLAPLSIFADVVDLGAMGVVLGQDASIWLANKPPVFAFAGPAELLYGLGVAVYAFEGIGMVLPLEAEAADKRRFGATLALSMAFIAVMYGLFGAMGYLAFGAATRDIITTNLGTGWLSVLVQLGLCINLFFTMPVMMNPVYEVAERLLCGKRYAWWLRWILVVVVGLLAMLVPNFADFLSLVGSSVCVVLGFVLPATFHLKVFGAEIGWTGLVADVAVIVIGTVLAVSGTWTSLVQIFSSSNL

SEQ ID NO: 21554 - protein, 194 aa, Sorghum bicolor
MGFPVGYSELVLPKQLLHLLLLLGYIRRFLLWAFDAVGLGDLLDLGDDHHQALLQQQHRRPEFRAVPAMVIEEVLPVVRFDELEEARVGGDCAVCLSGIGGRDEVRRLSNCRHVFHRACLDRWMEHDQRTCPLCRAPLIPDEMAGALWAAAAGVPDASDFDFSYFGATPLTTPVPSPTLLRPHELLLTGLGGYQ

SEQ ID NO: 21555 - protein, 159 aa, Sorghum bicolor
MTFPLVCYCNAVPRPVAALFKLLHAVALVFVLVLCFLGLYEFPYDPEDHAPVINGPPRRPRGDAPRPEAVKQRLPLVEFLELSSSSSSSGAAEPTCRVCLERLEATDEVRRLGNCTHAFHTRCIDRWIDLGEVTCPLCRSHLLPRRRAGILGMGMARLG

SEQ ID NO: 21556 - protein, 682 aa, Sorghum bicolor
MASRSRDDDSAHPPPKRPRRDAEAEADAAEPSPRVVLNPADCDLDFDVDGGGLRGSALHEGGFAYCWSGARATVGARGGGRYCFGCRIVAEQPVEMDLTTPEERHLCRIGVSRGDDPVGVLGESQHSFGFGGTGKFSHQRRFVNYGVKFGVGDTVVCAVDLDSKPMASIGFARNGEWLGIVRHFDASEKGLGLVDAPLRPMQWGSALFPHVLLKNVVVEMQFSREDGLLPVDGYEPWASAVTHGNSVFGPSFEQNKCEVMMMVGLPASGKSTWAEKWVKEHQEKRFILLGTNLALEQMKVPGLLRKNNYGERFDRLMDCATWIFNKLLTRAANTPRNFIIDQTNVYKNARIRKLRSFANYRKTAVVVFPTPSELKSRAAKRFDEMGKEVPAEAVNEMIANFVLPLSKDMPNSKEPFDKVIFTELSRDEAQRTLDEMQRVLPRIVTPSYGNSSNQNHASSTYSGTAASLDPSARSSMPGFYPPVANSYGVDTLPSSAATFSTGVYTAGNTTHGQASRNGRSFQSPTGNQHEIRSGYPSAPNQYQMPSSYLSNPNQYEVRASYESTSLPGYGQSTYGSHRNPSPYNPNPYNTEMHQSSQAPMSSRNLYQAPGPAEAYRAPGYAAANLIGRPHQVSSPSTLPAHGPQPAAQWVPNQDSSYSWSYDSYRPPYYGQQSHGCMSLGFA

SEQ ID NO: 21557 - protein, 321 aa, Sorghum bicolor
MAPCRQTFARYTMALLFAAAAVSAQLSTDFYGETCPDALDIIESAVRAAISKESRMGASLLRLHFHDCFVNGCDGSVLLDDTTGFTGEKTAKPNKNSLRGFDVVDDIKAQLEDSCQQTVSCADILAVAARDSVVALGGPTWDVELGRRDGTTASLDDANNDLPAPTLDLGDLIKAFAKKGLSANEMIALSGGHTIGQARCVNFRGRLYNETTSLDASLASSLKPRCPSADGTGDDNTSPLDPATSYVFDNFYYRNLLRNKGLLHSDQQLFNGGSADTQTTSYASDKAGFFDDFRDAMVKMGAIGVVTGSGGQVRLNCRKTN

SEQ ID NO: 21558 - protein, 426 aa, Sorghum bicolor
MEEEPQPQVEVEVPCYFLCPISLSIMRDPVTLPTGITYDRDGIERWLLTAATCPLTKQPVPADCDPTPNHTLRRLIQSWCALHAADGVDRVHTPKPRADVAALVSRLHDAAAAGSTAPQPQLLAALRELRDVAAESDRNRKLVAAVPGAVDVLAAVFAASANAKSSEGTAAAAAAVRDEALEVVSSLQVPEQCLRRVAETNEALVSALVSALQRSSAASRARAALLLERVTAALPPSRLASLPEQVFREAVELLRDRPAVSRPATKAALHVLVRTAAWGRNRVKAVDAGAVPVLVDMLFDDGAERRACELVLAALDRLCGCAEGRADLVAHGAGVAAVGRKALRVSEVATDKAVRVLRSVARHAATAAVVQEMAHAGVVATLCVVAQSEQYAERTRERARETLRLHARAWRTSPCLHHHLQALYPC

SEQ ID NO: 21559 - protein, 446 aa, Sorghum bicolor
MGTQAPENHSPTKDERSAGDKAIDDWLPITSSRNAKWWYSAFHNVTAMVGAGVLSLPYAMSKLGWGPGIVVLILSWIITLYTMWQMVEMHEMVPGKRFDRYHELGQHAFGQKLGLWIVVPQQLIVEVGGDIVFMVTGGKSLKKFHDVICDGKCKDIKLTYFIMIFASCHFVLSQLPNFNSISGVSLAAAVMSLSYSTIAWGVSLHKGKLPDVDYHVLAATTSEKAFNYFGALGDVAFAYAGHNVVLEIQATIPSTPENPSKKPMWKGVVVAYIMVAVCYFPVSFFGYWAFGNQVDDNILITLNKPKWLIALANMMVVIHVIGSYQIFAMPVFDMIETVLVKKLHFPPGLALRLIARSTYVALTTFVAITIPFFGGLLGFFGGFAFAPTTYFLPCIMWLAIYKPKRFSLSWFTNWVCILLGVVLMILAPIGALRQIILSAKTYRFYS

SEQ ID NO: 21560 - protein, 460 aa, Sorghum bicolor
MAAVQPSMETTQQGPPPAANYSPARDGGRSAEEKAAEIDNWLPINASRNAKWWYSAFHNVTAMVGAGVLGLPYAMSELGWGAGVTIMILSWIITLYTLWQMVEMHEMVPGKRFDRYHELGQHAFGERLGLWIVVPQQLVVEVGVNIVYMVTGGTSLKKFHDTVCESCKQLKLTYFIMIFASVHFVLSQLPNFNSISGVSLAAAVMSLSYSTIAWGASVDKGKAANVDYGMRATTTPGKVFGFLGALGTVAFAYAGHNVVLEIQATIPSTPEKPSKKPMWKGVVVAYIVVALCYFPVSFVGYWAFGNTVDSDILITLSRPKWLIALANMMVVIHVIGSYQIYAMPVFDMMETVLVKKLRFPPGLMLRLIARTVYVAFTMFIAITFPFFDGLLSFFGGFAFAPTTYFLPCIMWLAIYKPKRFSLSWFTNWICIILGVLLMVLAPIGGLRNIIISAKTYHFYQ

SEQ ID NO: 21561 - protein, 464 aa, Sorghum bicolor
MEMQPQLADCSPDKLASVALTPRGRLDSQEGRWPAQEKDIDDWLPINARRNAKWWYSAFHNVTAMVGAGVLGLPYAMSELGWEVGITVLLLSWIITLYTLWQMVEMHEMVPGKRFDRYHELGQHAFGEKLGLWIVVPQQLVVEVGLNIVYMVTGGQSLQKFHDVVCGDKQCKDIKLTYFIMIFASCHFVLSQLPNFHSISGVSLAAAVMSLCYSTIAWIASVQKGKSPEVHYGLRATTTPGKVFGFFGALGDVAFAYAGHNVVLEIQATIPSTPEKPSKKPMWKGVVVAYIVVAVCYFPASLVGYWAFGNSVNENILVTLNKPKWLIALANMMVVVHLIGSYQVYAMPVFDMIETVLVRKFGFRPSLMLRLIARSVYVGFTMFVAITFPFFTALLSFFGGFAFAPTTYFLPCIMWLTIYKPKTFSISWFTNWICIVLGVLLMVLSPIGGLREIILKAKTYHFYQ

SEQ ID NO: 21562 - protein, 401 aa, Sorghum bicolor
LATVAVPPKGRRRASDAPPEGVGRWSAQEKPTTDDDWLPVNARRNAKWWYAAFHNVTAMVGAGVLTLPYAMSELGWGVGVTVLILSWIITVYTLWQMVEMHECVPGKRFDRYHELGQHAFGEKLGLWIVVPQQLVVEVGLNIVYMITGGQSLHKFHDVVCHGRCKDIKLRYFIMIFASVHFVLSQLPDFHSISSVSLAAAVMSVSYSAIAWIASAAHGVSADTDAVADYRLRATTTPGKVFGFLGALGDVAFTYAGHNVVLEIQATIPSAPGKPSKKPMWKGVVVAYVIIAACYLPVALVGYWAFGNDVDENILITLNRPRWLIAAANMMVVVHVVGSYQVYAMPVFDMIETVLVRKYWFRPGLRLRLISRTVYVALTMFVAITFPFFSELLSFFGGFAYA

SEQ ID NO: 21563 - protein, 498 aa, Sorghum bicolor
MEVDHGAAGNGNGNGNHVQIQSRRAAESLSSSGSPHKPPLVDDDGRPLRTGTLWTASAHIITAVIGSGVLSLAWGVAQLGWAGGPAAIVVFGAVIYYTSTLLAECYRSGDPMFGPRNRTYIDAVRASLGDSKERLCGAIQLSNLFGIGIGVSIAASVSMQAIRRAGCFHYRGHGDPCHASTSPYIAIFGVMQIVFSQIPDLDKVWWLSTVAAIMSFSYSAIGICLGVAQIEAHGGPRGSLAGVIGAGAGVTVMQKVWRSLQAFGNIAFAYGFSLILLEIQDTIRSPPPSEARVMKKATAVSVAVTTVIYLLCGCIGYAAFGGSAPDNLLTGFGFYEPFWLLDVANAFVVVHLVGTYQVMSQPVFAYVERRAAAAWPGSALVRDREVRVGAAMPAFTVSPIRLAWRTAYVCVTTAVAMLLPFFGSVVGLIGALGFWPLTVYFPVEMYIAQRRLPRGSRRWMLLQGLSAGCLVVSVAAAAGSIAGVVEDLKAHNPFCWSC

SEQ ID NO: 21564 - protein, 372 aa, Sorghum bicolor
MAHSTTLALHLLVVVVMALIFVASASVSAPVNKSCVTGSAGASVSIGYGGARASAGAGVSLGADAYRTTCPRAEEVVRAAVEWAVAADPRMAASLLRLHFHDCFVNGCDGSVLLDDKPFLVGEKTAVPNANSLRGFEVIDAIKAELERECPETVSCADLLAIAARDSVVVSGGPSWEVEVGRKDSRTASLQGANTNLPAPTSGVATLVQKFRNVGLSAKDMVALSGAHTIGKARCTSFSARLAGVGGVSEGGVGAFKDLTFLQSLQQLCTGSAGSALAHLDLTTPATFDNQYYINLLSGDGLLPSDQALASSSGVAPGVEADVASLVAIYAFDASVFFQDFAESMLRMGRLAPGAGTSGEVRRNCRVVNISG

SEQ ID NO: 21565 - protein, 250 aa, Sorghum bicolor
MAREDCSSGAEMDALVRRLRLHRPPPSPYDPEPDAAPVPATAGDGQLFRPRRAAVLVCLFRGDGGELRVILTKRSSSLSTHSGEVSLPGGKVEEGDADDAATALRESKEEIGLDPALVTVVASLEHFLSKHLLVVVPVVGILLDRQAFKPALNIAEVDEIFDVPLEMFLKDENRTSEEREKMGQAFTVHYFTYEKGIQKYLIWGLTARILIHAASVVYQRPPDFTERSAHFKLPKFTKDCSSMLAGPAKH

SEQ ID NO: 21566 - protein, 241 aa, Sorghum bicolor
MEEEVGPGADMEALVRRLRLHRPAPSPYELSAAVAPAPAPGAGELFRPRRAAVLVCLFRGAAGELRVILTKRSSSLSTHSGEVALPGGKAEEGDADDAATALRESKEEIGLDPALVTVVTSLEHVLSKHLLVVVPIVGILSDINTFKPVPNAAEVDKIFDVPLEMFLKDENRTSNDLEWMGQEFTIHHFSYAKENEKYMIWGLTAGILIHAASVVYQRPPDFAEKRAQFNLPTYFNAMARA

SEQ ID NO: 21567 - protein, 462 aa, Sorghum bicolor
MPSGSATQFRYTQTPSKVLHLRNMPWECTEEELVELCKPFGRVVNTMCNVGANRNQAFVEFADQNQAISMVSYYASSSEPAQVRGKTVYIQYSNRQEITNNKGTGDSSGNVLLVTFEGVQPNDVTIEVIHLVFSAFGFVHKIATFEKAAGFQALIQYTDAPTALEAKNSLDGRSIPKYLLPEHISACHMRITFSAHKDLNIKFQSHRSRDYTNPYLPVNQTAIEGIVQPTVGPDGKVKEPESNVLLASIENMQYAVTVDVLHTVFSAFGSVQKIAMFEKNGGMQALIQYPDITTAAVAKQALEGHCIYDGGYCKLHLSYSRHTDLNVKAHDERSRDYTLSDPNAQLQAAAQAPVLSSPGVAWQNTASAPAAPFYASTAASTPVGQVPAWNPNMQAGGFASASTAYPNQPLMTNSMPHYPAIGSSSGAPPVSFQVSQQMPQYGMPPGAPPHAPPAGQPMYFPK

SEQ ID NO: 21568 - protein, 371 aa, Sorghum bicolor
MGQETFEDNKMKNYGERKLKRAHKIDEGEDDFEADFQAFSKKCDEEDESHYKFMALLPFKEGLTSVSTPTEGKVRLDFPMKDDVISREPTTTNEGTSVRPKRKRKTPYRGIRQRPWGKWAAEIRDPAKGVRVWLGTYRTPEDAARAYDAEARKIRGNKAKVNFPNEGPPNMVSNTPKLTATAMTTMDIPAEKMNTDELVCHTNYSNEDMLSMANFSGNNASLISAQAFGLHYMKKPRVPYDIPSMGECSNQNKITYGSSNGLGIEASRNLNGCSFLPQVGMPMFIQPTFDGPSRMIERNDVVISPTLTNATPITPLGVAGVDVAKKMNKHPILQEMENEATPILQGDVSEDVAAEISMWEFYDHLLDNKQN

SEQ ID NO: 21569 - protein, 221 aa, Sorghum bicolor
MAGGKSGGNAARSRKRVEATVLKRSRDGSAFTRCEACNKDVPVVLIDMHSCSLDKHIRMMLEAQVVEKTVEVAAKPAERNKSSAKGHGGGGNKDAKRKRSPTAFFLFMDDFRKEFKAAHPDNKSVATVAKEGGEKWKSMTDEEKKPYVEKAAELKAQAENGEGSGENNVAKKKAKADDKDGEQEVDQPAKKRIRRKALDEDEDDAGDQEDEDEQNELDDDM

SEQ ID NO: 21570 - protein, 275 aa, Sorghum bicolor
MASSTTIPALEENTNAVVVSAGNAADNKEPRKSRRNRMRRIAERKRRSRLRNHFSELESLVPNVTENEKINDKGDLVEQTIAYIQSLERTKAMLEKRKQQLALARQVAASSSSAPPQTARGKMAPAPVAPLLQPLAAAVPVSAAADDVPQPQPLVQQPLAVAAAVPPPQPLPVAAAGQGGFQTWSWPNLVLNVSNNNAYINVCVPRHLGMQNMVMVLSVLNNHGIDVVTTQVDADAARSVLNFYTRVTRMGGGNPSSEEVYKLATSEILLLLNTN

SEQ ID NO: 21571 - protein, 322 aa, Sorghum bicolor
MENHHSSAAPPNAKDGSSGIPEENKDVAVPNLSSAPEVAATVAASNDDDVSKGKNVVAADNEELKPHIVSERSRRNRLRDYFGELKAYIPQIPEKSDKATIVEHAIDYIKYLEKMKAMLEKRKQELALARQVGVVAAASSSSAPPPPPPPPPQTSHGMAVAAMPSDVPAGACSYVPPPPPPQPAVPVPAPQLLPATMSSDVVPQPQPLQPAPPQARIITATPVGFQTWSWPDLVLSVSNDTAHISVSAPRHRGMWTKVMVLSVLNKYGIDVVTAQVDSDAVRSVFNIYARNLKAKQAKVTAMGGGNPSALEVYQLAVSEILV

SEQ ID NO: 21572 - protein, 189 aa, Sorghum bicolor
MGFPSVCYCVILPQPLILVLQLLDFLRHAVLLCLSSLGLAASPAADDHPAYYAAPPAPADLWALQPSSSSLLLLQAGAAPLQEAPTPAAIKARLPAVRYADLLRSRRASASPPAPVPAVCAVCLGALEARHRVRELGNCAHAFHKACIDKWVDKGQATCPLCRALLLPDPSSAGAGDAVGELASSPFSF

SEQ ID NO: 21573 - protein, 271 aa, Sorghum bicolor
MSSAAAGEGGKERGGAGAGPGGACELCGAAARVYCGADEATLCWGCDAQVHGANFLVARHARALLCRGCARPTPWRAAGPRLGPTASLCDRCVRRGPGAVGVGGGDEEMGGAGDGRGHEEEDHDDDGGDDDDEVVVEDDEDEEEEEEEGEGENQVVPWTEEAEATPPPVASSTSSSSREAPANGASAADCAKENMPCSTSQPGLCHHLSSAHHGGRSDEATSSRNGGRFLASSRHRKRSPSDFFSSGSAQSGSGTPARNCSNAGIGRNDFT

SEQ ID NO: 21574 - protein, 865 aa, Sorghum bicolor
MVSKSYSNLLEMTSGDGFDFRQPFKSLPRVVTSPGIISDPDWDTISDGDSVGSASSTERKIIVANFLPLNCTRDDTGKLSFSLDHDALLMQLKDGFSNETDAVYVGSLKVQVDPSEQDQVAQKLLREYRCIPTFLPSDLQQQFYHGFCKQQLWPLFHYMLPICLDKGELFDRNLFQAYVRANKLFADKVMEAINTDDDCVWVHDYHLMLLPTFLRKRLHRIKIGFFLHSPFPSSEIYRTLPVRDEILKSLLNADLIGFQTFDYARHFLSCCSRLLGLHYESKRGYIGIEYFGRTVSLKILSVGVHVGRLESVLKLPATISKVQEIEQRYKGKILMLGVDDMDIFKGISLKLLGLELLLDRNPKLREKVVLVQIINPARSTGKDVQEAITEAVSVAKRINTKYGSSSYKPVVLIDHRIPFYEKIAFYAASDCCIVNAVRDGMNLVPYEYTVCRQGNEEIDKLRGLDKDTHHTSTLIVSEFVGCSPSLSGAFRVNPWSVDDVADALCRATDLTESEKRLRHEKHYRYVSTHDVAYWARSFAQDLERACKDHYSRRCWAIGFGLNFRVIALSPGFRKLSLEHFVSSYNKASRRAIFLDYDGTLVAQSSINKAPSEEVISILNTLCNDPKNVVFIVSGRGRDSLDEWFSPCEKLGVAAEHGYFIRWSKEAAWESSYSSPQQEWKHIAEPIMQVYTETTDGSSIESKESALVWHYLDADHDFGSFQAKELQDHLERVLSNEPVVVKCGHYIVEVKPQGVSKGLAVNKLIHTLVKNGKAPDFLMCVGNDRSDEDMFECINGMTSNDAISPTAPEVFACSVGQKPSKAKYYVDDTSEVIRLLKNVTRVSSQREDVNASHGRVTFRDVLDYVD

SEQ ID NO: 21575 - protein, 619 aa, Sorghum bicolor
MAASRALLPSPQASPAARVAVAPSSLTTLAARTGAARLRVVRCAVLSSPAAPVAESSKPPAHRISRSGSDGALRPKPAVLVAEKLSEAGLAVLREFADVECAYGMSPAELLAKVSQFDALIVRSGTKVTREVLEAGRGRLRVVGRAGVGIDNVDLQAATEVGCLVVNAPTANTVAAAEHGIALLASMARNVSQADAALKAGKWQRNKYVGVSLVGKTLSIMGFGKVGSEVARRAKGLGMHVIAHDPYAPADRARALGVELVSFDEAIGRADFISLHMPLIPTTSKIFNDESFAKMKTGVRIINVARGGVIDEDALVRALDSGKVAQAALDVFTVEPPAKDSMLVLHENVTVTPHLGASTVEAQEGVAIEIAEAVVGALRGELAATAVNAPMVPAEIMSELAPYVSLAEKLGRLAVQLVAGESGIKGVKVVYTTARGPDDLDTRLLRAMVTKGLVEPVSSTFVNLVNADYAAKQRGLRITEERVAHDSPAAEAPLESVQVRLSNVQSKFAGAISDGGDIVLEGRVKYGVPHLTLVGPYEVDVSLEGNLILCRQIDQPGMIGKVGNILGQRNVNISFMSVGRTFRGKQAIMAIGVDEEPDKETLENIGAIPAIEEFVFLEL

SEQ ID NO: 21576 - protein, 377 aa, Sorghum bicolor
MELRLSLGEAAVPDAGRAAVPELGLGLGVGIGASAAAGSGRREEGGTGNRAAPGTGTGTGTRWWAAPATPEPAAVRLSLVSSSLGLQWPPSDAGRAEAPAARGFDVNRPAPSSSAVAASALLALEDDEDDPGAAAALSSSPNDSAGSFPLDLGGGPHAHHAEGGAAAQAAGGGGERSSSRASDEDDGASARKKLRLSKEQSAFLEESFKEHSTLNPKQKAALAKQLNLRPRQVEVWFQNRRARTKLKQTEVDCEYLKRCCETLTEENRRLHKELAELRALKAAPPFFMRLPATTLSMCPSCERVASGPNPAASTSAPVSLSSSSPPATATATAVAAPVVRGEHRPPSSFAALFAATRSFTLASQPRPPAPAPASNCL

SEQ ID NO: 21577 - protein, 170 aa, Sorghum bicolor
MPPPQSGMALCRLPTATVGLPLSLPCLLSRPRMSLAARRARAVAARASSSSSSSPSPDSSFGSRMEDSVKKTVADNPVVIYSKSWCSYSMEVKALFKRIGVQPHVIELDHLGAQGPQLQKVLERLTGQTTVPNVFIGGKHVGGCTDTVKLYRKGELASMLSDLDININNS

SEQ ID NO: 21578 - protein, 492 aa, Sorghum bicolor
MDDPGASADPAGAARHHLSPQQQQQLGGQPPVPRSPTPLDLASSSAAAAASGYRRLSPSLRPPAHPQAARLPSPYGQIPSPGGAGAHHARSLSQPLFFSLDSLPLPPPLPPYADLGAAPPAIPPSPPPSTSSDPHPPPPPPLGLPPRRAGHRRSQSDIPFGFAQLSPPLPPPAPVKREVTTAADGCRSDGGGGDDAALYDLVNSYMDLDGLDPLNSSEDRHEDRDSRASGTRAGSAAESSENEAESQSTSVDRKDGGKSRHCRSLSMDSFMGKLNFAAGDESPKLPLPSPGGSLTRSGSGSMEGGAVALFDMEFANGEFTDSEKKKIMANERLAEIALTDPKRVKRILANRQSAARSKERKMRYIQELEHKVQVLQTEATTLSAQLTMLQRDSAGLATQNNELKIRLQAMEQQAQLRDALNEALTAEVQRLKLATGEITDGHGRMPKGLQQQMNSQMLQLQQLQIQQQVPQTQQQQGQRQQQQQQQQPQKSA

SEQ ID NO: 21579 - protein, 562 aa, Sorghum bicolor
MERQSSIRLGALEKLKSFRGMEKQKSFRGIMSLERRSRDSPGKRGDTPLHLAARSGSVAHAQRILAELDRALVAEMAAKQNQDGETPLYVAAEKGHAEVVREILKVSDVQTAGIKASNSFDAFHIAAKQGHLEVLKEMLQALPALAMTTNSVNATALDTAAILGHVDIVNLLLETDASLARIARNNGKTVLHSAARMGHVEVVRSLLNKDPGIGLRTDKKGQTALHMASKGQNAEIVVELLKPDVSVIHIEDNKGNRPLHVATRKGNIIIVQTLLSVEGIDVNAVNRSGETAFAIAEKMNNEELVNILKEAGGETAKQQVHPPNSAKQLKQTVSDIRHDVQSQIKQTRQTKMQVNQIKKRLEKLHIGGLNNAINSNTVVAVLIATVAFAAIFTVPGNFVEDLTQAPPGMSLGQAYVASNPAFIIFLVFDALALFISLAVVVVQTSLIVVERRAKKRMVFVMNKLMWLACLFISVAFIALTYVVVGRDDWWLAWCTMAIGTVIMLTTLGSMCYCIIAHRLEEKNTRKIRKKASASQSRGSWSRSVDSDEEILNSEYKTKMYAL

SEQ ID NO: 21580 - protein, 435 aa, Sorghum bicolor
MDWDLKAPGAWDLAELEHEQHAAATAAAAGPSGGHANAGVAGTGTGCRPPPGAGGAPAECSVDLKLGGLGEPGAAPPARREREAAAAAAAAAEHQQGQGQHQQQQCPSCAVEGCKADLSKCRDYHRRHKVCEAHSKTPVVVVAGREMRFCQQCSRFHLLAEFDADKRSCRKRLDGHNRRRRKPQPDTMASASFITSQQGTRFSPFAPPRLEASWPGVIKTEESPYYTHQIPLGSSSNRQQHFVGSTTPAYAKEGRRFPFLQEGEISFATGVVLEPPACQPLLKTVAVAPPESSSSSSAGGGNKMFSDGLTRVLDSECALSLLSAPANSSGIDVSRMVRPTEHVPMAQPVVSGLQFGSSSWFSPRPQASTGVTAGSGFPSCPAVVEGEQQQLNTVLSPHDNEVNYGGMFHVGGGSGGGGEGSSDGGTSSSMPFSWQ

SEQ ID NO: 21581 - protein, 330 aa, Sorghum bicolor
MTDGARVEAAPRLAQWRVEALPCYTYRKSLPFRIGLWNWYLSVERNNKQTCVKLFAENPNSPKNGPSAPIASFITKLLISLPPNQQTIVHPGIFDKQLKHDGFVWAIDSTVTGRFVIEIEFLDLKVADPSGGEPASIWASRQIKQCSDSTALSSLARMLHEDILTDITINAADGSVRAHRAILATRSPVFRSMFSHDLREKELSTVDISDMSLDACRAFLSYIYGDVSGEEFLANRLALLRAADKYDIDDLREACHESLLEDINMGNVLERLQTAHLYQLPRLKGGCLRFLVDFRKVYEMHDDLNAFLQTADRDLVAEVFHGVLAAWSGR

SEQ ID NO: 21582 - protein, 328 aa, Sorghum bicolor
MAAPSAPSGGRSGVIAVLLLLVLLAGTGTSSAQLCTSFYSHSCPGVYDAVRSVLQAAIAREQRMGASILRLFFHDCFVQGCDASLLLDDTPSFQGEKMANPNNGSARGFEVIDAIKSAVDKVCPGVVSCADILAIAARDSVVILGGPSWDVKVGRRDSRTASFSGANNNIPPPTSGLVNLTSLFAAQGLSQKDMVALSGAHTIGLARCTNFRAHIYNDTNIDGSFARSRQSVCPRTSGSGDNNLAPLDLQTPTVFENNYYKNLVYKKGILHSDQELFNGGSTDAQVQSYVSSQSAFFADFVTGMIKMGDIMPLTGSNGEIRKNCRRIN

SEQ ID NO: 21583 - protein, 280 aa, Sorghum bicolor
MAAMANTSRLPTPYSLPTVNIGGKCRRLAMAAVRCGPGGSRSHRRSLGVFLCRSSSTAGAQGSTRMEDYNTAMKRMMRNPYEYHHDLGMNYAVISESLIVGSQPQKPEDIDHLKDEERVAYILCLQQDKDIEYWGIDFQSILNRCKELGIQHIRKPAVDFDPDSLRSQLPKAVSALEWAISQRKGRVYIHCTAGLGRAPAVAIAYMFWFENMDLNTAYKKLTTIRPCGPSKRAIRAATYDLAKNDPSKEPFENLPEHAFEGIADWERKLIQDRVRALREA

SEQ ID NO: 21584 - protein, 545 aa, Sorghum bicolor
MSRVRARSGADMARALRWWDLVGLGLGGMVGAGVFVTTGRAARLHAGPGVVVSYAIAGLCALLSAFCYTEFAVDLPVAGGAFSYLRVTFGELAAFLTGANLIMEYVFSNAAVARSFTAYLGTAVGVDAPSQWRITVHGLPDGFNQVDLLAVAVILLITVCICYSTKESSVVNMVLTAVHVAFILFIIGMGFRHGDARNLTRPADPSRSPGGFFPHGAVGVFNGAAMVYLSYIGYDAVSTMAEEVQRPARDIPVGVSGSVVVVTVLYCLMAASMSMLLPYDAIDPEAPFSGAFKGRERCAWVSNVIGAGASLGILTSLMVAMLGQARYLCVIGRSGVMPAWLARVNPRTATPVNASAFLGVFTAALALFTELDILLNLVCIGTLFVFYMVANAVVYRRYVGGGGARWPTLAFLLVFSLSALAFTLAWKLAPPERRGVRAGLLAACAALAVTAVAAFQALVPQARVPELWGVPGMPWVPAASVFLNVFLLGSLDRPSYVRFAIFSAAALLVYVLYSVHASYDAEESGRLDVDGGGGGKVQDEACTVV

SEQ ID NO: 21585 - protein, 479 aa, Sorghum bicolor
MAVHSGVNKHAVAPMEVSVEAGNAGDAAWLDDDGRPRRTGTFWTASSHIITAVIGSGVLSLAWAIAQLGWVAGPAAMLLFAFVTYYTATLLAECYRTGDPETGKRNYTYMDAVRSNLGGANVVFCGVIQYANLVGVAIGYTIASSISMKAIRRAGCFHTHGHADPCKSSSTPYMILFGVVQILFSQIPDFDQIWWLSIVAAVMSFTYSSIGLSLGIAQTISNGGFMGSLTGISIGAGVTSTQKIWHTLQAFGDIAFAYSFSNILIEIQDTIKAPPPSESKVMQKATRLSVATTTIFYMLCGCMGYAAFGDAAPDNLLTGFGFYEPFWLLDVANVAIVVHLVGAYQVFCQPIFAFVERRAAAAWPDSAFIARELRVGPFALSVFRLTWRSAFVCVTTVVAMLLPFFGNVVGFLGAVSFWPLTVYFPVEMYIKQRRVARGSTKWICLQTLSISCLLVSIAAAAGSIADVIDALKVYRPFSG

SEQ ID NO: 21586 - protein, 481 aa, Sorghum bicolor
MAADRRTVVVYDAEAGDDHERQGTVWTATSHIVAAVVGSGVLALAWTVAQLGWVVGPLVLVGFSCVTYYTSALLADCYRYPDPVDGAVNREYIDAVRCYLDRKNVVLCGCAQYVNLWGTLVGYTITASASMIAVKRVNCFHRDGYGAAGCNPSGSTYMVVFGVFQLLLSQLPSLHNIAWLSVVAVATSFGYSFISLGLCAAKWASHDGGHDIRGTLAGAAVDVPRDKAFNVLLALGNIAFSYTFADVLIEIQDTLRAPPAENTTMKKASFYGLGMTTVFYLALGCTGYAAFGDDAPGNILTGFAFYEPFWLVDVANVCVIVHLIGAYQVFAQPIFARLESCVACRWPDAKFINATYYVRVPPCLRSSSSSAPASSTTVAVAPLKLVLRTIVIMFTTLVAMLLPFFNAVLGLIGALGFWPLSVYFPVSMHMARLKIRRGELRWWLLQAMSFVCLLISIAASIGSVQDIVHNLKAAAPFKPGN

SEQ ID NO: 21587 - protein, 484 aa, Sorghum bicolor
MASAGFPSRIAGISVRPDSSSACLIHKVGAPSNSLPGAVAVQVQGHQNRVRNGQAIRCAMATGKEQGAISTASSGDQTKGGLRGKLNKVVLAYSGGLDTSVIVPWLRENYGCEVVCFTADVGQGAIELEGLEKKAKASGACQLVVKDLREEFVSEYIYPCLRAGAVYERKYLLGTSMARPVIAKAMVDVAKEVGADAVAHGCTGKGNDQVRFELTFYALNPELKVVAPWREWDITGREDAIEYAKKHNVPVPVSKKSIYSRDRNLWHLSHEGDILEDPANEPKEDMYMMSVAPENAPSEPEYLEIGIIAGVPVSINGRDLSPASLLSELNEIGGKHGIGRIDMVENRLVGMKSRGVYETPGGTIMAAAVRELESLTLDRETMQWKDIIALKYAELVYAGRWFDPLRQSFDAFMEKITATTTGSVTLKLYKGSVNVASRKSPYSLYREDISSFENGEIYNQADAEGFIRLYGLPTRVRAMLEKGI

SEQ ID NO: 21588 - protein, 232 aa, Sorghum bicolor
MAANVGESTSGSSSGADAGGSFECNICFELPQEPIVTLCGHLFCWPCLYKWLRIHSHSPECPVCKAIVEEDKLVPLYGRGKDRVDPRSKNVPGAADIPNRPAGQRPATAPQVDPNTHFPNANPNPWFMGGGIPLANARWGNYTFSAAFGGLFPLLSFQVHGFPDATAYGQPAGFPYGYGHGHGHAFHGGHAGGHAHAAAAPRHGQQQQQADVYLKALLILVGFLVIASLITF

SEQ ID NO: 21589 - protein, 545 aa, Sorghum bicolor
MSRVRARSGADMARALRWWDLVGLGLGGMVGAGVFVTTGRAARLHAGPGVVVSYAIAGLCALLSAFCYTEFAVDLPVAGGAFSYLRVTFGELAAFLTGANLIMEYVFSNAAVARSFTAYLGTAVGVDAPSQWRITVHALPDGFNQVDLVAVAVILLITVCICYSTKESSVVNMVLTAVHVAFILFIIGMGFRHGDARNLTRPADPSRSPGGFFPHGAVGVFNGAAMVYLSYIGYDAVSTMAEEVQRPARDIPVGVSGSVVVVTVLYCLMAASMSMLLPYDAIDPEAPFSGAFKGRERCAWVSNVIGAGASLGILTSLMVAMLGQARYLCVIGRSGVMPAWLARVNPRTATPVNASAFLGVFTAALALFTELDILLNLVCIGTLFVFYMVANAVVYRRYVGGGGGARWPTLAFLLVFSLSALAFTLAWKLAPPEPRGVRAGLLAACAALAVTAVAAFQALVPQARVPELWGVPGMPWVPAASVFLNVFLLGSLDRPSYVRFAIFSAAALLVYVLYSVHASYDAEESGRLDVDGGGGKVQDEACTVV

SEQ ID NO: 21590 - protein, 480 aa, Sorghum bicolor
MIKPTEVSLEAGNLAEHSAELDDDGRPRRTGTVLTASAHIITSVIGSGVLSLPWAVAQLGWAAGPPVLLVFGGATYYTSTLLAECYRAGGGSDNPDATGARGRRNYSYMEAVRAILGGWKVTFCGVIQYANLAAVAVGYTIAASISMQAVWRANCFHARGHDDACRSSSVPYMIAFGATQIVFSQIPGFHQIEWLSIVASVMSFTYSGIGIGLAVAQTVANGGFRGTLTGVAVGGASGVTVMHKVWSTMQALGNIAFAYSFSNVLIEIQDTIKAPPPSETAVMNKATALSIATTTAFYALCGCMGYAAFGNAAPDNLLTGFGFYEPFWLVDVANAAIVVHLVGAYQVFCQPIYAFVESRAAAAWPESAFISKELRLGPFVPSALRLVWRSAFVCLATVVAMALPFFGSVVGLIGAFTFWPLTVYFPVEMYIKQRAVTRRSAQWICLKALAAVCLVVSVVATAGSIASFVGAFRDFRPFSG

SEQ ID NO: 21591 - protein, 478 aa, Sorghum bicolor
MAAHEGTTNRVAPMEVTVEAGNAGEAAWLDDDGRPRRAGTFWTASAHIITAVIGSGVLSLAWAIAQLGWVAGPAAMLLFAFVTYYTATLLAECYRTGDPETGKRNYTYMDAVRSNLGGAKVALCGVIQYANLVGVAIGYTIASSISMKAIRRAGCFHTHGHEDPCKSSSIPYMVVFGAVQIVFSQIPDFDQISWLSIVAAVMSFTYSSIGLSLGIAQTISNGGFKGSLTGISIGAGVTSTQKVWHSLQAFGDIAFAYSFSNILIEIQDTIKAPPPSESKVMQKATRLSVATTTIFYMLCGCMGYAAFGDAAPDNLLTGFGFYEPFWLLDVANVAIVVHLVGAYQVFCQPIFAFVERRAAAAWPDSAFISRELRVGPFALSLFRLTWRSAFVCVTTVVAMLLPFFGDVVGFLGAVSFWPLTVYFPVEMYINQRRVARGSTKWICLQTLSISCLLVSIAAAAGSIADVIDALKVYRPFSG

SEQ ID NO: 21592 - protein, 481 aa, Sorghum bicolor
MAMASHNGGTTKHLPPMEVSMEAGNGDAAEYLDDDGRPRRTGTFWTASAHIITAVIGSGVLSLAWAIAQLGWVAGPAAMLLFAFVTYYTATLLAECYRTGDPDTGKRNYTYMDAVRSNLGGARVAFCGCIQYANLVGVAIGYTIASSISMQAISRAGCFHKRGHAVPCKSSSNPYMILFGAVQILFSQIPDFDQIWWLSIVAAVMSFTYSSIGLSLGIAQTVANGGFKGSLTGISIGADVTSTQKVWHSLQAFGDIAFAYSFSNILIEIQDTIKAPPPSESKVMQKATRLSVATTTIFYMLCGCMGYAAFGDKAPDNLLTGFGFFEPFWLIDIANIAIVVHLVGAYQVFCQPIFAFVERRAAAAWPDSAFIARELRVGPFALSLFRLTWRSAFVCVTTVVAMLLPFFGNVVGFLGAVSFWPLTVYFPVEMYIKQRRVPRGSTKWICLQTLSVGCLFVSIAAAAGSIADVIDALKVYHPFSS

SEQ ID NO: 21593 - protein, 482 aa, Sorghum bicolor
MAPAAHNGVSNMHSVAPMEVSVEAGNAGAAAWLDDDGRPRRTGTFWTASAHIITAVIGSGVLSLAWAIAQLGWVAGPTAMLLFAFVTYYTATLLAECYRTGDPETGKRNYTYMDAVRSNLGGAKVVFCGIIQYANLVGVAIGYTIASSISMKAIRRAGCFHSHGHEDPCKSSSTPYMILFGVVEILFSQIPDFDQIWWLSIVAAVMSFTYSSIGLSLGIAQTVSHGGFKGSLTGVSIGAGVTSTQKIWHTLQAFGDIAFAYSFSNILIEIQDTIKAPPPSESKVMQKATRLSVATTTIFYMLCGCMGYAAFGDAAPDNLLTGFGFYEPFWLLDIANIAIVVHLVGAYQVFCQPIFAFVERRAAAAWPDSAFISRELRVGPFALSVFRLTWRSAFVCVTTVVAMLLPFFGDVVGLLGAVSFWPLTVYFPVEMYIKQRRVPRGSTKWLCLQTLSVTCLLVSIAAAAGSIADVVDALKVYRPFSG

SEQ ID NO: 21594 - protein, 530 aa, Sorghum bicolor
MRRQSSLARSYSSVAPVPAPASPPHNGGVNGKHLPPPMEVSAEAGNAGAAEWLDDDGRPRRKGTFWTASAHIITAVIGSGVLSLAWAIAQLGWVAGPTAMLLFAFVTYYTATLLAECYRTGDPDTGKRNYTYMDAVRSNLGGKKVVFCGVIQYANLVGVAIGYTIASSISMKAIRRAGCFHTHGHGDPCKSSSTPYMILFGVVQILFSQIPDFDEIWWLSIVAAVMSFTYSSIGLSLGIAQTVSNGGFKGTLTSIGFGAGVTSTQKIWHTLQAFGDIAFAYSFSNILIEIQVSMHYCSILCNSIPLFLTKDAAALVLDQDTIKAPPPSESKVMQKATRLSVATTTIFYMLCGCMGYAAFGDNAPDNLLTGFGFYEPFWLLDVANVAIVVHLVGAYQVFCQPIFAFVERRAAAAWPDSAFISRELRVGPFALSLFRLTWRSAFVCVTTVVAMLLPFFGDVAGLLGAVSFWPLTVYFPVEMYIKQRRVPRGSPRWISLQTLSFTCLLVSIAAAAGSIADVVDALKVYQPFSG

SEQ ID NO: 21595 - protein, 498 aa, Sorghum bicolor
MACSAAAAALLLLASMVCCCRSAPPAGALVTRLPGFDGAQLPSKHYAGYVTVNEHVGSRLFYYLVESERDPARDPVVLWLNGGPGCSSMDGFVYEHGPFNFESGGSAGSLPKLHLNPYSWSKVSSVLYLDSPSGVGLSYSKNVSDYETGDLKTAADSHTFLLKWFQLYPEFLKNPFYIAGESYAGVYIPTLANEVVKGIHKGDNPVINFKGYMVGNGVCDSAFDGNALVPFAHGMGLISNDIYKQANTACQGNYWNYSDSGECTEAVSKVDTVINGLNIYNILEPCYHGTNTKEVISENNRIPQSFKDLGVTSRPLPVRTRMIGRAWPLRAPVRDGRVPSWQELAAGTGSSVMCMSDEVATAWLNNDSVRSAIHAEPVSSIGPWVLCTDKLTFHHDAGSMIIYHKNLTSQGYRALIYSGDHDMCVPYTGSLAWTTSLGYGVIDSWRAWLVNEQVSGYTQGYENDLTFATIKGSGHTVPEYKPKEAFAFYSRWLAGSKL

SEQ ID NO: 21596 - protein, 495 aa, Sorghum bicolor
MACSASAPPACAATALLLLASIVCCCHSAPSGALVTHLPGFDGAKLPSKHYAGYVTVNETVGSRLFYYLVESERDPAWDPVVLWLNGGPGCSSMDGFVYEHGPFNFEAGRKAGSLPKLHLNPYSWSKVSSVIYLDSPAGVGLSYSKNVSDYKTGDLKTAVDSHTFLLKWFQLYPEFLTNPFYIAGESYAGVYVPTLSHEVVKGFGFGIVMILRLLVVLIFLSLTNDFTGIHKGDKPTINFKGYMVGNGVCDTIFDGNALVPFAHGMALISESTYKEANNACQGSYWNSSSAKCNEALSKVDTALGGLNIYDILEPCYHGTNTKEGIPQSNKLPPSFKDLGVTSKPLPVRNRMHGRAWPLRAPVRDGRVPSWQELAASVPDEVPCTNLTSQGYRALIYSGDHDMCVPYTGTEAWTASLGYGIVDSWRQWIVNDQVAGVLGTQFLSINHRNHWLSTAVGLTILSCETHEGAPDDGIPISVHGHVVLNQTEHNEEKIR

SEQ ID NO: 21597 - protein, 177 aa, Sorghum bicolor
MSSRDPLVVGSIVGDIVDYFSASALLRVMYGGREITCGSELRPSQVAGEPTVHITGGRRDGTPAFYTLLMLDPDAPSPSNPTKREYLHWLVTDIPEGAGANHGNEVVAYESPRPSAGIHRFVFIVFRQAIRQSIYAPGWRANFNTRDFAACYSLGPPVAATYFNCQREGGCGGRRYR

SEQ ID NO: 21598 - protein, 438 aa, Sorghum bicolor
MAPPSSMSTEKEEKAIDDWLPITSSRNAKWWYSAFHNVTAMVGAGVLSLPYAMSELGWGPGVVAMLLSWVITLYTLWQMVEMHECVPGKRFDRYHELGQHAFGDKLGLWIVVPQQLIVEVGVCIVYMVTGGKSFEKCYAVSCPDCKPLNTSSWIMIFAAIHLLLSQLPNFNSITLVSLAAAVMSLSYSTIAWAASAHKGRHAAVDYSMKASTATGQTFNFLSALGDVAFAYAGHNVVLEIQATIPSTPDKPSKKPMWQGVVLAYIVVAICYLPVAFVGYYVFGNAVDDNILITLEKPRWLIAMANIFVVVHVIGSYQIYAMPVFDMLETFLVKKLRFRPGLPLRLIARSLYVVFTALVGIAVPFFGGLLGFFGGFAFAPTTYYLPCILWLKIKKPKTFSLSWFINWFCIIVGVLLTVFAPIGGLRSIIVNASTYKFFS

SEQ ID NO: 21599 - protein, 513 aa, Sorghum bicolor
MAMAAEGGAASEPELVSIPATPHGLSTPEGATTPTGAGGGGGGGGRSKGGSGTPGRRVVEGLRGYLEDVGHLTRLDPRDAWLPVTESRGGNGRYAAFHSLNAGLGFQALLLPLAFPGLGWSWGIISLTIAYFWQLYTLWILVKLHEAVPGRRYNRYVELAQAAFGEKLGMWLSLFPTIYLSAGTATALILVGGETMKLFFQIVCGPLCSPNPITTVEWYLVFTSLAVILSQLPNLNSIAGLSLIGGATAIMYCTMSWVLSVSQPRPPTVSYDPVTSNSFGISLFSTLNALGIIAFAFRGHNLALEIQATMPSTFKHPAHVPMWRGAKVAYLLIAMCLFPVAVGGYWAYGNMMPPGGMLTALYAFHSHDIPRGLLATTCLLVVLNCLSSFQIYSMPVFDSFEAYYTGRTNRPCSAWVRSGFRVFYGFLSLFISVALPFLSSLAGLLGGLTLPVTFAYPCFMWIRVKKPERFSFSWYLNWGLGLLGTAFSLAFSLGGIWSIVNNGMKLKFFKPTN

SEQ ID NO: 21600 - protein, 337 aa, Sorghum bicolor
MAAAQQSRSRSSAAAAKAAACSPGAGGPVEVGEKLELRRGPWTVDEDLTLVNYIADNGEGRWNNLARAAGLKRTGKSCRLRWLNYLRPDVKRGNFSADEQLLILDLHTRWGNRWSKIAQHLPGRTDNEIKNYWRTRVQKHAKQLNCDANSKRFKDAMRYLWMPHLVDIAAAAATDDEHHHHLSLLHHHQQQQQEVAGGAGNNGDLAAAGYAAAADVQLHALSSSGLTTTGMTTTTTSSSDSFASGSYEDGGGLRQFANVLAGEMLLDCGGGDWAAGQEANNQGLWPSFDYDQSVPAQAAAAAGGGGQFQDPELSGWVQGFSESITDNFWALEEILRI

SEQ ID NO: 21601 - protein, 213 aa, Sorghum bicolor
MTSVVQSVSGDHRAEDQHHQKKQAEPGDQQEAPVTSSDSQPTVGTPSTDYVAPYAPHDMSHAMGQYAYPNIDPYYGSLYAAYGGQPLMHPPLVGMHPAGLPLPTDAIEEPVYVNAKQYNAILRRRQSRAKAESERKLVKGRKPYLHESRHQHALKRARGAGGRFLNSKSDDKEENSDSSHKEKQNGVAPNNGQPSTPPSPNGASSANQAGSRE

SEQ ID NO: 21602 - protein, 598 aa, Sorghum bicolor
MAASGGGKGGGGEGGCCGGTTLFPEESFRSWSAYGRALLETGPRLRDRLTARSLDATEVNEVRGRSGADMRRNLTWWDLIWFGIGAVIGAGIFVLTGQEAKEAAGPAVVVSYAISGVSAMLAVFCYTEFAIEIPVAGGSFAYLRVELGDFMAFIAAGNIILEYCIGGAAVARSWTSYFATLLNHHPDDFRVHAAALAEGYSELDPIAVAVTAAICALAVLSTKGSSRFNYVLSILHLVVIAFIVVVGLTKANAANLTADFAPFGARGIFAASAVLFFAYIGFDAVSTMAEETKNPARDIPVGLVGAMTLTTAVYCLLALVLCLMQPYTEIDANAPFSVAFTAVGMDWAKYIVAFGALKGMTTVLLVGAVGQARYLTHIARTHMVPPCLAQVHPRFGTPVYATIVMMVATAVIALFTNLGILSNLLSISTLFIFTLVAMALLVRRYYVAGETTASDRNKLVACLAVIVASSTATAACWGVTSSGGGGWVAYVVTVAAWLAATAYLQWGVPKARAPKMWGVPLVPWLPSASIFINIFLLGSIDGASFMRFLIWTAALLAYYFFVGLHASYDTAKAVAAEAEAARVEEGARKVAVGGCRFD

SEQ ID NO: 21603 - protein, 288 aa, Sorghum bicolor
MAAREEEWSMSDFEIGRYIGEGKFGKVYLAREKQSGYVVALKVIFKAKLEKYRFHAQLRREVEIQRDLDHPNVLRLFTWFHDEEKVVLVLEYAARGELYKVLRAAGRFDERTAATYVASLAGALAYCHKKGIIHRDIKPENLLLDLEGRLKIADFGWAARSDAKRHTLCGTIDYLAPEMVEKKAHDHAVDNWTLGILCYEFLYGSPPFEADEQDDTLRRIAKVDWAFPATPRVSSEAKDLISKLLVKDSSKRLCLEDIMKHPWIQKNAEPSGSCIKRKDVTGAKVNEK

SEQ ID NO: 21604 - protein, 480 aa, Sorghum bicolor
MHTHGAGLGLGGLPVHDDEDDAVPWLHCPVVVDDGDADTAPLPPEYCASLLSEYSEAAAPAATASHAAAVVPAAPPPPEAAVANKLAPPSATGSGVGEGVLNFTFFSRPLQRPQAASAAASHPVESTVVQAATNRLRSTPLFSEQRMAWLQPPKAPRATAAAAATPPPPPPPPPAPPQLAPMLPDTRHGETVAQPRSQPDARPPDAAAVTASSVCSGNGDRSQLKRSCHLAADCSVSPDEDMDDEPGATRRSAARSAKRSRTAEVHNMSERRRRDRINEKMRALQELIPNCNKIDKASMLEEAIEYLKTLQLQVQMMSMGTGLCMPPAAMLLPAMHQHMQALHHHHHHPMAHFPHLGMGLGYGMGMGMGATAAAGFDMLPRVAAGAHFPCPPMAMPPPPGAAMFGVPGTGMATLPAAFAHMAGAAPAGQMEAGAGDAAPAAAAAAAAAAPARPEEAEHPPVRGVAQGDQEAQQQQHPKQT

SEQ ID NO: 21605 - protein, 264 aa, Sorghum bicolor
MRPLLTRLFTSTHIAMASSSFSSSPSRRLAHLTRHLASSSSSELSSVGAPAAAAADAVPAKTPRSAPSKVHAAVLVCLFEDPSSGPRVLLTKRASSLSSHSGEVSLPGGKVEDGDADPKATALREAKEEIGLDPALVNVVTVLEPFLSKNGLNVVPVIGMISDKALFKPVLNKAEVEDIFDAPLEMFLKDDHRRTKQMSWMGIDIPVQFFDYEADGKRFVIWGLTAHIVTRAAAVIFGRKPSFDELPRPKYASAPVAGTNESKP

SEQ ID NO: 21606 - protein, 449 aa, Sorghum bicolor
MEEARKKKKQEEKLKTVVNLDDWLPITSSRTAKWYYSAFHNVTSMVGAGVLGLPFAMSQLGWGVGTVAVVMSFVITLYTLWQLVQMHEMVPGKRFDRYHELGQHVFGDRLGLWIILPLQIIVMAGTDVVYMVTGGQCLRKFHDLVCQGGGGGCTDMRLTFWIMIFATPHFVLSQLPNFNSISAVSGAAAVMSLAYSMIAFCTSVVKGARATAGAIDYGLRATTTSGQAFGMLSALGTVSFAYAAHNVVLEIQATIPSTPEKPSKKPMWRGVVVAYAVVALCYFSVAFGGYYAFGSSVDPNVLITLDKPRWLIAAANLMVVIHVIGGYQVFAMPMFDMIETVLVKKHKFNPGFWLRFVSRSAYVAATMFIGLTFPFFDGLLGFFGGFGFAPTTYFIPCIMWLMVRKPKKYGLTWFINIICIVIGVLLTIIGTIGGLRQIILGAKNYKLYS

SEQ ID NO: 21607 - protein, 485 aa, Sorghum bicolor
MGEHCYPATMEESSIELGHTAASKCYDDDGRLKRTGTMWTASAHIITAVIGSGVLSLAWAIAQLGWVAGPAVMLLFSFVTYYTSALLADCYRSGDPCTGKRNYTYMDAVNANLSGIKVQLCGFLQYANIVGVAIGYTIAASISMLAIKRANCFHVEGHGDPCNISSTPYMIIFGVAEIFFSQIPDFDQISWLSILAAVMSFTYSTIGLGLGIVQVVANKGVQGSLTGISVGAVTPLDKVWRSLQAFGDIAFAYSYSLILIEIQDTIRAPPPSESKVMRRATIVSVAVTTLFYMLCGCMGYAAFGDNAPGNLLTGFGFYEPFWLLDVANAAIVVHLVGAYQVYCQPLFAFVEKWAQQRWPKSSYITGEVDVPLSLAGAAGRCYKLNLFRLTWRTAFVVATTVVSMLLPFFNDVVGLLGALGFWPLTVYFPVEMYIVQKKVPRWSTLWVCLQLLSLGCLIITVASAAGSVAGIISDLKVYKPFVTTY

SEQ ID NO: 21608 - protein, 145 aa, Sorghum bicolor
GAIELERLDNKAKASGACQLVVKDLKEESVSEYIYPCLHAGAVYERKYLLGTSMAMPVIAKAMVDVAKEVGADSLARGCTGKGNDRFALSTFFALNPELKVVAPWREWDITGREDASMQRNIMYLFQFQRNQYTAEIRTCGTLVM

SEQ ID NO: 21609 - protein, 609 aa, Sorghum bicolor
METLLVGNPANGVAKPMCNGVGALPVANSHAVIGAAPPATTAAPAGATLGRHLARRLVQIGASDVFAVPGDFNLTLLDYLIAEPGLSLVGCCNELNAGYAADGYARSRGVGACAVTFTVGGLSVLNAIAGAYSENLPVICIVGGPNSNDYGTNRILHHTIGLPDFSQELRCFQTITCYQAVINNLDDAHEQIDTAIATALRESKPVYISVGCNLAGLSHPTFSRDPVPLFISPRLSNKANLEYAVEAAADFLNKAVKPVMVGGPKIRVAKAREAFAGVADASGYPFAVMPSAKGLVPEHHPRFIGTYWGAVSTTFCAEIVESADAYLFAGPIFNDYSSVGYSLLLKREKAIIVQPDRVVVGNGPAFGCILMSEFLRGLAKRLRRNTTAYDNYRRIFVPDREPLNGKPDEPLRVNILFKHIKGMLSGETAVVAETGDSWFNCQKLRLPEGCGYEFQMQYGSIGWSVGATLGYAQAAKDKRVIACIGDGSFQVTAQDVSTMLRCGQKSIIFLINNGGYTIEVEIHDGPYNVIKNWDYTGLINAIHNGDGNCWTMKVRTEAELKEAIATATGAKKDCLCFIEVIVHKDDTSKELLEWGSRVSAANSRPPNPQ

SEQ ID NO: 21610 - protein, 551 aa, Sorghum bicolor
MAADDAARSSRRMDLNLYLGLPRAPRARRPDLGSDLALGTPMLSSSSPSSSAASADAPPLETDPLHPPYSPTRADLVRPPTPAHEPYNPFAPEAHPPYVPPPPLPVPGALPVLADELEFGFPDAHLGVVERLDRPSSSTASSPFRPDRAERYRRFMSLGGSRYFRPRRFRSDLPPLSSEAPSLENDAAAQPPEREEPVHDTVEENKVVTDGAVVGVSEDDGTEHGKSAAMFECNICFEMAEEPVVTSCGHLFCWPCLYQWLHVHSSHKECPVCKGEVTEGNITPIYGRGNSGSDTEKKVAEDGNASGPKIPPRPHGNRLESFRQQFHHLRPISRRFGDTHGLLSTWRRIFDQHLVNSMSRLEAPPEPSVSETAQHASRLGRMTTRLRARRLQREAENPTSVVSSAPDSGQPGNNTSDLPRRSSSPFHAEGMDLLRHIAFAGLEDSERFATAVSELRRIARPSPYGASTSSNPPNPEPVDGTHIASALAADQASNSSTMAVIQEDAAFTESAGEPSNAGSSRSLRRRRGSDALGSLDVDGGDLHQNKRRRLN

SEQ ID NO: 21611 - protein, 956 aa, Sorghum bicolor
MVATSSWLLLLIGLALAAGVLQARAQPDSIGFISIDCGLPGTANSVDDATKLSYAPDAAFTDAGSNHNISVEFINPTLATRHLTARSFPDGGGARSCYTLRLPVAGGLKYLLRAEFLYGNYDGLNRPPIFDLYAGVNFWSRVNVSSPDELVRREAILVAPDDFVQVCLVNTGSGTPFISALELRPLKNSLYPQANATQGLVLLGRVNFGADEIVSLTRYPDDPRDRVWPPRVNSAAWDVISTTRKVQNLKDDKFEVPSMVMQTAIVPRNGSNTNSIWFFWDSVPQPNDRTPGYMAIMHFSELQLLSSNAALREFIVSINDDVWSSPRGFRPDYLFSDAIYSTAPLQRSPRYNVSIDSTANSTLPPFINAAEVFSVISTTSAVTDSSDVSAIMDIKANYRLKKNWAGDPCSPKTYAWDGLTCSDAVPPDRPRITSVNISYSGLDGDISSSFANLKAVKNLDLSHNNLTGSIPDSLSQLPSLTVLDLTGNQLSGSIPPGLIKRIQDGSLTLRHDNNPNLCTNDTSSCQPAKAGKSKLAVYIAVPVVLVVVIVSVVALLYYLVPRRKEQVMPQNETPMGHAPAPLPPGDDAYAQAQSSLRLENRRFTYKELEMITNNFQRVLGQGGFGKVYNGFLEDGTQVAVKLRSESSNQGAREFLLEAEILTRIHHRNLVSMIGYCKDGQYMALVYEYMSEGTLHEQIAGNGRNGRCITWWQRLRIALDSAQGLEYLHKGCNPPLIHRDVKATNILLNTKLEAKIADFGFSKAFNLGNEAQIATNTLVGTPGYVDPEYQATMQPTTKSDVYSFGVVVLELVTGRQAILSDPEPTSIIQWVRRRLARGNVEDVVDVRMHGEFDVNSVWKAADIALKCTVQVSAQRPTMADVVAQLQECLELEERRRTGGGGTRGGNFYGGGSSDPSFGYDAYVADSQSTDVSQISVAFEMEHNFGKVPRMGGGPIAR

SEQ ID NO: 21612 - protein, 961 aa, Sorghum bicolor
MAPAVLSSSGLLLLYLAAVASVAGVLQARAQPDSIGFISIDCGLSGTASYVDDTTKLSYVPDAGFIDGDAGSNHNISAEYMSPMLSKRYHNVRSFAAGGSARNCYTLRSIVAGLKYLLRATFKYGNYDGLRRLPVFDLHVGVNYWTTVNITDADAAVIVEAIVLVPDTSVQVCLVDTGSGAPFISGLDLRPLKSTLYPQANATQGLVLLGRLNFGPTDDTELVRYPDDPHDRLWIPWVDTATWNSVSTAQRVQNIDNDMFEAPSKVMQTAVAPRNGSKSIEFNWDSEPTPKDPTPGYVGIFHFSELQLLPAGAVRQFYINLNGKPWYPKAFTPEYLYSDAVFNTNPYRGIARYNISINATANSTLPPIINAVEVFSVISTTNVPTDSQDVSAITAIKAKYHVQKNWMGDPCVPKTLAWDGLTCSYAISSPPRITGLNLSFSGLSGDISSSFANLKAVQNLDLSHNNLTGSIPESLSQLSSLTVLDLTSNQLNGTIPSGLLQRIQDGSLNLKYGNNPSLCSNGNSCQTTKRKSKLAIYIAIAVVLVVVVLVSVVLLLCFIQKQKKQGPAKNAVKPQNETPLSPAPAGDAYSQSSLQLENRRFTYKELEMITSNFQRVLGRGGFGSVYDGFLEDGTQVAVKLRSDSSNQGVKEFLAEAQTLTRIHHKNLVSMIGYCKDGDYMALVYEYMPEGTLQEHIAGNGRSRGFLSWRQRLRIAVESAQGLEYLHKGCNPSLIHRDVKAANILLNAKLEAKIADFGLTKAFNLDNNTHVSTNTLVGTPGYVDPEYQATMQPTTKSDVYSFGVVLLELITGRPAVLRDPEPTSVIQWARQRLARGNIEGVVDPRMRGDHDVNGVWKAADVALKCTAQASAHRPTMTDVVAQLQECLQLEEARAAAAAGDVNGGGYYTGGSSSSAGGPYSGYNAYGAGEGGLSTDVSQSSTGFEVEHNFGRVPTMPTGPAAR

SEQ ID NO: 21613 - protein, 109 aa, Sorghum bicolor
MSASRSSSPNSMSKWSPKENKMFEQALAYYGEGTPNRWDKVSSAMGGIKSAEEVRCHYEDLDYDVKMIESGHVPYPQYKTQGFWTRGSLMPTNYVGSNPSIMTKISYFQ

SEQ ID NO: 21614 - protein, 491 aa, Sorghum bicolor
MASTGGGGGTPFLLSPATGHAATPSSSAVHDVEAVGAGAGTGTGAHHRAGKSTPAPDAGAAFVLESKGTWWHAGFHLTTAIVGPTVLTLPYALRGMGWGLGLAALTAVFAVTFYAYYLVSRVLDHCEAAGRRHIRFRELAADVLGSGWVFYVVVSVQTAINAGVTTGSILLAADCLKIMYSDLAPDGPLKLYHFIIIVAVVLALLSQLPSFHSLRHINLGSLILSFAYTILVSAACIRAGASSNPPAKDYSLSSSKSEKTFNAFLSISILASVFGNGILPEIQATLAPPAAGKMTKALVLCYAVVFFTFYLPAITGYWAFGNQVQSNVLQSLMPDEGPSLAPTWLLGLTVVLVLLQLLAIALVYSQVAYEIMEKNSADVAHGRFSRRNLAPRVALRTAYVAACALVAAALPFFGDIVGVVGAVGFIPLDFILPVVMYNMALAPPRRSPVYLANVAIMVVFTGVGVIGAVASVRKLALDAGKFKLFSDNVVD

SEQ ID NO: 21615 - protein, 428 aa, Sorghum bicolor
SLIDDRAFELAQSSSSDPIDPDMDMPMAMVSFDEDLDQMLLATISPAGSSATSSSAPAAAAAPPPVVAGSSSDDDEAAAVAVGADLRRGPWTVDEDILLVNYIAAHGEGRWNSLARSAGLKRTGKSCRLRWLNYLRPDVRRGNITAEEQLLILDLHSRWGNRWSKIAQHLPGRTDNEIKNYWRTRVQKHARHLRCDVNSAGFRHVVRHVWMPRLRERVQAAAGRDDQMVATAGSGCGGVQQQQQQQAAPAASLAAVVQAPAATSTASAPPAYCYDYYGRQHLVEQQQQGDHHGVPPAPSEAHRRRQYYSETAAGQTAAATALSPDDASSALRVPSTFTADDASTHYAAAYTSVAMATSTNDQGCGPTTIEDEVLAGTTWSELLATVTGGPHDDSSSMDMIGLPEFGFGDLEDRDGLWSLDDLCLQQLC

SEQ ID NO: 21616 - protein, 341 aa, Sorghum bicolor
MDDMDMAMAMVSFDDLDQVLAMSPSSSATSSAPVAAAQPAAAGSSSDDEAAAICADLRRGPWTADEDILLVNYIAVHGEGRWNSLARSAGLKRTGKSCRLRWLNYLRPDVRRGNITAEEQLLILDLHSRWGNRWSKIAQHLPGRTDNEIKNYWRTRVQKHARHLRCDVNSASFRHVVRHVWMPRLRERVQAAAGRDAGEGCGGGVQSPAAAPLVPVVVEAPAATTTASAPSACYDYYDASSALRRPSSSTLTADDTSHDYAGVYAYTSAAAATPTNDNQGCRQMTTDDDVFAGTALSELLATSGRDDDSSSASMIGLPEFGFGDLEDGLWSLDDLCLQQLC

SEQ ID NO: 21617 - protein, 758 aa, Sorghum bicolor
MRFDLDGLPVHFPYAAIYPEQHAYMGELKRALDARGHALLEMPTGTGKTAALISLITSYSLANPSRPLRLIYCTRTVHEMEKTLAELRLLFAHLPPPAARSLLALGLSSRKNLCVHPQASAAAARDSVDTACRRLTASWVREKAASDPESTPLCEFYETFDRAAAAGDLASFMPPGVYTLADLRALGRERRVCPYFLARQMVKYANVVVYSYQYLLDPKVASIVSREMQKECVVVFDEAHNIDNVCIEALSVSIRKQTLEGAERNLRRISQEIDRFKATDANRLRAEYNRLVDGLAQRGNLPISDAWLANPALPDDILKEAVPGNIRRAEHFLAVLRRLVRFLDGRLETENVENEMPVSFVASIHSQAGIDQKMLRFCYDRLHSLMMTLEITDTDEFMHIQTICDFATLIGTYTRGFSIIIEPYDERMPDIRDPVIQLSCHDASLAIRPVFDRFETVVITSGTLSPIDLYPRLLNFNPVISRSFTMSLTRDCICPMVLTRGSDQLPVSTKFDMRSDPGVVRNYGRLLLEMASAVPDGIVCFFVSYSYMDGIVNSWHEMGILQDIMQHKLVFIETPDVVETTLALDNYRKACDCGRGAIFFSVARGKVAEGIDFDRHYGRLVIMFGVPFQYTLSRILLARLEYLRETFQIKEGDFLTFDALRQAAQCVGRVIRSKADYGMMIFADKRYSRHDKRSKLPGWILSHLHDAHLNLSTDMALHIAREFLRRMAQPYDKTGSGGKKTLLTEEDLQNMAQDGMEM

SEQ ID NO: 21618 - protein, 799 aa, Sorghum bicolor
MATASDGDKESAAPASPPPQLESFLSIGLDQRTAENALANRKVTANLTAVIAEAGVTRCDKSVGNLLYTVATKYPTNALVHRPDLIKYILSEKIKNSAQLDAALTFLSTLGPDSLDSVKFEEACGVGVVVLFEEIQSTVTDVLNENMEAIVEQRYRINVGSLCGQVRKRHPWGDAKSIKEEIEKRLVEILGPKTEEDNAKPMKKKKEKPVKVEEEKTAVAVATPEEEVNPYSIFPQPEENLKVHTEIFFSDGNIWRAHNTKSILEKHLEATGGKVMTRFPPEPNGYLHIGHAKAMFIDFGLAKERNGHCYLRFDDTNPEAEKKEYIDHIQEIVTWIGWEPYKVTYTSDYFQDLYELAICLIQKGLAYVDHQSPEEIKEYREKKMNSPWRERPFEESLKLFEDMRRGLIAEGKATLRMKQDMQNDNKNMADFIAYRIKFTPHPHAGDKWFIYPSYDYAHCLVDSLENITHSLCSLEFGIRRPSYYWLLAALGQYQPYVWEYSRLNITNNVMSKRKLNQLVTDKWVDGWDDPRLLTLAGLRRRGISAAAINSFIRGMGITRSDNSLIRIERLEYHIREELNNVCPRALVVLHPLKVVITNLDYGMVINLDAKMWPNAPDSDGSAHYKVPFSRIIYIEKSDFRLKDSKDFYGLAPGKSVLLRHAFPIKCMEVIYGDNADSIVEIRAVYDASKATKPKGVLHWVAEPSPGVEPLKVEVRLFEKLFLSENPAELDDWLGDLNPQSKEVIKGAYAVPSLASAVLGDKFQFERLGYFAVDSDSTPEELVFNRTVTLKDSYGKAGPK

SEQ ID NO: 21619 - protein, 285 aa, Sorghum bicolor
MAAAAKLVLLVAALMATGHCSCAAWDLNIRMPTTRAIEEAAARLQEGMAAPLIHALHPLVGSAGDLGRRAGVPCDSWRLAVEAYNKRDWKTVPANCEHYVGHYMLGRQYRLDSRVVADEAIAYAEGLKLAGNGKEVWVFDIDETSLSNLPYYAKHGFGTKPYNATSFNEYVLEGSAPVLPETQRLFKKLISLGIKPVFLTGRTEDQRAITVTNLRRQGYSGWMHLLLKPIGFKGTAIGYKSGARQKLQNAGYVIVGNIGDQWSDILGAPEGARTFKLPDPLYYIG

SEQ ID NO: 21620 - protein, 237 aa, Sorghum bicolor
MSRDEPSRGSGGPGTSRRSAEGAMAESSGYGSVSVDVERISFGGKEHLVRTRCGSVTVAVYGDEDKPALVTYPDVGLNYMSCFQGLFFCPEAASLLLHNFCIYHINPQGHELGAAPISSDVPVPTVDDLADQVADVLDFFSLGSVMCLGVTAGAYVLTLFATKYRERVIGLMLVSPLCKAPSWSEWLYNKVLLNLLYYYGTQGLVKECLLQRYFSKVRFRSQYSHLVLLGLIVYSFH

SEQ ID NO: 21621 - protein, 190 aa, Sorghum bicolor
MADVEKAAPVAAPPAEGAAGDAAGGRTGAVGAVLRRWRTQDLLDRSGSALRAGAWALSLLAFLVMACNEHGDWKQFDRYEEYRYIVAIGLLAFVYTTLQLLRHGVRLTGGQDLQPKTGLLVDFAGDQVTAYLMMSALSAAIPITNRMREGADNVFTDSSAASISMAFFAFVCLALSALISGFKLAKQTYI

SEQ ID NO: 21622 - protein, 571 aa, Sorghum bicolor
MPSGSDDYSDPLLAARADGSMAGGDAAALDYRGRPADRGATGGWRSALFIIAVEIAERFTFYGVSSNLINYLTGPLGEGTAAAAAAINAWNGVAQLLPLLGGALADKWLGRYRTIVIASLLYVLGLGMLAFSTMLSSGSGHQCTTARGQTQTCAPSTLKATFFYVSLYIVAVAQGGHKPCVQAFGADQFDQSDPKETVSRSSFFNWWYFGMCAGTAVTLVLLSYVQDNIGWGLGFGIPCAVMAAALAVFLLGTRTYRYYVTAGERGLFARAAEAFAEWRSRRKTLQHRDRPAAEGALGFSAGVDEEEQAAVSNSAGLVKEAKAIIRLFPIWATCLLYAVAFSQSSTFFTKQAATLDRRIGRHGLQVPPAALQSFISITIVVFIPIYDRVLVPVSRRYSGKPSGITMLQRIGTGMLLSLLSMVIAALVEKHRLGVARDAGLVDKPKVPLPMSLWWMVPQYVLFGAADVFTMVGLQEFFYDQVPDKLRSLGLALYLSIFGVGSFISSALVSVIDRVTTARGGSWFNNNLNRGHVDYFYWLLAALSAVELLAYVFFAVTYKYKNKRAVHATVES

SEQ ID NO: 21623 - protein, 462 aa, Sorghum bicolor
MASFSSLAATSSSTSTPSFTLPTKTSPGTASLSFPRARESLKSRARMVTVRAEAVDTTISPRVSALRPSKTMAITDQATALRQAGVPVIGLAAGEPDFDTPAVIAEAGMNAIRDGATRYTPNAGTLELRKAICKKLEEENGLSYTPDQVLVSNGAKQCITQAVLAVCSPGDEVLIPAPYWVSYPEMARLAGATPVILPTSISDNYLLRPESLASVINENSRILILCSPSNPTGSVYPKELLEEIAAIVRKHPRLLVLSDEIYEHIIYQPAKHTSFASLPGMWERTLTVNGFSKAFAMTGWRLGYLAAPKHFVAACGKIQSQYTSGASSISQKAGLAALNLGYAGGEAVSTMVKAFQERRDYLVRSFRELPGVKISEPQGAFYLFIDFSSYYGSEVEGFGTIKDSESLCLFLLEKAQVALVPGDAFGDDKGVRISYAAAMSTLQAAMGKIKEAMALLKPPVAV

SEQ ID NO: 21624 - protein, 593 aa, Sorghum bicolor
MTSTPGSFGGTLAANSGPVALSFPTTSFANFLGGGGSSASSSGAADNGGVGLSKFKAMTPPSLPLSSSHPPASPASYLHAFSGILDSPILLTPSLFPSPTTGAIPSEPFNWMGTSESLSGSVKTEQQQYTDFTFQTAASAPPATSTSTMTGASHSASYLQSSVLMAPLGRVGDSYNGGELQQQQQQPPWAYQEPCTQFEAPAAAQPDNSMLGNGGYGGAPGPAVSGCFREQSQSNRPSSDDGYNWRKYGQKNMKGSENPRSYYKCSFPGCPTKKKVERSPDGQVTEIVYKGAHNHPKPQSTRRSASSAPAPASHVLQSVGDAVPEHSFGALSGTPVATPENSSGSFGGDDEINGVSSRLAGNFAGADDLDDDEPDSKRWRKDGGDGDGGVSLSGNNRTVREPRVVVQTMSDIDVLDDGYRWRKYGQKVVKGNPNPRSYYKCTTAGCPVRKHVERACHDTRAVVTTYEGKHNHDVPPARGSSASLYHRAALAAHQMPQQAGGGSCYQQQQQHGGLVRTADGFGFGASGGLHGGAPMMQAAESGFALSGFGHPAGTAAYSYTSHQQQQTTTTNEAMYYAKDEPRDDMFFEQPLLF

SEQ ID NO: 21625 - protein, 257 aa, Sorghum bicolor
MAPRTSEKTMTPAAAAAATGLALSVSGGAGASGPHFRGVRKRPWGRYAAEIRDPAKKSRVWLGTFDTAEEAARAYDAAARDYRGPKAKTNFPFPSSCMPLAAGAGAGSLPAAKAVTGGGGSRSSNSSTVESFSSGSDVQAAPMQAMPLPPSLELDLFHRAAAAGTGTGGAAVRFPFNSYPVTHPYYFFGQAAAAAAAGCHMLKLAPTVTVAAVAQSDSDSSSVVDLSPSPPAAVSTQKAAAAFDLDLNCPPPAEMEA

SEQ ID NO: 21626 - protein, 301 aa, Sorghum bicolor
MVVGEAAAAAGNEMSLSNMVLGFYEEAEKERWPPEDATAAATTAGDGGSDDDDDEGSSPSGGRAQSAAFWREQRSPLAKTSSAESRIQADTEEAVRQMRATPGGVCSCATRAAAAAGGCRGCALRFLADRLRDAGYNSAVCRSKWSRTPEIPSGEHSYVDVVVPTRRSGKAVRVVIEPSFRAEFEMARGGAEYRALVAALPDLFVGRSEKLRAVVRVMCDAARQCARESGMHMAPWRKHRYMEAKWLGTPERVVAPGGTGTGAGGAAVAIRVGSPEKQTRSRVRASMLTLDFGGRTAVEVV

SEQ ID NO: 21627 - protein, 913 aa, Sorghum bicolor
MNPDNFTHKTNEALVAAHEMASEAGHAQLTPLHLAAALAADKGGILRQAITGASGGDGAAGESFERVLSNALKKLPSQSPPPDSVPASTALIKVIRRAQSAQKKRGDSHLAVDQLLLGLVEDSQISDCLKEAGVSAARVRAELEKLRGGEGRRVESASGDTNFQALKTYGRDLVEQAGKLDPVIGRDEEIRRVVRILSRRTKNNPVLIGEPGVGKTAVVEGLAQRIVRGDVPSNLLDVRLIALDMGALVAGAKYRGEFEERLKSVLKEVEEAEGKVILFIDEIHLVLGAGRTEGSMDAANLFKPMLARGQLRCIGATTLEEYRKYVEKDAAFERRFQQVFVAEPSVPDTISILRGLKEKYEGHHGVRIQDRALVVAAQLSARYIMGRHLPDKAIDLVDEACANVRVQLDSQPEEIDNLERKRIQLEVELHALEKEKDKASKARLVEVKKELDDLRDKLQPLTMKYRKEKERIDEIRKLKQRREELQFSLQEAERRMDLARVADLKYGALQEIDAAISKLESETGENLMLTETVGPEQIAEVVSRWTGIPVTRLGQNDKERLVGLADRLHQRVVGQTEAVNAVAEAVLRSRAGLGRPQQPTGSFLFLGPTGVGKTELAKALAEQLFDDENLLVRIDMSEYMEQHSVARLIGAPPGYVGHEEGGQLTEQVRRRPYSVILFDEVEKAHVAVFNTLLQVLDDGRLTDGQGRTVDFRNTVIIMTSNLGAEHLLAGMVGKNSMKVARDLVMQEVRRHFRPELLNRLDEIVIFDPLSHEQLRKVARLQMKDVAVRLAERGIALAVTDAALDIILSLSYDPVYGARPIRRWIEKRVVTQLSKMLIQEEIDENCTVYIDAAPAKDELAYRVDRSGGLVNAETGLKSDILIQVPNDAVRSDAAQAVKKMRIMEEEDEDGMDEE

SEQ ID NO: 21628 - protein, 836 aa, Sorghum bicolor
MVARPCLLLLVLTAATVVVLGVHGEESPSSTGKSSYVDSATKLPYVSDVGFTDAGSNRNISAEYINPSFTKRYLNVRSFPDAARSCYTIGSMAPGSKYIFRATFMYGNYDGLSKPPVFDLHLGVNFWQTVNITGPDVPLIAEVIAVVPADSVQVCLVNTGTGTPFISGLDVRPVKSTLYSQVNATQALVLLARRDYGPSGFAVIRYPDDPYDRTWFPWSDPEEWSEISTAEGMRPVVVGSRFEVPSAVMQTAIVPLLNASAKSIDFSWDAEPSHVYPDPGYICMLHFAELQRLDSNATRQFDVIVNGIAWYHAYTPMYLTSDTLYSNRLHHGSNSYNISLKATANSTLPPIVNAVEIFNVISIANVATDVQDVAAIMAIKANYQVKKDWMGDPCVPKALSWDGLSCSFAIFSPPRIESLNLSFSGLSGDVSFYFAKLKSLKYFDLTGNQLNGSIPPGLLKRIQDGSLSLRYGNNPNLCSNSDSCQSAKKKSNSMLAVYIAVPVVVFVVVGTLALLFFFMRVKGSVEPGNNLNIKNRRFTYNEVKAMTKNFQLELGKGSFGKVYNGSLKDGTRVAVKLLSECSRQGVGEFLAEAETLTKIHHKNIVSLIGYCKDGGHMALVYEYMSGGTLEHKLRGSDDGSTGSLTWKQRLRIALDSAQGLEYLHKSCTKRLIHRDVKTSNILLNDNLEAKIADFGLLKAFHRDEDTHVSRTRVVGTLGYFAPEYVEAQRLTEKCDVYSFGVVLLEVITGKPAILECPEATNITMWVLQRLNQQNIEDVVDPRIQDDYDVNVAWKAADIALKCTERAPEQRPTMTDVVTQLQECLMLEDGGGGRDAI

SEQ ID NO: 21629 - protein, 250 aa, Sorghum bicolor
MASRRCLLRLLSSRLVPQRSQHLAPVSIATRTLTSLSEPLGSPAPRALASPRLYYPSRCHFATRSSGDEDDEEDEEEHYDDEGSEGEWGDEEEAVAAKKPSGKTEEEKVAEAAEIGYKVLGPLGADEKPFKPYEPVFAVVQIGSHQFKVSNGDSIFTERLKFCDVNDKLVLNRVLMLGSQTQTVIGRPILPDAAVHAVVEEHALDAKVIIFKKKRRKNYRRTKGHRQELTKLRITNIEGIDKPETAAVAA

SEQ ID NO: 21630 - protein, 459 aa, Sorghum bicolor
MELGLALRLVAPPPPPCLSRRALSLPQCFISLCVLRGRRVRASRLKHGGGAVCNAILTYSGVEEEEMVEEEVGEEEEEAEPAVSTRPRLELIEKPDRSLALLDEYESEELGTSLCANHRSGYVAVLGKPNVGKSTLINQMVGQKLSIVTDKPQTTRHRILGICSEPEYQIILYDTPGVIKKEMHKLDSMMMKNVRSAIGSADCVLVVADACKAPEKIDEMLEEGVGNKDIALPVLLVLNKKDLIKPGEIAKKLEWYQKFTNVDDVIPISAKFGNGVDDIKEWILSKLPLGPAYYPKDIASEHPERFFVGEIVREKIFVQYRQEIPYSCQVNVVSYKSRPTAKDFIQVEILVEKETQRSIILGKDGKAIKMLATASRLDIEDFLQKKVYLEVYIHLIHLYYMVAVDWPSPAGMQPSWRSFYLTVMHDSFLVQIEVKVKENWRQDERLLKRYGYGGEIQAL

SEQ ID NO: 21631 - protein, 978 aa, Sorghum bicolor
MAARAAAAVVLLIAAVVSVSAGGGEGDGDGQTLMAVKAGFGNAANALADWDGGRDHCAWRGVACDAASFAVVGLNLSNLNLGGEISPAIGQLKSLQFVDLKLNKLTGQIPDEIGDCVSLKYLDLSGNLLYGDIPFSISKLKQLEDLILKNNQLTGPIPSTLSQIPNLKTLDLAQNKLTGDIPRLIYWNEVLQYLGLRGNSLTGTLSPDMCQLTGLWYFDVRGNNLTGTIPEGIGNCTSFEILDISYNQISGEIPYNIGYLQVATLSLQGNRLIGKIPEVIGLMQALAVLDLSENELVGPIPPILGNLSYTGKLYLHGNKLTGHIPPELGNMSKLSYLQLNDNELVGTIPAELGKLTELFELNLANNNLEGHIPANISSCSALNKFNVYGNRLNGSIPAGFQELESLTYLNLSSNNFKGQIPSELGHIVNLDTLDLSYNEFSGPVPPTIGDLEHLLELNLSKNHLTGSVPAEFGNLRSVQVIDISSNNLTGYLPEELGQLQNLDSLILNNNNLVGEIPAQLANCFSLITLNLSYNNFTGHVPSAKNFSKFPMESFVGNPMLHVYCQDSSCGHSHGTKVNISRTAVACIILGFIILLCIMLLAIYKTNQPQPPEKGSDKPVQGPPKLVVLQMDMATHTYEDIMRLTENLSEKYIIGYGASSTVYKCDLKGGKAIAVKRLYSQYNHSLREFETELETIGSIRHRNLVSLHGFSLSPHGNLLFYDYMENGSLWDLLHGPSKKVKLDWDTRLKIAVGAAQGLAYLHHDCNPRIIHRDVKSSNILLDENFEAHLSDFGIAKCVPAAKSHASTYVLGTIGYIDPEYARTSRLNEKSDVYSFGIVLLELLTGKKAVDNESNLHQLILSKADDNTVMEAVDSEVSVTCTDMNLVRKAFQLALLCTKRHPVDRPTMHEVARVLLSLLPAPPAAKPPASKAVAAGDYTRFLAAAADMNHGLPDDIGDNSSSDEQWFVRFGEVISKHTLS

SEQ ID NO: 21632 - protein, 285 aa, Sorghum bicolor
MAPQSLDLGLSLGLGVAAFQPSLSFCHPAAGNAAAVAGAAERDASPATAEERERRCSPAGSPVSSGSGSGSGKRAAAERSAGSGDEDDDGAARKKLRLSKDQAAVLEECFKTHHTLTPKQKVALASSLGLRPRQVEVWFQNRRARTKLKQTEVDCEYLKRWCEQLAEENRRLGKEVAELRALSAAPAPAAPLTTLTMCLSCRRVASSSSPSSANTSSPNNIPAAHPHAHAAAAASNGGSMASSPAAAATLPAHRQFFCGFRDAGAAAAAVYGVSSGLAKAVRAAR

SEQ ID NO: 21633 - protein, 318 aa, Sorghum bicolor
MMPRTSLDLGLSLGLSLTSQGSLSSSTTTAGSSSPWAAALSSVVADVAKARDAGAHMLYHASASAAALDRAAMRASTSPDSAAALSSGGSGDNTTGTKRERETELERTGSGGVRSDEEDGVDGAGGRKKLRLSKDQAAVLEECFKTHSTLNPKQKLALATRLGLRPRQVEVWFQNRRARTKLKQTEVDCEYLKRWCERLADENKRLEKELADLRALKAAPSPAAAQPASPAATLTMCPSCRRVAATATAAASPTKHHHHQQQQCHPKPSSSLTPAAAAAAGGAGSVVPSHCQFFPAAVDRTSQSTWSTAAPLVTRELF

SEQ ID NO: 21634 - protein, 388 aa, Sorghum bicolor
MAHYEQQGRRQQVDEYGNPIPGGHAIQGRQAGGYGAVAGTGSYDAGGYGSQQQQAGYGPTGTGMHDAGGYGGGQQAGYGATGTGTHDAGGYGGSGHTGYGATGTGVHDAGGPGGYGARAHGTHGVTGIQDGAGGVGHTGGLHGATGMGTHGTGTGHGAHGATGGIHDARVTGMHDTAGVLGGGGGGHTGSGMPGATGVGTHGMGHGATGMTGTGGTATGAAFPHGAEHKTGGGILRRSGSSSSSSSSSEDDGMGGRRKKGLKEKIKEKMPGGHKDNHGQQATATGAYGGTGYTGPTTGTGTTGGGTYAPTTGGGTHEKKGVMEKIKEKIPGGHKDDYGQHHQHTSTGTGGGYGGTTGTYGTATTTTTEGTHEKKGFMEKIKEKLPGQH

SEQ ID NO: 21635 - protein, 179 aa, Sorghum bicolor
MAGSGRERETLVVGRVVGDVLDPFVRTTNLRVSYGTRTVSNGCELKPSMVVNQPRVEVGGPDMRTFYTLVMVDPDAPSPSDPNLREYLHWLVTDIPGTTGAAFGQEVICYESPRPTMGIHRFVLVLFQQLGRQTVYAPGWRQNFNTRDFAELYNLGPPVAAVYFNCQREAGSGGRRMYS

SEQ ID NO: 21636 - protein, 486 aa, Sorghum bicolor
MGWLTKFFRGSTHNISEGQYHSRPAEDTAWNEPSSSPVVTDIFSEFNNEDIDRAIALSLSEEEQRKAKTIDKDMHLEEDEQLARAIQESLNVESPPPSRENGSANGGNAYHPLPFMFSSGFRACAGCHREIGHGRFLSCMGAVWHPECFRCHACSQPIYDYEFSMSGNHPYHKTCYKEQFHPKCDVCKQFIPTNMNGLIEYRAHPFWLQKYCPSHEVDGTPRCCSCERMEPRESRYVLLDDGRKLCLECLDSAVMDTNECQPLYLEIQEFYEGLNMKVEQQVPLLLVERQALNEAMEGEKAGHHHLPETRGLCLSEEQTVSTILRRPRMAGNKIMGMITEPYRLTRRCEVTAILILYGLPRLLTGSILAHEMMHAWLRLKGYRTLSPDVEEGICQVLAHLWIESEIMAGSGSGAASSSSGSSSSMSSKKAGRSQFEHKLGDFFKHQIETDTSMAYGEGFRAGNRAVLQYGLKRTLEHIRLTGTFPF

SEQ ID NO: 21637 - protein, 358 aa, Sorghum bicolor
MCGGAILSDIIPPPPRRVTAGHLWPESKKPRRGAGAGRRRAGPPVEEEEEEEDFEADFEVFEVESGESELESEDEAKPFAAPRTRSALPRDGLNTSAVVVDGPAANSVKRKRKNQFRGIRRRPWGKWAAEIRDPRKGVRVWLGTFNSPEEAARAYDAEARRIRGKKAKVNFPDEVSTIPQKHRAGPTPLKVPEMDFEEKPIIKPAVNNMTNSNAYHYPVVDHNIPEPFMHTQNMSFAPFVNSAAPIQEPFVNLSSDQGSNSFSCSDFSLENDTRTPDITSVVVGESAFVQNTGPAVVPPLMGNASVDLTELDPYMNFLMDSGSEDSINTLLSCDGSQDVVSNMDLWSFDDMPMSAGFY

SEQ ID NO: 21638 - protein, 576 aa, Sorghum bicolor
MGSSSNSSPALSETKNTTPSVYTEDGTVDFRGNRAVRATTGGRKTAAILLVSYALMNFAFYGVAVDLVVFMRRVLHQENATAASFISMWTGTVYIFSLFGAFLSDSYMGRYRTCVMFQIIFLIGLVLLSFSSLFLLVEPSRCGDNQQHRPCQPPSQLGVVMFYISTFTTAFGIGGHYMERRSKLSFFSYFYLALNIGSLFSDSFLAFYEDKGMWVMGFGVSAVAVALGLLLFLLGTPYYRHCKQSGNPLTRMAQVFVAAFCKRHLQPPPGEVLHEVEGEDSETQGIRKLLHSDQLRCLDKAAIVTEEDYHAGKAKNPWRLCTVTQVEEVKCILSLIPIWMCTIIFSVEFTQMASTFVEQGTAMDTNLFGNFYMPAASMSMFDIASVILSVFAYNFFFVPMATWFTKNPAGITELQRMGTGLVIALVGMLAAAIVEVYRLRRVLAKDQPSPMSVLWQAPQYMLIGASEVFMYIGQLDFFNEQTPDSMKCFGSSLCMASISLGNYASMLMVSAVTSITNRQNKNGWITKNLNYGHLERFFLLLAVLSVIDFIFFALFSMMYKGIQFQGREKDISPNYN

SEQ ID NO: 21639 - protein, 491 aa, Sorghum bicolor
MAQDLEMAARNGSGSGAGADGAHYYPQQPRDGGAGGQELDDDGRKKRTGTVWTASAHIITAVIGSGVLSLAWSTAQLGWVVGPLTLMIFALITYYTSSLLSDCYRSGDQLTGKRNYTYMDAVAAYLGRWQVLSCGVFQYVNLVGTAVGYTITASISAAAVHKANCFHKKGHDADCSTYDTMYMVVFGIVQIFFSQLPNFSDLSWLSIVAAIMSFSYSTIAVGLSLARTISGRTGKSTLTGTEIGVDVDSAQKVWLALQALGNIAFAYSYSMILIEIQDTVKSPPAENKTMKKATLMGVTTTTAFYMLAGCLGYSAFGNAAPGNILTGFGFYEPYWLIDFANVCIVVHLVGAYQVFSQPIFAALETAAAKRWPNAKFVTREHPLVAGRFNVNMLRLTWRTAFVVVSTVLAIVMPFFNDILGFLGAIGFWPLTVYYPVEMYIRQRRIQKYTTRWVALQLLSFLCFLVSLASAVASIEGVTESLKHYVPFKTKS

SEQ ID NO: 21640 - protein, 408 aa, Sorghum bicolor
MAQLGWVAGPLILLLFAGITYYTCCLLSDCYRVGDPATGKRNYTYTEAVESYLGGWYVWFCGFCQYANMFGTGIGYTITAAASAAAILKSNCFHWRGHDADCTQNTGSYIIGFGVVQIIFSQLPNFHELWWLSVIAAVMSFSYATIAVGLALGQAISGPTGKTTLYGSQVGVDVDSFTQKIWMTFQALGNIAFAYSYTIILIEIQDTLRSPPAENKTMRQASIVGVVTTTAFYLMCGCLGYAAFGNAAPGNILSGFYEPYWLVDFANVCIVLHLVGGFQVFLQPLFAAVEADVASRWPCARQQHGGVNVFRLVWRTGFVALITLFAVLLPFFNSILGILGSIAFWPLTVFFPVEMYIRKQQIPRFSGTWLALQALSVFCFIITIAAGAASVQGVRDSLKTYVPFQSRS

SEQ ID NO: 21641 - protein, 465 aa, Sorghum bicolor
MDFEDRLATLPRVRGDRDDDGNETRTGTVWTATAHIITAVIGSGVLSLAWAMAQLGWVTGAVTLVLFAAITLYTCGLLADCYRVGDPVTGKRNYTYTEAVKSNLGGWYGCFCGFCQYANMFGTCIGYTITASISAAAINKSNCFHWHGHDADCSQNTSAYIIGFGVVQVLFSQLHNFHKLWWLSIVAALMSFSYSTIAVGLSLAQIVTGPTGKTTMTGTQVGVDVDSAQKVWMTFQALGNVAFAYSYAIVLIEIQDTLRSPPAENETMRRATVMGISTTTGFYMLCGCLGYAAFGNAAPGNILTGFGFYEPFWLVDFANACIVVHLVGSFQLFCQAIYAAVEEAVAARYPGSTTREHGAAGLNLSVFRLVWRTAFVAVITLLAILMPFFNSILGILGSIAFWPLTVFFPVEMYIRQRQVPRFSTKWTALQSLSFVCFLVTVASCAASVQGVLDSLKTYVPFKTRS

SEQ ID NO: 21642 - protein, 142 aa, Sorghum bicolor
MESDEEIRRVPEVGLELAGPSTSGRETTAAAGTAAGAAGTSSASQAATSAARRRGRSPADKEHRRLKRLLRNRVSAQQARERKKAYLSELEVRVKDLEKRNSELEERLSTLQNENQMLRQILKNTTVNRRGPGGSSAGGDSQ

SEQ ID NO: 21643 - protein, 135 aa, Sorghum bicolor
MVELLGRRIGVAAAAAAFIALAAFGSASSSPKSFVKSTVSAHDVVIFSKSYCPYCKRAKAVFKELQLKKEPYVVELDQREDGSEIQDALRDIVGRRTVPQVFVHGKHLGGSDDTVDAYESGKLAKLLNIGVKDDL

SEQ ID NO: 21644 - protein, 237 aa, Sorghum bicolor
MGHGHGGGCRCCELCGAPAAVHCAADAAFLCAACDAKVHGANFLASRHHRTRLHLAGTPDEEEYESAAASSCVSTADSASSSAAPRRRRRPAPAGSGSGSPRLRPPCEAVLEAWAKRAGLAAGAAARRRAARAVRACAHDLASARVPPRVAMAAALWREVAGRGGGIIGAGGGGGCGHDEALRRLEACAHVPARLVVAVATSLARARARRRRRAATDAVEGWDECAWAGPKSSPARS

SEQ ID NO: 21645 - protein, 552 aa, Sorghum bicolor
MGQCYGKAGGGGSSRADHDDDPAGAGAVAPPSPLPANGAPQAPPLPATPRRRKSGSTTPVHHQVATPGGGGGAWPSPYPAGGASPLPAGTFGFAKNFGAKYDLGKEVGRGHFGHTCSAVVKKGEYKGHTVAVKIISKAKMTTAISIEDVRREVKILKALSGHNNLVKFYDACEDALNVYIVMELCEGGELLDRILARGGRYTEEDAKAIVVQILSVVAFCHLQGVVHRDLKPENFLFTTRDESAPMKLIDFGLSDFIRPDERLNDIVGSAYYVAPEVLHRSYSMEADIWSIGVITYILLCGSRPFWARTESGIFRSVLRADPNFDDSPWPSVSAEAKDFVKRFLNKDYRKRMTAVQALTHPWLRDEQRQIPLDILIFRLVKQYLRATPLKRLALKALSKALREDELLYLRLQFKLLEPRDGFVSLDNFRTALTRYLTDAMRESRVLEFLHALEPLAYRKMDFEEFCAAAISPYQLEALERWEEIAGTAFQHFEQEGNRVISVEELAQELNLAPTHYSIVQDWIRKSDGKLNFLGFTKFLHGVTIRGSNTRRH

SEQ ID NO: 21646 - protein, 151 aa, Sorghum bicolor
MPKLVLHLLFLLGHLRRLSSWLLRLAGASADADSWASASDADHHPRHPAAAQRLEEHSPAVRFDSLSSGGSSSATAGEVPRPLPEGCCVCLGDFHAAAEVRRARGCRHVFHRACLDRWAAHGHRTCPLCRTQLLPPPLLLPLPLPLPLPPS

SEQ ID NO: 21647 - protein, 339 aa, Sorghum bicolor
MLPSSPIPPAQRNAAAVTTTTQAKRDDGATRMVRPALACCKLYISEARNAGALRAIEHAAAALRPAAALVNAFADDAYNRVGYTLVSPLAGDGTGEAPPLHRAAFRVVAAALEAVDLGAHAGAHPRLGVVDHVAFHPLAGARLEDVAALTRAVAADIGENLQAVSTYLYGAAHKDGRTLASIRRQLGYFTPTSPGGDQWCGAPDAPLPVAPDAGPVTPSRSKGVVVVGATAWVDNYNVPVRTADVGAARRIARAVSERGGGLASVQAMGLAHGDGAAEVACNLLDPAAVGADQVQERVRRLAAAMGIGVGEGYFTDLSQEKVVELYLQQAAQAEAASRQ

SEQ ID NO: 21648 - protein, 785 aa, Sorghum bicolor
MASSPPPPPLQEEEQEQGREEEHRHGAGGGDDDQITTPLLLVEATTSTSRSSPAGDEHYSDDLSSSEGENSPIEQVALTVPVGDDPTTPVLTFRMWVLGTASCALLSFLNQFFWYRKEPLTITAISAQIAVVPLGRLMAAALPERAFLRGTRWEFSLNPGPFNVKEHVLITIFANSGAGTVYAIHVITAVRVFYGKNITFFVSLLVVLTTQVLGFGWAGIFRRYLVEPAAMWWPSNLVQVSLFRALHERERRVKGGMTRNQFFLVAFICSFAYYIFPGYLFQMLTSLSWICWVFPHSVLAQQLGSGLTGLGIGAIGLDWSTISSYLGSPLASPWFATANVAAGFFIIMYVITPIAYWFNFYKAQNFPIFSDGLFTLTGQTYNISSIVDSHFQFDTEAYEKNGPLYLSTFFAVTYGVGFASLTATIVHVFLFHGSEILQLSKSAFQEKKVDIHTKLMRRYKQVPEWWFICILIANIAVTIFACEYYIEQLQLPWWGVLLACAIAFTFTLPIGIITATTNQTPGLNIITEYIMGYLYPGRPVANMCFKVYGYISMSQALTFLQDFKLGHYMKIPPRTMFMAQVVGTLIAAFVYLGTAWWLMDTVPNICNTELLPSDSPWTCPGDHVFYDASVIWGLISPRRIFGDLGTYSAVNWFFLGGAVAPLLVWLAHKAFPSQSWILLINMPVMIGATGMMPPATAVNYTTWILVGFLSGYVVYRYRRDWWERHNYLLSGALDAGLAFMAVLIYLCLGLENISLNWWGNDLDGCPLSSCPTAKGIVVEGCPVYT

SEQ ID NO: 21649 - protein, 700 aa, Sorghum bicolor
MDFGDEPEGSDSQRQRKRYHRHTPRQIQQLEAMFKECPHPDENQRAALSRELGLEPRQIKFWFQNRRTQMKAQHERADNCFLRAENDKIRCENITMREALKNVICPNCGGPPVAEDFFDEQKLRMENARLKEELDRVSSITSKYLGRPFTQMPPVPTMSMSSLDLSMGGMPGQQGHLGGPPSLDLDLLSGCSSGMPYQMPAPVTEMERPMMVDMATRAMDELIRLAQAGDQIWVKGMPGDAREMLNVATYDSLFSKPGVAFRPPDMNVEGSRDSGLVFMSAVALVDVFMDTNKWMEFFPGIVSKAQTVDVLVNGLGGRSESLIMMYEELHIMTPVVPTRELSFLRYCKQIEQGLWAIADVSLDGQRDAHYGMPSRSRRMPSGCLIADMSNGYSKVTWVEHMEIEQMLPINVLYRNLVLSGAAFGAHRWLAALQRACERFASVATLGVPHHDIAGVTPEGKRSMMKLSQRMVGSFCASLSSSPLQRWTLLSGTTDVSVRVSTHRSTDSGGQPNGVVLSAATSIWLPVPGDHVFAFVRDENARSQWDVLSHGNQVQEVSRIPNGSNPGNCISLLRGLNANQNSMLILQESCTDASGALVVYSPIDIPAANVVMSGEDPSGIPLLPSGFAILPDGRPGSGAGASSSVVLPLASQPGCVVTVAFQILVSNLPSSRLNAESVATVNSLIGTTVQQIKAALNCAGP

SEQ ID NO: 21650 - protein, 591 aa, Sorghum bicolor
MCGILAVLGVAEVSLAKRSRIIELSRRLRHRGPDWSGLHCHQDCYLAHQRLAIIDPTSGDQPLYNEDKTVVVTVNGEIYNHEELKAKLKTHEFQTGSDCEVIAHLYEEYGEEFVDMLDGMFSFVLLDTRDKSFMAARDAIGICPLYMGWGLDGSVWFASEMKALSDDCERFITFPPGHLYSSKTGGLRRWYNPPWFSETIPSTPYNALFLREMFEKAVIKRLMTDVPFGVLLSGGLDSSLVASVASRHLNETKVARQWGNKLHTFCIGLKGSPDLKAAKEVADYLGTVHHEFHFTVQEGIDALEEVIYHVETYDVTTIRASTPMFLMSRKIKSLGVKMVISGEGSDEIFGGYLYFHKAPNKKEFHEETCRKIKALHLYDCLRANKSTSAWGVEARVPFLDKSFINVAMDIDPEWKMIKRDLGRIEKWVIRNAFDDEERPYLPKHILYRQKEQFSDGVGYSWIDGLKDHANQHVTDSMMMNASFVYPENTPTTKEGYYYRTIFEKFFPKPAARSTVPGGPSVACSTAKAVEWDASWSKNLDPSGRAALGVHDAAYEDTPGEAPASADPVSDKGLRPAIGESLVTPVASATAV

SEQ ID NO: 21651 - protein, 406 aa, Sorghum bicolor
MGALCDFCGEQRSMVYCRSDAASLCLSCDRNVHSANALSRRHTRTLLCDRCASQPAMVRCLAENASLCQNCDWNGHIAGSSAAGHKRQTINCYSGCPSSAELSRIWSFVSDIPNVAPEPNCEQGISMMSISDSGVSSQDNAAGDNNLLDIASETLISDLGTCDKPLVGSSSGAGVNLLPLATDQTAGSVDSPPDKVPYTPDKDMFSKDSIYEDFCVDDVDLAFENYEELFGTSHIQTEQLFDDAGIDSYFEVKEAPAGNSTEQSKLKQPANSNAVSADSGMSNPGVKGDSSVCIPLRQARSSLSLSFSGLTGESSAGDHQDCVVSSLLLMGEPPWQPPGPEGSIAGGSRDSAITRYKEKKKRRKFDKKIRYASRKARADVRKRVKGRFVKVGEAYDYDPLCQTRSY

SEQ ID NO: 21652 - protein, 376 aa, Sorghum bicolor
MAMWRAAARQLVDRALGSSAAHTSAGSKKIVGVFYKAGEYADKNPNFVGCVEGALGIRGWLESQGHQYIVTDDKEGPNCELEKHIEDMHVLITTPFHPAYVTAERIKKAKNLELLLTAGIGSDHIDLPAAAAAGLTVAEVTGSNTVSVAEDELLRILILLRNFLPGYQQVVQGEWNVAGIAHRAYDLEGKTVGTVGAGRIGRLLLQRLKPFNCNLLYHDRLQIDPELEKEIGAKFEEDLDAMLPKCDVIVINTPLTEKTRGMFNKERIAKMKKGVIIVNNARGAIMDTQAVADACSSGHIAGYGGDVWFPQPAPKDHPWRYMPNHAMTPHISGTTIDAQLRYAEGARDMLDRYFKGEDFPVHNYIVKEGQLASQYQ

SEQ ID NO: 21653 - protein, 571 aa, Sorghum bicolor
MRSPVPERSLIIESDDDDDTQSAVATNWIGHGHGHDEEEPEQEPGSDSDSSSSSSSCATPRRGPSSPAYTQQWPQSYRQSIDILSSVHSSNLSFLGTPTLSRLSNSFLAITDSFRGKAPETISNFVKPLLGPTSSDEQQQQQHEDTRKSSQYIMPSRKSSLEQIPEDQKPLVVGHEASRNRNCSYTQGVMNGINVLCGVGILSTPYAIKQGGWIGLVILCLFALLAWYTGVLLRHCLDSKEGLETYPDIGHAAFGSTGRIVISIILYVELYACCIEYLILESDNLTKLFPTAHLTIGSLTLNSHVFFAILTTIIVMPTTWLRDLSCLSYISAGGVIASILVVICLFLVGVVNDVGFENEGTALNLPGIPIAIGLYGYCYSGHGVFPNIYSSLKNRNQFPSILFTCIGLSTFLYAGAAVMGYKMFGEATESQFTLNLPDNSLISKVAVWTTVANPITKYALTIIPLAMSLEELLPPNQQKYSTIIMLRSSLVMSTLLIALSVPFFGLVMALVGSLFAMLVTYILPCACFLAILKTKVGWHQIAACSFIIAVGVCCACVGTYSSLSKIIQNYT

SEQ ID NO: 21654 - protein, 329 aa, Sorghum bicolor
MVVRASSVIRCLLTVAAVLSLLMAGAAAAGGGLSTSFYSKKCPNVQSIVRAGMASAVAAEKRMGASILRMFFHDCFVNGCDASILLDDTATFTGEKNAGPNANSVRGYEVIDAIKTQVEASCNATVSCADILALAARDAVNLLGGPTWTVYLGRRDARTASQSDANGNLPGPGSSLATLVTMFGNKGLSARDMTALSGAHTVGQARCTTFRSRIYGDTNINATFASLRQQTCPQASDGGAGDAALAPIDVRTPEAFDNAYYQNLMARQGLFHSDQELFNGGSQDALVKKYSGNAAMFAADFAKAMVRMGAISPLTGTQGEVRLDCRKVN

SEQ ID NO: 21655 - protein, 318 aa, Sorghum bicolor
MGTSSLARSVALLTLLCLLLTCHGKLSTKFYAKSCPGVAAIVRSVTAQAVAKEPRMGASIIRLFFHDCFVNGCDASILLDDTPTFTGEKNAGANVNSVRGYEVIDAIKTQVEAACKATVSCADIVALASRDAVNLLGGPTWNVQLGRTDSRTASQSAANANLPGPGSSAASLVAAFAAKGLSARDMTALSGAHTVGRARCVFFRGRIYGEPNINATFAAVRQQTCPQTGGDGNLAPFDDQTPDAFDNAYYANLVARRGLLHSDQELFNGGTQDALVRKYSGNGRMFANDFAKAMVKMGGLAPAAGTPTEVRLNCRKVN

SEQ ID NO: 21656 - protein, 325 aa, Sorghum bicolor
MATFTCRSMAFLSLAAAVLVALLTAGAADAQKLSPNFYSKTCPNVATIVRQQMASAVAAEKRMGASILRMFFHDCFVNGCDGSILLDDTSTFTGEKGAGPNANSVRGFEVIDAIKTKVEASCKATVSCADILALAARDGVNLLGGPTWSVPLGRKDSRTASQSLANSNLPGPGSSLATLIRMFGNQGLSARDMTALSGAHTIGRSQCQFFRSRIYTESNINASFAALRQKTCPRSGGDATLAPFDVQTPDGFDNAYYQNLVAQKGLLHSDQELFNGGSQDALVRQYSTNANQFSADFVSAMIKMGNLMPSSGTPTEVRLNCRKTN

SEQ ID NO: 21657 - protein, 173 aa, Sorghum bicolor
MANDSLTRGHIIGDVLDPFTSSVPLTVMYDGRPVFDGMEFRASAVSVKPRVEIGGDDFRVAYTLVMVDPDAPNPSNPTLREYLHWMVTDIPASTDDSFGRELIPYENPSPTMGIHRIVLVLYQQLGRGTVFAPQVRQNFNLRNFARRFNLGKPVAAMYFNCQRQTGTGGRRFT

SEQ ID NO: 21658 - protein, 472 aa, Sorghum bicolor
MTRNCFVSGDGSDIISADAAPLFHVPEYTPSSGFGFVGEPAAADIAASSFPADGSVLLAGHQLLRATALQSVSPEETTHAGGAYGVTGGGSYSYSYVPSPWDVTVAHAPRMAKQLSIAGEPAEGGWIHESSYYCPTTWFSGHAQFAGAPASELSLRLRAGSSPTAGAVSASLPDQSSEVSCSGPGLFQPPCGAGGQVVRQVPMHFSQVLSRWSGYANIAQQALDEFVGCLLQDVAGFAGFTTGGGEASCPLPSSSCSKTTSSSDPNPSMFLGSEEHNHKLKNDLQKLLQIMDQRCKQCMDEIQSAACKYGSLVRPGGGALSAPFAHGAVSAMHRRLRARITGEIAAATRRGDQPSSSSSLSLTLADRERSWESAFIQKHWALRQLRRGDQQSWRPQRGLPEKSVAVLKAWMFENFLRPYPKDNEKEMLAARSGLSRSQVSNWFINARVRLWKPMIEEMYEDLKKASGGMEGV

SEQ ID NO: 21659 - protein, 348 aa, Sorghum bicolor
MGDSGGSVVSVDVERISFGGKEHHIQTNHGSVSVAIHGDHDKPALITYPDIALNHMSCFQGLLFCPEAASLLLHNFCIYHISPPGHELGAAPILSSTPVASVDDLADQIADVLDFFGLDSVMCLGVTAGAYILTLFATKYRERVLGLILVSPLCKAPSWSEWFYNKVMSNLLYYYGMCNVVKDILLQRYFGKGVRGGSTEPESDIVQACRSFLDQRQCMNVWRFIQTINERKDLTENLKQLQCRTLIFVGENSQFHAEAVHMTAKLDRRYSALVEVQACGSVVTEEQPHAMLIPMEYFLMGYGLYRPSQINCSPRSPLNPFCISPELLSPESMGVKLKPIKTRANLKA

SEQ ID NO: 21660 - protein, 449 aa, Sorghum bicolor
MAGAAGRKKRVGRYEVGRTIGQGTFAKVKFAVDADTGAAVAMKVLDKETIFTHRMLHQIKREISIMKIVRHPNIVRLNEVLAGKTKIYIILELVTGGELFDKIARHGKLRENEARKYFQQLIDAIDYCHSKGVYHRDLKPENLLLDSRGNLKVSDFGLSTLSQNGVGLLHTTCGTPNYVAPEVLGSNGYAGSAADIWSCGVILYVLMAGYLPFEENDLPSLYEKITAAQYSCPYWFSPGAKSLIQRILDPNPRTRITIEEIRADPWFGKNYVAIRRGEDENVSLDDVQAVFDNIEDKYVSEEVTHKDGGPLMMNAFEMITLSQGLDLSALFDRQQEFVKRQTRFVSRKPAKTIVATIEVVAESMGLKVHSQNYKLRLEGAASNRMSQFAVVLEVFEVAPSLFMVDVRKVAGDTLEYHRFYKNLCSKLDSIIWRPTEVSAKSTLLRTTTC

SEQ ID NO: 21661 - protein, 399 aa, Sorghum bicolor
MAATAAASGTGSSFLSPRRSRSAASSTVRAAASRFRSPRSVLGSEQLRVAQEGKRMGGAAEPRAAVWTPKAPAPEARLAALPREPRDSRMKIFSGTANRPLAQEIAAYLGVDLGKILIKRFADGEIYVQLQESVRGCDVFLIQPTCSPVNENLMELFIMIDACRRASARSITVVIPYFGYARADRKAQGREPITAKLAANLLTEAGSDRVIVCDIHSTQALGYFDIPVDHIYGQPVILDYLASKTISEDLVVVSPDVGGVVRARAFAKKLLNARLAIVDKRRQGHNMSEVMNLIGDVKGKVAILIDDMIDTAGTITSAAALLKQEGAEAVYACCTHAVFSPPAIERLSGGVFEEVIVTNSILLPEDKCFPQLTVLSMANLVAETIWHVHRDGSVSSIFQ

SEQ ID NO: 21662 - protein, 445 aa, Sorghum bicolor
MGRRLSASTAAVASAEPLLPRALKRGVLLERCASRADDELQWFRSCLRWVCMDHSSGPAQAALSWLLFLVLAIIVPAAAHFLLAFRASRRPFSAVVQLSLSAASAAGFLCLSSSFRRVGLRRLLHLDKLRGKSDRVRLNYTARLAFSFRLLASLVAPCFAAEAAYKAWWYATSADRVPFFANDVLSDVLACSLEMASWMYRSAVYLLTCVLFRLICHLQGLRLEDFAGSLLEEVEEGRAGVETVLREHLDIRKQLKVISHRFRKFIVAALLIATASQFASVLLTTRRDSVDDLLNTGELALCSVVLMSGLIIILSSAAKITHQAQALTGHTTKWHACCTIEPVLEDGEPGSNQNSMIEQEPESDSDTEYSEETGDEDLLENTKIHMPHAHVISFQKRQALVTYLENNRAGITVFGFTLDRSYLHTIFMLEWTLFLWLLGKTIGFS

SEQ ID NO: 21663 - protein, 613 aa, Sorghum bicolor
MALATPLRLRHLLPAAAAAPARAPDPAGPSSLASHRALSLCRGRLLRAGLSTTPRSGLVAVAAAASAAGGRPTVLVTENLGTAGLDLLRAFANVDCSYELTAEELRAKVSLVDALVVRSGTQVTREVFEAARGRLRVVGRAGVGVDNVDLQAATEAGCLVVNAPTANTVAAAEHAVALLAAMARNVAQADASLKAGKWQRSKYVGVTLVGKTLAVMGFGKVGPEVARRAKGLGMDVIVHDPYAAVDRARAIGVDMVSFDEAISTADFISLHMPLTPSTAKLFNDETFAKMRKGVRIINVARGGVVDEEALLRALDNGTVAQAALDVFTEEPPPRDSKLVQHENVTVTPHLGASTTEAQEGVALEIAEAVIGALRGDLAATAVNAPTVPAEVLSELSSYVVLAEKLGRLVVQLVAGGSGIKGIKVVFSSARDPDDLDTRILRAMVTKGIIEPISSAFVNIVNADYVAKQRGLRIVEERIFLDGSPEIPLDSIQVHLTNVESKFAGALSDAGDIRVEGKVRDGAPHLTLVGSFRVDVSLVGNLILCCQVDQPGIIGKVGSILGKMNVNVSFMSVGRTAPGKQAIMAIGVDEEPEKEALKLIGDTPSVEEFVFLKL

SEQ ID NO: 21664 - protein, 236 aa, Sorghum bicolor
MSYSTRAMEEEGFGKSWLGLGIGGGDLMKRSRSPAPVQFDLMLFPRSVKEEAAATASKKAEKGARKRSKTTITDDDGQSSHGGPSPSDDDVAVGAGARKKLRLTKEQSTLLEDTFRAHNILSHAQKQELARQVNLSTRQVEVWFQNRRARTKLKQTEVDCEILKRCCESLTGENQRLRLELAQLQRSAAAAAGLYVQSFPAPATAMASAICPSCDKVTVTSGGGETSGKSSTSYSS

SEQ ID NO: 21665 - protein, 288 aa, Sorghum bicolor
MASEEVLHKVQNLIERCLQMYMNQKEVVDALSQHSKIEPCITELVWRQLEQQNPLFFKAYYMRLMLKNQIMVFNKLLQDQFEIMNKDFSSGIPSMSLPNGSNSNLLKQNPCFLPETAPGSAMPDGIMHNGSSSGIINGTPSGNQLLNASKDLHGLHNGIDASTSLQSDQNATTVLYGVDNETSATIKTESCYSSNADFAFCGNTFLESCQSIGDASGGGSFSSSELNGQPLNESILDMESSSFSFLNQMPQNFIFSDLADDFNQSAEITPFLTPETNFSDSTGGEHTG

SEQ ID NO: 21666 - protein, 217 aa, Sorghum bicolor
MARPGSSAAAPLLLLLAAAAASILAAAAASPAPSDFVRKSCRATQYPSVCEQSLASYGGSPAPRSPRELARAALSVSADRARAASAYVGRLCGGSSSSAGHKKGAAARKGGAPGAAAGPVRDCLENLADSVGHLRDAAQEMGGAGMSRSGTPAFKWHLSNVQTWCSAALTDENTCLDGLSSRGVDAGTRAAIRGKVVEVAQVTSNALALVNKVGPGY

SEQ ID NO: 21667 - protein, 389 aa, Sorghum bicolor
MLVTLMNLLRACWRPSNRHARTGSDVTGRQDGLLWYKDAGQHVNGEFSMAVVQANNLLEDQCQIESGPLSFLDSGPYGTFVGVYDGHGGPETACYINEHLFQNLKRFASEQNAMSADVLKKAYEATEDGFFSVVTKQWPIKPQIAAVGSCCLVGVICGGVLYVANVGDSRAVLGRHVKATGEVLAVQLSAEHNVSIESVRKELQSMHPEDRHIVVLKHNVWRVKGLIQVCRSIGDAYLKKQEFNREPLYAKFRLREPFNKPILSSEPSICVQPLQPHDQFLIFASDGLWEHLTNQEAVDIVHSSPRSGCARRLIRAALQEAAKKREMRYSDLKKIDRGVRRHFHDDITVIVVFLDSSLVSRASTHRGPTLSLRGGGASAGLRSNTLAPT

SEQ ID NO: 21668 - protein, 397 aa, Pyrobaculum aerophilum
MGASKIVLAYSGGLDTTVAVKWLSEKFGAEVYTVTVDVGQEDDFSKIEERAYKAGAVQHFYIDAKREFAEEYIARAILMNGMYEGVYPLGTALARPLIAAKVVEVARRLGADAVAHGSTSKGNDQVRFDVTVKALAPDLKIIAPARIWGMTRAEEIEYAKRHGLPVGEEHKKYSIDDNLWSRSIEGGPIDDPLAEPPEDAFKWTVSPDKAPHDPTYLTIEFEKGLPVAVNGEKMSLASIISLLNHVGGANGVGRIDHIENRLVGFKSREVYEAPAAVILYHAHRDLEKMVLTPRELRFKHYVLDPQWADLVYQGLWVEPLRNALEKAAEEMERWVSGEVRVKLYKGSLWVVGRESPYGGYSKELADYSAGWYPSDEEARGFIEMWSLHSLTALRRRK

SEQ ID NO: 21669 - protein, 652 aa, Ralstonia solanacearum
MGKIIGIDLGTTNSCVSIMEGNTPKVIENAEGARTTPSIIAYMEDGEILVGAPAKRQAVTNPRNTLYAVKRLIGRKFEEKEVQKDIGLMPYTISKADNGDAWVEVRDKKMAPPQISAEVLRKMKKTAEDYLGEEVTEAVITVPAYFNDSQRQATKDAGRIAGLDVKRIINEPTAAALAFGLDKNEKGDRKIAVYDLGGGTFDISIIEIADVDGEKQFEVLSTNGDTFLGGEDFDQRIIDYIIGEFKKESGVDLSKDVLALQRLKDAAEKAKIELSSTQQTEINLPYITADASGPKHLNLKITRAKLEALVEDLIARTIEPCRTAIKDAGVKVSDIHDVILVGGMTRMPKVQEKVKEFFGKEARKDVNPDEAVAVGAAIQGQVLGGDRKDVLLLDVTPLSLGIETLGGVMTKMIGKNTTIPTKFSQTFSTADDNQPAVTIKVYQGEREMASGNKMLGEFNLEGIPPAPRGTPQIEVSFDIDANGILHVGAKDKATGKENKITIKASSGLSEAEIERMVKDAEANAEEDKKLRELVDSRNQGEALVHSTRKALGEYGDKLEAGEKDKIEAAIKDLEDVLKGSDKAAIDAKVEALATASQKLGEKVYADMQAKGGAEAGAEQAAAGAHAGAQAGHGAPQDDNVVDAEFKEVNDKK

SEQ ID NO: 21670 - protein, 322 aa, Leptospira interrogans serovar Lai str. 56601
MDPIFEKIEKAIDTEIESILYFRKNLDPSIKQAIELILECKGKLIVTGVGKSGDVGKKISSTLSSTGTPSVFLHPADAAHGDAGIISCEDIIIAIGKSGESEELLNLIPTIKNIGAKLVSMTANVDSKLAKESDVVLITPVLKEACPLELAPTSSTTIALILGDAIAMCLMELKNFKRENFALYHPAGRLGKRLSLKIDDVMRKDKDLAKVLPDTKLENILTEITVKRQGATGVIDLNGTLLGIITDFDIRKKLKEGKLDSSISAEQLMNPSPTMFLSGSNAYDVLKQMESRPNPISVAPIVDNSKRLIGIVSIHDLLQKGL

SEQ ID NO: 21671 - protein, 389 aa, Leptospira interrogans serovar Lai str. 56601
MNIGILKESKEETRVSVTPDIVDALKKIGATVLVEKGAGEQSYYHDEDYKKAGASLVSRQDVINKSNLIVSIHFADPTTLGKMKPGTIYLGMFQPAMNAQTVQKLASKKVEVLSLDAIARITRAQSMDVLSSQATVAGYKAVLLAASHLARFFPMLTTAAGTITPASVLIIGAGVAGLQAIASSRRLGAVVDVFDTRPEVKEQVHSLGAKFVEVEGASHSAAAGGYAVEQTEEYKKRQQEAIDKYAQKADVIITTALIPGKKAPLLITKKIVDNMKSGSVVVDLASSMGGNCEYTKHGQNVVTPKGVTVIGHKNLAGSIPADASKMFSKNVLNFLKLLIKDKKINLDLNDEILSSTTITYQGEVRHKLTLDALGSKSGAAKPKKSASKK

SEQ ID NO: 21672 - protein, 627 aa, Leptospira interrogans serovar Lai str. 56601
MEDRQTRLFLALILSMGIWMGVNYFFFPNTSTKKNTETKQTQSDKTSENTKQQITSGKTKESNSADPVVQKEKITPFDTKKSFIVTDSYIVEFSSLGGKISKFYMKDFTGPNGELIQVARKNPETVVVDGKSYQAVELSRDKGFDFNFSDSLVEISDSPWNYIQFSLTEDKINHSISFSAVSPDRSYQLKKEFRFYPSENYFKLSISIINFSKEKLSFASQKNVRYLRTFGSLGPYPKDRPLSDRDTANFFRFYYLGGSFQDTLDGSSSVGFWSSVGNFFTGNSGTDESFSIKTDKESGVDFAGTGSRYFIAVADPLDHKPHGIVLDNRPKNESGAVLVYDNILLNPGENYNLDFASYIGIRESEGMAFKNPELDPSQSKNSPFVGLSSDLNKSFNQGITTPFRNGIIWILKQIYRFTIPNYGWSIIIFAILFKLVFYPLNQKQADSMKKMQELSPQLKTINEKFANDPKMRQQKTMELYKKNNVNPVGGCLPMVIQIPIFIALYTAFSDTIDLWNSPFLWVKDLSEPDVIWTSPAIPYFTQTGIGLNLLALLMVGTQVFQTRMTSVSMDPNQKMLMYVMPVMMLYIFWNMPSGVTLYWTFQNVLSIGQQWITNHLKKTEEKKKAKV

SEQ ID NO: 21673 - protein, 393 aa, Leptospira interrogans serovar Lai str. 56601
MEEAVILDGIRTPFGNFGGTLKDLSAVDLGVLVSKTILERTGVSPEAIGESIFGNVIPTGKEAIYLARHIGLKTGLPLGVPALTLNRLCGSGMEAIIQAAKKIYLGDADAVLAGGVESMSNAPYVVRNARWGVRYGSAEFEDTLEQGLTDQYVGLIMGQTAENLADQYKISRQEQDEWAAISQTRAEKATLEGRLKEEIFTVTIPGKKPVILEKDEFIKGASGVDKLGSLKAVFREGGTVTAGNASGLNDGAAVTIVASSSYAKKLGKKPLAIIRGYGHAGCDPAKMGIGPALAIPAALKKAGLKLSDMSLVEVNEAFAAQYLAVQKELGLNPEITNVNGGAVAIGHPLGASGARVTITLAYELKRRKAKYGIASLCIGGGQGIALVLENPEV

SEQ ID NO: 21674 - protein, 493 aa, Leptospira interrogans serovar Lai str. 56601
MFMVTELSCCQKMTQLKRSLNLFDSISLMFSSMVGPGIFITTGYILHQVPNPNIVLLAWILGGFLAVAGAMSYAKSASLFPYAGGDYVYLKEAYSPIVAFASGWLSLSINFSASISLSALAFSKSFFSLINPSWDIYFFEIPFLGLTISIGTAQILAMSAILVFTIVNFFGISTASRIQNLFTSVKILGLVSFVILGFVIGNYDISRFKSFSLFPSDLKGFELLLAGVIPVTYSYLGWNMITYVAEEVKDPDKNIYKAVLYSCALVTILYILMNFLFLSSGTLSELSGDKIGITASSALFGPKATVFITVFICWAFLASISAYIIGGSRIYFAMARDGFFFQNMAKLHSKHKSPYMSLLFQCGYACLFCFVKEIESLLYLITCSTLLLATITAYTPILFEKRNYKLKFRIPGYPYTTYLYIASNFGIIATLLWNKPTEAFWGVGFTFLSIPMYYYFKIMQNTLSKNSTPLETPEVLATSLLPENEPVPIASGE

SEQ ID NO: 21675 - protein, 405 aa, Leptospira interrogans serovar Lai str. 56601
MTNIIVQKYGGTSVGTPERIQNVAKRIKSYHDKGQQVAVIVSAMGHTTDELVDLAAKISSNPPKREMDMLLSTGEQISTALLAMALWEIGVPATSFTGSQIKLLTDGNFSNAKIKMIDRSRIDSALNEGKVVIIAGFQGIDAEENITTLGRGGSDTSAVAVAAILGAKECEIYTDVDGVYTADPRVVPSAKKHKQITYEEMLELASLGAGVLHSRSVELGMNYDVVIHVRSSFNDNIGTLVVSEDKIMEKLKVSGVTAKNDQARITIAGVPDKPGLAAGLFGELSSKHILVDMIVQSSPHNGINTISFTIPKKDVHEAKPILEGFSKSHNAKEPEINENIAIVSAVGVGMKSHVGVAAGMFKALADNGINIEMISTSEIKISCVIAESQAKIAVNKIHDVFGLSS

SEQ ID NO: 21676 - protein, 356 aa, Leptospira interrogans serovar Lai str. 56601
MESFVDEVAIEVFAGHGGAGSVHFRREKYVEFGGPDGGDGGIGGNVVIRPNLSMYTLDKYLSKRKFKAQAGFPGVGDNCSGKKGEDLVLFVPLGTQIYDEETGDLLFDFVSDSQEFVVARGGRGGKGNAHFKTSTNQTPRFAQPGEEGEYKFLRLSLKLLADVGIVGLPNAGKSTLISKITDAHPKIAGYAFTTLSPNLGVVKRRGDIFRFTIADIPGIIEGASMGIGLGLSFLRHIERVKGILYLFDASSLDIEEDLKMLRNELSTYNPELLNRPYLIVLNKIDIWNDPEFTKDVIAKVSHLGKVVAISADQEVNLEELLENMDEVFFKNEIEKILNPIKDTKPISLDESDIFES

SEQ ID NO: 21677 - protein, 1498 aa, Leptospira interrogans serovar Lai str. 56601
MNDLKEQLQLQKYLEENGLYEKSFEHDNCGVGFVASYQGENSHRIVSMGLKAVACLTHRGAVDADMVTGDGAGIMIQIPKKLFATYIEEMGHRRPDEDSIGVGMIFLPREDIDKQDMCRSLVESALMEFNFKLYAWRYVPVNPEVLGPKANQSRPQIEQVLIGKPEGMSNEDFETKLFLIQKKLMRDADRHSLAGDLYICSLSSERIVFKGLFNGNQVSQFYDDLNSEEMVSPYCIFHQRYSTNTFPSWALAQPFRILAHNGEINTIAGNRIWMLAREEELECKKWGEYQKEIHPIIRPHMSDSASLDNAMEAIVRSGKDVLQAKAMLVPNAWSKNLTMSEELKSFYEYNNTLIEPWDGPAALAFAEGDWIGGALDRNGLRPARYAVTEDGLLVMGSEAGLVQVEEELVIKKGRLGPGEMIGINLKEKKLYYNEDINSLFEKKYDYREWSKENVSYLNQDLDSSINETITYKGDDLRRRQILFAYSPFKQKSVIKPQAHQGKEAISSMGDDTPLSILMLSRIGLYTYFRQRFAQVTNPPIDYMREKGVTSLYTRLVKKMNLFGDEKPQNCLVLSHPYLTNLDLKRIREMEGKPYKILTLDATFEAHLETEASQSRNYLETALDALLEQALKAATSGTNILILSDKKLSKERAPIPMELAVAAVHNHLIRNKTRSAVSILVETGSAFEIHNVAVLLGYGASGVNSYLIWDTLFDLWEKGEFDGEDGARPEFYKICGNYRYGVDDGLLKIMSKMGISILSSYVGGQVFEAIGLSRTLVSKYFPGTYSRISGIGIGGIEQNILRNHEQAFYKEINPEDFISEKDDQPHRWSPRVVKFLRKAAVDNDYEAFKEATKILKESDPINIRDLFDFVAKKPIPIEEVETVTEIQKRFLTPGMSHGALSIEAHTDLAIAMNRLGAKSSSGEGGENPSRYVVNEKGDLANSSIKQIASGRFGVTSEYLNSATEIEIKIAQGAKPGEGGQLPGKKNNEEIATNRHTPMGIDLISPPPHHDIYSIEDLSQLIYDLKMANHKAQVSVKLVSEAGVGTIAAGVAKANADVILISGHVGGTGAAPITSIKYAGSPWELGLSETHQVLVMNGLRDRVVLRTDGGIVSGRDVIIAACLGAEEYGVGTASLVALGCIMARKCHLNNCPTGIATQDIKFRAKYKGSPDQLVNLFTCLALEVREYLAELGFRSIDEIIGRTDLLKQITRYERDRLDSLDLNPILVRLPLFYDPTKQKKDRSIRKEPVGEVLDDRIIKDAEKALEGKSSMALSYLVRNTNRTVGAKISGLIARKYGSKGLPGKLEIILEGTAGQSLGAWLVKGVQITLHGDANDYVGKGLCGGVIVIKKHRKSKFKAYENTIIGNTCLYGATSGKLFCSGRAGERFGVRNSGAEAVVGGAGDHFLEYMTSGTIVCLGSVGKNMGAGMTGGTAYFFQKGWDIQPLLNKEYVRTVDLENVDYEIIKNLISEHSKLTSSDLSEGILKDFEANKNYFVKVVPK

SEQ ID NO: 21678 - protein, 366 aa, Leptospira interrogans serovar Lai str. 56601
MLEYVLANRIQGLDTSAIRKAFELAGTLKNPINLSIGQPHFPCPSNIIEAGSKALKEGKTAYTLTGGIPELKSALSEKYKNENEISYAKPERILVTSGISSAFLLLFNALLNEGDECLVITPHFLMYPAYIKIYGGKMNSIHESFEPEELKEFANKKLKIIIYSSPSNPTGKILSKKQLEALAELAEKTGAYLISDEIYEKFDYDKKFISVGSFYEKAITLSGFSKTYSMTGLRLASILAPESITKTLTTLQQYTLVCAPSITQWMGIEALKTDMSPYIADYKEKRDFVFESLKDHYEITKSEGAFYFFIKIKEKDEDFILKAVKEKELILVPGYIFTSSKNYIRISFASEWENLKRGISALVDLA

SEQ ID NO: 21679 - protein, 116 aa, Leptospira interrogans serovar Lai str. 56601
MQITVMKGKIHRATVTDADLNYEGSLTVDMDLVDAAGMRVYEKVSVVNVNNGARFETYIIEGKRGSGEICLNGAAARLGMKGDKIIIITYAQVEEQELASDYTPKVVHVDEKNRKR

SEQ ID NO: 21680 - protein, 860 aa, Leptospira interrogans serovar Lai str. 56601
MKLDKLTSKLNEAIYNAQASAEKLGNPEISEEHILKEVLSQPDGLVPLLISKLNLSPKSFLESTENALGKQPKVGGNTSADVGFSRSAVSLLKAADEVRKELKDEYLSTDHILLGLMKNGTGSLKTEFLKLGLEYHKLLKITLENRKGKTIMDDSPEGKTDALAKYAKNLNELAKQGKLDPVIGRDEEIRRTIQVLSRRTKNNPVLIGEPGVGKTAIVEGLANKIVQGEVPEGIKNKTLYTLDLGSMIAGAKYRGEFEDRLKALLDEVKSSDGEVILFIDEIHTLVGAGATEGALDASNMLKPMLARGELRCIGATTLKEYQKYIEKDAALERRFQPVYVKEPSVEETVTILRGLKGRYELHHGIRILDSALIAAATLSNRYISDRFLPDKAVDLIDEASSKMRIEIDSMPEELDRANKRIQSLKIEREALKKEQDTASKERLKTLERDLSEQEQNFQTLKARWDLEKSKIGRLKQIKEEIEKYKNLEAEAERRGEINRVAEIRYGKLVDLQKELESANEELKKQESASRLLKEEVSEEDIANIVSRWTGIPVSKMLQGERAKLLLMEDVLKTKVIGQDHALRLVSEAVQRSRAGIADPNRPIGTFLFLGPTGVGKTETAKALAEFLFDDVNAMTRIDMSEYMEAHSVARLIGAPPGYVGYDEGGQLTEAVRRRPYSLILFDEIEKANPEVFNIFLQILDEGRLTDGKGRNVDFKNTVIILTSNIGSEVLGSSEYTSEEKERLVEQRLKKHFKPEFLNRIDEVILFHSITDSVIHKIADIQLEGLRQKAKENGLDVSFTNELKDYVSKAGFDAEYGARPLKRLIQREVGNALSRYILDGKFTNGQNVTVDYRQGKVVVVV

SEQ ID NO: 21681 - protein, 411 aa, Leptospira interrogans serovar Lai str. 56601
MVGRMISFPKDKIQVLLLENVHQDAFDMFQKDGFNVRLLPAAFSEKELLDEIENIHVLGIRSKTNVTSAVLEKAKRLLTIGCFCIGTNQVDLVGAEKKGIPVFNAPYSNTRSVAELVISEIIMLARRVPDHIRNTHSGIWNKISKNCFEVRGKTIGIVGYGHIGSQVSVLAEAMGMKVIYYDIQTVLPLGNATPVSSYEELLKNSDFISFHVPETPQTMNLYGKKEIEVTKKGAYMINLSRGKVVDLEALAKAIQSGHIAGAGIDVFPEEPESNNDPFLTPMQNLPNVILTPHIGGSTEEAQRNIGSEVASKLLKFINNGSTTFSVNFPNLEITPLPAGQYRILNVHKNQPGFLKDINSMVSAIGANISSQHLGTSAEIGYLSMVIDKSVGDELKEKIEKHPFSIKTRILY

SEQ ID NO: 21682 - protein, 296 aa, Leptospira interrogans serovar Lai str. 56601
MINKYTISIIGTGIMGRGMAVNLAKAGHSLRLYTRNLSKIQDLKKDNVQIFDSPIEAAKNSDLVVLCLTEDQIVEKETISSGLLDTKPPILIDCGTTSLSLTLKLSKLCSEKKIRFYDSPMTGSKNAARDGQILFMIGAKQVDIKDIQFFFEVCGKNAVYCGSIGGGQKAKLALNMIQAGIFQVYMEGFELAKNSELDPSILKEILLQSAAKSGIAEFKFPYVFSGDYETHFSLKNMRKDVYHAIELAKENKTNLSLCKNLPEIYDLGMNAGYAENDFCSLNEVTAKIRPPKSENL

SEQ ID NO: 21683 - protein, 107 aa, Leptospira interrogans serovar Lai str. 56601
MNNDLKQKIDGLIGSNKVFLFMKGTPEAPMCGFSAGVSNVLRSLGIQFGSFNVLSDETIRQGIKEYANWPTIPQLYINGEFIGGHDIVVEMAKTGDLQKKAGILSAG

SEQ ID NO: 21684 - protein, 404 aa, Leptospira interrogans serovar Lai str. 56601
MDLSAKRLNVIEPSPTLVITAKANELKKKGEDIVSFGAGEPDFETPSHIRDAAKNAIDRGMTRYTAVSGTVELKEAIVHKFKRDNGLDYDKSQVIVGTGGKQVIYNYFLATLNAGDEVIIPAPYWVSYADIVRLAEGVPVIVNTTPEANFQITSEQLKKVITPKTKCLILNSPSNPTGAGYSKKDIEALGEVVLSTGIQVMSDDIYEKIVYDGFVFSNLAMLSPELKKQTFVINGVSKTYSMTGWRIGYGAGDLNIVKNMETIQSQSTSNPSSISQAAAQAAIAGDQSCVEEMRKAFQVRRDLIVSLLNAIPGVKCNNPQGAFYVFPYLTDVYKTTGFIKLKQGFSETSLSKIFCSTLLEKYKVAAVPGIAFGEDQALRLSYAMGENDIRRGVERIAEMIRDLN

SEQ ID NO: 21685 - protein, 214 aa, Leptospira interrogans serovar Lai str. 56601
MELYLDTANVDEIKEIASYGLVDGVTTNPSLIAKSGRSFKEVIKEICSIVSGPVSAEVLSTKFDGMMKEALELVEIAENVVIKVPLIPEGLKTVVELTKRNIPTNVTLCFSAPQALLAAKAGATFISPFIGRVDDTSWDGMELISEIREIYDNYGYDTRILAASIRGPIHLKESALRGADCATMPHSAFLQLFKHPLTDIGLEKFLEDSKKLKW

SEQ ID NO: 21686 - protein, 506 aa, Leptospira interrogans serovar Lai str. 56601
MKQKIAFILYTIWFISCSPQSRIDIAPLLLATLSQTTGSQNEISFQVLSPREGEILTVYQLETIVQANSDGEFEIFHEGNKLFSFQSTPSSPQTSPTFKPKNGHNTIQIRFKKSNGFVLSQEIHFYFGTKLSAGGAHSGFLINGELYTVGRNNFGQLGTGISTGDGINDRIVKVDPIRDIFSIHFNQNNSMAISQNGRVYTWGANSKGQLGIGNNNTDPARASDPGNRQPPTEIPGINDAVMGAYGFNHALVLKSDGTVVAFGQNNVGQLGNGENNLNRNSFSSNPVNVVQLRNVIQVIAGSEHSAALTENGEVYIWGRNQYGNLGNGIISPANTVQSVPVKVEGLSKIKQIANGRDHILALTSDGKIYSWGLNASGQLGIGGNGNPPPTPIPTQILNIQDVASIWAGGTQSFAILKNGEVKGWGANGNMASLALGESNTQKVYEPNKAVVGIDNVVHFGCGATHNFALLGNGEIYGWGWNFKGSLGRTDLQNNWGAPNPVYIKFP

SEQ ID NO: 21687 - protein, 592 aa, Leptospira interrogans serovar Lai str. 56601
MKIRFLLTVAFLLSLWTLRGRIIMSAESRRVTGARLMVELLEEYGVDVVFGYPGGAILPFYDEIYKSKKIKHILVRHEQGAVHMAEGYARATGKLGVCIATSGPGATNLVTGITDAKMDSVPILAITGQVATNAIGTDAFQEADIFGITIPITKYNALIKSADDIARHFEEATLIALGGRPGPVLLDFPKDVQTELTNVRKSSRLKIAPHHYKKPAVSGNLEEFAEAINRSQKPLLYVGGGAINAGASKEILELATKGGIPVTTTLMGLGAFPGTHPLSIGMLGMHGTATANKAVLECDYILNLGARFDDRVAKIGEFAEGAVRAHIDIDTAEFNKRIQVDYLLHGDLKDALSAILPFVKKQERKEWLTHLQNLKKEHPLDFDNSGNEIKPQDFLERLYKKTQGKAIVSTDVGQHQMWAAQYYLMDEPNNWLTSGGLGTMGYGLPAAIGAKFGRPDKTTICISGDGSIQMNIQELATIVANKLGVKILVFNNNFLGMVRQWQELFYEERFSESEWNFNPDFVKLAEAYSIPAMKISNKSEIDKAIEFFTKDDGAAFLEVMIPAEEKVFPMIPAGKSQKEMIEFKDLAGLKKV

SEQ ID NO: 21688 - protein, 255 aa, Leptospira interrogans serovar Lai str. 56601
MTEILKIQNLKAGIQTGDSGEIKEIVKGVDLTIRPGEVHAIMGPNGSGKSTLSNVIMGHPKYQVLSGDILFEGKSILNLPTDERARLGIFLCFQYPTSIPGVTIGNFLKTIVKSVRGKELPVKEFRKELKESMAALDMPESFIARYVNDGFSGGEKKRNEILQMSLLKPKLSVLDETDSGLDIDALRIVSEGINRNKTPERSILLITHYQRMLNYITPDFVHVFAKGKILKTGTRELALELEEKGYDWILAESKD

SEQ ID NO: 21689 - protein, 781 aa, Leptospira interrogans serovar Lai str. 56601
MKNRIANRIVLILFLGINLPLFSESPALELSKTVDPIWLILCAALVFFMQAGFLMLETGLSRLKNTINVAVKNLMDYIVGTIAFFSVGFALMFGLSYEGWIGTNHFFLTGLKTGKDFSFFLFQVAFMGTAATIVSGAVAERIKFSAYLIVSVVVSLFIYPVFGHWTWGGGWIAKIGFVDFAGSTVVHSLGGWIALAGVIVLGPRKDKFKEDGTPRKIHGHNLTFSVLGVFILWFGWFGFNGGSALSFTDQVPLIILNTSLAGSVGGIFAITFSWIFYRVASVEDCMNGVLGGLVAITAGCHAFQPYASLIVGALAGISVVITSWVLEKILKLDDVVGAFPVHGVCGIIGTLLLPILSENQDIRIYPQFIGVLTCSFWAFGLGMILFLLLKISIGIRVNEEFEEKGLNVTEHGAGSSWIDLIHSLKDLAKGGGDLTRKIHVDSGTEAGAIAFLMNRYLANLGQMIYTIKEKSIELEYSSSEISVAWGKMSQGIQQQAANLGEVTSIFDSFRESFQTISSSAAQQKEMETSASELLNELVFGFQKFDSDLKNSSEKSEESVKAIDLSRKELNQLETDINDIGSSAKKVEGLVKLLNDISAKLGMLSINASIEAARSGAAGKGFGVVAEEISKLASSTQESTKKASEILGEIQSTVSRGKTTVQTSVEFFKNLTEEFRFLAETYITIRKSSLHYSNLIGNLNRLNTSITNQSEIIMTDIDKRFSEIGNLYESVDLINGAFHEISAQSEELNATGEFLKQLAEILNSLVRNFRVEQNSSQELIPG

SEQ ID NO: 21690 - protein, 631 aa, Leptospira interrogans serovar Lai str. 56601
MKFFFRLLSYSVHYKYRFTLGIVFALLTAILNAVSLTALIPLFDSLGNDKQTRFQLQMTLPEQRIILKQKVFGKDSLDGLEKTKLLLIEVKEWVNGRTKGLEPKEVVWSICIIVMPLYLLKLITYLLSVFCIATAGYKAVRDIRQELFEKNQLLPLTYFFKEKTGLMMSRIINDVEVIAAVISSNFRDATINFFYVITHLMVLLYLNTELLLIACLTVPVIILPVTLFTRKITKSTARSQEKMADLNANIQEMISGIKVIRVFNSEKYEQEKFGKINQNVYRRNFKGQFYLQIAPSLVELTSSVVVLGFFAAGASLIYNGRFTQGEFMAFLLTLLFLLRPLTQLSQMVGKVTQSIASGKRIFEIIDLETEDHSEESKITASPLSQNIEFKNLFFSYPGTGSAVLKDINLKVKKGETIALIGASGCGKSTLMDLIPRFFDPTSGSIEFDGIDIRDLSLGDLRKKIGIVTQDIFLFHGSVADNIAYGKLGATRKDVIRAARLAHAHDFIKKMDNGYDSILGVRGLNLSGGQRQRLVIARALLRDPEIMILDEATSALDVESERLVSDALRRLYANRTTFVIAHRLSTIKDIPRIIVMDNGKIVEEGDHNSLYDKNGIYRKLSDNQFANNGVLP

SEQ ID NO: 21691 - protein, 626 aa, Leptospira interrogans serovar Lai str. 56601
MNIYKRLLKYSFKYKYRLTLGIVLSFLVSILNGASLTSLIPIFDSLGTGEKTNFEISLTKKDKILLQRLEEKESFTSVESIELKLAQWKIQLNSSLKKMSHDELVLLFCFIVFPVYLLKLIFLAAAVYCINSAGYLAIRDLRSELYAKAQTLPINHFVQEKTGILMSRIINDVEVLGKLISSDLKDAITDFFYIVTHLLLLLYLSWKMFLAVFIVVPIVMGPVSAFADKIRRATRNQQERLSLLNGHLQEVISGIRVIRAFSMEKTEAKRFWEFNQDLSDKTFKGHFYHQVGPSLTELFSSIVAVIFLSFGAYLMEDGTFSRGMFMAFFLTLIFLMRPFKQMSMLSNSIQSAISAGDRVFELLDQETDIRNPANPKFLKKMEKGLSFNNVTYMYPGAKNPAIQEINLEIAKGETIALVGASGAGKSTLVDLVPRLIDPQEGKVLIDGIDLRDLDLSNLRKRIGIVSQQVFLFNGSIRENICYGNQNVTEEQLRTACEQAFAMEFILSFEEGLDTIVGERGVMLSGGQRQRIAIARALLLNPEILILDEATSALDTESERLVQEALESLYKNRTVIIIAHRLSTVQIANRIFTMEDGKIVESGTHTELLQLDGKYKKLYDIQFSENV

SEQ ID NO: 21692 - protein, 646 aa, Leptospira interrogans serovar Lai str. 56601
MSKEKIIGIDLGTTNSVVSVMEGGDPVVIQNSEGARTTPSIVAFTAKGETLIGQFAKNQAITNAVNTIRSAKRFIGRRLNECESEMKHVSYKVIRSGNEGVKFETSAGEFTPQEISARVLMKMKQTAEDYLGQKVTKAVITVPAYFNDEQRQATKDAGRIAGLEVERIINEPTAAALAYGFDKKNVNSKIAVYDLGGGTFDISILELADGVFEVKSTNGDTHLGGDDFDMAIMEWMISEFKNQTGIDISADKNTVQRLKEAAEKAKIELSGTMSTQINLPFITADASGPKHLDMTLTRAKFDQLTKSLVDRTRIPCENALRDAGLKASDINEVILVGGSIRIPAVQELVKQVFGKEPNKSVNPDEVVAIGAAIQGGVLAGEVSDVLLLDVTPLSLGIETLGGVMTKLIERNTTIPTKKSQVFSTAADNQSAVSIHVLQGEREMASANRTLGRFDLIGIPPAPRGVPQIEVTFDIDANGIVHVSAKDLGTGKEQKIRIESSSGLSEDEIQKMVKDAEAHAAADKAQREVIEAKNELDTLTYSLEKTVNEAGDKIGANEKQLATDEIKRAREAIESNDKARIESAKASISKIATDIASKVYSQSAPGAEQAAAGGPNGSAGSNDQGNSTNNGEKVVDADYTVVDDEKK

SEQ ID NO: 21693 - protein, 312 aa, Leptospira interrogans serovar Lai str. 56601
MNGDIAVFAGNSNKQIAEEICTHLGIQSGKINLKKFSDGEISVKIEDNVRGKEVFIVQSTSAPANDHLMELILIMDALRRASVSSISVVIPYYGYGRQDRKVEPRVPISARVVADLIEVVGLDRILTMDLHADQIQGFFRVPVDNLHFAPVLAEYVNTKKIDDLVIVSPDSGGAERARAFGKKVNGSLAIIDKRRPKANVSEVMNVIGEIEGKNCILLDDMIDTAGTICKAADALLKHGAKSVYCAATHGVLSGEAVDRINSTQFSEVVLANTIAIPESKKINKLKSLSVAPLFANAIQRIHTNQSVSTLFD

SEQ ID NO: 21694 - protein, 507 aa, Leptospira interrogans serovar Lai str. 56601
MQKFMESKFTSVLVIDDEFEIRTVLERVISKEGYQVLSAKDSDSALEIIRNQKVDVVISDIVMNGKSGIEVVKEIRKINENIPVILMTGNPDLNSAEEAVRNRAFDYISKPIRRRNILEILERAKIEKETRDKRAENLIKSETENTKLAQRAKDLYLQNYNILNATSDCVITLDRELKFSGLNRAALDAFGYVEEEIVGKHFEVLIPVGKEKLYMERLNRLLKRKNKKQISRISRADLKSKNGEVRAYEISICYYDIEGQTYYTGIARDITSKLLISEKLIDAERRAFLSILASSIGHEINNSLTAIQGHIEIAKLPDATDPIRQKAIQITWSQLVKLKTLTNNLLQLGKPGENFKRASEPIDLNECVESVIDVFQKTSRLKNCKIHFKPEPIPVIVESNQDQLSLLLSNIVLNSADATGNQGNIQISVYIKNHHPVVSVLDDGVGMDEEVIQKIYQPYFTTKGIGKGTGLGMFVAKEIADQHKIKIEIESEPNFGTEFRLIFPNKV

SEQ ID NO: 21695 - protein, 521 aa, Leptospira interrogans serovar Lai str. 56601
MKGTSMKKLKFSELNLSAEIQNAILEMGFEEASPIQSEAIPVILKGKDIIGHAQTGTGKTAAFAIPTIELLEVESKHLQALILCPTRELVIQVSEQFRKLIKYKGNFEVVPIYGGQEIERQLRALRKNPQIVIATPGRMMDHMRRGSIHLDEIKIVVLDEADEMLDMGFREDMEFILKDTPADRQTIMFSATMTDDVLTLMKKFQNHPQIIDVTHQKLSAPKIEQIYYEIQENAKGEALARLIEYRNVKLALVFCNTKAQVDTVVELLKSRGYFAEALHGDLNQKQRDKVMSGFRKGSIEILVATDVAGRGIDVNNVEAVFNYDLPRDGEDYVHRIGRTGRAGKKGIAFSFIVGKQIYNLKKIERINGIKIEAGKIPTLDDLEETKIHSYTSKVRSIVDAGHIGKYVNQVEKLMGDDYTALDIAAALFKMTILKDSVTFDDSVQFESDFKYEEKHSTKKKSGGGRYRDRNFGRSGSGSRSKSNSNSHFGNNSKDGSRSKFSKGDKNQKQGGGATSFKKKKK

SEQ ID NO: 21696 - protein, 384 aa, Leptospira interrogans serovar Lai str. 56601
MFDSNLVFILFYSGEFFLTDFSESLIDLFSAVKTGKTNEIQKLLNALKGEAILIDWLKDYRDSYGSGVLSWAVKNSDQEAIELLLEAGAEPDETNARGETPLLNALDQNNEDLIRIFLEAGADTEKKDFAGNTPLTKAVSTGNVSIVEMVLENEYSTPDLEERNGEGYTPILLAVDLGHLDIVEYLLDQGADFLKKNSEGRTILHLTALHNDFEILDLFLEKEETKIILEDKDADGNTALLLASSHDSVECLEKLIQVGANILQLNASGKTGLEEAERQKYHHVTKILKKVLTEKLFFAAKHGEDELCKNILQIGISPNPIDQEGNTPLHVAVIHDQISTTELLIQWNASPFLKNLNGKSPLDIAKAAEKIELVRILEPEPEND

SEQ ID NO: 21697 - protein, 223 aa, Leptospira interrogans serovar Lai str. 56601
MRLDFQSLKERLIIPQENFIGIPIPPIGQEKSRASSVILSIYEESDRSQGIILQKRNSNLKTHPGQISFPGGAYSPKDKNLLNTALREWEEEMGESSSFLEVLGEYNGIFTFTGFHISPFIAHYKGSFLFNTNPEEVERFILLDLNLLESSPFYSIRIRRSGANEIEIYYFDLKEGLLWGATGRIIVNFLREHANFNREPIFVEPNLSSPPFFDPSRKFSKKN

SEQ ID NO: 21698 - protein, 403 aa, Leptospira interrogans serovar Lai str. 56601
MAQNKPVKKIVLAYSGGLDTSVILTWLKDTYGCEVIAFTADIGQKEELSGLEEKGIKTGASKVYIQDLRLEFARDFIFPAIQGNAIYEMRYLLGTSLARPLIAKAMVEVAEKEGADAFAHGATGKGNDQVRFELGVKSLAPEKTIIAPWRIWSFGGRSDLIEYAKSKGIPVPVTAEKPYSMDRNLMHISYEGGILEDPYKEPDEKMFLLTTSPEKAPDAPEYLELDFEEGNCVAINGKKMNPLEIMETLNTIAGKHGVGRVDIVENRLVGIKSRGVYETPGGTILFLAHRDLESITIDRDTQHHKDKLSIEFAELIYNGHWFSSRMKAVRAFITETQRYVSGTVRIKLYKGVCSVVGRKSQVSLYNPEMATFEKEELYNQKDAEGFINIYGLPAQETARLRKK

SEQ ID NO: 21699 - protein, 314 aa, Leptospira interrogans serovar Lai str. 56601
MHSLMKPTREPQINLFKKSNPYKAKVISNVLLTPETGTGKRPKKEGEALVHRIVLAIDHSAYPYVIGQSGGVIPPGEDPEKKAKGLADVGYTVRLYSIASPSYSFGMKEDNIEFIIKRDNIYDENGNIQFKGVCSNYMCDLKPGDEVTMTGPSGKKFLLPNTDFSGDIMFLATGTGIAPFIGMSEELLEHKLIKFTGNITLVYGAPYSDELVMMDYLKGLESKHKNFKLITAISREEKNSFDGGRMYISHRVREQAEAVKKILNGGGRFYICGGPKGMEKGVIEEIQKISGNTGTYEEFKHHLEGAHQLFVETY

SEQ ID NO: 21700 - protein, 550 aa, Leptospira interrogans serovar Lai str. 56601
MIKIFLAKHFPKVQNYRMQNSMILQFISEHPWYSLFYTIGTYLFFALLHDIFQRRHAIKHNFPLVGRIRYIFETIGPELRQYWVANDKEEMPFNRAERSWVYATAKKQNNNFGFGTTELLYEAGYPIIKHSAFPFPESKVKHLKNDTSMIPCLKVIGEFHNRKKPFRPPSVVNISAMSYGSLGKNAVSALNKGAMMAHCYQNTGEGGISPYHKLGGDIVWQIGTGYFGARDEKGNFSLEVFGQKIQENPQIRMIEIKLSQGAKPGKGGILPGKKVTKQIASIRGVPIGKDCVSPNAHSEFGNVNELIDFIERLHFASGLPVGIKSAIGEIHFWNELAERMKETNKGPDFITIDGGEGGTGAAPLAFADHVSLPFKVGFARVYQIFQKEKLSERMAWIGSGKLGFPDRAIVAFAMGCDLINVAREAMMSIGCIQAQRCHTDHCPAGVATQNRWLQAGLDIELKAERNANYIKGLRKEVLSVTHAAGYEHPLQFRGSDIEISAGLNIFKTLETILGYERDHVHFTKMLDYTDHTYLEEYMQGTTKQEHPKTV

SEQ ID NO: 21701 - protein, 204 aa, Bradyrhizobium yuanmingense
ARQTQIKEFASFPTLEQLPLWGFDGSSTQQAEGHSSDCVLKPVAVFPDGARTNGVLVMCEVMMPDGKTPHPSNKRATILDDSGAWFGFEQEYFFYKDGRPLGFPTAGYPAPQGPYYTGVGYSNVGDVARKIVEEHLDLCLAAGINHEGINAEVAKGQWEFQIFGKGSKTAADQMWMARYLMLRLTEKYGIDIEFHCKPLGDTDW

SEQ ID NO: 21702 - protein, 204 aa, Bradyrhizobium yuanmingense
ARQTQIKEFASFPTLEQLPLWGFDGSSTQQAEGHSSDCVLKPVAVFPDGARTNGVLVMCEVMMPDGKTPHPSNKRATILDDAGAWFGFEQEYFFYKDGRPLGFPTAGYPAPQGPYYTGVGFSNVGDVARKIVEEHLDLCLAAGINHEGINAEVAKGQWEFQIFGKGSKTAADQMWMARYLMLRLTEKYGIDIEFHCKPLGDTDW

SEQ ID NO: 21703 - protein, 560 aa, Lentinula edodes
MPSAISRRQMSPEFKIGYMPDLSPSLLNFDDPHRFMPSDDQLLFDMEDVSFTHDASSGPFSWDLKNDTDSDIKPAYYTAGPSPLSSNYDYLSQASPTDSFYDPSAYLTHEDSTSFDNNLFGSWIHEPELIPIPSPVAPIPISPNDPQNLEPFFTFGERSHFPQDHGLSPSEFAALQPLPMSPSSSYEESHAFPRQRVDSMTSISPADISAVQTPEWVSLFDNTATPSSISIRTPASSRPSVRHSPISSDGVQRIRMPRRASITSSQLFQSASAPSHSHLQTQSRSASSMASRRAESVSLSDDRDATVRRRRKVSNTSVEEHEKSDKPNDSVPTKSALRPPKLAPSAWQLYFTDWIQRQLASNTRKLNVAQAAKEAGQEYASLSAEEKEPYKLRSQAMKEAREREHAAYMRTLTPEDIKRENVFRAAQRKAGKSRKSNIKDPNAPKKPLSAYFMFLQRIRANPQLVQKVFGDETETTKQSVLAAAKWRSMTDDERKPFLAQAEQEKMEYEAARRLYEEGTTGYGTSISFSILPGSPIYQPAKLESESESDSGSAVDGFHRF

SEQ ID NO: 21704 - protein, 485 aa, Eucalyptus grandis
MSAISLMEWNAKPPLQWEWENLMMFGSKATETSKPLRATDWGIEAEELIDPGSLFPYENGGGSSSCTSIDPGYTSVSKSSKSASVNSSSTDELKISKFSVEAHEGFSLQSSKKGLAVNDFTGMSPALEPSVCSGEPLLSLKLGKRIYFENTIDKDHVKTQDLPSVMKSPDTPAKRNKSNCQGTSAPRCQVEGCNLDLSSAKDYHRKHRVCESHSKCPKVIVSGIERRFCQQCSRFHGLSEFDEKKRSCRKRLSDHNARRRKPPPDVTQLNPARLSALFYGGMQQLNPVLSRAPAVHTRSTASFKWADTQDTKLIEKGPKLPIGGGVGECITIPSNGIPDTLKSNGLGKSYNELLSSKGMPVKTTGGGLGESLASPNLDPSQNIQRALSLLSTDSRDPIRQKSASHGHSVHTNNNCMSTDQSSMYGFGQGSRLASSGYWHAEQRPKTHILNPQNESNIISFGGSSMQECLFSEARHEFSFDSAQLN

SEQ ID NO: 21705 - protein, 631 aa, Citrus sinensis
MPYARYLSTLLHKGPTATASQSYEFKRLGQSSSYSIYMLHPCFNLITRNQALSTKIFTTMAQPRKLFLALFAVVLVVTAVVTIIATRKNNSSNTNDEHIAAHAHAYAQPVIRSSCSATLYPELCFSALSAAPAAAVSKVNSPKDVIRLSLNLTITAVQHNYFAIKKLITTRKSTLTKREKTSLHDCLEMVDETLDELYKTEHELQGYPAAANNKSIAEQADELKILVSAAMTNQETCLDGFSHERADKKIREELMEGQMHVFHMCSNALAMIKNMTDGDIGKDIVDHYSKARRLDDETKWPEWLSAGDRRLLQATTVVPDVTVAADGSGNYLTVAAAVAAAPEGSSRRYIIRIKAGEYRENVEVPKKKINLMFIGDGRTTTIITGSRNVVDGSTTFNSATVAVVGDGFLARDITFQNTAGPSKHQAVALRVGSDLSAFYRCDMLAYQDTLYVHSLRQFYTSCIIAGTVDFIFGNAAAVFQNCDIHARRPNPNQRNMVTAQGRDDPNQNTGIVIQKCRIGATSDLLAVKGSFETYLGRPWKRYSRTVVMQSDISDVINPAGWYEWSGNFALDTLFYAEYQNTGAGADTSNRVKWSTFKVITSAAEAQTYTAANFIAGSTWLGSTGFPFSLGL

SEQ ID NO: 21706 - protein, 348 aa, Pseudomonas putida
MSFFKKISGLFVPPRESTVSVRGQGFQFKVPRGQTILESALHQGIAFPHDCKVGSCGTCKYKLISGRVNELTSSAMGLSGDLYQSGYRLGCQCIPKEDLEIELDTVLGQALVPIETSALIRKQKRLAHDIVELELVSDKQIAFYPGQYADVECAECSAVRSYSFATPPQPDGSLSFHVRLVPGGIFSGWLFGGDRTGATLTLRAPYGQFGLHESNATMVCVAGGTGLAPIKCVLQSMTQAQRKRDVLLFFGARQQRDLYCLDEIEALQFDWGGRFELIPVLSEESSTSSWKGKRGMVTEYFKEYLTGQAYEGYLCGPPPMVDAAETELVRLGVARELVFADRFYNRPL

SEQ ID NO: 21707 - protein, 110 aa, Aureococcus anophagefferens
MKYAVIEIGGKQLLVEEGKYYATNRLPHKAGSSLSLQRILLCNDKGRRLVGHPYIENLESVEIKATVLEHFKDSKITVFKMKPKKKTRWTKGHRQAQTRIMIDKIETKPN

SEQ ID NO: 21708 - protein, 846 aa, Aureococcus anophagefferens
MFERFTEKAIKVVMLSQEESRRLGHNFVGTEQILLGLIGENGGVAYKVLRTFGVTLREARTEVERIIGRGSGFVAVEIPFTPRAKRVLEIAIEEARDLGHGYIGTEHVLLALLEEEVGVGVRVLQQLGLVISQIRTELLIQIGESIEAAVAGEKSELFDMGGLAIEEFTTNLTESAFNGNLDPVVGRDDEISRVIQILARRRKNNPVLIGEPGVGKTAVAEGLAQRIVERDVPALLDDKQVISLDVGLLLAGTKYRGEFEERLKRIVDEVRSSENIILVIDEVHTLIGAGAAEGAVDAANILKPALARGELQCLGATTVEEYRKHIERDSALERRFQPVQIDEPSVDDTVDILRCLRARYERHHGLKIGDDALEAAARMGAQYIADRFLPDKAIDLIDEASARVRLRATRTPDSATGLKRELRDVMKEKEAAIREQDFERAADILDREIEIRAQLNIILSTIKRVSTPTETSTYDSVVCEEDIAGVVAAWTGIPVNKLSKTESEKLLLMEDTLHSRIIGQEQAVSAVSRAIRRARVGLRNPNRPIASFMFSGPTGVGKTELTKALALYFFGAEDSMVRLDMSEYMERHTVAKLIGSPPGYVGYSEGGQLTEAVRRKPYTVVLFDEIEKAHPDVFNLLLQILEDGRLTDSKGRTIDFKNTMIILTSNVGAKVIEQSTTSGGGLGFDSPDSDNTDSQYSRMAELVNEELKRFFRPEFLNRLDEVIVFQQLTKQDLSQIADIMLAQLCARTQEQQFTLNITPRAKDLLIDEGFDPVYGARPLRRAIMKLLEDKLANTVLSEVIEPDSLVLVDVNDQKELTIIVDRSEAPILDVKSSDAVVDKSPEPIAN

SEQ ID NO: 21709 - protein, 833 aa, Aureoumbra lagunensis
MFERFTEKAIKVVMLSQEESRRLGHNFVGTEQILLGLIGENGGVAYKVLRSLGVTLREARTEVERIIGRGSGFVAVEIPFTPRAKRVLEIAIEEARDLGHGYIGTEHILLALLEEEVGVGVRVLQQLGLEVSQIRTEVLMQIGETLEVVLGGDRSEFFEMSGVSIEEFTTNLTEAAFNGKLDPVVGRDEEIERVIQILARRRKNNPVLIGEPGVGKTAVAEGLAQRIVKRDVPDLLDEKQVISLDIGLLLAGTKYRGEFEERLKRIIDEVRSSNNIILVIDEVHTLIGAGAAEGAVDAANILKPALARGELQCIGATTIDEYRKHIERDSALERRFQPVQIDEPSVSDTVQILRCLRPSYERHHGLKISDEALEAAASMGAQYIADRFLPDKAIDLIDEAGSRVRLKAVRMPDAASDLDRELRDIIKEKDTAIADQNFEVAATALDRELELRAQLSAILATVDRIPGPAIKKMVDPVVTEDDIANVVSAWTGIPVNKISKSESEKLLHMEETLHSRIIGQEQAVSAVSRAIRRARVGLRNPNRPIASFLFSGPTGVGKTELTKALALYFFGAEDAMVRLDMSEFMERHTVAKLIGSPPGYVGYSEGGQLTEAVRRKPYTVVLFDEVEKAHPDVFNLLLQILEDGRLTDSKGRTIDFKNTMLILTSNIGAKVIQENDSSSGDIGFGGNLVNGNDSSYDRMASLVNEELKRFFRPEFLNRLDEIIVFRQLTRNDLSQIADIMLKQLCDRAEDKSFTLKVTQRAKLVLINEGFNPTYGARPLRRAIMKLLEDRLATQLLSESIEPGSMILVDSPDQKELVINISKVDIDVDQPVMA

SEQ ID NO: 21710 - protein, 317 aa, Oryza sativa Indica Group
MASATNSSLSLMLLVAAAMASVASAQLSATFYDTSCPNALSTIKSVITAAVNSEARMGASLLRLHFHDCFVQGCDASVLLSGQEQNAGPNVGSLRGFSVIDNAKARVEAICNQTVSCADILAVAARDSVVALGGPSWTVLLGRRDSTTASEALANTDLPAPSSSLAELIGNFSRKGLDATDMVALSGAHTIGQAQCQNFRDRIYNETNIDSAFATQRQANCPRPTGSGDSNLAALDTTTPNAFDNAYYSNLLSNKGLLHSDQVLFNGGSADNTVRNFASNAAAFSSAFTTAMVKMGNISPLTGTQGQIRLSCSKVNS

SEQ ID NO: 21711 - protein, 81 aa, Shewanella oneidensis MR-1
MRIIFLKNLETFMSKTTGVVKWFNEDKGFGFISPDNGGADAFVHFRAIVSDGFKTLAEGQKVSYEVEQGQKGPQAANVVVL

SEQ ID NO: 21712 - protein, 683 aa, Chlamydomonas reinhardtii
MKALRSGTAVARGQAGCVSPAPRPVPMSSQAMIPSTSSPAARAPARSGRRALAVSAKLADGSRRMQSEEVRRAKEVAQAALAKDSPADWVDRYGSEPRKGADILVQALEREGVDSVFAYPGGASMEIHQALTRSDRITNVLCRHEQGEIFAAEGYAKAAGRVGVCIATSGPGATNLVTGLADAMMDSIPLVAITGQVPRRMIGTDAFQETPIVEVTRAITKHNYLVLDIKDLPRVIKEAFYLARTGRPGPVLVDVPKDIQQQLAVPDWEAPMSITGYISRLPPPVEESQVLPVLRALQGAAKPVIYYGGGCLDAQAELREFAARTGIPLASTFMGLGVVPSTDPNHLQMLGMHGTVFANYAVDQADLLVALGVRFDDRVTGKLDAFAARARIVHIDIDAAEISKNKTAHVPVCGDVKQALSHLNRLLAAEPLPADKWAGWRAELAAKRAEFPMRYPQRDDAIVPQHAIQVLGEETQGEAIITTGVGQHQMWAAQWYPYKETRRWISSGGLGSMGFGLPAALGAAVAFDGKNGRPKKTVVDIDGDGSFLMNVQELATIFIEKLDVKVMLLNNQHLGMVVQWEDRFYKANRAHTYLGKRESEWHATQDEEDIYPNFVNMAQAFGVPSRRVIVKEQLRGAIRTMLDTPGPYLLEVMVPHIEHVLPMIPGGASFKDIITEGDGTVKY

SEQ ID NO: 21713 - protein, 469 aa, Solanum tuberosum
MAPEFQKNAMYVSNELENGDVQKNFDDDGREKRTGTLLTASAHIITAVIGSGVLSLAWAIAQLGWVAGPAVLFAFSFITYFTSTLLADCYRSPGPISGKRNYTYMDVVRSHLGGVKVTLCGIAQYANLVGVTIGYTITASISMVAVKRSNCFHKNGHEASCSIESYPYMIIFAVIQIVLSQIPNFHKLSWLSILAAVMSFTYASIGLGLSIAKASGVGHHVKTALTGVVVGVDVSGTEKVWRSFQAIGDIAFAYAYSTVLIEIQDTLKSSPSESKVMKRASLAGVSTTTLFYVLCGTIGYAAFGNNAPGNFLTGFGFYEPFWLIDFANVCIAVHLVGAYQVFCQPLYGFVEGRCSERWPDSKFITSEYAMQVPWCGTYNLNLFRLVWRTTYVIVTAVIAMIFPFFNDFLGLIGAASFYPLTVYFPIEMYIAQRKIPKYSFTWVWLKILSWTCLISITCCSCWIDPGTCH

SEQ ID NO: 21714 - protein, 666 aa, Triticum urartu
MPRTVSDGGEDFDGDVSSQTGSHRHTDSNSTHHHHHHGYKVGFPPAKGLLAEFADGVKQTFFADDPLREYKDQPRSKKLWLSLVHLFPVLDWARSYSFGKFKGDFVAGLTIASLCIPQGHRLCQACLPASTCWTVDSSFVPPLVYAMMGSSRDIAIGPVAVVSLLLGTLLQEEIDPVKNPYEYSRLAFTATFFAGITQAMLGFFRLGFIIEFLSHAAIVGFMAGAAVTIALQQLKGFLGIKKFTKKSDIISVMESVWGNVHHGWNYQTILIGASFLAFLLTTKYIAKKNKKLFWVSAIAPLISVVISTFCVFITHADKQGVAIVKDIKQGINPPSFHLIYWSGPYLAKGFRIGVVAGMVALTEAIAIGRTFAAMKDYQIDGNKEMVALGTMNIVGSMTSCYVATGSFLRSAVNYMAGCKTAVSNVVMAIVVMLTLLLITPLFKYTPNAILASIIINAVVSLVDYETAYLIWKVDKMDFVALLGAFFGVVFASVEYGLLIAVVAISLGKILLQVTRPRTALLGNLPRTTIYRNVEQYPEATKVPGVMIVRVDSAIYFTNSNYVKERILRWLRDEEEQQQEQKLSKTEFLIVELSPVTDIDTSGIHALEELLKALEKRKIQLILANPGPAVIQKLRSAKFTDLIGDDKIFLSVSDAVKKFAPKSALNV

SEQ ID NO: 21715 - protein, 655 aa, Triticum urartu
MPRTILDGGEDFNGNISRTRSHHQTDDHGYKVRFPPAKGLFTELAEGVKETFFPDDPLREYKDQPRSKKLWFGLVHLFPVLDWARSYTFGMFKGDFIAGLTIASLCIPQDIGYAQLAFLPAHVGLYSSFVPPLIYAAMGTSRDIAIGPAAVLSLLLGTLLQEEINPVKNPHEYSRLAFTATFFAGITQAMLGFFRLGFIIEFLSHAAIVGFMAGAAITIGLQQLKGFLGIAKFTKKSDIISVMESVWGNVHHGCNWQTILIGASFLAFLLTTKYIAKKNKKLFWVSAIAPLISVIISTFCVFITRADKQGVAIVKDIKQGINPPSFHLIYWTGPYLVKGFRIGVVAGMVGLTEAIAIGRTFAAMKDYQIDGNKEMLALGTMNIVGSMTSCYVGTGSMSRSAVNYMAGCKTAVSNVVMAIVVMLTLLLITPLFKYTPNAILASIIINAVVSLVDYEAAYLIWKVDKMDFMALLGAFFGVVFASVEYGLLIAVAISLGKILLQVTRPRTALLGNLPRTTIYTNVEQYPEASKVPGVMIVRVDSAIYFTNSNYVKERILRWLRDEEEQQQEQKLSKTEFLIVELSPVTDIDTGGIHALEELLKALEKRKIQLILANPGSAVIQKLQSAKFTKLIGDDKIFLSVGDAVKKFAPKSALNV

SEQ ID NO: 21716 - protein, 541 aa, Shewanella oneidensis MR-1
MESQRNILLIGLLFVSFLLWQQWQADKAPKPVATESSVVANATTNHSADVPEADTGVPAAVAATQNLITVKTDQLDVQINPVGGDIVYAALVSHKLEQGKDQPFVLLEQTKDFTYIAQSGLIGRDGIDSSAKGRAIFAASKTEFTLADGQDSLEVPLTYVAENGVTYTKVFVFHRGKFNVNIDYKINNTSAAPLQVQMYGQIKQTIKPSESSMMMPTYRGAAFSTASVRYEKYNFEDMGKNNLNQPTIGGWAAMLQHYFVSAWIPPATDSNTIFSSVSAGGLANIGFRGAVYDVAPGATQEISSQFYVGPKDQKALSALSDTLNLVVDYGFLWWLAVPIHWLLMFYQSFVGNWGVAIILITLTVRGLLFPLTKAQYTSMAKMRNLQPKLQDLKERFGDDRQKMGQAMMELYKKEKVNPMGGCLPILLQMPIFIALYWVLLESFELRHAPFMLWIHDLSVQDPYYILPLLMGVSMFIMQKMQPIAPTMDPMQVKMMQWMPVIFTVFFLWFPSGLVLYWLVGNIVAIIQQKIIYAGLEKKGLN

SEQ ID NO: 21717 - protein, 387 aa, Shewanella oneidensis MR-1
MKQAVIVDCIRTPMGRSKAGVFRNVRAETLSAELMKGLLLRNPQLDPNTIEDVIWGCVQQTLEQGFNIARNASLLAGIPKTAGAVTVNRLCGSSMEAIHQAARAIMTGMGDTFIIGGVEHMGHVPMNHGVDFHPGLANNVAKASGMMGLTAEMLGKLHGITREQQDAFAVRSHQRAYAATIEGRFAKEIYGIEGHDATGALIKVLQDEVIRPETTMESLAVLRPVFDPVNGTVTAGTSSALSDGASAMLIMEESKARALGLPIRARIRSMAVAGCDAAIMGYGPVPATQKALARAGITVNDLDVIELNEAFAAQSLPCVKDLGLLDVVDEKINLNGGAIALGHPLGCSGARISTTLINLMEHKDATLGLATMCIGLGQGIATVFERV

SEQ ID NO: 21718 - protein, 407 aa, Shewanella oneidensis MR-1
MSIENKNTGVKKVVLAYSGGLDTSAIIPWLKENYDNCEIIAFCADVGQGEEELIGLTEKALASGASECHIVDLKEEFVKDYIYPTMATGAIYEGTYLLGTSMARPIIAKAQVEVARKVGADALCHGCTGKGNDQVRFEGCFAALAPDLKVIAPWREWTMQSREDLLAYLAERNIKTSASATKIYSRDANAFHISHEGGELEDPWNEPSKGVWTLTADPEDAPNQAEYVSLEVENGRVTKVNGEALTPYAALMKLNAIAAPHGVGRIDITENRLVGMKSRGCYETPGGTVMFAALRAIEELVLDKTSRNWREQVGAQMAHLVYDGRWFTPLCKSLLAASESLAESVNGEVVVKLYKGHAIAVKKRSPNSLYSEAFATFGEDQVYDQKHAEGFIRLYSLASRIRALNAK

SEQ ID NO: 21719 - protein, 279 aa, Shewanella oneidensis MR-1
MIKKHRAFLKWAGGKFKLVDELANYLPTGERLVEPFVGAGSVFLNTDYPRYLLCDINQDLINLYNIVKERPVEYIAAAKKLFVDEMNQKEAYYRVRTDFNKSNDPFLRSVYFLYLNRHGFNGLCRYNRKGGFNVPFGSYKKPYFPEKEILAFSKKAQRAEFKCISYEKAFEQIRAGDVIYCDPPYAPLSTTASFTTYVGAGFSLDDQALLARYSRHMALEQRIPVVISNHDIPLTRELYRGAHLAKIQVQRNISQNGSGRNKVDELIALYDETYDPQDD

SEQ ID NO: 21720 - protein, 253 aa, Shewanella oneidensis MR-1
MPKPIIPWMGGKRRLVKEILPLFPEHHTYVEPFCGGAAMFFSKDEARVEVVNDMNGDLVNLYRVIKHHLEEFIRHFKWALISREEFLWQKNTNPETLTDIQRASRFYYLQKLAFGGKVSSQNFGSSASRPAGLNLLRIEEDLSIAHLRLARTYIERLDWAECVRRYDKPETLFYLDPPYWSTAGYGVEFGLEQYALMAELAKTIKGKMVISVNDIPEMREVFAGLQMKTLGIKYTVGGSGRSGEQQELLIWNW

SEQ ID NO: 21721 - protein, 408 aa, Shewanella oneidensis MR-1
MTVSELRFALDTFYFLISGALVMWMAAGFAMLEAGLVRSKNTTEILTKNVVLYAIACVMYLLVGYNIMYVDNAEGGWLPSFGTLIGSQAADANHALESDFFFQVVFVATAMSIVSGAVAERMKLWAFLVFSVVMTGIIYPVEGYWTWGKGFIASLGFVDFAGSGIVHMTGAAAAIAGVLLLGARKGKYGPNGQVNPIPGSNLPMATLGMFILWMGWFGFNGGSQLMVSDAANASAVAKVFVNTNTAAALGAISALIVCKMIWGKADLTMILNGILAGLVAITADPLSPSLLMAGVIGLVAGGLVVFSIVGLDRIKIDDPVGAISVHGVAGFLGLMCVPLSNANATITAQLTGAAIIFAWVFSASFAVWFVLKMTMGIRVSEEEEYNGMDASDCGIDAYPEFVTVKSAG

SEQ ID NO: 21722 - protein, 405 aa, Shewanella oneidensis MR-1
MEMAIGIGMFTLVVCLLVIVILIAKKKLVTTGEITIGINDDAEKSIKVAAGDKLLGALASKNIFIPSACGGGGTCGQCRVKVKSGGGDILPTELGHITKKEAKEGCRLACQVAVKTDMELELEEEIFGVKKWQCEVISNDNKATFIKELLLKLPEGEDVHFKAGGYIQIEAPAHVVKYADFDIPAKYRDDWEKYGLFDLVSTVNEDVLRAYSMANYPDEKGRIMLNVRIATPPSANVPPGKMSSYIFNLKAGDKVTISGPFGEFFVKDTDAEMVFIGGGAGMAPMRSHIFDQLKSKKTKRKMSFWYGARSTREVFYQQDFDTLAAENDNFVWHVALSEPLPEDNWTGYTGFIHNVLYENYLKNHKAPEDCEFYMCGPPIMNSSVIKMLESLGVEPENILLDDFGD

SEQ ID NO: 21723 - protein, 639 aa, Shewanella oneidensis MR-1
MGKIIGIDLGTTNSCVAVLDGGKARVLENAEGDRTTPSIIAYTDDETIVGQPAKRQAVTNPNNTFFAIKRLIGRRFKDDEVQRDVNIMPFKIIAADNGDAWVESRGNKMAPPQVSAEILKKMKKTAEDFLGEEVTEAVITVPAYFNDSQRQATKDAGRIAGLEVKRIINEPTAAALAYGIDKKQGDNIVAVYDLGGGTFDISIIEIDSNDGDQTFEVLATNGDTHLGGEDFDNRLINYLADEFKKEQGLDLRKDPLAMQRLKEAAEKAKIELSSTNQTEVNLPYITADATGPKHLVVKITRAKLESLVEDLIIRTLEPLKVALADADLSVSDINEVILVGGQTRMPKVQEAVTNFFGKEPRKDVNPDEAVAVGAAIQAGVLSGDVKDVLLLDVTPLSLGIETMGSVMTKLIEKNTTIPTKAQQVFSTADDNQSAVTIHVLQGERKQASANKSLGQFNLDGIEPAPRGMPQIEVMFDIDADGILHVSATDKKTGKKQNITIKASSGLSEEEVAQMVRDAEAHAEEDKKFEELVQSRNQADGLVHATKKQVEEAGDALPSEDKAKIEAAMSAVETAVKGNDKEAIEKATQALIEASAKLMEIAQAKAQTQGGAQEGAAKQSNATADDVVDAEFEEVKDDKK

SEQ ID NO: 21724 - protein, 649 aa, Shewanella oneidensis MR-1
MAKNLILWVVIAVVLMSVFQGYSPSSSSSQKMDYSTFLDNVRDGQVATVEVKSDQRTIEGSKRTGEKFTTIMPLYDQDLINDLDRKGITMKGQEAEESGFLTQIFISWFPMLLLIGVWIFFMRQMQGGGGKGAMSFGKSKAKLMSEDQIKTTFADVAGCDEAKEEVKELVDYLRDPTKFQKLGGRIPTGVLMVGPPGTGKTLLAKAIAGESKVPFFTISGSDFVEMFVGVGASRVRDMFEQAKKSAPCIIFIDEIDAVGRQRGAGLGGGHDEREQTLNQMLVEMDGFEGNEGIIVIAATNRPDVLDSALLRPGRFDRQVVVGLPDVRGREQILKVHMRKVPLSEDVKASVIARGTPGFSGADLANLVNEAALFAARGNRRVVGMEEFERAKDKIMMGAERRSMVMSEAEKEMTAYHEAGHAIVGCLVPEHDPVHKVTIIPRGRALGVTFFLPEADAISQSRRKLESQISVAYGGRLAEELIYGTEKVSTGASQDIKYATSIARNMVTQWGFSDKLGPLLYAEEEGEVFLGRSMGKAKAMSDETATLIDTEVKAFIDKNYSRAKQILQDNVDILHSMKDALMKYETIDSLQIDDLMNRREVRQPADWQADENGSNDKGNGKGEPAVKVDEVVKSAPAEAELKDADESPVK

SEQ ID NO: 21725 - protein, 1482 aa, Shewanella oneidensis MR-1
MSLYHPSFERDNCGFGLIAQMDGEASHRIVRTAIHGLDRMKHRGGIASDGRTGDGCGLLMQLPLQFFEAVAAENDWHLSRKFAVGMLFLSQDEELADQAKFILERELERETLSIAGWRKVPVNPDVLGEIGKSSLPQIYQVLINAPIGWREKDLERRLYMARRRLEQQITDDKDFYVASLSGQVIVYKGLMMPADLPAFYPDLADIRLKSSICLFHQRFSTNTSPKWPLAQPFRYLAHNGEINTITGNRQWARARAYKFNSPLLPDLQQAAPFVNETGSDSSSLDNMLEMLLSGGMDLYRAMRLLIPPAWQSNPEMDDELKAFYDFNSMHMEPWDGPAGIVMTNGRHAACAVDRNGLRPSRYVITKDRILTLASEVGIWDYAADEVIEKGRVGPGELLVLDTLNGRLYQSFEIDNDLKRRHPYKEWMAKNSRTLIPAEQLTTEQHGASELSPEQLLQYQKQFGYTREELEQVIWVLAKQGEEATGSMGDDTPMAVLSKKSRSLYDYFRQKFAQVTNPPIDPLREKHVMSLATCIGREQNLFNETTGHAYRVMFNSPILLFSDFNQLLGLDSTYYRANIVDLNYEPKEGLEQAIRRITSEAERLARSGTTLLILSDRAIDKSAQVIPVAMAVGAVQQMLVSKSLRCDTNIIVETASARDPHHFAVLLGFGATAIYPYLVYESISDLAKRHDLTDTTALMLNFRYGIEKGLRKIMSKMGISTIGSYRCSQQFEAIGIASDVIELCFKGVISRIEGASFEDIANDQALLHKAAYRAHVPLPQGGLLKYVDGGEYHCFNPDVVNTLQASLIDKNFATYKKFAELVDNRPIATLRDLIGIKAGQTAIELNNVEAASNLYPRFDSAAMSIGALSPEAHEALAIAMNRLGGRSNSGEGGEDARRFNTERNSAIKQIASARFGVTAHYLVNADVLQIKVAQGAKPGEGGQLPGHKVSVEIAGLRHARPGVTLISPPPHHDIYSIEDLAQLIFDLKQINTKALISVKLVSEPGVGTIATGVAKAYADMITISGYDGGTGASPITSVKYAGSPWELGLAEVHQSLVENGLRHKIRLQVDGGLKTGTDVIKAALLGAESFGFGTVPMIALGCKYLRICHLNNCATGVATQDKKLRDNHYHGLPERVMTYFEFVAEEVREWMATLGVSKFEDLVGRSEWLHTLEGQTDKQRGLDLAPILYQPNVRASTSRTWQETNPPADLGLLNQHLLNECQSAVDKGESFDAAYSINNTDRSVGARLSGYIATTLGVKGSKAPIKLSFNGSAGQSFGVWNSPGLELKLCGDANDYVGKGMSGGKIVIYPPLGSPFQSERSAIVGNTCLYGATGGRFFAAGQAGERFAVRNSGAIAVVEGLGDNGCEYMTSGIVVVLGKTGVNFGAGMTGGFAYVFDQFGRFNRRVNSELVDTQKLESPIQQQHLKGLIEEHVAETGSEHAKMILSDFANWLDCFVLVKPKNIAVADLLKLEQSSPELAVKAG

SEQ ID NO: 21726 - protein, 339 aa, Shewanella oneidensis MR-1
MTKKTDLPAVDAANASNEPSLDELLARMNAASAAAPSVHYDVTYCGMVAIIGRPNVGKSTLLNRLLGQKISITSKKPQTTRHRIMGIHTDGPRQIVFIDTPGLHIEEQRAINRLMNRAAASSLADVSMVIFVVDGMTWTADDEMVLSKLRRGGEERKTVLAINKVDNIKDKEALFPYLEDVAKKYPFDEILPISASKGTNVKRILELAAQSLPENPFFFPEDYVTDRSQRFMASEIVREKLMRFLGDELPYDATVEIEQFKMMENGVYQINALILVEREGQKRMVIGSKGERIRTIATQARLDMETLFDNKVFLEVWVKVKSGWADDERALRSLGYGDD

SEQ ID NO: 21727 - protein, 325 aa, Shewanella oneidensis MR-1
MKFDYKPGQFITFVLEINGEQACRSYTLSSTPSRPYSLMVTIKRVDGGLVSNYLIDHLQPGQTVRVLPPTGQFNLFDIPANKYLFLSAGCGITPMYSMSRYLTDTQINADIAVVHSARTQADIIFKNTLETMAARHASFKLCYLVEGVTTDTVWHTEEAFHYVGRLSAQNLLSLVPDFAERIVFLCGPELYMQAVKTILTELNFDMNKLYHESFATAVKEAQSHVKQAEIQSETPTTSSTGFMLSIGDKKHLLTAEQTLLDGIEAEGLPIIAACRSGVCGACKCKVLQGETESTSYMTLTPTDIEAGYVLACSTRLKSDVTLSLI

SEQ ID NO: 21728 - protein, 396 aa, Shewanella oneidensis MR-1
MSTELLNQEIVIVAAKRTPMGSFQGSLSGITSLSLAATAIKALLADTQVAPDKVDEVLMGCVLPAGLGQAPARQATLGAGLPLSVGATTVNKVCGSGMKTVMLAHDLIKAGSAKVVIAGGMESMSQAPYLLDKARAGIRMGHGKVLDHMFLDGLEDAYTGGAMGTFAQKTADEFGITREQMDAFALSSLEKANAAINSGAFKTEIVPVTVSDRRGDVTIDTDEQPGNARPEKIPTLRPAFAKDGTITAANSSSISDGAAALMLTTRANAEQLGLTVLATIKGHTTHAQEPALFTTAPVGAMAKLLSNVGWSKDEVDLFEINEAFAMVTMLAVSELGLDMTKVNVNGGACALGHPIGCSGARLLVTLIHALKARGLKRGVASLCIGGGEATAMAIEV

SEQ ID NO: 21729 - protein, 556 aa, Shewanella oneidensis MR-1
MSHVDTEVRPSNFIRNIIDEDLKSGKHTNVQTRFPPEPNGYLHIGHAKSICLNFGIARDYQGLCNLRFDDTNPEKEDIDYVNSIQADVRWLGFQWDGEVRYSSNYFDQLHQYAVELINKGLAYVCFLNADETREYRGTLKEPGKNSPYRDTPVEENLRLFGKMRLGEFKEGECALRAKIDMASPFMCMRDPVIYRIRFAHHHQTGDKWCIYPMYDFTHCISDALEHITHSLCTLEFQDNRRLYDWVLDNLDDFQAPNRTRQYEFSRLNLEYTLMSKRKLNDLVTRKLVTGWDDPRMPTIAGLRRRGYTPASIREFCQRIGITKQENMIEAAMLDACIREELNEHAPRAMAVLRPLKVVIENYPEGQIETIQAASHPSDESMGTRELAFGREIFIDVADFREEANKQYKRLVMGKEVRLRNAYVIKAERCDKDSEGNITTVYCSYDADTLGKNPADGRKVKGVIHWVEATTAKPAQFRLYQRLFTDPNPAAAETVDEVLNPNSLEVVNGLVEASLANAPAEKAYQFEREGYFCADNKDSSADHLVFNLTVALRDSFE

SEQ ID NO: 21730 - protein, 363 aa, Shewanella oneidensis MR-1
MNPVFTPNVAQKILFIDRDGTLIEEPVTDKQVDNLAKLVFEPQVIPALLRLQKAGFRLVMVSNQDGLGTPSFPQEDFDAPHNMMMQILSSQGVKFEDVLICPHFNDENCSCRKPKLGLVKDFLTQGFIDFTQSAVIGDRHTDVELGNAMGIISFQYQRGSLGWNAIADALLNKGRSATVVRTTKETDIRVTVDLDNASKGTINTGIGFFDHMLDQIATHGNFKMEVNVDGDLEIDDHHSVEDTALAIGDALRQALGDKRGIARFGFSLPMDEAKGECLLDLSGRPFIKFAAQFEREKVGEMATEMVPHFFRSFADGLRCTLHVAAEGDNDHHKVEALFKVLGRALRQAVKVEGDVLPSSKGVL

SEQ ID NO: 21731 - protein, 195 aa, Shewanella oneidensis MR-1
MDQTEFRLRFTLHPLAKQDPAALPHQGLRKAAVLIPLQEIDGELNLILTQRPMHLRAHPGQISFPGGKIEASDPSAIMAALREAEEEIGLCRENVDVIGTFPAHNTFTGFEITPVVGIIKQDFTLRLDPGEVADCFTVPLSFFIEPRHRHRKEFLRKGRYYSVHFIPYQQRFIWGATAAIIDHLCRHVSLPEEIR

SEQ ID NO: 21732 - protein, 404 aa, Shewanella oneidensis MR-1
MKLPIYLDYAATTPVDPRVAEKMFQYMTMDGIFGNPASRSHRYGWQAEEAVDVARNQVADLINADHREIVFTSGATESNNLAIKGVAHFYKKKGKHIITSKTEHKAVLDTCRQLEREGFEVTYLEPESNGIIPMARLEAAMRDDTILVSIMHVNNEIGVIHDIDAIGELCRSKGIIFHMDAAQSAGKLPIDVQATKVDLISISGHKMYGPKGIGALYVRRKPRIRLEAQMHGGGHERGMRSGTLPTHQIVGLGEASAIAKAEMATDNVRIAKLRDKLWNGIKHIEETYVNGDMNQRTSGSLNVSFNYVEGESLMMALKDLAVSSGSACTSASLEPSYVLRALGLNDEMAHSSIRFSIGRFTTEEEIDHAIEVITQSIDKLREMSPLWEMFKDGIDLNQVQWAHH

SEQ ID NO: 21733 - protein, 572 aa, Shewanella oneidensis MR-1
MEKLSGASMIVRSLIDEGVKHIFGYPGGSVLDIYDALHLIPGIEHILVRHEQAAVHMADGYARATGKVGVVLVTSGPGATNAITGIATAYMDSIPLVVLSGQVPSNLIGNDAFQECDMIGISRPVVKHSFLVQDPTQIPEIIKKAFYIASTGRPGPVVVDLPKDCLNPALLHDYIYPESIKMRSYNPTTSGHKGQIRRGLQALLAAKKPVLYVGGGAIISGSEKQILTLAEKLNIPVISTLMGLGAFPGTHKNSLGMLGMHGRYEANMAMHNCDLIFGIGVRFDDRTTNNIEKYCPNATILHIDIDPSSISKTVRVDIPIVGSADIVLDSILALLDEASETNDFVAINQWWQEITTWRNRQCLAYDKESNRIKPQQVIETLYKLTNGEAYVASDVGQHQMFAALYYPFDKPRRWINSGGLGTMGFGLPAAMGVKMAMPDETVVCVTGDGSIQMNIQELSTALQYDTPVKIINLNNRFLGMVKQWQDMIYSGRHSHSYMDSVPNFAKIAEAYGHVGMTISDPAELESKMAEALAMKDRLVFIDIMVDETEHVYPMLIRGGAMNEMWLSKTEKC

SEQ ID NO: 21734 - protein, 585 aa, Shewanella oneidensis MR-1
MKFPSLVSFMPGLALMLQYEKQWLRDDVRAGLSVAAVALPVAIAYAQLTGVNAAVGLYSCVLPMLVYALFGTSRQLIVGPDAATCAVIAAVVTPLAAGDSMKHWQLVMTMTAMTGFWCLIASRFRLGVLADFLSKPILMGLLNGVAITIIVGQFSKIFGFTFDERYLIERLSGAPSYLTKTHWPTLLMGLVTLLTYALVKRYRPQWPASMCAMAVAAFLVWAFNLTSFNINVVGEVSAGLPSFQAPVFDIGIARELVVPALNLAMVSFVSMMLTARSFAAKNGYDIDADKEFRALGIANIASALSQGFAVSGADSRTAVNDANGGKSQLVSIIAAVLIALVALFFTAPLKYIPSSALGVVLVIASISLIDLKALWNLRVRDRSAFLLACTTLFSVLFIGVIPGITLAVLLGLFQFLATVMRPTDQVLGLDHKGVIRSVDDSGKAKSVPGVFIYRFNSPLTYFNATYFKRRLLEKFIREPDPVDCIIIDAVPCFTHLDLSVMAMLADLHQLLKKRGIRLVLAGRKRQMLGWFEQAGMQSGEGGILIRPDLYLALKMNQSYKQALAEGQAPVIKKAPEDDVLLYSHL

SEQ ID NO: 21735 - protein, 404 aa, Shewanella oneidensis MR-1
MRPIIKSNKLDTVCYDIRGPVHKEARRLEDEGHRILKLNIGNPAPFGFEAPEEIVRDVILNLPSAQGYCESKGLFSARKAIVQHYQAQGIYDVDIEDVYIGNGVSELIMMAMQGLLNTADEILIPSPDYPLWTAAANLAGGKAVHYRCDEEADWFPDLDDIKSKISSRTRGIVLINPNNPTGAVYSKELLLQVVELCREHNLILFADEIYDKILYDEAKHIPAASLSDDILTVTFNGLSKAYRAAGFRIGWMMLSGNLKAAKSYIEGLDMLASMRLCANVPNQHAIQTALGGYQSINELILPSGRLTVQRDTCYELLNQIPGVSVKKPKGALYAFPKLDMKKFNLRDDERLVLDLLRDKKILLVHGTAFNWPEPDHLRVVFLPYKEDLTKALTEFGNFLETYKQ

SEQ ID NO: 21736 - protein, 68 aa, Shewanella oneidensis MR-1
MASGTVKWFNNAKGFGFICPDQGGEDVFAHYSTIEMEGYRTLKAGQPVQFEVEQGPKGMHASAISPTK

SEQ ID NO: 21737 - protein, 554 aa, Shewanella oneidensis MR-1
MCSIFSILDIQSDAKELRQVALEMSKLMRHRGPDWSGIYASDKAILAHERLAIVDIEHGAQPLLTEDGSLILAVNGEIYNHKELKAQLGDKYSYQTNSDCEVILALYQEYGTEFLDKLNGIFAFVLYDKAKDAYLIGRDHMGIIPLYTGRDAAGNLYVASEMKALMPVCKTVEEFQPGQYLYSSDAAAVKYYTRDWQQYDAVKDNGASQEELREALEAAVKRQLMSDVPYGVLLSGGLDSSVISAITQTFAKRRIEDDGETGAWWPQLHSFAVGLKGAPDLIAAKKVADAIGTIHHEINFTFQEGLDAIKEVIYHLETYDVTTIRAATPMYLMARKIKAMGIKMVLSGEGADELFGGYLYFHKAPNAQAFHEELVRKLDKLHLFDCLRANKAMAAWGLEARVPFLDKEFMDVAMRINPEAKMSKDGRIEKHILRQAFEHKLPKEVAWRQKEQFSDGVGYSWIDGLKAHAAEQVDDLQLANAKFRFPYNTPETKEAYFYRCFFEEHYPLPSAAETVPGGKSVACSTPEALAWDESLRGIIDPSGRAVRSVHAASY

SEQ ID NO: 21738 - protein, 291 aa, Shewanella oneidensis MR-1
MAKVAFIGLGVMGYPMARHLLNKGHEVTVYNRTFAKAQTWVDTYGGRCCPTPKEAAIGQDIVFTCVGNDNDLREVVLGDDGVIHGMALGTVLVDHTTASADVARELHKVLGEKGIDFLDAPVSGGQAGAENGVLTVMVGGEQAVFERVKPVIEAFARCAERLGEVGAGQLTKMVNQICIAGVVQGLAEALQFARKAGLDGEKVVEVISKGAAQSWQMENRYKTMWAQNYDFGFAVDWMRKDLGIALEEARRNGSHLPLTALVDQFYSEVQAMGGNRWDTSSLLARFEKNTK

SEQ ID NO: 21739 - protein, 69 aa, Shewanella oneidensis MR-1
MSQVTGVVKWFNSDKGFGFIEQESGPDVFVHFRAINSDGFKTLDEGQKVSFTVTQGQKGPQAENVTVIG

SEQ ID NO: 21740 - protein, 601 aa, Shewanella oneidensis MR-1
MTASPKNEMWTVFKRLMGYLKPMKGMFLLSVVGLIVYGLVDAAFISFIGPFIDKGFSSSAPAISNGIALPTSQGFHADNQVLLMAPIVVILMFSLRGFANFVSTYGISYMSARLIMDMRQQVFEHYLSLPVSYMDKENTGNLISKVTFDTEQIARASGSALISIVRDSVTIIGMLGLMFYNSWKLSLCILVIGPIMGVVITIVSRRFRKVSKQIQTAMGDVSAATEQMIKGHKNVLAFGGQETETARFAKINDRNRHQNMKLAVAQAVSQPLIMVIGSFALAFVLYAASLDSMKADLTAGTFATILGAMMAMLQPIKNLTRVNAEFQRGIAACTTVFELLDTVPESDTGTYTVARAKGNLRFDNVSFSYEGQERRALEKIDFEVSQGQTLALVGRSGSGKSTIASLVTRFYTGLESGDILLDDVSIYDYSLKSLRSQVALVSQQVTLFNDTIANNIAYAYPGEVTREQIIEAATLAHAMEFIEQLPDGLDTQVGENGVLLSGGQRQRIAIARAMLRDAPVLILDEATSALDTESEKAIQQGLDNLRQNRTSVVIAHRLSTIESADQILVVDQGRIVERGTHKSLLELGGMYAKLYQMQFGS

SEQ ID NO: 21741 - protein, 187 aa, Shewanella oneidensis MR-1
MGTVNRAVFLDRDGVINKDHGYVHQVDDFEYIEGVFEACLALKQQGYKLVVVTNQSGIARGMYTEDQFHSLTEWMDWNFADKGVDLDGIYYCPHHNEKGIGEYKVDCDCRKPKPGMLIDAAKFLKIDLSQSVMVGDKTDDMLAAKAAGVPTRILVRTGKAIADESDASVVLDSIADVPAFLKNHKAS

SEQ ID NO: 21742 - protein, 110 aa, Shewanella oneidensis MR-1
METVEKIKQQIGENPIIVYMKGSPKLPSCGFSCQVAQIMINCGEQFAFVDILQHPDIRAELPKYANWPTFPQLWIEGELIGGCDIVVDMYQKGELQPLIKATAEKYKTAE

SEQ ID NO: 21743 - protein, 324 aa, Shewanella oneidensis MR-1
MKDSHSNASQASANGHESVPVSSHFSCYYQAEIYGKSKVVKAPWQSFGLAVFAGAFIALAFVFYLTVTTGAGDSAWGLVRLVGGIAFSLGLILVVICGGELFTSSVLSSVAWAQKQVTTSELLKCWTRVYLGNFVGAMLMVGLIMAAGLYELDGGNWGLNALKVAQHKLHHTWIQAFSLGILCNMLVCLGIWMTFASRESLTKAILLILPVAMFVSSGFEHSIANLFMVPFGITIQAVASPEFFASLGVTQEQFADLTVANFIFKNLIPVTLGNIVGGGVIVGLGYWWIEQGQIALPDPQKSHQPHFFASPLHTEKVKKSQESK

SEQ ID NO: 21744 - protein, 399 aa, Shewanella oneidensis MR-1
MSNKLVLVLNCGSSSLKFAVIDAQTGDDQISGLAECFGLEDSRIKWKINGEKHESSLGAFTAHREAVEFIVNKILAGQPELAAQIQAVGHRIVHGGEKFTRSVIIDEHVIKGIEECSSLAPLHNPAHLIGIRAAMASFPKLPQVAVFDTAFHQSMPERSFIYALPYKLYREHGIRRYGMHGTSHLFVSREAAKVLKKPLAETNVICAHLGNGASVTAVKGGKSVDTSMGLTPLEGLVMGTRCGDIDPSIIYHLVHQLGYTLEEVNNLMNKQSGLLGISELTNDCRGIEEGYADGHKGATLALEIFCYRLAKYIASYTVPLGRLDAVVFTGGIGENSDIIREKVLNMLQIFNFHVDSERNKAARFGKKGIITADNSTVAMVIPTNEEWVIAEDSIKLITK

SEQ ID NO: 21745 - protein, 717 aa, Shewanella oneidensis MR-1
MSRNIMLIPIGTGVGLTSLSLGMVRALERHGVKVQFFKPISQLRPNDNGPERSTTILSKSPTVNPLEPFDMAHAEALIRADQTDVLMEQIIARAAECASNTETLIVEGLVPTRNHPFADDVNYAIAKAMDADVIFIATPGSDTPTGLMNRLEIAYNSWGGKNNKRLIGAVINKIGAPVDDEGRARPDLSEVFDHQGVQRSDASIMFQLPGKSPLRILGSVPYNLDLVAPRASDLAKHLRARILNAGEMNIRRLRKVTFCARSLPNMVNHIKTDSLLVTSGDRSDVIVSACLAAMNGVKIGALLLTGSYEPEPEILKLCEQAFETGLPVFLIDTNTWQTSLNIQRFDHEVPVDDAVRIDLVQEYVASHIDQTWIESVTKNSPREHRLSPPAFRYKLTELARAAHKTVVLPEGDEPRTIKAAAICAERGIARCVLLGKKDEILRIAAQQDVVLGEGVVIVDPDEVRARYVEPMLELRRSKGLTEVVAKEQLEDNMVLGTMMLAQDEVDGIVSGAVNTTANTIRPPLQLIKTAPGSSLVSSIFFMLMPDQVLVYGDCAINPDPNAEQLADIAIQSAESAKAFGIEPRVAMISYSTGNSGTGSDVDKVREATRIAKEKRPDLVIDGPLQYDAAVMPNVARSKAPNSPVAGQATVFVFPDLNTGNTTYKAVQRSADLISIGPMLQGMRKPVNDLSRGALVDDIVYTIALTAIQASQNDAKKS

SEQ ID NO: 21746 - protein, 407 aa, Shewanella oneidensis MR-1
MHTTYTIGELESFLIAIFVLFIGHSINRHVRVFKQYNIPEPIVGGLVVAAVIAFLHFQDITLAFSLPMQNTLMLMFFSTIGLSANYKLLLSGGKKVFIFLGVASVYIIIQNAVGVSLASLLGLDPILGLIAGSITLSGGHGTGVAWSQTFAENYGINTLEFAMAAATFGLVMGGIIGGPVAQRLISKHNLVSSYGVGRKHHATHPQLVTYDQLEEDQVTAKTIIETLFVLLFCVAGAKWFTVLVSEYGLNWLKMPDFVYALFLGVVIANITEVTRGYKPHTESIDVIGTVALSLFLSMALMNLKLWEILDLAIPLLIILVVQTAVLAVFAYFVTFKVMGSNYDAAVITGGHCGFGMGATPTAVMNMGALVSRTGPSPQAFMVVPIVGAFFIDIVNLIVLQGYLSFIM

SEQ ID NO: 21747 - protein, 643 aa, Shewanella oneidensis MR-1
MCGFAGFFNTSNLTDHARILECMGLELFNRGPDSFGIWFNSDDRIGLVHRRLAIVDLSAAGHQPMTSDSGRYIISYNGEIYNHQELRDELESIRQYNWRGHSDTETLLAAIEQWGLKITLQKATGMFGIALWDTLNKELYLARDRFGEKPVYYGLHKDAFIFASQLNAFRAYPDFKPEINRDSITLLLRHNYIPAPYSIYSDIHKLLPATILKLDSNNNISLETYWSAKDIMSNASSTETDLPVGKQVEALENTLKKAVALQMSADVPLGAFLSGGVDSSLIVSLMQAQSNKPVKTFSIGFDDPRFNEAVFAKEVAKHLGTEHTELYLTAEDALEVIPKLAEIYDEPFSDSSQIPTFLVSKIARQYVTVSLSGDAGDELFCGYNRYLMTSKVWKRLSVLPVFLRSFLANVFTFVPVNVWNLFGKLLPSRLQLSNLGDKLHKAAAVLACRDVEQLYLGLVSHWQNPEQVVLGSKEPLTVLTDPKRKANFSDPILQMMAQDTLSYLTDDILVKVDRAAMAVSLETRVPFLDHSVLEHAWRLSLDLKLRDGKTKWCLREILYKYVPKDLIERPKMGFAVPLDAWLRGPLKVWADNLLAAERLRQEGFFDAELIDRMWQEHKSGKRNWQYQLWDILMFQSWYEKYHK

SEQ ID NO: 21748 - protein, 446 aa, Shewanella oneidensis MR-1
MSEAKLLLVEDDASLREALLDTLMLAQYDCIDVASGEEAILALKQHQFDLVISDVQMPGIGGLGLLNYLQQHHPKLPVLLMTAYATIGSAVSAIKLGAVDYLAKPFAPEVLLNQVSRYLPLKQNRDQPVVADEKSLSLLSLAQRVAASDASVMILGPSGSGKEVLARYIHQHSSRAEEAFVAINCAAIPENMLEATLFGYEKGAFTGAYQACPGKFEQAQGGTLLLDEISEMDLGLQAKLLRVLQEREVERLGGRKTIKLDVRVLATSNRDLKAVVAAGQFREDLYYRINVFPLTWPALNQRPADILPLARHLLTKHAKALNVVDLPEFDDAACRRLLSHRWPGNVRELDNVVQRALILRAGALITANDIIIDAQDVPLTSDDAEYMSEPEGLGEELKAQEHVIILETLVQCQGSRKLVAEKLGISARTLRYKMARMRDMGIQLPS

SEQ ID NO: 21749 - protein, 857 aa, Shewanella oneidensis MR-1
MRLDRMTNKFQLAISDAQSLALGRDHQFIEPLHLMMALLNQDSGSIHPLLTQAGIRVSALRSLLSQELERLPQVEGTGGDVQLSQGLIRLLNLCDKLAQKRKDKYISSELFVLAALEGCDALAQCLKKSGATKELMEQTIEQVRGGQKVDDPNAEDQRQALKKFTVDLTERAEQGKLDPVIGRDDEIRRTIQVLQRRTKNNPVLIGEPGVGKTAIVEGLAQRIVNGEVPEGIKNKRVLSLDMGALIAGAKYRGEFEERLKAVLNELAQEEGQVILFIDELHTMVGAGKGDGAMDAGNMLKPALARGDLHCVGATTLDEYRQYIEKDAALERRFQKVLVDEPSVEDTIAILRGLKERYELHHHVEITDPAIVAAATMSHRYVSDRKLPDKAIDLIDEAASSIRMQMDSKPESLDRLERRAIQLKLEEQALAKENDEASRRRLDHLQEELRDVEAKASELSEIWRTEKAALAGTQHIKADLEQARLDLEVARRAGDLTRMSELQYGRIPELEKQLDLASQAEMQDMTLLRNKVTDLEIAEVLSKATGIPVSKMLEGEREKLLQMEVALHERVIGQNEAVDAVANAIRRSRAGLADPNRPIGSFLFLGPTGVGKTELCKSLARFLFDSESALVRIDMSEFMEKHAVSRLVGAPPGYVGYEEGGYLTEAVRRKPYSVILLDEVEKAHPDVFNILLQVLDDGRLTDGQGRTVDFRNTVIIMTSNLGSDIIQEGFGHLSYSEMKSAVMNVVTHSFRPEFLNRIDESVVFHPLDAENIKHIASIQIASLRKRLAEKDYTLEITDEALSLIAEIGFDPVYGARPLKRALQQEMENPLAQKLLRGDLLPGKPIKVSCVDGELVFEQ

SEQ ID NO: 21750 - protein, 318 aa, Shewanella oneidensis MR-1
MKIVVLDGETLNPGDLSWQAISDLGKFSCFARTPDAEIIPRAQDAEIVFTNKTPLDAKTLAQLPKLKYVGVLATGTNVVDIAAAKDLGIVVTNVPAYGHDAVAQMVFAHILHHTQAVAAHHQAVAAGQWTSCSDFCFTLMPLQSLKGKTLGLIGYGDIGQQVAKLALAFGMKVLVNTRTEPAHLPQGVSWTSRDKVLKESDILSLHCPLTPETNELINAQTLELMKPQALLINTARGGLIDEAALAVALTQGRVFAGVDVLSTEPPSMDNPLLSAPNISTSPHNAWATKEARQNLLNIATENLKSFLQGNIRNCVNSK

SEQ ID NO: 21751 - protein, 388 aa, Shewanella oneidensis MR-1
MKFVDEAVIRVEAGDGGSGCVSFRREKYIPDGGPDGGDGGDGGSVYLEADENFNTLIEYRFERFHMAERGENGRGRDCTGHSGKDLILKVPVGTRAIDHDTEEVLGDLTTHGQKLLVAKGGFHGLGNTRFKSSTNRAPRQKTLGTPGEVRSLKLELLLLADVGLLGMPNAGKSTFIRAVSRATPKVADYPFTTLVPNLGVVNPRPGQSYVIADIPGLIEGAAEGAGLGIRFLKHLERCRILLHIIDIEPIDGTDPVDSARAIVGELEKYSPKLASKPRWLVFNKADLLLEDELKEKAERVVKELGWEGEVYTISAYGRDGTKELAAKLWDFIQSLPPEDKDANPEDEVEFKWDNYHQANIDAINEDYDDDFDDDFDDDDYDVEVIYQR

SEQ ID NO: 21752 - protein, 595 aa, Shewanella oneidensis MR-1
MSQQSSYASVSQRAVLPWIWQFLKPYRPRVVAAIVFLLIGSLAWLSLGQGVRLMVDEGFIKDNAQRLNEIILFVLVITAVSGTAVFCRFYLMTWLGERVSADIRLAVYNQLLKLSPAFYAKVRTGEVISRFTADSTLLQTVVGSSLSMALRSGVTVIGGLAMMGITSVKMTLLVLLAVPLVLGPVSFFGRKVRTLARESQDRVADLGAYVDETLHEIHTVQAYGHEDKDRSLFNGRVEDVMTAASGRIRYRALLISSVMFLSIAAIALVTWVGAHDVMSGKMTGGELSAFMFYAVMVAGAVATISEVVGEIQRASGAAERLIELAETEVDIPAPLVPKTLPTKVRGELQLHQLNFHYPEQTQLVLSDLNLVINAGERVALVGPSGAGKSTLFQLLQRFYVPSSGSILLDGIDIAALSPQDLRAQFALVPQDSVIFATSVLENVRYGRVDASEQEVIDACIAARAHEFISEFSEGYQTYLGERGVRLSGGQKQRIAIARAILADRPILLLDEATSALDALSEQKVKQALDELMAGKTTLIIAHRLATVINADRIIVFDKGRIVASGKHQDLIKTNALYREFATLQLLTDEAMPLSD

SEQ ID NO: 21753 - protein, 508 aa, Shewanella oneidensis MR-1
MQIGIPRESLVGETRVAATPATVEQLKKLGFEVVVEANAGLLSSFDDAAFEAAGAKITTEVWQADLIFKVNAPTDAEIALIKEGATLISFIWPAQNAELVEKLSKRNINVMAMDMVPRISRAQSLDALSSMANIGGYRAVVEAAHHFGRFFTGQITAAGKVPPAKVLVIGAGVAGLAAIGTAGSLGAIVRAFDTRLEVAEQIESMGGQFLKLDFTNEDGSSSDGYAKTMSDEFIAAEMALFAEQAKEVDIIITTALIPGRPAPKLITKAMVDSMKSGSVIVDMAAQAGGNCEYTQPGELFVTDNGVKVIGFTDLPGRLPAQSSQLYGTNLVNLMKLMCKEKDGTASINFDDVVMRNMTVVKEGQVTFPPPPISVSAAPVKPTVKIEAKAAQAKAPSKLKYILAALGAAGFAAVASVAPAEFLSHFTVFILSCVVGYYVVWNVSHSLHTPLMSVTNAISGIIVVGALLQIGQGSTLVTVLAFIAVLIASINIFGGFTVTQRMLKMFRKD

SEQ ID NO: 21754 - protein, 315 aa, Shewanella oneidensis MR-1
MPDIKLFAGNATPSLAKKIADRLFCKLGDAVVGRFSDGEISVQINENVRGADVFIIQSTCAPTNDNLMELIVMVDALRRASAGRITAVIPYFGYARQDRRVRSARVPITAKVVADFLSSVGVDRVLTCDLHAEQIQGFFDVPVDNVFGSPVLLEDMLAKKLDNPVVVSPDIGGVVRARAVAKLLDDSDLAIIDKRRPQANVAQVMHIIGDVQGRDCIIVDDMIDTGGTLCKAAEALKEHGANRVFAYATHPVFSGKAAENITNSVIDEVIVTDTVPLSPEMLKVAKVTQLTMSAVLAEAIRRVSNEESISAMFSH

SEQ ID NO: 21755 - protein, 325 aa, Shewanella oneidensis MR-1
MVDQSQLRQWGCKVIDIEKSALDNLYQYVDSAEFAQACELILNCSGKVIVMGMGKSGHIGNKISATLASTGTPAFFVHPGEASHGDLGVLSDNDIILAISNSGESSEILALMPVIQRKAIPVIAMTGKPESTMARLAKIHLCIEVPEEACPLGLAPTSSTTATLVMGDAMAIALLQAKGFTRDDFAMSHPGGALGRKLLLKVSNVMHCGDDLPLVKHDICITDALYEISKKGLGMTAIIDEQNKLVGIFTDGDLRRVIDAQVNLRTTPIADVMTRNCVTITENVLAAQALQVMDSRNINGLIVIDKENHPVGALNMLDMVKAGVI

SEQ ID NO: 21756 - protein, 451 aa, Shewanella oneidensis MR-1
MSLVVAKFGGTSVADYGAMNRCAEIVLGNPDCRLVVVSASSGVTNLLVELTQESINDDGRLQRLKQIAQIQYAILDKLGRPNDVAAALDKLLSRMAVLSEALVSARSKATMDELLSLGEQCSSALFAAVLREKGANSSAFDVRRVLRTDSHFGRAEPQVEQIALLSREHLLPLLSEQVIVTQGFIGADEAGQTTTLGRGGSDYSAALLAEALTASAVEIWTDVAGIYTTDPRLAPNAHPIAEISFNEAAEMATFGAKVLHPATILPAVRQQIQVFVGSSKEPEKGGTWIRHQVEDAPVFRAVALRRDQTLLNLHSLQMLHAQGFLAETFATLARHKISVDLITTSEVNVSLTLDKTGSDSSGQGLLSEALLQELSQHCRVRVEDGLALVAIIGNRIATTAGICRRVFEVLEPHNVRMICQGASPHNLCVLVAESEAAQVVKALHENLFEGA

SEQ ID NO: 21757 - protein, 623 aa, Shewanella oneidensis MR-1
MSSDERTFRELGLSENLLRALDELGYEKPTPIQSASIDPLMAGKDILGQAQTGTGKTGAFALPLLNKVTSQTTPQILVLAPTRELAVQVAEAFSSYAKFMKNFHVLPIYGGQSMQQQLNALKRGPQVIVGTPGRVMDHMRRGTLKLETLQALVLDEADEMLKMGFIDDIEWILEHTPPQRQLALFSATMPEQIKRVANKHLKNATNISIAASHTTVDSIEQRFVQVSQHNKLEALVRVLEVENTEGIIIFVRTRNSCVELAEKLEARGYASSPLHGDMNQQARERAVEQLKNGKLDILIATDVAARGLDVERIGHVVNYDIPYDTEAYVHRIGRTGRAGRTGMAILFVTSREMRMLRTIERATNSRISPMKVPSPETVAERRLSRLGEQLAQTMNNDLEFMREAVAQLCQQLEVDTDLLAAALLHQVQQERPLQLPAIQERVRDERSERSERGSDRGAERGERRSRESRPMPASLGSAEALKDNPDLKMCRYVIDVGRENGVGVGNIVGAIANEANIDSRYIGAIQLYDSVTTVDLPDGMPKDVLQHLKKVRVCGKPLNIREAGDQVFVDSGRGARSDRRPRSDRPAGDRKPRAASGDKPFADRKPRSDKPAGERRPRKPREE

SEQ ID NO: 21758 - protein, 797 aa, Shewanella oneidensis MR-1
MARCHLHKFGGSSLADADCYRRVAHILLTHGHSDDLVVVSAAGKTTNFLYKLLSLRDSNQLWQEELQVLISYQQGLIEQLLSNEQARDLRERLTTDKAQLISLLSLDVRNDYQISHVVSFGERWSARLMAALLRESGVAASHVDACSILVADEAAVPQIRVQESRAKVQALLAAHPNERLVITGFICANERGDTLLLGRNGSDFSASLIASLADIERVTIWTDVEGVFNADPNKINDAKLLKSMSLAEADRLARLGSPVLHSRTLQPLFNTEVSLAVRSSYASHTDFTLIAPHSSSASAPVVTNLNAVVLFGFKIAGDVASLLDQLVEAGLTPLAHWVSAHQRLELAYTAENQKQVQKLLDAQAEALGIRDLQINTELGLVALVSADAEHYRRSFARLLSRDAKPLFSGDLSLVTLVPQSQVNLLTQKVHRRCAGPRKRIGVLLLGVGNIGEAWVKLFKSVSPSLNQELEAQVELVGLVTSSKALIKSKGVDLQSWQQEFDNEATPWQYEHLFEQLEQLNCDELIALDISASASLTLQYPEFFERGIHMVSANKLAGSGPLPFYRELKEQLGYRRLFWRYNASCGAGLPIQHALNDLRNSGDSVEAVGGIFSGTLCWLFEKYDTSKPFSELVIEARGLGITEPDPRDDLSGRDMQRKLLILAREIGLEIELEDIELRSLVPAHLADIPLEQFLARIGELDDELLQQYGAAAEQNKVLRYVASLDNSGAVLKAEVGLQWIDASHPYANLTPGDNVFVIRSAFYQGNPLIIRGPGAGREVTAAAVQSDLTQICRDLLQE

SEQ ID NO: 21759 - protein, 241 aa, Shewanella oneidensis MR-1
MGQETSKILVVDDDMRLRALLERYLMEQGYQVRSAANAEQMDRLLERENFHLIVLDLMLPGEDGLSICRRLRQQGSTIPIVMLTAKGDEVDRIIGLELGADDYLPKPFNPRELLARIKAVMRRQTQDVPGAPAQQEAEIRFGEFSLDLATREMYHGDEAIVLTSGEFAVLKVLVTHPREPLSRDKLMNLARGRDYSALERSIDVQVSRLRRLIEKDPANPRYIQTVWGLGYVFVPDGAARR

SEQ ID NO: 21760 - protein, 436 aa, Streptococcus mutans UA159
MSMFLDTAKVSVKAGRGGDGMVAFRREKYVANGGPWGGDGGRGGDVIFVVNEGLRTLMDFRYNRHFKAKAGEKGMTKGMHGRGAENLYVSVPQGTTVRDAQTGKVIADLVKNGQEFIVAHGGRGGRGNIRFATPRNPAPEISENGEPGEERELALELKILADVGLVGFPSVGKSTLLSVITAAKPKIGAYHFTTIVPNLGMVRTKSGDSFAVADLPGLIEGASQGVGLGTQFLRHIERTRVILHVIDMSASEGRDPYEDYLAINKELETYNLRLLERPQIIVANKMDMPQAAENLEQFKEKLDANYGEFDDKPQIFPISGIAHQGLDALLDATAQLLAQTDDFLLYDESDMQEEAYYGFEEEEKAFDISRADDAAWVLSGEKLEKLFVMTNMERDEAIMKFSRQLRGMGVDQALRERGAKDGDIVRIGKFEFEFVD

SEQ ID NO: 21761 - protein, 471 aa, Streptococcus mutans UA159
MMTIFRKKNTNLDKTEMKRHFKVIDLIFLGLGSMVGTGIFTITGIGAAKYAGPALIISIIVSAIAVGISALFYAEFTSRIPANGGAYSYLYATLGEFPAWLAGWYIIMEFLTAISSVASGWGSYFKGLLSSYGIELPSLLNGTFNPAKNNYIDLLPALVIFLVTGIVLLNSKIALRFNSSLVVMKFSALALFIIIGLFYIKPENWSNFAPFGFGKIYGGQTGIMAGASLMFFAFLGFESISMAVDEVQKPQKNIPKGIIASLTIVTILYVSVTLVLTGIVHYSKLNVADAVAFALRQAGLVWAANYISVVAILTLITVCISMTFALARTVYSISRDGLLPKQLGIVTKHSKVPKNATLLVGFASMICAGVFPLSSIAEFLNICTLAYLIMLAIAIIKLRKDQGQPKIGEFKTPFIPFLPIVSIVICLSLMSQYKSVTWIAFGISTSIGFLIYFAYGYRHSTIFIKNNPKIR

SEQ ID NO: 21762 - protein, 322 aa, Streptococcus mutans UA159
MSYSNLKLFALSSNKELAEKVAKTIGISLGKSTVRQFSDGEIQVNIEESIRGNHVFILQSTSSPVNDNLMEILIMVDALKRASAETVSVVMPYYGYARQDRKARSREPITSKLVANMLAVAGVDRLLTVDLHAAQIQGFFDIPVDHLMGAPLIADYFVRRGMCGSDYVVVSPDHGGVTRARKLAQFLQTPIAIIDKRRNVNKMNTSEVMNIIGNVSGKTCILIDDMIDTAGTIAHAADALAEAGATAVYASCTHPVLSGSALDNIQNSAIEKLVVLDTIDLPEEKLIDKIEQISITDLISEAIIRIHEKRPLSPLFEFTTFN

SEQ ID NO: 21763 - protein, 391 aa, Streptococcus mutans UA159
MDLSKRFNKNLNKIEVSMIRQFDQSISDIPDVLKLTLGEPDFATPKHIKEAAKRAIDADESHYTGMAGLLALRQAASAFVKEKYHLTYNPDNEILVTIGATEALSASLTAILEPGDKVLLPAPAYPGYEPVVNLVGAEVVEIDTRSNDFVLTPEMLEEAILKEGEALKAVILNYPTNPTGVTYSRQQIKNLAEVLKKYPIFVISDEVYAELTYTGESHVSIAEYLPDQTILISGLSKSHAMTGWRLGLIFAPAVLTAQLIKSHQYLVTAATTSVQFAAIEALTNGKDDALPMKEEYIKRRDYIIEKMEAMKFKIIKPDGAFYIFAKIPVAQGQDSFKFLQDFAKEKAVAFIPGVAFGKYGEGYLRISYAASMETIKEAMKRLKEFMEQYAD

SEQ ID NO: 21764 - protein, 567 aa, Streptococcus mutans UA159
MEKIYLENPKSGSEILLDTLANLGVKTIFGYPGGAVLPLYDAIYKQDNIRHILARHEQGAVHEAEGFAKSTGKLGVAIVTSGPGATNAITGIADAMSDSVPMLVFTGQVATPGIGKDAFQEADIIGITMPITKYNYQIRETADIPRIVTEAVHIATTGRPGPVVIDLPKDVSEKRVSSFNETTIKIPGYQPTIEPNNLQVKKILSQLKKAKKPLILAGGGVNYAGASAELIAFAERYKIPVVSTLLSLGVMPIEHPLSLGMGGMHGSYASNMALTECDFLINFGSRFADRLTGNPKTFAQKAVVAHVDIDPAEIGKVVKTAIPVVGDAKKTLKQLLESDKVSTRHREWTDKVLQDKAKAPFSYKFDQEVIKPQHAIETIGKLTKGDAIIITDVGQHQMWAAQFYPYKNERQIITSGGLGTMGFGIPAAVGAKLANPGKEVVLFVGDGGFQMTNQELAILNGYGVPIKLVLINNHSLGMVRQWQESFYDERRSESTFDDEPNFQLLAESYGISHYKLDNPLTLEKDLEVILENKPMLIEVDISNREHVYPMVPSGKSNAEMLGVTFNA

SEQ ID NO: 21765 - protein, 256 aa, Streptococcus mutans UA159
MSVLEIKDLHVSIEDKEILKGVNLTLKTGEIAAIMGPNGTGKSTLSAAIMGNPIFEVTQGEILLDGENILEMEVDERARLGLFLAMQYPSEIPGITNAEFIRAAMNAGKKDDEKISVRDFIMKLDEKMELLGMKEEMAERYLNEGFSGGEKKRNEILQLLMLEPKFALLDEIDSGLDIDALKVVSKGVNAMRGEGFGAMIITHYQRLLNYITPDIVHVMMDGRVVLSGGPELAARLEKEGYAQIAEELGLEYSEEV

SEQ ID NO: 21766 - protein, 396 aa, Streptococcus mutans UA159
MSKEKVILAYSGGLDTSVAITWLKKDYDVVAVCMDVGEGKDLEFIHDKALKVGAIESYVLDIKDEFAEEYVLPALQAHAYYEQKYPLVSALSRPVISKKLVEIAHQTGATTIAHGCTGKGNDQVRFEVAIAALDPKLKVIAPVREWKWSREEEINYAKENGVPVPADLDNPYSVDQNLWGRANECGVLENPWNQAPEEAFGITNSVEEAPDKAEYVDITFKEGKPVALDGQEMKLADLIQKLNVLAGKHGVGRIDHVENRLVGIKSREIYECPGAVTLLTAHKEIEDITLVREVSHFKPILENELSNLIYNALWFNPATQAILAYITETQKEVNGTAKVKLYKGSARVVARKSPHSLYDENLATYTSADSFDQDAAVGFIKLWGLPTQVNSQVNNK

SEQ ID NO: 21767 - protein, 271 aa, Streptococcus mutans UA159
MKKKYRIIGLAVAALLFLSACGRSQVTSHSSDAWEKFVYFFAETIRFLSINGRIGIGIILFTFLIRTILLPLFNLQLKSGQKMQELQPELKALQTKYPGKDRESRMRMAEESQELYKKYGVNPYASLFPLLIQMPVLWALYQALTRVEFLKTGSFLWMDIGNKDPYFILPVLAAIFTFLSSWLTNKAAKERNGMMITMNIILPIFILLIGFNLASGVALYWVVSNAYQVFQILLLNNPFKIIAERQRLEDEARELEAKKRRAKKKAHKKRK

SEQ ID NO: 21768 - protein, 1505 aa, Streptococcus mutans UA159
MREVIKKAKQTTLWDPSFETDACGMGFVAQIDGIASHQLVDYALTMLERMNHRGGTGAEPDTGDGAGMLLAMPDEFFRLKAKEEEIDLPPLGDYAVAQLFLPQDKVAKTILEDSLISEIKRLGFHVLLSRDVPFNYDNCGPAAQEIMPSFVQLFIEKPTETNSGCAFEDSLFRLRRKLEKTFAADELFICSLSSKTIVYKGMLHAFQVRLFYPDLSDEMFKSHIALTHSRFSTNTFPSWDRAQPFRFLAHNGEINTLRGAENWMHSHQIEVYNEENSDSAKLENCLEYLYRHGRDIPQSLLMMVPEAWGKDAGLSKELTAFYEYASSFVAPWDGPAALVFTDGEMVGARLDRNGLRPSRYSRTKDNFLICSSESGVVDIAPSQVVEKGVLGPGNMMLIDTKKNLVLKNDEVKEHYSKQHPYQQWVQENVTLLDDFAAQEEIVNDYDVNQMWKIFGYTDETIRTVILPMSEKGEEPVISMGFDSPLAVLSKKPQSLFTYFKQQFAQVTNPPIDAIREQLVVSTTVFLGGDGDIRQDNADNCVKVRVDSPVLSSQDFAKLANLTDERYKATTLSTVYDLGDSDNNRLQYALEDLFKKADEAINQGSKIIILSDRGVTKGRIAIPILLAVSGLNNYMVVKGKASQFSIVVDTAEAFEVHHFATLVGFGATAIHPYGAYATLKAFDKTNDSFEKYRKAAEKGIVKVMSRMGISTVLGYKGAQLFEAIGLSADVVNQYFRGTATRIEGLSLKQIEKEYLERVDFAFGPRANDFLPSGGSYQYKTDGEYHLFNPRSIYNFQQSIRRGDYGLFKQYSTELDNEALKQPTTLRSLWEFHSKRPKVDLAEVEPAKEIVKRFKVGAMSFGSLSKEAHETIAQAMNTIGAKSNSGEGGENRKRFKPQVDGRNINSKIKQVASGRFGVNAEYLMSAEELQIKLAQGAKPGEGGQLPGQKVFPWIAEIRGATPGVRLISPPPHHDIYSIEDLAQLIYDLKAINPYAKINVKLVSSTGVGTIATGCVKAGADKVVISGYDGGTGASPRNSVRDAGLPWEMGLAEAHQTLSMNRLRQRMTLETDGKLMTGRDIAIATLLGAEEYSFASLALISVGCVMMRVCSLNTCPVGVATQNPELRKNFSGKPEHVINMMTFLAEELREYMAELGFRSVDEMVGHAEVLKSRFVAQGKAKSLNFSRVIGNSFPIDRKNEDPFAEERQWKELDGFAAAAIEKGISVTIENTINNVDRSVGSRMAGWMAERYGNDAVKEGLIKYHYTGIAGQSFASYLTQGLEYTLIGEANDYIAKSMSGGRLIVKPPHDAAYDVENSPIVGNVSLFGAVKGEAYFAGRAGERFCVRNSGAKVVVEGVGAHGCEYMTGGVAVILGTTGRNFAAGMSGGVAYVYDVHGDFAQKVNMEMVDLYQIGETRGDDILKDMIEKHYEYTESVKAKRLLDNWDEEVKRFIKVYPSDFHEINDIEYALSQKGMSGDELELRTFEVATGGDATAQERQALLASVTGGK

SEQ ID NO: 21769 - protein, 222 aa, Streptococcus mutans UA159
MEFMLDTLNLADIEKWAAILPLAGVTSNPSIAKKEGKIDFFEQVKRVRAIIGEEPSIHAQVVAADVEGIIKDAHKLQDELGGNLYVKVPVSPTGLTAMKQLKEEGFQITATAIYTVFQGLLAIEAGADYLAPYYNRMENLNIDPIEVIGQLAQAIECQQASAKILAASFKNVTQVAKALAAGAKAVTAGADIFAAGFANPSIQKAVDDFAADWESTQGRPYI

SEQ ID NO: 21770 - protein, 364 aa, Streptococcus mutans UA159
MMKIFASPSRYIQGEKALFENAKAIINLGSHPILLTDNVVYDIVGKRFETYLNQEGLIVDRIAFNGEASINEIDRVVAIAKEKGNDLIIGLGGGKTIDSAKAIADLLEIPVIIAPTVASTDAPTSALSVIYTDQGAFEKYIFYSKNPDLVLVDTEVISKSPVILLASGIADGLATWVEARAVLQKNGQTMTGAGQTLASLAIAQACERTLFADGLQALAACEAKVVTRALENVIEANTLLSGLGFESAGLAAAHAIHNGFTALTGDIHHLTHGQKVTYGTLTQLFLENRPKEEIDKYIHFYRAIGMPTTLEEMHLGDADYSELLKIGQQATIEGETIHQMPFEIKAGDVANALLAVDQYTRSLK

SEQ ID NO: 21771 - protein, 285 aa, Streptococcus mutans UA159
MSEQIKLANTTLQPFTKWTGGKRQLLPILRSYMPEKYNCYFEPFIGGGALFFDLVPEKAVINDFNEELMNTYRQIKNNPTALIELLTEHKEKNSKEYYLKVRAADRNETITRMSDVERAARLMYMLRVDFNGLYRVNSKNQFNVPYGKYKNPKIIDRELIYQISDYLNENDIQILNTNFEEAVSNAKKGDFVYFDPPYIPLNETSSFTSYTHEGFTYEEQLRLRNVFEQLNRKGIYVMLSNSSSPLALDLYQDYNIHFVDAVRTNGAKTESRKKIKEIIVTNYDE

SEQ ID NO: 21772 - protein, 753 aa, Streptococcus mutans UA159
MLCQNCKLNEATIHLYANVNGQQKQIDLCQNCYQIMKTDPENGPLNHLSQQNSSSINPFFDDFFGDLNNFRAFNNQDLPNTPPTQAGGGNGNGGNNRRPGGPQQQASQKPNGLLEEFGINLTDIARKGEIDPVIGRDEEITRVIEILNRRTKNNPVLIGEPGVGKTAVVEGLAQKIVDGDVPQKLHGKNVIRLDVVSLVQGTGIRGQFEERMQKLMEEIRQRQDVILFIDEIHEIVGAGSAGDGNMDAGNILKPALARGELQLVGATTLNEYRIIEKDAALERRMQPVKVDEPSVAETITILKGIQPKYEDYHHVKYTDEAIEAAANLSNRYIQDRFLPDKAIDLLDEAGSKMNLTLNFVDPKEIDHRLIEAENLKAQATRDEDYEKAAYFRDQIAKYKEMQSAKLDKENTPVITEKNIEVIVEQKTNIPVGELKEKEQSQLIHLADDLKTRVIGQDAAVDKIAKAIRRNRVGLGTPNRPIGSFLFVGPTGVGKTELSKQLAIELFGSEDSMIRFDMSEYMEKHAVAKLVGAPPGYVGYEEAGQLTEKVRRNPYSLILLDEVEKAHPDVMHMFLQVLDDGRLTDGQGRTVSFKDTIIIMTSNAGTGKSEANVGFGASREGRTNSVLGELGNFFSPEFMNRFDGIIEFQALSKDNLLQIVSLMLDDVNQRLAVNAIHLDVTDKVKEKLVDLGYDPKMGARPLRRTIQEHIEDAITDFYLEHPEQKELKAIMTSNGKIVIKASNKVETVTKATSD

SEQ ID NO: 21773 - protein, 271 aa, Streptococcus mutans UA159
MKKLKKILLGIIAALMLVTLAACSSSSKDDSLQKIKNKGKIVVAMNPEFAPFEFKTLVNGKDTIVGADVEIAKAIAKELGVKVEFSAMSFNNVLSSVQSGKADIGISGISATKERQKVYDFSDTYYESVNVVIVKKSELAKYKKTNSLKGLSVATQKGTIQETVAKEQLTGAKIVSLVQNGEMINELKSGQVNGVVLEKPIAEGYVAKNDDLAIAQIKLKSSSSDAYAVAMPKGSSALKKKVDKVIKKLKKANKIDKFVKDAYNLSVSGGK

SEQ ID NO: 21774 - protein, 380 aa, Streptococcus mutans UA159
MIYFDNSATTLPYPEAIKTYEEVATKIFGNPSSLHQLGSQSSRILQASRQQIAELLGKRTDEVFFTSGGTEGDNWVIKGLAFEKQRYGKHIIVSDIEHPAVKESAKWLQTQGFEVDFAPVDKKGFVKVDVLAKLLRPDTILVSIMAVNNEIGSVQPIKAISKLLADKASISFHVDAVQAIGKIATDDYLTDRVDFATFSGHKFHSVRGVGFIYKKAGKKISPLLNGGGQEAGFRSTTENVAGIAATVKALRIVLDKAKIGQKQLLAMKRILFDSLSHYDDVILFSEMEYFAPNILTFGIKGVRGEVLVHAFEEHDIYISTTSACSSKAGKPAGTLISMGISSKLAQTAVRLSLDEDNDMSQVEQFLTIFKQIYEKTKKVR

SEQ ID NO: 21775 - protein, 331 aa, Streptococcus mutans UA159
MGIRSLFGSLREKIVSKNVRIVFPEGNDERVVRAAARLKFEGLIEPIILGDATEVRNLLTKLGFADQDYTIINPEDYTDFEHMKQEFVEIRKGKATIEDAEQLLKDVNYFGVMLVKLGLADGMVSGAIHSTADTVRPALQIIKTKPEISRTSGVFLMNRETTDQRLIFADCAINIEPDEQELAEIAINTADTAKIFDIDPKIAMLSFSTKGSAKASQVEKVQEATRIAKELRPEITLDGELQFDAAFVPTTAKIKAPESDVAGQANVFIFPDLQSGNIGYKIAQRLGMFDAIGPILQGLNMPVNDLSRGSSAEDIYKLAIITAAQTLDNTK

SEQ ID NO: 21776 - protein, 326 aa, Streptococcus mutans UA159
MSNAYPDKHLKLFSLTSNTAIAEKIAKVVGVPLGKLSSRQFSDGEIMINIEESVRGNDIYVIQSTSYPVNNHLWELLIMVDACKRASANSVNVVIPYFGYSRQDRIAAAREPITAKLVANMLVKAGVDRVLTLDLHAVQVQGFFDIPVDNLFTTPLFADHYTNLGLYGEDIVVVSPKNSGIKRARSLAQYLDAPIAIIDYAQDDDSSREEGYIIGEVAGKKAILIDDILNTGKTFAESAKIVERGGATEIYAVASHGLFASGATEILQAAPIKDILITDSVYTEQELPSNLHYLSASELIGEAIIRIHERRPVSPLFAYNRKGDEA

SEQ ID NO: 21777 - protein, 353 aa, Streptococcus mutans UA159
MTDTMTSVFGNPSSIHTYGRTANKVLRERRQQVAQIFDVKSRNIIFTSGGTESNNTAIKGYALANQFKGKHIISTSIEHHSVLHTLDYLEQRFGFEVTYLNPIKGKILMQQVKDALRSDTILVSIMFANNETGDILPIQEIGNVIKEHQAVFHVDAVQTVGKLPIHPKELNIDFLSASAHKFHGPKGVGILYVADNLHFDNLLHGGEQEEKRRASTENLIGIVGLTQALKDSYLHQENVLNYIDGLKKLFLDELEGLDYYLNSNEDALPHVINIGFPNYNNSILLTQLDLAGFAISTGSACTAGTVDPSHVLIAKYGLDSVRLQESIRISFSDLNTPDEVKALAVKIKEIIGK

SEQ ID NO: 21778 - protein, 363 aa, Streptococcus mutans UA159
MTTTIMASYSYGEDCYQEIPEVLKPYHIKRVVLIGGERALASSEDEVRSILVQAGIEVTGSFVYGVDSTQTNIDKLVANPDVQRAEAIFGFGGGKALDTAKMVAKELDKPTFTFPTICSNCSAGTAIAVVYNDDHSLLKYGYPDSPLHIFINTRVIAQAPEKYFWAGIGDGISKAPEVEHAILEAKKKGTAEFPHTARLGEAVALSSKEAFYRYGQQGLEDVRNNKVSRAVEEIALDIVVSTGYASNLVNQPDFYYNSCHAHAFYNGTTAIRREGEYLHGMVVSYGVLVLHAYFDEQEELERVANFNKALGLPIRLQELGLTKEDIPKIVEVALTTNEYRNTPFDPEKFAQAIRTVDYLGQQL

SEQ ID NO: 21779 - protein, 393 aa, Streptococcus mutans UA159
MTKLSRRVLEMEESVTLATSARAKTLKAQGRDVLELSLGQPDFVTPKNIQEAAMKSIRDGRASFYTIASGLPELKDAISQYFEKFYGYSVERKQIVVGTGAKFILYALFAAVINPKDEVIIPTPFWVSYADQIKMNDGVPVFIRTSEENHFKATVEQLEAARTNKTKMIVLNSPSNPTGMIYSKKELEAIGNWAVKHDILILSDDIYGRLVYNGARFTPISTISQPICQQTIVINGVSKTYSMTGWRVGYAVGDPEIIGAMSKIVSQTTSNLTTAAQYAAIEALIGNQDTVEVMRQAFEERLNTIYPLLAKVPGFHVVKPEGAFYFFPNVKKAMEMKGYTDVTEFTTALLEETGVALVTGAGFGAPENVRLSYATDMVTLKEAINRIQAFMEK

SEQ ID NO: 21780 - protein, 242 aa, Streptococcus mutans UA159
MGKKFKTRYQIPFYESDVNHNVKLPHILSVALQIASDQSVSLGLGDERIFKDYNLVWVVSEHEVTIDRLPRFNEIVEIETEPISYNRYFCYREFRIYDQNGEKLVDIFSTFVLMDYDTRRVHDVPEDLVAPYESEKIRKILRGPKYKALEKATDTLYHVRYFDLDINGHVNNSRYLEWMYDVLDFNFLKAYTPKKINLKYVKEVQYGSDIESRLEQDGLITKHEITSNGYVNAQAITQWEKI

SEQ ID NO: 21781 - protein, 860 aa, Streptococcus mutans UA159
MIDKMTQLVEDSLEEAKELAIAHRNYQLDIPHLWAVLVKPDQFAFQFYQSLEINTNQLIEIINKEIDKIPVLSSTEKSSYARLYSQRLKNLLDDAHQEMIDLKDQVLTVEHLILALFNQQRNPITVFLLEQGLNKEKLYQKMHRIRKGKPAISSSQETIYDALEKYAVNLNQRALDEPVNKIIGRQDEMNDIIRILSRKNKNNAVLVGHSGVGKTAIIEGFVQRLVKNQVPKNLQGKVIYSLDIGALLAGTKYRGEFEERFKALLNDIIDSNGQIILFIDEIHSIVSAGRTEGSVDAASILKPLLARGKIRIIGSTTHAEYRESIEYDRALERRFQRILVHEPDLDYTMEILKGLKPIYENFHGVRLEEDGLEAAASLSKRYISDRFLPDKALDLIDEACAAKRLASHAYPVQMTNLSQQLISEKIRLLRLTDSDTDDKFKLNNHLEQLEEQKSQLLANWQRERELLDQVQELRSHLTALEEQANLALENNQVADYVRLEDEEIRKCHQKMTALEKERLDSQKIINVTVTREDIAAVVERLTGIKVQGVMENERDRLLHLEELLHQKIVGQDQAVQKVSQAIIRSRAGIQNPKRPIGSFLFLGPTGVGKTALAKRLAEVLFGSELEMVRLDMSEYMEKHAVSRLVGPPPGYVGYEEGGQLTEAVRQRLYSIVLLDEIEKAHPDVFNTLLQVLDEGRLTDSKGRTIDFKNTILIMTSNIGSTNILQSLQDSGCITSEVRYKVLDELNHSFRPEFLNRIDETVLFNALSEKDMTGVVKVMVSDLQARLLEQDIHLTLTESVYILLAKEGFDAAFGARPMQRTIMQKLENPLALYLIQNQKNKEKETFVTVSVKDKKLKFTFS

SEQ ID NO: 21782 - protein, 270 aa, Streptococcus mutans UA159
MNIKKFLISLAALIMIATSLSGLSKVNADNVTSPQVKKIKRAGVLKVGVKQDVPNFGYYNAETGKYEGMEIDIARKIAKSIGVKLELVPVTTQTREPLMDNGQVDLVIATYTITPERQASYSISKPYYYDQIGFLVRQSSKISKISDLDGLTIGVSQGATTKVNLEAYAKKHHLKFNYVQLGSFPELAISLYSKRIDAFSVDKSILTGYVSKQSKLLKSGFNTQEYGIATKKSNTGLTKYVNYLLKKWTADKSLESIYNKHNLESAKPDK

SEQ ID NO: 21783 - protein, 299 aa, Streptococcus mutans UA159
MSFKSGFVAILGRPNVGKSTFLNHVMGQKIAIMSDKAQTTRNKIMGIYTTDKEQIVFIDTPGIHKPKTALGDFMVESAYSTLREVDTVLFMVPADEKRGKGDNMIIERLKAAKVPVILVINKIDKVHPNQLLEQIDDFRNQMDFQEIVPISALQGNNVSHLVDLLVDHLEEGFQYFPADQITDHPERFLVSEMIREKVLLLTREEIPHSVAVVIDSMARDEETHKIHIRATIMVERDSQKGIIIGKKGAMLKKIGQMARRDIELMLGDKVYLETWVKVKKNWRDKKLDLADFGYNKKEY

SEQ ID NO: 21784 - protein, 452 aa, Streptococcus mutans UA159
MKVVKFGGSSLASATQLEKVLNIIKSDEERRFVVVSAPGKRDAQDTKVTDALIRYYRSYTSDKDVTADQSWIINRYRAIIDELGLGQNILEKITKAIVDLANLPIEDNDFLYDTFLAAGEDNNAKLIAEYFRKNGLSARYIHPKKAGIIVTSEPGNARIIPSSYDKLEELRDSDEVLVIPGFFGVTIDNQICTFSRGGSDITGSIVAAGVKADLYENFTDVDGIFAAHPGVVHKPHSISELTYREMRELAYAGFSVLHDEALIPAYRGKIPLVIKNTNNPEHPGTKIVLAHTGATIPVVGIAGDDDFVSINLSKYLMNREIGFGRKILQVLEELNIRWEHIPTGIDDMSIILRGRELTPIKEQEIISQLTRKLEVDEVEIERNLSIIMIVGENMKNHIGVTAKAAEAFSKKHINLEMISQGSSEVSVMFVIKTEQEKQAVRALYQTFFMKDE

SEQ ID NO: 21785 - protein, 368 aa, Streptococcus mutans UA159
MEELFCIGCGAQIQTTAKEQAGYTPKSALEKGLESGKIYCQRCFRLRHYNEITDVHISDDDFLKLLHEVGDSRTLVVNVIDIFDFNGSVIPGLQRFISSSDLLLVGNKADILPKSVKSGKITQWLMERAHEEGLRPLDLILISAQNKWAIKELIAKIEELRQGRDVYVVGVTNVGKSTLINAIIQEITGDKNIITTSRFPGTTLNKIEIPLNDGSYIFDTPGIIHRHQMAHYLSDKALKYISPKKEIKPKTYQLNPEQTLFLGGLARFDYVTGDKQGFTAYFDNNLKLHRTKLAGADAFYDKHIGSLLTPPDKKEMAAFPKLVRHEFTIKEKTDLVFSGLGWIRINGRAKIAAWAPEGVAVVTRKALI

SEQ ID NO: 21786 - protein, 399 aa, Streptococcus mutans UA159
MSKTISINAGSSSLKWQLYLMPEEKVLAKGLIERIGKDDAISTVKFNGQEASETLAIKDHTAAVKILLDDLIHLDIIKSYDEITGVGHRVVAGGTYFNESALVDSEEVIKKVEELALLAPLHNKANAAGIRAFKKILPDITSVVVFDTAFHTTMPEVAYRYPLPNKYFTENQVRKYGAHGTSHYYVAHEAAKILEKPIEKLKLITVHMGNGVSLTAVDGGKSVDTSMGFTPLGGVMMGTRTGDLDPAVIPYLMDNTEDFKTPEDIRRIFNNESGLLGISELSNDMREIEAATAAGNKNATLAYNMFIDRIIKHIGAYAAVMNGVDAIVFTAGIGENDAHIRSEIMKHFDWLGADIVTEKNEKRPVYGVISSNAAKVKVLVIPTDEELVIARDVERLKTK

SEQ ID NO: 21787 - protein, 646 aa, Oryza sativa Japonica Group
MEPMASESSVPIGTAFADLLLQGPEHPSLWNDLTGMFRKAFRWQGADKRFTLSVYVMSVLQGLFPILDWWKTYNLKFFRSDLMAGLTLASLSIPQSIGYATLAKLDPQYGLYTSVVPPLVYAVTGSSREIAIGPVAIVSLLLSSMIQKIVDPSVDPAFYRKMVFTVTFLTGVFQFAFGLFRLGFLVDFLSHAAIVGFMGGAAIVIGLQQLKGLLGLSHFTNRTDVVSVTKAVWVSVHETGRKYKKLFWVSAIAPVLSVALSTLFVYATRADKHGVKIIQKVNSGINASSVEQIDLKGGYAAECAKIALVCAVIALTEAVAVGRSFSAINGYRLDGNKEMVAMGFMNIAGSLSSCYVATGSFSRTAVNFAAGCKTTVSNIIMAATVMVALELLTKLLYYTPVSILASIILSALPGLINVQEVCFLWKVDKMDFLTCMGSFLGVLFGSVEIGLSVALLVSFAKIIIQSIWPQVEILGRLQGTEIFCNVKQYPVVHETPTVLTVRIETSFLCFVNSSSIKEKIMGWVTDEREAFCSVVLDMSNVVNMDTSGLVALEELHKELACLGIQSLHCIFSSEKLADAVVKCSRPCPEKQPHLQMAIAKPGWQVIHKMKLARLVDGIGEGWFFLTVGEAVEACLANKAGNALECC

SEQ ID NO: 21788 - protein, 248 aa, Helianthus annuus
MSFQNEDSGDISPQRRIGKGKIEIKRIENTTNRQVTFCKRRNGLLKKAYELSVLCDAEVALIVFSSRGRLYEYANNSVTGTIDRYKKSCLDPPSTGSVAEANAQFYQQEATKLRQQIANLQNQNRQFYRNIMGESLADMPGKELKNLESKLEKAINRIRAKKNELLFAEIEYMQKRELELHNSNQFLRARIAENERAQQQHMSLMPGSSGYNDLGPHQSFDGLNDLQTNELQLNNNYSCQDQTPLQLV

SEQ ID NO: 21789 - protein, 491 aa, Synechococcus elongatus PCC 7942
MPRGVAPAFAGRKPKGWAWASTAVPDFQGGFKRLINRFQGSKLWLACVPLAATIAVFWGVAANAQGSADPVPSAQFLVNNLWLMVATVLVIFMNAGFAMVETGLCRQKNAVNVLAKNLIVFTLAATAYWFIGYSLMYGSPVVDGFLYFGKGGPLGFFFDPTVSAETIKNDGLISSLDFLFQAAFAGTAATIVSGSVAERIKFVDFIIFSLILTAVIYPIAGSWQWNVGSGWLNKAGFIDFAGSTVVHSVGGWAALIGAITLGPRMGKFQDGRPGALPGHNLAIATLGALILWIGWYGFNGGSVLAFNTAVPYVAVTTTLGGAAGGISATITSWSTSGKPDLSMVINGILAGLVGVTAGCDGFGMGGSFIVGLIAGVLVVFSVYTFENLKIDDPVGACSVHLVCGIWGTLAVGLFNLEKGLFYGGGFGQLGSQILGIISYGVWTVVASVIIWNILKALLGLRVSLKKSYKAWILANTGWKPTLALPRMHLTP

SEQ ID NO: 21790 - protein, 836 aa, Zinnia violacea
MMAVTSSCKGDSMGMDNGKYVRYTPEQVEALERLYHDCPKPSSHRRQQLIRECPILSNIEPKQIKVWFQNRRCREKQRKEASRLQAVNRKLSAMNKLLMEENDRLQKQVSNLVYENSHFRQQTQNMALVTTDTSCESVVTSGQHHSSPQHPPRDASPAGLLSIAEETLTEFLSKATGTAVEWVQMPGMKPGPDSIGIIAISHGCTGVASRACGLVGLEPTRVAEILKDRPSWYRDCRAVDVLNVLTTGTNRTIELLYMQLYAPTTLAPARDFWLLRYTSALEDGSLVVCERSLNNTQNGPTMPPVPHFVRAKILPSGYLIRPCDGGGSIIHIVDHVDFEAGSVPEVLRPLYESSTLLAQRTTLAAFRQLRQISQEISQPAVTSWGRRPAALRALAQRMSRGFNEAINGLNDEGWTMMEGDGVDDVTVLVNSSPDKVMGATPMFADGFPSISHAVLCAKASMLLQNVPPAILTRFLREHRSEWADSSIDCYAATSVKGGACGIPLARSGGFGGQVILPLAHTIEHEEFMEVIKLENMSPYRAEDMLIPGDIFFLQLCNGVDENAIGTSAELIFAPIDASFTDDAPLLPSGFRIIPLNNNSQNPTRDLASTLEVGPPGKRSPADYLGQSGSTKSVMTIAFQFAFEIHLQESIAAMARQYVRSIIASVQRVALALSPSSFGPRSLQSASGTPEAQMLARWICQSFRCFLGEDLFKMVDERSDTMLKTLWHHSDAIMCCSLKALPDFTFANQAGLDMLETTLVSLQDITLDKIFDRGGRTSICSELPQILQQGFACFPSGVCLTSMGRPVSYERAVAWKVLNDEENPHCIAFVFVNWSFV

SEQ ID NO: 21791 - protein, 346 aa, Arabidopsis thaliana
MENTDELVSIELPAPASWKKLFYPKRAGTPRKTEIVFVAPTGEEISSRKQLEQYLKAHPGNPVISEFEWTTGETPRRSSRISQKVKATPDKEPLLKKRRSSLTKKDNKEAAEKNEEAAVKENMDVDKDGKTENAEAEKEKEKEGVTEIAEAEKENNEGEKTEAEKVNKEGEKTEAGKEGQTEIAEAEKEKEGEKAEAENKEAEVVRDKKESMEVDTSELEKKAGSGEGAEEPSKVEGLKDTEMKEAQEVVTEADVEKKPAEEKTENKGSVTTEANGEQNVTLGEPNLDSDAEQIREKNPKNMMRRRQKLRRIRKMTLKNLMRRRQKLQQIRRTKPKSLMSRRPKLQ

SEQ ID NO: 21792 - protein, 317 aa, Corynebacterium ammoniagenes
MSTQYLNSNLKVFSLNSNKELAEQIAKHIGVGLGKCSVDRFSDGEVQINIEESIRGCDVFIIQSTSFPVNEHIMELLIMIDALKRASAKTINIVIPYYGYARQDRKARSREPITSKLVANLLETAGATRVITLDLHAPQIQGFFDIPIDHLMGVPILSDYFETKGLKDIVIVSPDHGGVTRARKMADRLKAPIAIIDKRRPRPNVSEVMNIIGNIEGKTALLIDDIIDTAGTITLAANALVENGASEVYACCTHPVLSGPAIERIQNSNIKELVVTNSIVLPEEKKIDKVHELSVAPLIGEAIIRVYEEESVSVLFN

SEQ ID NO: 21793 - protein, 291 aa, Sulfolobus solfataricus
MIIIGGSATNGIDESLSKILSIPLVKVENKIFPDGESYIRVPSSIRDEEVLLVQTTDYPQDKHLIELFLIAETIRDLGAKKLTAIVPYLAYSRQDRRFKDGEAISIKTILHILSEVGVNTLVVVEPHKPEELSYFKGELKIVHPYHQIARKIKEIIEDPFILAPDRGALDRARKIAEEINAPYSYIEKERDRTTGEVRIKEAPNINLKGKDVVIIDDIISTGGTIVQATRLAYSLGAKSVTAAAIHLLLVGGAKERLREVGVKTLIGTNTINVNDKDIITIDVSQSIALSL

SEQ ID NO: 21794 - protein, 344 aa, Mycoplasma genitalium
MKLLKRKQSDASLKLSIDNKKHVIFSLSKSKTLVENICKKLNISEGKMVCEHFADGETYIRFDESVRNKDIYIFQSTCPNVNDSLMELLIAIDALKRGSAKSITAILPYYGYARQDRKTKGREPITSKLIADMLTKAGANRVVLTDIHSDQTQGFFDIPVDSLRTYHIFLFRVIELLGKKDLVVVSPDYGGVKRARLIANTLELPLAIIDKRRPSHNVAESINVLGEVKNKNCLIVDDMIDTGGTVIAAAKLLQKEQAKKVCVMATHGLFNNDAEQKFMEAFDQKLIDFLFVSNSIPQYKFKAVKQFEVVDLASLYEEVVLCYANSLSVSAIYERHIEWIKKHV

SEQ ID NO: 21795 - protein, 328 aa, Mycoplasma pneumoniae
MDRHNHVVFSLSKTHDLVSRICQKLKMPMGLITHNEFADGETYIRFEESVRNKDVFIFQSTCAPVNDSLMELLIAIDALKRGSAKSITAILPYYGYARQDRKTMGREPITSKLVADLLTTAGVSRVALTDIHSDQTQGFFNIPVDTLRTYHVFLTRTVELLGKKDLVVVSPDYGGVKRARLIATSLELPLAIIDKRRPAHNVAESINVLGEVANKNCLIVDDMIDTGGTVIAAAKLLREHHAKKVCVMATHGLFNGEAPQRFQKAFNEGLVDYLFVSNSIPQTKFDQCPQFQVIDLAPLFEEVLLCYANNSSISAIYTRHIEWIKKHV

SEQ ID NO: 21796 - protein, 662 aa, Aegilops speltoides
MPRTVSDGGEDFDGDFSSQTGSHRHTDSNSTHHHHGYKVGFPPARGLFAEFTDGVKETFFADDPLREYKDQSRSKKLWLSLVHLFPVLDWARSYKFSMFKGDFVAGLTIASLCIPQDIGYAKLAFLPAHVGLYSSFVPPLVYAMMGSSRDIAIGPVAVVSLLLGTLLQEEIDPVKNPYEYSRLAFTATFFAGITQAMLGFFRLGFIIEFLSHAAIVGFMAGAAVTIALQQLKGFLGIKKFTKKSDIISVMESVWGNVHHGWNYQTILIGASFLAFLLTTKYIAKKNKKLFWVSAIAPLISVVISTFCVYITRADKQGVAIVKDIKQGINPPSFHLIYWSGPYLAKGFRIGVVAGMVALTEAIAIGRTFAAMKDYQIDGNKEMVALGTMNIVGSMTSCYVATGSFSRSAVNYMAGCKTAVSNVVMAIVVMLTLLLITPLFKYTPNAILASIIINAVVSLVDYETAYLIWKVDKMDFVALLGAFFGVVFASVEYGLLIAVAISLGKILLQVTRPRTALLGNLPRTTIYRNVEQYPEAAKVPGIMIVRVDSAIYFTNSNYVKERILRWLRDEEDQQQEQKLSKTEFLIVELSPVTDIDTSGIHALEELLKALEKRKIQLILANPGPAVIQKLRSAKFTDLIGDDKIFLSVGDAVKKFAPKSALNV

SEQ ID NO: 21797 - protein, 655 aa, Aegilops speltoides
MSRTMSGGSEDFNGNISRTGSHRQTDHHGYKVRFPPAKGLFTELAEGVKETFFANDPLREYKDQPRSKKLWLSLAHLFPVLDWARSYTFGMFKGDFVAGLTIASLCIPQDIGYAKLAFLPAHVGLYSSFVPPLVYAAMGTSRDIAIGPAAVLSLLLGTLLQEEINPATNPHEYSRLAFTATFFAGITQAMLGFFRLGFIIEFLSHAAIVGFMAGAAITIGLQQLKGFLGIAKFTKKSDIISVMESVWGNVHHGCNWQTILIGASFLAFLLTTKYIAKKNKKLFWVSAIAPLISLIVSTFCVFITRADKQGVAIVKDIKEGINPPSFHLIYWSGPYLAKGFRIGVVAGMVGLTEAIAIGRTFAAMKDYQIDGNKEMLALGTMNIVGSMTSCYVGTGSMSRSAVNYMAGCKTAISNVVMAIVVMLTLLLVTPLFKYTPNAILASIIIMIVVSLVDYETAYLIWKVDKMDFMALLGAFFGVVFASVEHGLLIAVAISLGKILLQVTRPRTALLGNLPRTTIYTNVEQYPEASKVPGVMIVRVDSAIYFTNSNYVKERILRWLRDEEEQQQEQKLSKTEFLIVELSPVTDIDTSGIHALEELLKALEKRKIQLILANPGPAVIQKLRSAKFTDLIGDDKIFLSVDDAVKKFAPKSALNV

SEQ ID NO: 21798 - protein, 502 aa, Nicotiana sylvestris
MEHSLMATRSYFLLFSSFTFLLILLSFPVEKSHALEAKETIESHFHTLQLTSLLPSSSCNTATKGKRRGASLEVVNRQGPCTQLNQKGAKAPTLTEILAHDQARVDSIQARVTDQSYDLFKKKDKKSSNKKKSVKDSKANLPAQSGLPLGTGNYIVNVGLGTPKKDLSLIFDTGSDLTWTQCQPCVKSCYAQQQPIFDPSASKTYSNISCTSTACSGLKSATGNSPGCSSSNCVYGIQYGDSSFTVGFFAKDTLTLTQNDVFDGFMFGCGQNNRGLFGKTAGLIGLGRDPLSIVQQTAQKFGKYFSYCLPTSRGSNGHLTFGNGNGVKTSKAVKNGITFTPFASSQGATFYFIDVLGISVGGKALSISPMLFQNAGTIIDSGTVITRLPSTVYGSLKSTFKQFMSKYPTAPALSLLDTCYDLSNYTSISIPKISFNFNGNANVDLEPNGILITNGASQVCLAFAGNGDDDTIGIFGNIQQQTLEVVYDVAGGQLGFGYKGCS

SEQ ID NO: 21799 - protein, 90 aa, Schizosaccharomyces pombe
  misc_feature (2)..(2): Xaa can be any naturally occurring amino acid
  unsure (1)..(90): unsure at all Xaa locations
MXKPSTEHINLKVVGQDNNEVFFKIKKTTEFSKLMKIYCARQGKSMNSLRFLVDGERIRPDQTPAELDMEDGDQIEAVLEQLGGCTHLCL

SEQ ID NO: 21800 - protein, 174 aa, Prunus mume
MPRDRDPLVVGRVVGDVLDPFTRSVSLRVTYGLKEVNNGCELKPSQVVQQPRVDIGGDDLRTFYTLVMVDPDAPSPSDPNLKEYLHWLVTDIPATTAASFGQEIVCYESPRPTVGIHRFVLVLFRQLGRQTVYAPGWRQNFNTRDFAELYNLGLPVAAVYFNCQRESGSGGRRR

SEQ ID NO: 21801 - protein, 250 aa, Glycine max
MERSLSGSSEEEMSITKGPWTEEEDSVLFNYITVHGEGLKRTGKSCRLRWLNYLRPNVRRGNITLEEQLLILDLHSRWGNRWSKIAEHLPGRTDNEIKNYWRTRVVKQAKQLKCEVNSKQFRDTLRFVWMPRMLERIQAQASSSSSSSSGQAHQTTLISNAQAHSDPCGVMTTNPSLLSEVSSSALDAHAPSLYDSSASYNLMGGGSSSSYSAEYCYYSDIAGNGFGGSDLWTDENICFLQQLLADHDLS

SEQ ID NO: 21802 - protein, 404 aa, Pseudomonas aeruginosa
MAGRDGLKEIIHWRLKLHIGVPLETHAGETRVAATPETIKKLVSQGHQVTVQSGAGISASIPDAAYQAVGASIGSAAAALGADLVLKVVAPTDAELAHMKAGAVLVGMLNPFSNETIARMAARGITAFALEAAPRTSRAQSLDVLSSQANIAGYKAVLLAAHHYPRFMPMLMTAAGTVKAARVLILGAGVAGLQAIATAKRLGAVIEASDVRPAVKEQIESLGAKFVDVPCETDEERECAQGVGGYARPMPASWMARQAKAVHERAKQADIVITTALIPGRKAPTLLHEATVAEMKPGSVVIDLAAAQGGNCPLTVAEQVVVQHGVTIVGHSNLAALVPADASALYARNLLDFLKLVIDKDGQFHLNLEDDIVAACLMCTGGQVVRSNGAPSATAAAQTEKENA

SEQ ID NO: 21803 - protein, 415 aa, Nitrosospira sp. NpAV
MNAKNLFKLGVIGLYGMATLALSTLDISPAAAHGERSQEPFLRMRTIQWYDMKWGPDTTKVNDFATMTGKFHLAEDWPRAVGKPGRAFFNVGSPSPVFVRLSTKLNGEPTYISGPLEIGRDYAFEVKLKARIPGRHHMHAMVNIKDAGPIAGPAAWMNITGSWDDFTNPVKLLTGETIDTETFNFNNGIFWHLLWLGLGCFWIGYYVARPMFLPRSRVLLAYGDDLLLDPMDKKVAWIVLIATFGIVWGGYRYTETKHPYTVPIQAGESKVQPMPVKPNPIAIKVTHANYDVPGRALRVTMSVTNSGDTAYRIGEFTTAGVRFINKVGLKHLDRNYPKELVATGLSFDNDALIQPGETREVKMEAKDALWEVQRLMALLGDPESRFGGLLTTWSDSGDRNINSIAGAVIPVFTKL

SEQ ID NO: 21804 - protein, 284 aa, Daucus carota
YPQAIFKDPFRRGNNILVMCDSYTPAGEPIPTNNRFAAAKIFSHPDVAAEVPWYGIEQEYTLLKKDVHWPLGWPNGGFPGPQGPYYCGIGADKAFGRDIVDAHYKACLYAGINISGINGEVMPGQWEFQVGPVVGISAGDELWVARYILESITEIAGVVVSFDPKPIPGDWNGAAAHTNYSTKSMRNEGALEVIKKAIEKLGLKHKEHIVAYGEGNERRLTGKHETADINNFSWGVANRGASVRVGRETEKDGKGYFEDRRPSSNMDPYVVTSMIAETTILWNP

SEQ ID NO: 21805 - protein, 361 aa, Arabidopsis thaliana
MGTSTTESVVACEFCGERTAVLFCRADTAKLCLPCDQHVHSANLLSRKHVRSQICDNCSKEPVSVRCFTDNLVLCQECDWDVHGSCSSSATHERSAVEGFSGCPSVLELAAVWGIDLKGKKKEDDEDELTKNFGMGLDSWGSGSNIVQELIVPYDVSCKKQSFSFGRSKQVVFEQLELLKRGFVEGEGEIMVPEGINGGGSISQPSPTTSFTSLLMSQSLCGNGMQWNATNHSTGQNTQIWDFNLGQSRNPDEPSPVETKGSTFTFNNVTHLKNDTRTTNMNAFKESYQGQETSKSNNIPAAIHSHKSSNDSCGLHCTEHIAITSNRATRLVAVTNADLEQMAQNRDNAMQRYKEKKKTRR

SEQ ID NO: 21806 - protein, 378 aa, Ulmus americana
  misc_feature (265)..(265): Xaa can be any naturally occurring amino acid
  misc_feature (374)..(374): Xaa can be any naturally occurring amino acid
  unsure (1)..(378): unsure at all Xaa locations
GSGALQVKASSQAPPKLNGSNVGLVKSSQIVKKGDDTTSPPARTFINQLPDWSMLLAAITTLFLAAEKQWMMLDWKPKRPDMLVDPFGLGRFVQDGLVFRNNFSIRSYEIGADRTASIETLMNHLQETALNHVKSVGLLEDGLGSTREMSLRNLIWVVTKMQVAVDRYPTWGDEVQVSSWATAIGKNGMRREWIVTDFRTGETLLRATSVWVMMNKLTRRISKIPEEVWHEIGPSFIDAPPLPTVEDDGRKLTRFDESSADFIRXGLTPRWSDLDINQHVNNVKYIGWLLESAPPEIHESHEIASLTLEYRRECGRDSVLNSATKVSDSSQLGKSAVECNHLVRLQNGGEIVKGRTVWRPKRPLYNDGAVVDVXAKTS

SEQ ID NO: 21807 - protein, 485 aa, Bacillus cereus ATCC 10987
MYNTEMDETLKIIDKGLKKTTSPKQIIVVGAGMAGLISASLLKAAGHEVKIFEANNRVGGRIETVRMEDTGLYLDVGAMRIPYSHTLTMAYIRKFGLQVSPFINRNETDIIYVNGRKTTLKQYEKDPSILKYPVEMNEVGKTSEELLLLAVQPIINFIKKNPEKNWDVVVKDFGRYSTGQFLKYHPYQYNTYFSPVTIEMIGVLLDLEGFLERSFVETLRFLYIMQEESGFCEIIGGNDRLPKSFLPQLEEDIIYNQKLMKLHQHDNGVTAFYRNEETFEYSSITGDLVIVTIPFSTMRFVEVDPFDSISHEKWKAIRELHYMPATKIGIQFKSRFWEEQGQLGGRIITDLPIRYAYYPSYGIGGKGPAMMLGSYTWSYDALLWDGLSKGDRIYYTLQNLATILGGQVYDEFLSGISKSWTLDPYALGGFALFQAGQESELQPAIVKPEGRIFFAGDHTTLYHGWIQGAIESGVRVAVDVNELNV

SEQ ID NO: 21808 - protein, 421 aa, Corynebacterium efficiens
MALVVQKYGGSSLESAERIRNVAERIVATKKAGNDVVVVCSAMGDTTDELLDLAAAVNPVPPAREMDMLLTAGERISNALVAMAIESLGAEAQSFTGSQAGVLTTERHGNARIVDVTPGRVREALDEGKICIVAGFQGVNKETRDVTTLGRGGSDTTAVALAAALGADVCEIYSDVDGVYTADPRIVPNAQKLERLSFEEMLELAAVGSKILVLRSVEYARAFNVPMRVRSSYSNDPGTLIAGSMEDIPMEEAVLTGVATDKSEAKVTVLGIPDKPGEAAKVFRALADAEINIDMVLQNVSSVEDGTTDITFTCPRSDGPRAMELLKKMQQQGDWTNVLYDDQVGKVSLVGAGMKSHPGVTAEFMEALRDVNVNVELISTSEIRISVLIREDDLDKSAKALHEKFQLGGDEEATVYAGTGR

SEQ ID NO: 21809 - protein, 339 aa, Burkholderia cepacia
MLHSIALRFEDDVTYFITSSEHETVADAAYQHGIRIPLDCRNGVCGTCKGFCEHGEYDGGDYIEDALSADEAREGFVLPCQMQARTDCVVRILASSSACQVKKSTMTGQMTEIDRGSSSTLQFTLAIDPSSKVDFLPGQYAQLRIPGTTESRAYSYSSMPGSSHVTFLVRDVPNGKMSGYLRNQATITETFTFDGPYGAFYLREPVRPILMLAGGTGLAPFLSMLQYMAGLQRNDLPSVRLVYGVNRDDDLVGLDKLDELATQLSGFSYITTVVDKDSAQLRRGYVTQQITNDDMNGGDVDIYVCGPPPMVEAVRSWLAAEKLNPVNFYFEKFAPTVGN

SEQ ID NO: 21810 - protein, 651 aa, Sporothrix schenckii
MALRCSGSTPLFLSFLFPSVHVARCAGHSGRRAAAAAVPFPATRPVTCRQSPPRRHYGSETTPPPADGTAEAELREEKIPQETPVAYPVSRLNPAPDDYAATSFADKATLTVHAGSGGAGCISFLRDMFLPDGPANGGDGGHGGNVYIQAVPGETSLHKIARRRVMRAGRGKHGQGSARNGPRGDDLIVTVPVGTVVTEASRIDPVAEEAVLARERHYARKRKRQLAHAANQAAIAAAKAAAASGLALEAGEEPPKSEEQLQLERQQQQDADEGDDAEMEWVRRKWLVYPGLSSSEVRNIEYPRLPRRDRFFVQPPAPIYLDLSRPTTQPILLAAGGIGGLGNPRFVSRRLPRPMVATRGENAVSLTIHLELKLLADVGLVGLPNAGKSTLLRAVSNSRARVGSWAFTTLQPNIGTVVLDNNRGRPVVSMRPTKKKAVTSTADGEIHTVAGDEANATVAVPPRTRFTIADIPGLIEGAHLDKGLGIEFLRHVERAGVLAFVVDLGAGDAVTALKALWKEVGLYARLRAEEEEQREREARIEWDAQQPPAQTISHTVADGLRTSTSAPTVSPELAIAGKPWFVVATKGDLPSAEANFGKLKDYIDRMGRGEEEHPSGVAGGWTKNLAAIPVSAINGHGVDRIVHWTVGLLDL

SEQ ID NO: 21811 - protein, 398 aa, Solanum tuberosum
MATEEDAVRRRTALADYRKKLLQHKELDARVRTVRENLRATKKEYAKTEDDLKSLQSVGQIIGEVLRPLDNERLIVKASSGPRYVVGCRSKVDKEKLTSGTRVVLDMTTLTIMRALPREVDPVVYNMLHEDPGNISYSAVGGLSDQIRELRESIELPLMNPELFLRVGIKPPKGVLLYGPPGTGKTLLARAIASNIDANFLKVVSSAIIDKYIGESARLIREMFNYARDHQPCIIFMDEIDAIGGRRFSEGTSADREIQRTLMELLNQLDGFDQLGKVKMIMATNRPDVLDPALLRPGRLDRKIEIPLPNEQSRMEILKIHAAGIAKHGEIDYEAAIKLAEGFNGADMRNVCTEAGMFAIRAERDYVIHEDFMKAVRKLNEAKKLESSAHYSADFGKE

SEQ ID NO: 21812 - protein, 592 aa, Solanum tuberosum
KPPHTDVGCLPTVNAVTIHNPAVPFNSPESTLGRHLARRLVQVGVTDVFGVPGDFNLTLLDHLIDEPGLNFVGCCNELNAGYAADGYARARGVGACVVTFTVGGLSVLNAIAGAYSENLPLICIVGGPNSNDYGTNRILHHTIGLPDFTQELRCFQTVTCYQAVVNNLEDAHELIDTAISTSLKESKPVYISISCNLPGIPHPTFSREPVPFFISPRLSNKMGLEAAVEAAAEFLNKAVKPVIVGGPKMRVAKACDAFVELADASGYAVAVMPSAKGMVPEHHPHFIGTYWGAVSTAFCAEIVESADAYLFAGPIFNDYSSVGYSLLLKREKAIIIQPDRVTVGNGPTFGCILMKDFLAALGKRLKHNPTAYENYRRIYVPEGHPLKCEPKESLRVNVLFEHIQRMLSGDTAVIAETGDSWFNCQKLKLPKDCGYEFQMQYGSIGWSVGATLGYAQAAKEKRVIAFIGDGSFQVTAQDISTMLQCGQRTIIFLINNGGYTIEVEIHDGPYNVIKNWNYTGLVDAIHNGQGKCWTTKVRCEEELVEAIETATETKKDSLCFIEVIVHKDDTSKELLEWGSRVSAANSRPPNPQ

SEQ ID NO: 21813 - protein, 325 aa, Mycoplasma gallisepticum
MSTLIEELKIKIKNSKKVPEILLVEGWNAYVQEAAKQLVAEKLVKPVLMFRTMDEIPADFDPRIKRYVIEKMDLSKYATYLFKLREKKGMTLEVAQQEVQKPNVLASLLVKLDEVDGEVCGKEYTTKETLKPALQIIKTSETAKIVSSVMVLEKNQERLVFADCAINVYPTAEELAEITKSTIKFAKDVLQIEKINLAMLSYSTLNSGVGESVDKVKAVTKLVEESDVGKLASICGPMQFDAAYVEEVRKQKAPKLDWEKGANVFIFPNIDAGNIGYKIAQRLGGYDAIGPVLTGLAKPVNDLSRGANAHEIYSVAIITACQAVA

SEQ ID NO: 21814 - protein, 344 aa, Cicer arietinum
GFREFKDDSDFDEDEEDDDDDEGLLVGGKGFTFSSNNTKSFKTFSRGSTAAKSVSPKSNEQAEKACKRKRKNQYRGIRQRPWGKWAAEIRDPRKGVRVWLGTFNTAEEAARAYDAEARRIRGKKAKVNFPEEAPVTSSKRFKPNLENKLVNKNLNSFNPNGNKMFNFGENVENYYSPMDQVEQKPLVNNNNQYANMGPFSGNGVQHSQISPSADVTAYFSSEHSSNSFDYSDLGWGEQGPKTPEISSMLSAAAPLESESQYVQNNMQSNNNQNMLPVEDNSAKTLSEELADIESQLKFFETPYDDNWGDASLASFLGGDATQDGGNPMNLWSFDDLPSISGGVF

SEQ ID NO: 21815 - protein, 805 aa, Capsicum annuum
MTDQAESSDSKNAKKDFSTAILERKKAANRLVVDEAVNDDNSVVALHPATMEKLQLFRGDTILIKGKKRKDTVVIALADETCDEPKIRMNKVVRSNLRVRLGDVVSVHQCPDVKYGKRVHILPIDDTIEGLTGDLFDAFLKPYFLEAYRPLRKGDNFLVRGGMRSVEFKVIETDPGEYCVVAPDTEIFCEGEPVKREDEERLDEVGYDDVGGVRKQMAQIRELVELPLRHPQLFKSIGVKPPKGILLYGPPGSGKTLIARAVANETGAFFFCINGPEIMSKLAGESESNLRKAFEEAEKNAPSIIFIDEIDSIAPKREKTHGEVERRIVSQLLTLMDGLKSRAHVIVMGATNRPNSIDPALRRFGRFDREIDIGVPDEVGRLEVLGIHTKNMKLAEEVDLERISKDTHGYVGADLAALCTEAALQCIREKMDVLDLEDDTIDAEVLNSMAVTNEHFQTALGTSNPSALRETVVEVPNVSWEDIGGLENVKRELQETVQYPVEPPEKFEKFGMSPSKGVLFYGPPGCGKTLLAKAIANECQANFISVKGPELLTMWFGESEANVREIFDKARQSAPCVLFFDELDSIATQRGSSSGDAGGAADRVLNQLLTEMDGMNAKKTVFIIGATNRPDIIDPALLRPGRLDQLIYIPLPDEDSRHQIFKACLRKSPLSKDIDLRALAKHTQGFSGADVTEICQRACKYAIRENIEKDIEREKRRQENPDSMDEDVDEVPEIKPAHFEESMKYARRSVSDADIRKYQAFAQTLQQSRGFGTEFRFADTSGGATAAADPFATSNAAADDDDLYS

SEQ ID NO: 21816 - protein, 685 aa, Candida albicans
MIGMNRLIFSKAFTSSCKSVGKVPFAKSITRANTRYFKPTSILQQIRFNSKSSTAPNTEANSNGSTNSQSDTKKPRPKLTSEIFKLLRLAKPESKLIFFALICLVTTSATSMALPLMIGKIIDTTKKDDDDDKDNDNDDKDDTQPSDKLIFGLPQPQFYSALGVLFIVSASTNFGRIYLLRSVGERLVARLRSRLFSKILAQDAYFFDLGPSKTGMKTGDLISRIASDTQIISKSLSMNISDGIRAIISGCVGLSMMCYVSWKLSLCMSLIFPPLITMSWFYGRKIKALSKLIQENIGDMTKVTEEKLNGVKVIQTFSQQQSVVHSYNQEIKNIFNSSMREAKLAGFFYSTNGFIGNVTMIGLLIMGTKLIGAGELTVGDLSSFMMYAVYTGTSVFGLGNFYTELMKGIGAAERVFELVEYQPRISNHLGKKVDELNGDIEFKGIDFTYPSRPESGIFKDLNLHIKQGENVCLVGPSGSGKSTVSQLLLRFYDPEKGTIQIGDDVITDLNLNHYRSKLGYVQQEPLLFSGTIKENILFGKEDATDEEINNALNLSYASNFVRHLPDGLDTKIGASNSTQLSGGQKQRVSLARTLIRDPKILILDEATSALDSVSEEIVMSNLIQLNKNRGVTLISIAHRLSTIKNSDRIIVFNQDGQIVEDGKFNELHNDPNSQFNKLLKSHSLE

SEQ ID NO: 21817 - protein, 400 aa, Thermoanaerobacterium thermosaccharolyticum
MKILVINCGSSSLKYQLIESKDGNVLAKGLAERIGINDSLLTHNANGEKIKIKKDMKDHKDAIKLVLDALVNSDYGVIKDMSEIDAVGHRVVHGGEYFTSSVLITDDVLKAITDCIELAPLHNPANIEGIKACTQIMPDVPMVAVFDTAFHQTMPDYAYLYPIPYEYYTKYKIRKYGFHGTSHKYVSQRAAEILNKPIESLKIITCHLGNGSSIAAVKNGKSIDTSMGFTPLEGLAMGTRSGSIDPSIISYLMEKENISAEEVVNILNKKSGVYGISGISSDFRDLEDAAFKNGDKRAQLALNVFAYRVKKTIGSYAAAMGGVDVIVFTAGIGENGPEIREFILDGLEFLGFKLDKEKNKVRGEEAIISTADSKVNVMVVPTNEEYMIAKDTEKIVESLK

SEQ ID NO: 21818 - protein, 393 aa, Geobacillus stearothermophilus
MKLAKRVASLTPSATLAITEKAKELKAAGHDVIGLGAGEPDFNTPQHILDAAIKAMNEGHTKYTPSGGLPALKEEIIKKFARDQGLDYEPAEVIVCVGAKHALYTLFQVLLDEGDEVIIPTPYWVSYPEQVKLAGGVPVYVEGLEQNHFKITPEQLKQAITPRTKAVIINSPSNPTGMIYTAEELKALGEVCLAHGVLIVSDEIYEKLTYGGAKHVSIAELSPELKAQTVIINGVSKSHSMTGWRIGYAAGPKDIIKAMTDLASHSTSNPTSIAQYAAIAAYSGPQEPVEQMRQAFEQRLNIIYDKLVQIPGFTCVKPQGAFYLFPNAREAAAMAGCRTVDEFVAALLEEAKVALVPGSGFGAPDNVRLSYATSLDALETAVERIHRFMEARA

SEQ ID NO: 21819 - protein, 398 aa, Azospirillum brasilense
MTAQGIYLDNNATTRVDPDVLAEMLPLFTEQFGNPSSMHGFGAAVGGQDRMGAQAGAGAARAAHDSEIVFTSGGTESDNTAILSTLEAYPKKKSIVTSVVEHPAVLALCDYLEKKRGYTVHRIGVDNRGNLDLDAYKRCALGPDVAIVSIMWANNETGTIFPIEELAQLAKAAGAVFHTAVQAVGKIPMNVRHSAVDMLCACGHKLHAPKGVHALYVKRGLRFRPIVRGGHQERSRRAGNGERAGHRRAGGGAHVALMHMTDENTRVKRSRQAGAAILAAVPNCFVTGNPANRLPNTCNVAFEYIEGEAILLLLNEADIAASSGSACTSGSLEPSHVMRAMGVPYTAAHGPTRLSLSRETTEEEIDRVIRVVPGMRTGRSVSPYWSQAAPEGVRPVYS

SEQ ID NO: 21820 - protein, 401 aa, Pantoea agglomerans
MKNVYLDNNATTRIDPMVLEAMMPYLRDYYGNPSSIHDFGGPCRAGLECAREQVASLLGAAYTSEIIFTSCATEATSTAIYSAIALAPERREIITTAVEHPATLAVCEHLERQGYMIHRIGVSEEGALDTAHYYDALSENVALVTMMWANNETGVLFPVSEMATAAHERGILFHCDAVQAVGKIPISLRATDIDMLSCSAHKIHGPKGCGCLYLRRNTRFRPLVRGGHQERGRRAGTENIAGIVGMGAACELADVHMPMMASVQEMRDRLETGLLTTIPHTLLMGANQPRTPNTVNIAFEYIEGEAILLLLNHCGIAASSGSACTSGSLEPSHVMRAMNIPYTAAHGSIRFSLSRFTREREIEWAIEQMPDIVARLRTLSPYWQQDKVQIAQGGLFAPTYG

SEQ ID NO: 21821 - protein, 484 aa, Candida maltosa
MYKTVLKNSGRIQRNFIFRNVSSTLQRSLATSASTSSSTTTSNAETGELHVSTPLDSPSVHPPDGSSISLKSATRDASLFGTRPIYLDVQATTPVDPRVLDKMLEFYTGLYGNPHSSTHAYGWETDKEVEKARGYIADVINADPKEIIFTSGATETNNMAIKGVPRFYKKTKKHIITTQTEHKCVLDSARHMQDEGFDITYLPVNSEGLINLDDLKKAIRKDTVLVSVMAVNNEIGVIQPLKEIGQICRENKIFFHTDAAQAYGKIPIDVNEMNIDLLSISSHKIYGPKGIGACYVRRRPRVRLDPIITGGGQERGLRSGTLAPPLVAGFGEAARLMKQESAFDKKHIEKLSTKLKNGLLSIPSTQFNGCNNPTYQYPGCVNVSFAYIEGESLLMALKDIALSSGSACTSASLEPSYVLHALGADDALAHSSIRFGIGRFTTEAEVDYVIQAINERVDFLRKMSPLWEMVQGGIDLNSIEWSGH

SEQ ID NO: 21822 - protein, 65 aa, Bacillus cereus
MNGKVKWFNNEKGFGFIEMEGSEDVFVHFSAIQSDGYKALEEGQEVSFDITEGNRGPQAANVAKL

SEQ ID NO: 21823 - protein, 54 aa, Bacillus cereus
MTLTGKVKWFNSEKGFGFIEVADGSDVFVHFSAITGDGFKSLDEGQEVSFEVED

SEQ ID NO: 21824 - protein, 64 aa, Pseudomonas fragi
MSQRQSGTVKWFNDEKGFGFITPQGGGDDLFVHFKAIESDGFKSLKEGQTVSFVAEKGQKGMQA

SEQ ID NO: 21825 - protein, 59 aa, Pseudomonas fragi
FNDEKGFGFITPESGPDLFVHFRAIQGNGFKSLKEGQKVTFIAVQGQKGMQADKVQAEA

SEQ ID NO: 21826 - protein, 63 aa, Pseudomonas fragi
MSQRQSGTVKWFNDEKGFGFITPESGPDLFVHFRAIQGNGFKSLKEGQKVTFIAVQGQKGMQA

SEQ ID NO: 21827 - protein, 986 aa, Lotus japonicus
MRIRVSYLLVLCFTLIWFRWTVVYSSFSDLDALLKLKESMKGAKAKHHALEDWKFSTSLSAHCSFSGVTCDQNLRVVALNVTLVPLFGHLPPEIGLLEKLENLTISMNNLTDQLPSDLASLTSLKVLNISHNLFSGQFPGNITVGMTELEALDAYDNSFSGPLPEEIVKLEKLKYLHLAGNYFSGTIPESYSEFQSLEFLGLNANSLTGRVPESLAKLKTLKELHLGYSNAYEGGIPPAFGSMENLRLLEMANCNLTGEIPPSLGNLTKLHSLFVQMNNLTGTIPPELSSMMSLMSLDLSINDLTGEIPESFSKLKNLTLMNFFQNKFRGSLPSFIGDLPNLETLQVWENNFSFVLPHNLGGNGRFLYFDVTKNHLTGLIPPDLCKSGRLKTFIITDNFFRGPIPKGIGECRSLTKIRVANNFLDGPVPPGVFQLPSVTITELSNNRLNGELPSVISGESLGTLTLSNNLFTGKIPAAMKNLRALQSLSLDANEFIGEIPGGVFEIPMLTKVNISGNNLTGPIPTTITHRASLTAVDLSRNNLAGEVPKGMKNLMDLSILNLSRNEISGPVPDEIRFMTSLTTLDLSSNNFTGTVPTGGQFLVFNYDKTFAGNPNLCFPHRASCPSVLYDSLRKTRAKTARVRAIVIGIALATAVLLVAVTVHVVRKRRLHRAQAWKLTAFQRLEIKAEDVVECLKEENIIGKGGAGIVYRGSMPNGTDVAIKRLVGQGSGRNDYGFRAEIETLGKIRHRNIMRLLGYVSNKDTNLLLYEYMPNGSLGEWLHGAKGGHLRWEMRYKIAVEAARGLCYMHHDCSPLIIHRDVKSNNILLDADFEAHVADFGLAKFLYDPGASQSMSSIAGSYGYIAPEYAYTLKVDEKSDVYSFGVVLLELIIGRKPVGEFGDGVDIVGWVNKTMSELSQPSDTALVLAVVDPRLSGYPLTSVIHMFNIAMMCVKEMGPARPTMREVVHMLTNPPQSNTSTQDLINL

SEQ ID NO: 21828 - protein, 349 aa, Triticum aestivum
MCGGAILSDIIPPPRRPAGGRLWQADRKKRRAGPRRVPEEEPEEEAEEGDEDFEADFEGFVDEESDGEVKPFPARRSGFSGDGLKATAAGEYDCASGSAKRKRKNQFRGIRRRPWGKWAAEIRDPRKGVRVWLGTYNSAEEAARAYDVEARRIRGKKAKVNFPEEAPMAPQQRCATAVKVPEFNTEQKPVLNTMGNADVYSCSAVDYTLNQQFVQPQNMSFVPTVNAVEAPFMNFSSDQGSNSFSCSDFSWENDIKTPDITSVLASIPTSTEVNESAFLQNNGINSTVPPVMGDANVDLADLEPYMKFLMDDGSDESIDSILSCDVPQDVVGNMGLWTFDDMPLSAGFY

SEQ ID NO: 21829 - protein, 354 aa, Agaricus bisporus
MANTYHNDLLAPYLSLDQGDKIQAEYVWIDGDGGLRCKTTTVSKKVTDIGQLRIWDFDGSSTNQAPGHDSDVYLRPAAIFKDPFRGGDNILVLAETYNNDGTPNRTNHRHHAKKVFDEAKEHEPWFGLEQEYTLFDADDQPYGWPKGGFPGPQGPYYCGAGTGKVFARDLIEAHYRACLYAGINISGINAEVMPSQWEFQVGPCEGISMGDHLWMARYLLVRIAEQWGVKVSFHPKPLKGEWNGAGCHTNFSTKAMREAGGMKFIEDAIEKLAKRHDEHIAVYGEDNDLRLTGRHETGHISNFSSGVANRGASIRVPRHVASQGYGYLEDRRPASNIDPYRVTSIIAETTILDK

SEQ ID NO: 21830 - protein, 360 aa, Glomerella cingulata
MATEAAVVSNPNTLAKYLKLDQKGSIMAEYIWIDADGETRSKSRTLKEKEYTPEDLPMWNFDGSSTGQAPGDNSDVYLKPVAVFPDPFRGSPNILVLSECWNADGTPNKYNYRHECAKLMEAHAAHEPWFGLEQEYTLLDLSNRPFGWPANGFPAPQGPYYCGVGTGKVVQRDIVDAHYKACLYSGVKISGTNAEVMPAQWEFQVGPCVGIEMGDHLWLARFLLARIAEEFGAKVSVDPKPIPGDWNGAGLHSNFSTKEMRVEGGMKHIEAAIKKLEGRHKEHIAVYGEGNEKRLTGRHETGAIDQFSYGVANRGASIRIPREYTAKGYGYFEDRRPASNADPYRITGILMETIYGSVDN

SEQ ID NO: 21831 - protein, 380 aa, Chlamydomonas reinhardtii
MAFALRGVTAKASGRTAGARSSGRTLTVRVQAYGMAAEYIWADGNEGKPEKGMIFNEMRSKTKCFEAPLGLDASEYPDWSFDGSSTGQAEGNNSDCILRPVRVVTDPIRGAPHVLVMCEVFAPDGKPHSTNTRAKLREIIDDKVTAEDCWYGFEQEYTMLAKTSGHIYGWPAGGFPAPQGPFYCGVGAESAFGRPLAEAHMEACMKAGLVISGINAEVMPGQWEYQIGPVGPLALGDEVMLSRWLLHRLGEDFGIVSTFNPKPVRTGDWNGTGAHTNFSTKGMRVPGGMKVIEEAVEKLSKTHIEHITQYGIGNEARLTGKHETCDINTFKHGVADRGSSIRIPLPVMLKGYGYLEDRRPAANVDPYTVARLLIKTVLKG

SEQ ID NO: 21832 - protein, 541 aa, Methanocaldococcus jannaschii
MCSISGIIVKDNQISAKYSIDMMKILKHRGRDNSGLLLDDEVIYFNDFEDVEDLEEEMIGNLSLAHNRLAIVGRYGVQPIPNEDETIWLVCNGEIYNYIELREYLKQNHEFRTDSDNEVIIHLYEEEKLEELDGDYAFAIYDKSKNVVRLARDMFGVKPLFYVDRDKYFAFASERKALWHLLINIDGCERDLDELNSKIKTLKPNSQLIYYLDDNRFEIIEGFKKLELNYMKERSYEEAKEYLDRALKNSVLKRVRGLDKVGIICSGGVDSSLIAKLASLYCEVILYAVGTENSEDLIYAERLAKDLNLKLRKKIISEEEYEEYVFKVAKAIDEVDLMKIGVGIPIYVASEMANEDGLKVVLSGQGADELFGGYARHERIYRERGEEELKKELLKDVYNLYKVNLERDDHCTMANGVELRVPFLDEEVVEIALSIPIEYKMSELSNRPYAESNISLKSEPINGLKNTNLNIKCVRSVRKKILRDVASQYLPDYIAYRPKKAAQYGSGGEKMIYKVAKKYGFSKKRINEFLDMLKRKIVSEF

SEQ ID NO: 21833 - protein, 395 aa, Erwinia chrysanthemi str. 3937
MLDQQTIATIKSTIPLLAETGPALTAHFYQRMFHHNPELKDIFNMSNQRNGDQREALFNAICAYATHIENLPALLPAVERIAQKHASFNIQPEQYQIVGTHLLATLEEMFQPGQAVLDAWGKRYGVLANVFIQRESDIYQQSAGQNGGWHGIRPFRIVAKQPQSSLITSFTLEPVDGGPIAAFRPGQYLAVYIRDKRFEYQEIRQYSLTNEPNGRYYRIAVKRETMGSVSGYLHDVAREGDVIELAAPHGDFYLEVTPETPVALISAGVGQTPMLSMLHSLKNQQHQADIFWLHAAENTEVHAFADEIADVAATLPQLQSYVWYREASSEAARSAHAFHGLMALKDLPTPLPMTNLHCYLCGPVAFMQFAARQLLELGITESQIHYECFGPHKVI

SEQ ID NO: 21834 - protein, 608 aa, Geobacillus stearothermophilus
MSKIIGIDLGTTNSCVAVLEGGEPKVIPNPEGNRTTPSVVAFKNGERLVGEVAKRQAITNPNTVISIKRHMGTDYKVEIEGKKYTPQEISAIILQYLKSYAEDYLGEPVTRAVITVPAYFNDAQRQATKDAGRIAGLEVERIINEPTAAALAYGLDKEEDQTILVYDLGGGTFDVSILELGDGVFEVKATAGDNHLGGDDFDQVIIDYLVDQFKQEHGIDLSKDKMALQRLKDAAEKAKKELSGVTQTQISLPFISANENGPLHLETTLTRAKFEELFAHLVERTMGPVRQALQDAGLTPEDIDKIILVGGSTRIPAVQEAIKRELGKEPHKGVNPDEVVAIGAAIQGGVIAGEVKDVVLLDVTPLSLGIETMGGVFTKLIERNTTIPTSKSQIFTTAADNQTTVDIHVLQGERPMAADNKTLGRFQLTGYPPAPRGVPQIEVTFDIDANGIVHVRAKDLGTNKEQSITIKSSSGLSEEEIQRMIKEAEENAEADRKRKEAAELRNEADQLIFTTEKTLKEVEGKVDEAEVKKAREAKDALKAALEKNDLDEIRKKKEALQEAVQQLSIKLYEQAAKQAQNQQAGADGATKKDDNIVDAEFEEVKDDK

SEQ ID NO: 21835 - protein, 613 aa, Candida albicans
MADGVFQGAIGIDLGTTYSCVATYDSAVEIIANEQGNRVTPSFVAFTSEERLIGDAAKNQAALNPKNTVFDAKRLIGRAFDDESVQKDIKSWPFKVVESNGQPLIEVEYLDETKTFSPQEISSMVLTKMKEIAEAKIGKKVEKAVVTVPAYFNDAQRQATKDAGAIAGLNVLRIINEPTAAAIAYGLGAGKSEKERHVLIFDLGGGTFDVSLLNITGGVFTVKATAGDTHLGGQDFDTNLLEHFKKEFQKKTGNDISSDARALRRLRTACERAKRSLSSGTQTTVEIDSLFDGEDFSANITRARFEDINSALFKSTLEPVEQVLEDAKISKSQVDEVVLVGGSTRIPKVQKLLSDFFDGKQLEKSINPDEAVAYGAAVQGAILTGQSTNDDTKDLLLLDVIPLSLGVAMQGNVLAPVVPRNTTVPTIKRRTFTTVADHQTTVQFPVYQGERVNCSENTLLGEFDLKNIPPMQAGEPVLEAIFEVDANGILKVTAVEKSTGRSANITISNSIGRLSTEEIEKMISDAEKFKSSDDAFAKRHEQKQKLEAYVASVESTVTDPVLSAKLKKSAKDKIEAALSDALQTLEIEESSADDYRKAELALKRAVTKGMATR

SEQ ID NO: 21836 - protein, 246 aa, Solanum lycopersicum
MGRGRVELKRIENKINRQVTFAKRRNGLLKKAYELSVLCDAEVALLVFSNRGKLYEFCSTSNMLKTLDRYQKCSYGTLEVNRSIKDNEQSSYREYLKLKAKYESLQRYQRHLLGDELGPLTIDDLEHLEVQLDTSLKHIRSTRTQMMLDQLSDLQTKEKLWNEANKVLERKMEEIYAENNMQQAWGGGEQSLNYGQQQHPQSQGFFQPLECNSSLQIGYDPITTSSQITAVTNAQNVNGMIPGWML

SEQ ID NO: 21837 - protein, 170 aa, Pseudomonas putida KT2440
MCQGAVPAGRGRHLQAKPWLRTIAHPNFLGSTCLTQLRRAVPALCSHASQYSSYKALGEQDYRRNTMSYAVIVTGGKQYKVAEGEFLKIEKLEVATGESVTFDRVLLVANGEEVTIGAPVVAGAKVVAEVVSQGRHDKVRIIKFRRRKHHMKRMGHRQWFTEIKITGIQA

SEQ ID NO: 21838 - protein, 311 aa, Pseudomonas putida KT2440
MTRDSLYGTAAESTYAGVVSFSRRRYSRDLRGVDVVVSGVPFDTATSNRPGARFGPRAIRAASVQQAWARHWPWAFDPFDHLAVIDYGDCPFDSGTPQSVPDSIEAHAEHILQAGCAMLTLGGDHFISYPLLKAHARRHGPLALIHFDAHSDTWPDEAGKRIDHGTMFWHAAREGLVDPAHSVQIGLRTTNDDSQGFAILDARQVHRQGTEAVIAAIRQRVGERPVYLTFDIDCLDPAYAPGTGTPVCGGLSTVQALEILGGLRGINLVGMDLVEVAPAYDHADITALAGATLAMEMLCLYAARHKVDNGQ

SEQ ID NO: 21839 - protein, 304 aa, Anabaena
MTQAKAKHADVPVNLYRPNAPFIGKVISNEPLVKEGGIGIVQHIKFDLTGGNLKYIEGQSIGIIPPGVDKNGEPEKLRLYSIASTRHGDDVDDKTISLCVRQLEYKHPESGETVYGVCSTYLTHIEPGSEVKITGPVGKEMLLPDDPEANVIMLATGTGIAPMRTYLWRMFKDAERAANPEYQFKGFSWLVFGVPTTPNILYKEELEEIQQKYPDNFRLTYAISREQKNPQGGRMYIQDRVAEHADQLWQLIKNQKTHTYICGLRGMEEGIDAALSAAAAKEGVTWSDYQKDLKKAGRWHVETY

SEQ ID NO: 21840 - protein, 303 aa, Anabaena sp.
TQAKAKHADVPVNLYRPNAPFIGKVISNEPLVKEGGIGIVQHIKFDLTGGNLKYIEGQSIGIIPPGVDKNGKPEKLRLYSIASTRHGDDVDDKTISLCVRQLEYKHPESGETVYGVCSTYLTHIEPGSEVKITGPVGKKMLLPDDPEANVIMLATGTGIAPMRTYLWRMFKDAERAANPEYQFKGFSWLVFGVPTTPNILYKEELEEIQQKYPDNFRLTYAISREQKNPQGGRMYIQDRVAEHADQLWQLIKNQKTHTYICGLRGMEEGIDAALSAAAAKEGVTWSDYQKDLKKAGRWHVETY

SEQ ID NO: 21841 - protein, 517 aa, Aspergillus niger
MPSLENPTFQNEARLLLVSNRLPITIKRSDDGRYDFSMSSGGLVSGLSGLSKSTTFQWYGWPGLEVPEEEIPVVKERLKQEYNAVPVFIDDELADRHYNGFSNSILWPLFHYHPGEITFDESAWEAYKEANRLFAKAVAKEVQDGDLIWVHDYHLMLLPEMLREEIGDSKENVKIGFFLHTPFPSSEIYRILPVRNELLLGVLHCDLIGFHTYDYTRHFLSACSRLLGLTTTPNGIEFQGKIIACGAFPIGIDPEKFEEGLKKEKVQKRIAMLEQKFQGVKLMVGVDRLDYIKGVPQKLHALEVFLSDHPEWVGKVVLVQVAVPSRQDVEEYQNLRAVVNELVGRINGKFGTVEFMPIHFLHKSVNFDELIALYAVSDACIVSSTRDGMNLVAYEYIATQKKRHGVLVLSEFAGAAQSLNGSIIINPWNTEELAGAYQEAVTMSDEQRALNFSKLDKYVNKYTSAFWGQSFVTELTRISEHSAEKFHAKKASFSDNNSENGEPSNGVETPAQEQVAQ

SEQ ID NO: 21842 - protein, 562 aa, Pantoea agglomerans pv. gypsophilae
MKPHSVFADSLWPSIDLLYDYAPFLQQSMVDGHIGFFPTGITPPRVAIIGAGISGLIAATELLRAGVRDITLFEARDRLGGRAWSQLFDPHYYPRLIAEMGAMRFPPSATGLFHYLNRFSIQTSASFPDPGIVDTELHYRGVRHLWPAGEQPPALFTRVHNGWRALLYEGCLLDGVSLVGPLQITAMLKSERFDEAAEAWQIWLNVFRDCSFYSAMVTIFTGTNPPGGIAWERRDDFELFGALGIGSGGFLPVYQAGFTEILRMVINGYEDDQRLIIGGISTLAEQLARQEIRGTTPGRHVRFSKVNRISKDNGKISLATDVKPVDAFDRVIVTSNNRAMQMVHGLSADETFLNQDVCRAVRETHLTGSSKLFMLTRDKFWLKNKLPLTIQSDGLVRGVYVLDYESDNPEGRGVVLLSYTWEDDAHKLLAITDKKQRGQHLVDELSAIHPEFARYLVPAGADYERYVLHHDWLTDPCSAGAFKLNYPGEDVYSQRLFFQFKTANHPEQDSGLLLAGCGCSFTGGWVEGAVQTAVNSACAVIRSTGGTLYGNPLDSVHSIYDY

SEQ ID NO: 21843 - protein, 510 aa, Phormidium laminosum
MTSTVPAETSLNKFEKLKSEKDGLAVKSELEDFARLGWEAMDETDRDHRLRWMGVFFRPVSQGKFMLRMRIPNGILTSGQIRVLAEVVERYGEDGNADITTRPNLQLRGIRLEDIPDIFRRFEQAGLTSIQSGMDNVRNITGSPVAGIDADELIDTRGLVRKVQDMITNNGEGNPSFSNLPRKFNIAIAGCRDNSVHAEINDIAFVPAYKDGKLGFNVLVGGFFSAKRCEAAVPLNAWVDPRDVVALCEAILIVYRITGCGANRQKSRLMWLIDEWGMDKFRAEVEQQLGHPLQTAAPKDEILWDKRDHIGIHAQKKPGLNYVGLLVPVGRLYAPMFDLARIAEVYGDGEMRLTVERKRDHSRTCPMSSVASLLKEPLLEKFSVSPGLLVRSLVSCTGAQFCNFALIETKNRAMALIRELESELELARPVRIHWTGCPNSCGQPQVADIGLMGTKVRKDGKATEGVDLYMGGKVGKHAELGTCVQKGIPCDDLKPILRNLLIEHFGARPK

SEQ ID NO: 21844 - protein, 1121 aa, Ceratodon purpureus
MSAPKKTYSSTTSAKSKHSVRVAQTTADAALEAVYEMSGDSGDSFDYSKSVGQSAESVPAGAVTAYLQRMQRGGLIQTFGCMVAVEEPNFCVIAYSENASEFLDLMPQAVPSMGEMDVLGIGTDIRTLFTPSSGAALEKAAATQDISLLNPITVHCRRSGKPLYAIAHRIDIGIVIDFEAVKMNDVSVSAAGALQSHKLAAKAITRLQALPGGDIGLLCDTVVEEVRELTGYDRVMAYKFHEDEHGEVVAEIRRMDLEPYLGLHYPATDIPQASRFLFMKNRVRVIADCCASPVKLIQDPDIKQPVSLAGSTLRAPHGCHAQYMGNMGSIASLVMAVIINDNEEDSRGAIQRGRKLWGLVVCHHTSPRTVPFPLRSACEFLMQVFGMQLNMEVELAAQLREKHILRTQTLLCDMLLRDAPIGIVSQTPNIMDLVKCDGAALYYGKRFWLLGTTPTENQIKDIAEWLLEYHKDSTGLSTDSLADANYPGAHLLGDAVCGMAAAKITAKDFLFWFRSHTAKEVKWGGAKHDPAEKDDGRKMHPRSSFKAFLEVVKRRSLPWEDVEMDAIHSLQLILRGSFQDIDDSDTKTMIHARLNDLKLHGMDELSVVANEMVRLIETATAPILAVDSTGMINGWNAKIAHVTGLPVSEAMGRSLVKDLVLDESVVVVERLLYLASQGEEEQNVEIKLKTFGTQTEKEAVILIVNACSSRDVSDSVVGVCFVGQDVTGQKMFMDKFTRIQGDYKTIVKNPHPLIPPIFGGDEYGYCFEWNPAMEALTGWKHDEVVGKLLVGEIFGMEMMCCRLKSQDSMTKFMISLNNAMDGTNTDKFSFSFCNREGKFVEALLSTNKRTNADGVITGVFCFLQIASSELQQALTVQRATEKVAIAKLKELAYIRQEIKNPLCGITFTRQLLEDTDLSDDQKQFLDTSAVCEQQLQKVLNDMDLESIEDGYLELDTAEFEMGTVMDAVISQGMTTSREKGLQIIRETPREISTMRLFGDQIRLQQVLSDFLINAIRFTPSSEGWVKIKVVPTRKRLGGNVHVMHLEFRVSHPGGGLPDELVLEMYDRAKGMTQEGLGLNMCRKLVRLMNGDVQYVRENAQCYFVVYVELPMAQRDDAASQM

SEQ ID NO: 21845 - protein, 1124 aa, Lathyrus sativus
MSTTRPSQSSNNSGRSRNSARIIAQTTVDAKLHATFEESGSSFDYSSWVRVSGSVDGDQQPRSNKVTTAYLNHIQRGKQIQPFGCLLALDEKTCKVVAYSENAPEMLTMVSHAVPSVGDHPALGIGTDIRTVFTAPSASALQKALGFAEVSLLNPILVHCKTSGKPFYAIIHRVTGSLIIDFEPVKPYEVPMTAAGALQSYKLAAKAITRLQSLASGSMERLCDTMVQEVFELTGYDRVMAYKFHEDDHGEVIAEIAKPGLEPYLGLHYPATDIPQAARFLFMKNKVRMIVDCNAKHVKVLQDEKLPFDLTLCGSTLRAPHSCHLQYMANMDSIASLVMAVVVNDSDEDGDSADAVLPQKKKRLWGLVVCHNTTPRFVPFPLRYACEFLAQVFAIHVNKEIELEYQILEKNILRTQTLLCDMLMRDAPLGIVSQSPNIMDLVKCDGAALFYRNKLWLLGATPTEYQIREIALWMSEYHTDSTGLSTDSLLDAGFPGALSLSDTVCGMAAVRITSKDIVFWFRSHTAAEIRWGGAKHEPGEQDDGRKMHPRSSFKAFLEVVKARSVPWKDFEMDAIHSLQLILRNASKDTDIIDLNTKAINTRLNDLKIEGMQELEAVTSEMVRLIETATVPILAVDVDGTVNGWNIKIAELTGLPVGEAIGKHLLTLVEDSSTDIVKKMLNLALQGEEEKNVQFEIKTHGDQVEFGPISLIVNACASRDLRENVVGVCFVAQDITAQKTVMDKFTRIEGDYKAIVQNPNQLIPPIFGTDEFGWCCEWNAAMIKLTGWKREEVMDKMLLGEVFGTQMSCCRLKNQEAFVNFGIVLNKAMTGLETEKVAFGFFSRKGKYVECLLSVSKKIDAEGLVTGVFCFLQLASPELQQALHIQRLSEQTALKRLKVLTYMKRQIRNPLAGIVFSSKMLEGTDLETEQKQIVNTSSQCQRQLSKILDDSDLDGIIDGYLDLEMAEFTLHEVLVTSLSQVMNRSNTKGIRIANDVAEHIAKESLYGDSLRLQQVLADFLLISINSTPNGGQVVIASSLTKEQLGKSVHLVNLELSITHGGSGVPEAALNQMFGNNVLESEEGISLHISRKLLKLMNGDVRYLKEAGKSSFILSVELAAAHKLKG

SEQ ID NO: 21846 - protein, 1136 aa, Picea abies
MSTTRPRAATHSASSGSVSRSSKHSARVITQTPVDAKLQAEFEGSVHSFDYTKSIDISGDSSSVPSETVKAYLQRLQKEMLIQPFGCVLAVEEGSCAVVGYSENAPEMLDVVGGAHAVPSIGGQQQEGGGGGGGLLRIGMDARTLFKPASAAALQKAATFADMHLVNPIFVRCNRSGKPFYAILNRIDAGLVIDFEPVMPSDVPVSAAGALQSYKLAAKAISRLQSLPGGDIRLLCDTVVQEVRELTGYDRVMAYRFHEDEHGEVVAEMRRPDLEPYLGLHYPATDIPQASRFLFMKNRVRMICDCCAPPVNVIQDKRLRQPLSLCGSTLRAPHGCHAQYMANMGSIASLVMSVTTNENGDDSEGGGQQQPQNRRKLWGLVVCHHTSPRVIPFPLRYACEFLMQVFGIQLNKEVELAAQLREKHILRVQPVLCDMLLRDAPVGIVSQTPNIMDLVKCDGAALLYGKRLWLLGTTPTEAQILDIADWLLEHHRDSTGLSTDSLAEAGYPGAASLGDAVCGIAAARITSKDFLFWFRSHTAKEIIWGGAKHDPNDKDDGRRMHPRSSFKAFLEVVKRRSLPWEDVEMDAIHSLQLILRDSFHDIDDSDSKTMIHARLNDLRLQGIDELSAVTNEMVRLIETATVPILAIDSNGLVNGWNTKAAELTGLLADEVIGRPLIDLVQHDSVEIVKKMLYLALQGEEEQNVEIKLKTFGIQEEKGPVVLIVNACSSRDLEENVVGVCFVAQDVTWQRIAMDKFTHLQGDYRAIVQNPNPLIPPIFGADEYGYCSEWNPAMEKLTGWKREEVIGKMLVGEVFGIHRMSCQLKGQDGLTKLRIVLNNAMAGKETEKFPFSFFDRHGKNTEALLSANKRTDAEGIITGVFCFLHVTSTELQQALQVQRMAEQAAMDRLKELAYIRQEIRNPLYGIIFTRKLMESTDLSEEQKQIVQTSALCQRQLVKVLDDADLESIEDGYLELDTIEFTLGTVLDAVVSQGMILSREKGLQLIRDSPEEIKTMCLYGDQLRLQQILSNFLINALRFSTSEGWVGNKVVPTKRHLGSGVNVMHMEFRITHSGQGIPEELIKEMFVHNQDMFQEGLGLYMCQQLVKIMNGDVQYLREAGRSSFIINVEFPLAQTDKQ

SEQ ID NO: 21847 - protein, 1131 aa, Pinus sylvestris
MASNSRHTQSQSTGSNNRRSSTNTNTTTNKATAMAQYNSDARLLQVFEQSGESGKSFDYTRSIQVHNRAVPEQQITAYLSRIQRGGRIQPFGCVLAVEETTFRIIAYSENEEMLDLGAQSVPSMEKPQQDVLTIGTDVRTLFTAASAHSLEKAAVAQEISLMNPIWVHCKNSRKPFYAIVHRIDVGMVIDLEPLRTGDAFMSAAGAVQSQKLAVRAISRLQSLPCGDVGLLCDTVVENVRELTGYDRVMVYKFHEDEHGEVVAEIRRSDLEPYLGLHYPATDIPQASRFLFMQNRVRMICDCMATPVKVIQSEELMQPLCLVGSTPSAPHGCHAQYMANMGSIRSLLMAVIINGNDDEGGGSGRNSMKLWGLVVCHHTSPRAVPFPLRYACEFLMQALGLQLNMELQLAAQLTEKHILRTQTLLCDMLLRDAPMGIVTQSPSIKDLVKCDGAALYYGGMCWMLGVTPTEAQIKDIADWLLEHHGDSTGLSTDSLADAGYPGAASLGDAVCGMASARITSKDFLFWFRSHTAKEMKWGGAKHHPDDKDDARRMHPRSSFKAFLEVVKRRSLPWDNVEIDAIHSLQLILRCSFRDIDDSGTKTMVHSRLNYLRLQGIDELSSVASEMVRLIETATAPILAVDYNGLVNGWNAKVAELTGLPVGEAMGMSLVQDLVFEQSVERVEKMLHNALRGEEEKNVEMMLKTFGPQKEKEAVILVVNACSSRDFTDNIVGVCFVGQDVTSQKVVMDKFIRIQGDYRSIVQSPNPLIPPIFASDEYACCSEWNAAMEKVTGWTHDEVIGKMLVGEIFGGCCRLKGQDAVTKFTIVLHQCNHGQEIEKFPFAFFDKQGKYVEALLTANKRTDADGRITGSFCFFRIASSELQHALEVQRQQEKKCFARLKELAYIRQEIKNPLYGMMFTRKLLEETDLSDDQKQFVETSAVCERQMQKVMDDMDLESLEDGYMELDTAEFILGTVIDAVVSQGMIVLREKGLQLIREIPGEVKTMRLYGDEVKIQQILADFLLNVLRFTPSPEGWVAIKVFPTLKQLGGGLHVVHLEFRITHPGLGLPAELVQDLFDRSQWATQEGVGLSMCRKLLKLMNGDVRYIRESGICYFLVNVEFPMAQREDAASIK

SEQ ID NO: 21848 - protein, 408 aa, Methanosarcina mazei
MKVLVINAGSSSLKYQLIDMTNESALAIGLCERIGIDNSIITQKRFDGKKLEKQTDLPNHKIALEEVVKALTDSEFGVIKSMDEINAVGHRVVHGGEKFNSSALINEGVEQAIKDCFELAPLHNPPNMMGISSCQEIMPGVPMVAVFDTAFHHTIPPYAYMYALPYELYEKYGIRKYGFHGTSHFYVAKRAAAMLGKPEQDVKVITCHLGNGSSITAVKGGKSIETTMGFTPLEGVAMGTRCGSIDPAVVPFIMEKEGLSTREIDTLMNKKSGVLGVSSLSNDFRDLDEAASKGNQKAELALEIFAYKIKKVIGEYIAVLNGVDAIVFTAGIGENSASIRKRILADLDGIGIKIDEEKNKIRGQEIDISTPDATVRVLVIPTNEELTIARDTKEICETEVKLRSSVPI

SEQ ID NO: 21849 - protein, 317 aa, Agrobacterium tumefaciens str. C58
MMDIMTDHENPAVTGEDNALPTRSGFVALIGPTNAGKSTLVNRLVGAKVSIVSHKVQTTRAVMRGIAIHKNAQIVFMDTPGIFKPRRRLDRAMVTSAWGGAKDADLILLLIDSERGLKGDAEAILEGLKDVPQKKILCLNKIDQVKREDLLKLAAAANEKVAFDRTFMISATNGSGCEDLMDYLVETLPEGPWYYPEDQISDLPMRQLAAEITREKLFLRLHQELPYASHVETEKWEERKDGSVRIEQVIYVERDSQKKIALGKNGDAIKAISTASRKELSEILEQPVHLFLFVKVRENWGDDPERFREMGLEFPRG

SEQ ID NO: 21850 - protein, 562 aa, Buchnera aphidicola (Schizaphis graminum)
MNNKIEKNDNNFIYKIINEDFKKNKNLLLHTRFPPEPNGYLHIGHAKSICLNFELANVYNGYCNLRFDDTNPVKENIKYINSIKNDIKWLGYQWHKKVRYSSEYFPILYEYAKELIQKGLAYVDELTKEEIREYRGTLSTVGKNSPYRNRSITENLKLFEKMKKGEFKEGEACLRAKINMSSSFIVMRDPVLYRIIFSTHHQTKKKWCIYPTYDFAHCLSDSIEGITHSFCTLEFQDNKNLYNWILKNTSIKHYSKQYEFSRLNLEYSILSKRKISILIEKKIVNGWDDPRILTISGLRKKGYTASSIRDFCHRIGITKQNNLIEFSMLEYCIRKELNKKAIRTMAVLEPIKIFLYNIDNDHEEKLIVPNHPKHLHLGTHEIIFTNTIYIEREDFKEKYDKKYKRLKIGEEVRLRYAYIIKAEKIEKDESGNIIKIICFCDINSLGKKPINRKNPAVIHWIAVKNSFPAKFKLYNQLFKIKNPDQEKNFLSYLNSNSLIVKNGFVEKKIAQKIIKKMSNNFIKLFFQFERTGYFCVDEVDSKENKLVFNRTVSLKDSWNLKK

SEQ ID NO: 21851 - protein, 552 aa, Methanothermobacter marburgensis str. Marburg
MMVEDLVYRYALMNAVKHKGKANPGAVMGAVMSNEPELRKRAPEVKEAVQAAVEKVNSLKPEEQQSEMERLGLEIRERKQKKRQGLRNLPDVKGEVVLRFAPNPSGPLHIGHARAAILNHEYARRYDGKLILRIEDTDPRRVDPEAYDMIPSDLEWLGVEWDETIIQSDRMEIYYEYTERLIERGGAYVCTCTPEAFREFKNEGKACHCRDLGVRENLQRWREMFEMPEGSAVVRVKTDLQHPNPAIRDWVSMRIVEAEHPRTGTRYRVYPMMNFSVAVDDHLLGVTHVLRGKDHLANSEKQEYLYRHLGWEPPVFIHYGRLKMDDIALSTSGAREGIVEGKYSGWDDPRLGTIRAIARRGIRSDAIRKLMVEIGVKIADSTMSWKKIYGLNRNILEEEARRYFFAADPVRFEIEGLPGPIRVERSLHPDKPELGNRILELNGDVYLPRGDLREGPLRLIDAVNVIYSDGELRYHSEGIEEARELQAAMIHWVPAESALKAVVVMPDASEIEGVIEGDASELEVDDVVQLERFGFARVDSSGERLVFYYAHK

SEQ ID NO: 21852 - protein, 391 aa, Streptococcus agalactiae NEM316
MTLEKRFNKYLDRIEVSLIRQFDQSISDIPGMVKLTLGEPDFTTPDHVKEAAKSAIDANQSYYTGMSGLLALRQAAADFAKDKYNLTYNPDCEILVTIGATEALSASLIAILEAGDVVLLPAPAYPGYEPIVNLVGADIVEIDTRENDFRLTPEMLETAIIQQGEKLKAVLLNYPTNPTGITYSRQEIASLAEVLKKYDIFVISDEVYSELTYTGQQHVSIAEYLPNQTILINGLSKSHAMTGWRVGLVYAPEAFIAQIIKSHQYMVTAASTISQFAGVEALSVGKNDTLPMRQGYIKRRDYIIDKMSKLGFKIIKPSGAFYIFAKIPDSYPQDSFKFCQDFAYQQAVAIIPGVAFGKYGEGYIRLSYAASMEVIETAMARLKVFMESYEG

SEQ ID NO: 21853 - protein, 396 aa, Streptococcus agalactiae NEM316
MGKEKLILAYSGGLDTSVAIAWLKKDYDVIAVCMDVGEGKDLDFIHDKALTIGAIESYILDVKDEFAEHFVLPALQAHAMYEQKYPLVSALSRPIIAQKLVEMAHQTGATTIAHGCTGKGNDQVRFEVAIAALDPELKVIAPVREWKWHREEEITFAKANGVPIPADLDNPYSIDQNLWGRANECGVLENPWNQAPEEAFGITKSPEEAPDCAEYIDITFQNGKPIAINNQEMTLADLILSLNEIAGKHGIGRIDHVENRLVGIKSREIYECPAAMVLLAAHKEIEDLTLVREVSHFKPILENELSNLIYNALWFSPATKAIIAYVKETQKVVNGTTKVKLYKGSAKVVARHSSNSLYDENLATYTAADNFDQDAAVGFIKLWGLPTQVNAQVNKG

SEQ ID NO: 21854 - protein, 397 aa, Streptococcus agalactiae NEM316
MSKTIAINAGSSSLKWQLYEMPEEKVVAKGIIERIGLKDSISTVKFDDKKDEQILDIVDHTQAVKILLEDLTKHGIIKDFNEITGVGHRVVAGGEYFKESALVDDKVVEQVEELSALAPLHNPAAAAGIRAFREILPDITSVCVFDTAFHTTMQPHTYLYPIPQKYYTDYKVRKYGAHGTSHQYVAQEAAKQLGRPLEELKLITAHVGNGVSITANYHGQSIDTSMGFTPLAGPMMGTRSGDIDPAIIPYLVANDSELEDAAAVVNMLNKQSGLLGVSGTSSDMRDIEAGLQSKDPNAVLAYNVFIDRIKKFIGQYLAVLNGADAIIFTAGMGENAPLMRQDVIAGLSWFGIELDPEKNVFGYFGDITKPDSKVKVLVIPTDEELMIARDVERLKAK

SEQ ID NO: 21855 - protein, 450 aa, Streptococcus agalactiae NEM316
MKVVKFGGSSLASSQQLYKVLNIIKSDYTRRFVVVSAPGKRYEEDLKMTDALIQYYQNYINGKDIVKDQTWIINRYQEIISDLSLGSTIAEEITRSIEQLASLPIENNQFLYDCFLAAGEDNNAKLVATFFNQNDIPARYVHPNEAGIIVTKEPCNARIIPGSYDKIENLCLYNEVLVIPGFFGVTEDNQICTFSRGGSDITGSLIAAGIKADLYENFTDVDGIFAAHPGVVKNPHAIPELTYKEMRELAYAGFSVLHDEALLPAYRDRIPLVIKNTNNPQQPGTKIVLKHTRSNIAVTGIASDSRFASINVSKYLMNREVGFGRKVLQILEDLNISFEHMPTGIDDLSIVLREKELTPIKEQEILNYLTRKLEVDYVDIQHNLSTIVIVGENMKSQIGVTATATQALSREKINITMISQGSSEVSIMFVINSKDEKRAIKALYETFFQK

SEQ ID NO: 21856 - protein, 330 aa, Streptococcus agalactiae NEM316
MKKSFIHQQQEISFVKNTFTQYLIDKLEIVEVQGPILSQVGDGMQDNLSGIEHPVSVKVLNIPEAEFEVVHSLAKWKRHTLARFGFNEGEGLFVHMKALRPDEDSLDPTHSVYVDQWDWEKVIPDGRRNLDYLKETVEKIYKAIRLTELAVEARFDIESILPKRITFIHTEELVEKYPDLSPKERENAIAKEYGAVFLIGIGGELADGKPHDGRAPDYDDWTTPSENGFKGLNGDILVWNEQLGTAFELSSMGIRVDEDALKRQVVLTGDEGRLEFEWHKTLLRGFFPLTIGGGIGQSRLAMFLLRKKHIGEVQSSVWPKEVRDTFENIL

SEQ ID NO: 21857 - protein, 266 aa, Streptococcus agalactiae NEM316
MLRRKRLTLYLLSCIFIFLLFYPNSTSANQLSEIKKSGVLKVGVKQDVPNFGYYNAETNQYEGMEIDIAKKIAKSLGVKPVFVPTTAQTREPLMDNGQIDILIATYTITPERKANYNISKAYYHDEIGFLVRKNSHIKTIKELDGKHIGVAQGATTKGNLEKYAKEHKLKFSYAQLGSFPELAISLYANRIDAFSVDKSILSGYLSPHTTILKEGFNTQEYGIATSKQDKVLIPYVNKLLVSWEKDGSLKHIYQKFKLKPAKVKKE

SEQ ID NO: 21858 - protein, 330 aa, Streptococcus agalactiae NEM316
MRSLFGGLREKVASDYVKIVFPEGSDERVLRAAARLKFEGLVDPVILGKADEVHDSLARLGFVDQDYSVIDPEQYEKFEEMKEAFVEIRKGKATMEDADRLLKDVNYFGVMLVKLGLADGMVSGAIHSTADTVRPALQIIKTKPGISRTSGVFLMNRESTQERYIFADCAINIDPNAQELAEIAVNTADTAKIFDINPKIAMLSFSTKGSAKAPQAEKVQEAAKIAKDLSPELAVDGELQFDAAFVPETAEIKAPNSDVAGKANVFIFPDLQSGNIGYKIAQRLGMFEAIGPILQGLNAPVNDLSRGSSAEDIYKLAIITAAQAIDEKSK

SEQ ID NO: 21859 - protein, 371 aa, Streptococcus agalactiae NEM316
MIYLDNAATTALTPSVIEKMTNVMTSNYGNPSSIHTFGRQANQLLRECRQIIAEYLNVNSREIIFTSGGTESNNTAIKGYALANQLKGKHIITSEIEHHSVLHTMTYLSERFGFDITYLKPNHGQITAKDVQEALRDDTIMVSLMFANNETGDFLPIQEIGQLLRNHQAVFHVDAVQVFSKMELDPHSLGIDFLAASAHKFHGPKGVGILYCAPHHFDSLLHGGDQEEKRRASTENIIGIAGMSQALTDATTNTLKNWTHISQLRTTFLDAISDLDFYLNNGQDCLPHVLNIGFPRQNNGLLLTQLDLAGFAVSTGSACTAGTVEPSHVLTSLYGANSPRLNESIRISFSELNTQEEILELAKTLRKIIGD

SEQ ID NO: 21860 - protein, 181 aa, Streptococcus agalactiae NEM316
MSKKHITPVFTGSLIVSLILVLLGIIVPRGFQSWTQILREQVSTNFGWLYLLLVTSILALCVFFIMSPLGQIRLGRPHSRPEYSTVSWIAMMFSAGMGIGLVFYGAAEPSSHFAISTPGAPKESQTALADAFRFTFFHWGIHAWAVYALVALALAYFGFRKQEKYLLSVTLKPLFGDKTDG

SEQ ID NO: 21861 - protein, 381 aa, Streptococcus agalactiae NEM316
MIYFDNSATTIPYPEVLRTYQEVASKIYGNPSSLHELGTTSSRILEASRKQIASLLELKANEIFFTSGGTEADNWVIKGLAFEKQHFGNHIIVSDIEHPAIKESAKWLGEYGFEIDYAPVDDKGFVDVEALVKLIKPETILISIMAINNEIGSIQPIKAISDLLSDKPTISFHIDAVQAIGKIPTKDYLTERVDFASFSSHKFHGVRGVGFLYIKEGKRISPLLTGGGQESDLRSTTENVAGIAATAKALRMVMDKEVVAIPKISKMKTIIHDELAKYEDITLFSGKEDFSPNIITFGIKGVRGEVLVHAFEGHDIFISTTSACSSKAGKPAGTLIAMGISTKLAQTAVRISLDDDNDMGQVEQFLTIFKQVYEKTKKVRG

SEQ ID NO: 21862 - protein, 347 aa, Streptococcus agalactiae NEM316
MFVKKGLFVFLLLCILSMWLMIFGVAFYYFGSLHQSLTSRIIYQFVLTVLLTTTAWFMGAYFLAFEGHFKTVFQFQEADGKQIVNCLFQLCFALYAVVMLIGSIIDRVQTKRLLLAVVSWLFLVYTPLAYLIWNSEGVFAKMGVLDFSGGMVVHLSAGLSSYILAHVIGKSEHQHNKVKNDSLFLGMILITFGWFGFNMGPVGEWNSQAIMILLNTIFAIIGGGLAWTLAAKWNGEEEKTGSLLNGIIVGLVTSTAGVGYLLTWQLLAVTFFASLFTYFVTDYVAKAFAIDDVVSSFGMNGIGGLLGSLGVGLFKLSHMPVQLLALATTILLSIIMTYIISKAIFRK

SEQ ID NO: 21863 - protein, 372 aa, Streptococcus agalactiae NEM316
MEELFCIGCGARIQTENKDAAGYTPRAALEKGLETGELYCQRCFRLRHYNEITDVHITDDEFLKLLHEVGDSDALVVNVIDIFDFNGSIIPGLSRFVAGNDVLLVGNKKDILPKSVKDGKVTQWLTERAHEEGLRPVDVILTSAQNHHAIKDLIDTIEKYRHGRDVYVVGVTNVGKSTLINAIIREITGSRDVITTSRFPGTTLDKIEIPLDDGSYIFDTPGIIHRHQMAHYLTAKNLKYVSPKKEIKPKTYQLNSEQTLFLAGLARFDFISGQKQGFTAYFDNNLNLHRTKLVGADEFYTKHVGKLLTPPTGKEVSDFPKLVRHEFTIKNKMDIVYSGLGWIRVKSEAENPVVVAAWAPEGVAVVLRKALI

SEQ ID NO: 21864 - protein, 621 aa, Mycobacterium avium
MSAPTRRPAPDAPGAAGIAPAPPAPAAKPAAGKPKRIGPEQVTGAQSVIRSLEELGVEVIFGIPGGAVLPVYDPLFDSKKLRHVLVRHEQGAGHAASGYAHATGKVGVCMATSGPGATNLVTALADAQMDSIPVVAVTGQVGRTLIGTDAFQEADISGITMPITKHNFLVVRQRNPAVLAEAFHIAASGRPARCSVDIPKDVLQGQCTFSWPPRIHLPGYKPTTKPHSRQIRERAKLIAAARKPVLYVGGGVIRGEASEQLRELAELTGIPVVTTLMARGAFPDSHRQHLGMPGMHGTVAAVAALQRSDLLIALGTRFDDRVTGKLDTFAPEAKVIHADIDPAEIGKNRHADVPIVGDVKAVIAELVEILRHDGAPGNLDIADWWAYLDDVQSTYPLSYGPQSDGSLGPEYVIEKLGQIAGPDALYVAGVGHDQMWAAQFISYEKPRTWLNSGGQGTMGFAIPAAMGAKMGRPEAEVWAIDGDGCFQMTNQELATCAVEGIPIKVALINNGNLGMVRQWQTLFYEERYSQTDLGHPLAPHPDFVKLAEALGCVGLRCEREEDVVDVINAARAINDRPVVIAFIVGADAQVWPMVAAGTSNDEIQAARGIRPLFDDETEGTP

SEQ ID NO: 21865 - protein, 430 aa, Corynebacterium efficiens YS-314
MPQNADETAPARLLRSSISDTQVKEKHMTSSRTRIAIVGAGIGGLTLAAELRRRGLEPQIYEQASELREVGAAVALSANATHFLRDRLGVGEELAEKSADVDGLILRDGRDGRVISRISSREDYHERAGAPYYGVHRADLQHILKHAVGEDAIHLNKRCIRVEERTDAAVLYFADGDTVEADLVIGADGVRSRLRREILGYDDAQFSGCHAWRGLVAPEKMPSLPDPEAIQFWMGPGGHLLHYPIGGGVQNFFLVQRHNGPWEESSWVVPVAEEDEHLRAFEGWAPAITEMISANPVTERWALFHRPPLQRWSKGRITLIGDAAHAMVPHHGQGANQSIEDAIVLADCLMEGLEQGTGWDTARQRYQELRADRARRVQITSLAAADVYHLPDGPAAEARNARLGAPDAWDRYLGWIHEHVADRYPSPVAS

SEQ ID NO: 21866 - protein, 136 aa, Corynebacterium efficiens YS-314
MLRTILGSKIHRATVTQADLDYVGSITIDADLVNAAGLIEGEKVAVVDITNGARIETYVITGDAGTGSICINGAAAHLINPGDLVIIMSYLQATDAEARAYQPNIVHVDADNRIVALGNDAGEPIPGSSLLSSRSL

SEQ ID NO: 21867 - protein, 1498 aa, Corynebacterium efficiens YS-314
MKKQGLYNPAFEHDSCGVAFVADIHGRASRRIISNALEALCRMEHRGAAGAEKTTGDGAGILLQIPDALYRADTDFDLPEPGHYATGIAFLPRARMAMLDAQKEIARIATEEGATVLGWREVRVDPRGIGEMAAEAMPSFSQLFLTVPGTSGTELDRVMFFIRKRCERELGTTGDRPTVYFPSLSARTVIYKGMLTTAQLERFYRDLQDPRMESAIAVVHSRFSTNTFPSWPLAHPYRLVAHNGEINTVRGNENWMRAREALIDSHVLGPLNRVLPVCTPGGSDTALFDEALELLHLGGYELPHAVAMMIPQPWEHSTSMNQELRDFYEYHSCLMEPWDGPAALAFTDGRYVGAVLDRNGLRPGRIAITSDGLVVMASESGVLDLDESSVVKRTRLVPGQMFLVDTAQGRVIPDDEVKRGLQASAPYGEWIRENFVHLSGLPRTRYEYMPHQRAVLRQRVFGITEEDVDLLILPMARTGAEAIGSMGSDTPIAAISQRPRMLYDFFAQRFAQVTNPPLDSIREKPVTSMYTLLGAQSDVLNPGPEAARRIRLESPVIDNHELATLIHANDHGEWDTFGAAVISGLYPVAHHGAGMKAAIARVRREVSEAIRQGSTLIVLSDRESNEQLAPIPALLLTSAVHQYLVQQRTRTRCSLVVESGDAREIHHLAMLISFGADAINPYMAFETIDELRMKGQLGDLDLDEACRNYVTAATTGVLKVMSKMGIATVSSYRGAQLADVTGLHQDLLDDYFGGIPSPISGIGLDEVAADVEARHRSAFLPRPEEHAHRELDLGGEYKWRREGEYHLFNPETIFKLQHATRTGQYAIFKDYTAKVDGQSARLGTIRGLFEFSTDRQPIPVEEVEPVSSIVRRFSTGAMSYGSISAEAHEVLAIAMNRLGGMSNSGEGGEDARRFTPEPNGDWKRSAIKQVASGRFGVTSHYLNNCTDIQIKMAQGAKPGEGGQLPPEKVYPWIAEVRITTPGVGLISPPPHHDIYSIEDLAQLIHDLKNANPDARIHVKLVAEQGVGTVAAGVSKAHADVVLISGHDGGTGASPLTSLKHAGGPWELGLAETQQTLLLNGLRDRIRVQCDGQLKTGRDVMIAALLGAEEFGFATAPLVVEGCIMMRVCHLDTCPVGIATQNPDLRAKFTGQAEHVVNFFTFIAQEVREYLAQLGFRTLDEAVGQSQVLRKRADIPADSRAAHLDLTPIFHRPVAPHFPEQDIRCTTTQDHDLEAALDNRFIEQAADTIARAAAGEQARTTLTARVSNVNRSVGTMLGSVLTRAAGASGLDDDTITLNLTGCAGNSFGAFIPAGITLTLTGDANDFVGKGLSGGRIIIRPSERAPKQLKNSPDIIAGNVLGYGATSGEMFIRGEVGERFCVRNSGATAVVEGIGNHGCEYMTGGRVLVLGPVGENFGAGMSGGIAYLLDEPDLEKKINRGLVDVEKLTPDEALWADRLIARHVALTGSTTTVRAKDLVKVMPRDYKRVLLSTLTLEEAH

SEQ ID NO: 21868 - protein, 428 aa, Corynebacterium efficiens YS-314
MNERCARVALVVQKYGGSSLESAERIRNVAERIVATKKAGNDVVVVCSAMGDTTDELLDLAAAVNPVPPAREMDMLLTAGERISNALVAMAIESLGAEAQSFTGSQAGVLTTERHGNARIVDVTPGRVREALDEGKICIVAGFQGVNKETRDVTTLGRGGSDTTAVALAAALGADVCEIYSDVDGVYTADPRIVPNAQKLERLSFEEMLELAAVGSKILVLRSVEYARAFNVPMRVRSSYSNDPGTLIAGSMEDIPMEEAVLTGVATDKSEAKVTVLGIPDKPGEAAKVFRALADAEINIDMVLQNVSSVEDGTTDITFTCPRSDGPRAMELLKKMQQQGDWTNVLYDDQVGKVSLVGAGMKSHPGVTAEFMEALRDVNVNVELISTSEIRISVLIREDDLDKSAKALHEKFQLGGDEEATVYAGTGR

SEQ ID NO: 21869 - protein, 227 aa, Corynebacterium efficiens YS-314
MEGVQDILSRAGIFQGVDPTAVNNLIQDMETVRFPRGATIFEEGEPGDRLYIITSGKVKLARHANDGRENLLTIMGPSDMFGELSIFDPGPRTSSAVCVTEVHAATMNSEMLRNWVSDHPAIAEQLLRVLARRLRRTNASLADLIFTDVPGRVAKTLLQLANRFGTQEAGALRVNHDLTQEEIAQLVGASRETVNKALATFAHRGWIRLEGKSVLIVDTEHLARRAR

SEQ ID NO: 21870 - protein, 255 aa, Corynebacterium efficiens YS-314
MMPRHLTPNHLYPDLPHDFPGENTELAPAKAPVWMRRLMDRIEAGHLRNPLAGTEVTGTTHAEKQAAVLMLFSGSETSFDLPNDASVLLTHRSPTMRSHSGQIAFPGGRIDPEDTNAVDCAFREAWEETGLDRRTATPLAQLEEVHIRATGYPVYPILGHWHSPSPVAVVSPDEADEVFDAPVYELIDPANRLMVGWRRWKGPAFRINGYVIWGFTGGLLSAIIDQAGWATDWDTDRIYDLEDTLATSRNNEPLR

SEQ ID NO: 21871 - protein, 67 aa, Corynebacterium efficiens YS-314
MAQGTVKWFNPEKGFGFIAPSDGSADVFVHYSEIEGNGFRTLEENQLVEFEIGEGAKGLQAQSVRAV

SEQ ID NO: 21872 - protein, 397 aa, Corynebacterium efficiens YS-314
MSDAFIISALRTPVGRYGGALSSIRPDDLMAHTIRSVVEGSGIDPAAFDDVVIGNANGAGEDSRNVARLAWLRAGYPDTVAGVTVNRLCASGMTSISMATALVASGQADLIVAGGVESMSRAPWVMPKPESAFAKPTAIWDTAIGPRFVNPAFPPRVNYSMLETAEEVARVKNVSREDADAFAVESQSRAQTALQAGCFNSEITAVEVTDRKGKVTIVDTDEGPRAGVTREGLARLKPIVQGGSVVTAGNSSSLNDGASAVIIASEWAIREHNLTPRARVAGATVVGLAPEIMGMGPVPATHKLLDRTGWKLDDVDAIELNEAFATQSLACIRELDLDSAKVNSWGGAIALGHPLGSSGARISITLLNRLEKSSARRGIATMCVGYGQGMALAIETV

SEQ ID NO: 21873 - protein, 383 aa, Corynebacterium efficiens YS-314
MTTPTISKQKAKFNALTVSEVRRLTDDAVEISFEVPEELQADYDYIPGQYVALRTQLDGAEVRRSYSICDIPRPGTIRVAVKKNLGGLFSTWANEELKAGDTLEVMNPQGGFTSKTHVTSLNDAETIAQEAGNNHLVAVAAGSGITPIMAIAQTVLAENPKATFEIVYANKGGADVMFAEEIGDLKDKYPQRFAVHHVLSREQRVNPLFSGRIDDEKLNLLLDQVLRTDEVKEWFLCGPFELVQLCRDELEGRGVDSANVRFELFTTGKPGDGPGQGNTGRPVIADPEGDNITISFTLDGLSGTIESPSSARESVLNAALRARPDVPFACAGGVCGTCRAKVIEGEYEMEENYALEPDEVEAGYVLTCQTRPKGDTLVVDYDA

SEQ ID NO: 21874 - protein, 401 aa, Corynebacterium efficiens YS-314
MSTPNAYLVSGRRTPVGRYGGALSAVRPDDLAALTIKAVVEEAGIDPAAVDEVIFGNANGAGEENRNVARMAWLLAGYPDSVPGITVNRLCASGMSAITMAANMIKAGEADIVVAGGVESMSRAPWVQEKPTTAFAKPGQIFDTSIGWRFTNPVFAAQEKTTYSMPETAEEVARVKNISREDADAFAVESQRRAVEAIKAGRFNSEIVPVEVKGRKGQVTVVDTDEGPRERTTAEVLAKLRPVVGGGEVVTAGNSSSLNDGASAILVVSERALEKYGLTARARVVGGASVGLAPEIMGMGPVPATRKVLERADWSIDDVDAVELNEAFASQSLACIRELGLDTDKVNTWGGAIALGHPLGSSGARITITLLNRLEQEGGTKGVATMCIGVGQGAAIAIEKV

SEQ ID NO: 21875 - protein, 402 aa, Corynebacterium efficiens YS-314
MTTSSKTPNDPSDIVILGARRTPQGKLLGQLSTLTATQLGGRAIAAALESAGVRPDQVDQVIMGQVVQSDAGQNPARQAAVEAGIGLDVPAVTVNSVCLSGLRAITDAARLLRLGEAEVVVAGGQESMSGAPHLLPGARRGVAYGSVTAVDSLERDALTDAFDQRSMGVNTDEGNGQFTISREQQDEVAALSHQRAAAAWEEGAFDAEITPVEVTVRKKGTITIDRDEGIRPETTVDSLAGLRPAFTPDGSITAGNSSPISDGAAATVLSTRAFAEAHGLEPLATIVGWANTAGPDTLLHAQPARATRAVLERAGWSTGDLDFLEINEAFGAVAVESLRELDYPLERTNIHGGAIALGHPVGTSGARIVVHAAHELARRGGGRAAVSICGGGGQGDALLLAR

SEQ ID NO: 21876 - protein, 598 aa, Corynebacterium efficiens YS-314
MVSMTTPDPYSHQPPVDDEAEELTATEELAGLLESSRTAEVDTADSPAGFPPESEKQDFSLNWGVIIPALVVVLIAVAWGIGLPDSFSSFAETALTLVVDSLGWAFVFFGTVFVFFAIVIAASKFGQIRLGHQDEAPEFRTVSWIAMMFAAGMGIGLMFYGTTEPLTFYRNGVPAHQPQEVGTAMASTLFHWTLHPWAIYAIVGLAIAYSTFRVGRRQLLSSAFVPLIGEKGATGWLGRLIDILSIIATVFGTACSLGLGALQIGAGLSAAGIIEDPSQWTVLGIVSVLTLAFILSALSGVGKGIQYLSNGNMVLAAILAIFVFVVGPTVSILNMIPTSIGAYFSSFFEMASRTAVSADGTAGEWLSGWTIFYWAWWISWSPFVGMFLARISRGRTIREFIIGVMLVPAGVSTVWFSIFGGTAITKEQGGESIWGEGVAEEQLFSLLQSLPGGQVVSIVAMILLSTFFITSADSASTVMGILSQRGKLDANRWVSASWGVATAAIGLTLLLSGGDNALNNLQNVTIVAATPFLFVIIGLMFAIVKDLRNDIIYVDYREQQRFAARLARERRIHAEAQRRAELARKKRERQAERMARRR

SEQ ID NO: 21877 - protein, 325 aa, Corynebacterium efficiens YS-314
MTAHWKENHKNLMLFSGRAHPELAEAVARDLEVEVTPMTARDFANGEIYVRFEESVRGSDCFVIQSHTQPLNKWLMEQLLMIDALKRGSAKRITAILPFYPYARQDKKHRGREPISARLIADLLQTAGADRIVSVDLHTDQIQGFFDGPVDHMHAMPILTDYIKDKYDLSNIVVVSPDAGRVKVAEKWANTLGDAPMAFVHKTRSTEVANEVVANRVVGDVAGKDCVLLDDMIDTGGTIAGAVGVLKEAGARSVVIACTHGVFSDPARERLSSCGAEEVITTDTLPQSTEGWSNLTVLPIAPLLARTISEIFENGSVTTLFEGDA

SEQ ID NO: 21878 - protein, 582 aa, Corynebacterium efficiens YS-314
MNPKRAVWERYLPGVAALVHYRRSWLRGDLLAGVTVAAYLVPQVMAYAVIAGLPAVVGLWSILLPMVIYFFLGTSRKLSIGPESTTALMTAAGVGALVGAAGGPERYAEVAAILAIAVGIVCLVGFVTRLGFLTSLLSRPVLIGYLIGIALLMIVSQLGKVTQLEVEGESTWDNVVSFAGQVGQAHLPTVLLSASVLILLFLTYWRFPKAPSALLVLLLAGAVVAIFHLERLGLDVIGEVPRGLPEPRVPDLGDLDLWALLPFAVGIAIVGFSDNILTGRAFASGRGEVIDSNQELLALGTANVATGFLQGFPVSSSGSRTVLADTAGAKTQVYSLVAMLMVVLVLLFAGPVLESFPDAALGALVIFAATRLIDVAELRRIGRFRASELFITAVTTVTVVMFGVLIGIGVAIALSLLDLIRRITTPHADILGYAPGVAGMHSMHDYPDAVPVRGLVVFRYDSPLFFANAENFLEQAEQAVVDSEQPVEWFLINAEANTEIDLTAVDMLEELRIRLEERGITLALARVKQDLHRQLEPTGFIDRIGEENIFATLPTAVREYARRYHEKHGQWPDGVPGYILNP

SEQ ID NO: 21879 - protein, 362 aa, Corynebacterium efficiens YS-314
MIYLDNAATTGVRREALEAMWPYLTSHFGNPSSPHGVGEVAAAGLEAARRSVARVVGGRASQVIFTSGGTEADNLAIKGIALANPRGRHIITNPLEHSAVLESIDYLVRFHNFEVSYLTPDEYGLVSPTELAQLTRPDTTLVSIHYANNEIGTVQPIRELAAATTAPVHTDAVQAAGLPLTDLGVDAISLSGHKVGAPKGIGALWCRLPVEPVLHGGGQERGRRSGTENVAGAVAFAAALNASLVDAPPDLTDFITTVLTIDGAHLTGHPTRRLPGHASFVFDHTAGETVLLELEQRGIICSPGSACGSGEVPHVLLAIGLPEELARTSVRFTFSPVNTREEVDTAAHAVVEAVSAVRAIGG

SEQ ID NO: 21880 - protein, 486 aa, Corynebacterium efficiens YS-314
MAMSEVPAAAQPGAAPGSSETTSDPNRRQELGTGLRTRHLTMMGLGSAIGAGLFLGTGVGIRAAGPAVLLAYIAAGVIVVLVMQMLGEMAAARPHSGSFSKYAEDAFGHWAGFSLGWLYWFMLIMVMGAEMTGAAAIMGAWFGVDPWIPALVCVVFFAIVNLAAVRGFGEFEYWFAFIKVAVIVVFLIVGVGLIFGLLPGSTFVGTSNFIGDHGFMPNGLSGVAAGLLAVAFAFGGIEIVTIAAAESDQPRRAISLAVRAVIWRISLFYLGSVLVITFLMPYESIDNAETAAESPFTRILDMANIPGAVGLMEAVIVLALLSAFNAQIYATSRLVFAMSRNQDAPRVFSVLSRSGVPTAAVLLSMFFAFVSVALQYFNPAGLLDFLLNAVGGCLLVVWAMIALSQLRLRPKLEHNGEISTVRMWGHPWLGILTLVLLAGLVLLMLGNEGSRSQVFSVAVVYGFLVALSFTTTRSPLRGKRTGLIDR

SEQ ID NO: 21881 - protein, 314 aa, Corynebacterium efficiens YS-314
MENETFGTELPDTWVGRIDGDNPEHALWYTTVSPLPEPDEVEEGVVTLGFASDEGNLRNHGTAGAALGPDAIRGVLGLVAVHDARPRYDAGTIRVGGDLERGHDELSDAVETIARAGHLPIVLGGGHEAGFGSHRGIYRARGSSPAIINLDAHLDLRAAERPTNGTPFRQVRELVGEEFRYSVLGVSVPNNTDFLFNAAREFGTEVTTDDEINAMSPQEAADHALALVRDAEHIHLTVDIDVLSEALAPGTGSPAAVGVELGRIRAICTGLAATGRLTLVDVVEVNPRLDHNNQTARVAARLIHEIAEAHLKAT

SEQ ID NO: 21882 - protein, 465 aa, Corynebacterium efficiens YS-314
MNASPTVTDQLVQTRKFKGLRARHIHFIALGSAIGTGLFYGSAGAIQAAGPSVLLVYLLGGAVVYFMLRALGEMSVRHPVRGSFAVYTRAHLGGWAGYITGWMFAFEMLIVCLADLTAIGIYMKFWFPDTAQWVWVAATLLIVGGANLASVRWFGELEFVFTLIKVTAVIAMIVGGAAILAFGLGNSPEVSGISNLWEHGGFFPNGIEGMIAAFILVLFAFGGTEIIGVAGSEAEDPEKSIPKAVNTVPARILLFYVGAILVILALNPWQTITGEESPFVQIFSTLGVNWAAGLLNLVVITAALSAINADLFGAGRVLTGLAKENLAPKIMGRVAGNGVPIMTTVIMIIVLILGVVLNVILPERVFEIVASLATFATVYVWLMILLAQVASRRQMSAQEVAGLKFPVPFYPFGQYFAILFIAFTFGIMVWYDNYHLALGVGVGFLVVMTILYYATGRPKAIAPAQ

SEQ ID NO: 21883 - protein, 736 aa, Corynebacterium efficiens YS-314
MRNTDNVNGDVEQPDNVISSESQETPQGDSAAADFALDTPTNTVEGTAVSEGSEEITRVAEISEDADSAEAADSASNVINENVNEDSSEDVTQSSHESSSTEASTGFDALGLPQQVLDAVRKVGFETPSPIQAQTIPVLMDGHDVVGLAQTGTGKTAAFALPVLSRIDKSVRSPQALVLAPTRELALQVADSFQSFADHLGGLNVLPIYGGQAYGIQLSGLRRGAHIVVGTPGRIIDHLEKGSLDISGLRFLVLDEADEMLNMGFQEDVERILADTPDDKQVALFSATMPNGIRRLSKQYLNNPQEISVKSETRTATNITQRFLSVAHRNKMDALTRILEVTEFEAMIMFVRTKHETEEVAEKLRARGFSAAAINGDIAQAQRERTVDQLKDGRLDILVATDVAARGLDVERISHVLNYDIPNDTESYVHRIGRTGRAGRTGEAILFVTPRERRMLRSIERATNAPLVEMELPTVDEVNEYRKVKFADSITEALENPQVALFRTLIKEYAEKNDVPLEDVAAALATQAQAGNDFFLTEQAADRDRGRGDRRRDRDFDDRGGRGRDRGDRPSRFDRDDANLATYRIAVGKRQHVRPGAIVGALANEGGLNSKDFGRITIAADHTLVELPKDLPQSVLDNLRDTRISGQLINIERDSGGRPPRRFERDDRGGDRGGRGGFRGDRDDRGGRGGFRGGRDRDDRGGRGGFRGDRDDRGGRGGFRGGRDRDDRGGRGGWRD

SEQ ID NO: 21884 - protein, 535 aa, Corynebacterium efficiens YS-314
MYNNPLKENLVSDNTWFIIAIIIYMLVMVLIGFWSYRKTAKYDEYMLGGRGLNPFVAAMSAGASDMSGWLLMGLPGALYVTGMSELWIAIGLTVGAWANWMWVAPRLRSYTEVSRNSITLPSFFENRLRDNSRFLRIVAALIIIVFFTFYISSGMVAGGVYWESTFGGDYLTGMIIVASVTVLYTFIGGFLAVSYTDAVQGTIMFFSLIIVPVFAILALNNPGDIFSFAASNDYGPYTDGVGNPTYFSMITGVSVAAIIGNIAWGLGYFGQPHIVVRFMALRSPAEAKQGRRIGISWMILCLTGATFTALAATVFFAQNPDYSVTDTRAYESVFLDLARVLFHPLIAGLVLTAVLAAIMSTMSSQLLVTASSLIEDLLQVVKKDGLSQKTLLALSRATVIILAIIAGAMAVNPSDSILGLVGFAWAGFGSAFGPIILAMLYWKRLNAPGAIAGMITGAVVSIVWGSTALGDIIYEIVPGFALATIVMVIVSLATKAPSREITDEFDTAVRLSHATSMTDEDVDFSEVAQEIKKGR

SEQ ID NO: 21885 - protein, 373 aa, Corynebacterium efficiens YS-314
MDTFYLDHAATTPMRAVAADTWMEHAQALNPGGQYGSGRRARSVVDTAREEIAELLGCEPIEVIFTASGTEADNLAIQGLYRASPMNRIVSTPIEHPGVLETVKALGTEGAQVDLLPMGGDGRVSSFEALAQPAAVATMMWANNETGAIQPVEQFIAAAGETPTHIDAVQVVGHLPVDFHALGATTLAASAHKFGGPRGVGLLLARRSPAPSAVLHGGGQERGIRPGTLDVAGAAATAAALREAVAEIDTELARLSALRDRLYDGILSLIDNVLVHTTEPALPGHLHLSFPGAEGDSLIMLFDSMRIEASTGSACSNGVNRASHVLLAMGISESDARGAIRFTLGRTTTEADVEAVLTVITDVVARARTAGLA

SEQ ID NO: 21886 - protein, 665 aa, Corynebacterium efficiens YS-314
MLWVDTPASNIARTSVAPREHAPASEQLNSDSPRGVIRNPSTKRSQKVVNVAASQQPTPATVASRGRSGAPERMTGAQAIVRSLEELNADIVFGIPGGAVLPVYDPLYSSTKVRHVLVRHEQGAGHAATGYAQVTGRVGVCIATSGPGATNLVTPIADAHLDSVPLVAITGQVGRSLLGTDAFQEADIRGITMPVTKHNFMVTDPNDIPKALAEAFHLAITGRPGPILVDIPKDIQNAELDFVWPPKIDLPGYRPVTVPHSRQIEQAVKLIGEAQKPVLYIGGGVIKADAHEELLAFAEYTGIPVVTTLMALGAFPESHELNMGMPGMHGTVAAVGALQRSDLLITIGARFDDRVTGEVSSFAPDAKIIHADIDPAEIGKIRQADVPIVGDAREVLTQLLASVRNKTNATGDVSAWVDYLRDLRERFPRGYDEQTDGSLSPQFVIETLSREVGPDAIYCAGVGQHQMWAAQFIDFEKPRTWLNSGGLGTMGYAVPAALGAKAGAPEKEVWAIDGDGCFQMTNQELTTAAVEGFPIKIALINNGNLGMVRQWQTLFYEGRYSNTKLREQGSYVPDFVQLSEGLGCVAIRVTKEEEVIPAIQKAREINDRPVVIDFIVGEDAQVWPMVSAGASNSDIQYALGLRPLFDTEESAGENPADIDAVTTRA

SEQ ID NO: 21887 - protein, 327 aa, Corynebacterium efficiens YS-314
MAMMNRRTFLGATALGAMGTLGLLGGRAAGSSPTAPTPGDSVTIGYVPIACSSPLLVADALGLFQSHGVTVKLRKFAGWADLWSAYLTRELDVTHMLSPMAVAPTFRPTTLAYTLNTNGQAITIASDLHSQVRGLEDLKGRVIGIPFEYSIHALLLRDQLAAHGVDPVSDLELRLLRPADMVAQLEVGGIDGFIGPEPFNQRVLATGSGRVLHMTKEFWDRHPCCAVSMGDDWLAAHPTQAQAITAALAEASTFLNSDGNHVAAADLLSREMYLNQPAKLIAPVLEGSYRNWAGKDVIDPDRIHFGDPTDPVATAWMREQLYRWELV

SEQ ID NO: 21888 - protein, 530 aa, Corynebacterium efficiens YS-314
MSQNGRPVVLIADKLAQSTVDALGDAVEVRWVDGPNRPELLEAVKEADALLVRSATKVDAEVIAAAPNLKIVGRAGVGLDNVDIPAATEAGVMVANAPTSNIHSACEHAVSLLLSTARQIPAADATLRDGEWKRSSFNGVEIFGKTVGIVGFGHIGQLFAQRLAAFETTIIAYDPYANPARAAQLGVELVELEELMGRSDFVTIHLPKTKETAGMFDAELLAKAKKGQIIINAARGGLVDEQALADAIESGHIRGAGFDVYETEPCTDSPLFKLPQVVVTPHLGASTEEAQDRAGTDVADSVLKALAGEFVADAVNVSGGKVGEEVALWMELARKLGLLAGKLVDGAPVSLEVTARGELSSEDVSALGLSAVRGLFSGIIEEPVTFVNAPRIAEERGVSVDVKTNSESVTHRSVIEVKVVTGEGNTASVVGALTGLERVEKITRINGRGLDMRAEGRNLFLEYTDAPGALGTVGTKLGAAGINIEAAALTQAAKGDGAVLILRVEREVPEELVEEITAELNADSFQVNLG

SEQ ID NO: 21889 - protein, 401 aa, Corynebacterium efficiens YS-314
MTNRVVLAYSGGLDTSVAIPYLSKMTGGEVVAVSLDLGQGGEDMESVRQRALDCGAVESIVIDAKDEFAEEYCLPTIKANGMYMKQYPLVSAISRPLIVKHLVQAAKEHGGTHVSHGCTGKGNDQVRFEVGFMDLDPSLEIIAPARDYAWTRDKAIEFAEENNVPIEQSAASPFSIDQNVWGRAIETGFLEDLWNPPTKDLYAYTEDPALGNAPDEVIITFKSGKPVAIDGRPVTMLEAIEELNRRGGAQGVGRLDMVEDRLVGIKSREIYEAPGAIILITAHEAMEDVTIERELARYKRGIDARWSEEVYDGLWFGPLKRSLDAFIESTQEHVTGDIRLVLHAGKVTVNGRRSGSSLYDFNLATYDTGDTFDQTAAKGFVQLHGLSSKIANKRDREAGEN

SEQ ID NO: 21890 - protein, 252 aa, Corynebacterium efficiens YS-314
MSTLEIRNLHAQVLPSDESAEPIEILKGVNLTINSGEIHAIMGPNGSGKSTLAYTIGGHPRYEITEGEVLLDGENILEMEVDERARAGVFLAMQYPTEIPGVSVANFLRSAATAIRGEAPKLREWVKEVRSAQEALSIDPEFSNRSVNEGFSGGEKKRHEVLQLDLLKPKFAIMDETDSGLDVDALRIVSQGINSYKEETNGGILMITHYKRILNYVEPDFVHVFADGRIVTTGGPELADQLEAGGYDQFIK

SEQ ID NO: 21891 - protein, 439 aa, Corynebacterium efficiens YS-314
MDPSDLAWILAAFALVSLMFPGLALLYGGMLGGHQVLNTLMMVMGALAVTCLVYVTYGHGLVMGNSIGGLGIIGNPLDHLGFHDIMADDGAGGLMWAGFYVLFAAISLALVASGAAGRMKFGAWMVFGAIWLTLVYAPLAHWVFGGGWMITALGFHDFAGGTAIHMNAGASGLALALVLGRRHSMAVRPHSLPMTLLGAGMIMVGWFGFNGGTAGGANFLASYVVVTTLLATGGGMLGFILIERIREGRSTLLGLATGIIAGLVAITPAADAVSPVGALITGFLGSAVAAWVISWKRTHRIDDTLDVFAVHGMAGVAGALFVMLLGSPDAPAGLAGVLRGGELSLLWREPLAIIITLGYAFGMTWLIATVMNRITPIRIASEDEYTGIDTAIHAESAYSLTPVGMASRTNPETRIPEETAPADRAGVAKRNTDQKEDAR

SEQ ID NO: 21892 - protein, 294 aa, Corynebacterium efficiens YS-314
MSHKRMFTRLAAATSAAVLAGITLTACGDSEGGDGLLAAIENGNVTIGTKYDQPGLGLRNPDNSMSGLDVDVAQYVVNSIADDNGWDHPTVEWRETPSAQRETLIQNGEVDMIAATYSINPGRSESVNFGGPYLLTHQALLVREDDDRIQTLEDLDDGLILCSVTGSTPAQKVKDVLPGVQLQEYDTYSSCVEALSQGNVDAMTTDATILFGYAQQREGEFRVVEMEQDGEPFTNEYYGIGITKDDTEATDAINAALERMYADGSFQRFLTENLGEDSQVVQEGTPGDLSFLDE

SEQ ID NO: 21893 - protein, 441 aa, Corynebacterium efficiens YS-314
MPSMTADQIVATSGHAAWMLISASLVLLMTPALALFYGGMSRQKSVLNMMMMSFGTLGVVSVIYVLWGWSMSYGTQSWGGIVANPLEFFGLRNSITDAGGNYLEGASGYANIIDIGFQLTFAVISTALISGALAERVKFSTWLTFTALWSTFVYFPLAHMVWGGGLLAHGETGFAAWLFGVTDGEATIAPIDFAGGTVVHISAGTAALVLALIIGARRTFPMVAARPHNLPLVMLGAALLWFGWFGFNGGSAFAADGLAGLAWLNTTAATAAAILGWLATERLRDGHATSLGAASGVVAGLVTVTPAAGALTPLTALILGVIGGILACLGVGLKYRFGFDDSLDVVGVHLVAGLWGTVGVGLLATDAGWFTGGGMDGFRLFIIQIVIAVVAMIFAAVITAVIAYLLKATMGWRIDEDKEQHGIDTAEHGESAYDTAGPEIR

SEQ ID NO: 21894 - protein, 640 aa, Corynebacterium efficiens YS-314
MCGLLGILSANGNAADYVPALQRALPCLHHRGPDEAGTWQDGDLAFGFNRLAIIDIAHSHQPLRWGPEGEPERYAMTFNGEIYNYIELREELTALGYAFETEGDGEPIMVGFHHWGADVVNHLRGMFAIAIWDTVDRSLFLARDQFGIKPLFYATTGVGTVFSSEKKAILEMAEELNLDLSLDRRAIEHYVDLQYVPEPETLHTGIRRLESGCTATIIPGGELVEKRYFTPRFPVKSVPKGREQDLFDRIARVLEDSVEKHMRADVTVGSFLSGGIDSTAIATLAKRHNPNLLTFTTGFEREGYSEVDVAAESAAAIGVEHIVKIVSPEEYANAIPKIMWYLDDPVADPSLVPLYFVAAEARKHVKVVLSGEGADELFGGYTIYREPLSLAPFEKIPTPLRRGLGRLSRVLPEGMKGKSLLERGSMTMEERYYGNARSFNFEQMQRVIPWARREWDHREVTAPIYAQSRDMDPVARMQHLDLFTWMRGDILVKADKINMANSLELRVPFLDKEVFKVAETIPYDLKIANGTTKYALRKAMEQIVPPHVLHRKKLGFPVPMRHWLAGDELFGWAQDTINESQTDEIFNKKAVLEMLNEHRAGVSDHSRRLWTVLAFMVWHGIFVENRIDPQIEQRDYPVEL

SEQ ID NO: 21895 - protein, 323 aa, Corynebacterium efficiens YS-314
MGLCWLVTLPTRDPVRGSMSFTDTPEGFRSGFVSFVGRPNTGKSTLTNALVGEKIAITADQPETTRHPIRGLVHREDAQIIVVDTPGLHRPRTLLGERLNESVKDTYSDVDLIGLTIPATDKIGPGDRWILDAVRTAAPKTPIVGIVTKIDKASWDQVAAQLMAVHELLGGESEVVPVSSASGENIDTLAAVIAGLLPEGPKYYPDDHITDEDIETRMSELIREAALSGLKDELPHSIAVEIDEVLPDEPRPGMLTVHAIIYVERPGQKDIIMGHNNQRMGRIIHNSRQQLTKLLGKNIYLDLRIKILKNWQSDPKALNRLGF

SEQ ID NO: 21896 - protein, 615 aa, Corynebacterium efficiens YS-314
MSQKITLSQDPEEKHFLGLKSDPFIFLLSVGIIVTFVVATVILGDTARDGFSAMAGWLLENLGWMYVGGVSLILVFLIGIFASRYGRVKLGDDDDEPEHRLLVWFAMLFAGGVGAVLMFWGVAEPINHAFNVPMVNEEPMSEAAIEQAFAFTFYHFGIHMWVVMTLPGLALGYFIYKRKLPPRLSSVFAPLLGRHIYSTPGKLIDVLAIVGTTFGIAVSVGLGVLQINSGMNKLWGTPIASWTQLLVILVITVVACISVASGLEKGIKLLSNINIATAVALMVFILLTGPTLTLIRFVVEAFGIYAGWLPDIMFWTDSFQDNPGWQGKWTVFYWAWTICWSPYVGMFIARISRGRTVREFIGGALALPAIFGVIWFAIFGRAGIELELNSPGYLTDPVVVEGDVPAALFNLLAAYPLTGIVSALALAIIVIFFITSIDSAALVNDMFATGEENKTPTSYRIMWACTIGAVAGSLLIISPESGIATLQEVVIIVAFPFFLVQFIMMYSLLKGMSEDAAATRRVQTRKWEKTDTPEKLEEHQSRPAPGYDEDGNPLPIPALEHDEDGNIRIPGNVVIGGDLGVVGDVVDDPNEAQDMEDRFKIVEQTRPQSRDDYKG

SEQ ID NO: 21897 - protein, 521 aa, Corynebacterium efficiens YS-314
MSHQVALAFEDGITRFIECEDEQTVADAAYQARINIPFDCRDGACGTCKAFCESGDYEEGDYIEDALSEDEAEQGYCLPCQMFPRTDLILQIATTSVLAKTGAATFTGELVELNRLSDSTFGITIELENRSDLAFLPGQYMNIEVPGTGQTRSYSFSSSTEDDKVSFLIKNTPGGLMTTYLDEQAAVGDKLELTGPMGSFFLREPVRPILLLAGGTGLAPILAILEKLATDELLDVPIRMVYGATFDHDLVELDRIDSFKDKIKDFDYITVISDDASNHERKGYVPAHLTGEYEPDEDTDVYLCGPPPMVEAVRQFFGTLENPPLDFYYEKFTSAAGTPGKTDVEVTTETVESARDGEERSVVEVSTPGMTTGEVHVSRPDSESQLEARMALELGALELAIRKLGDRDIERFRTLAETANSFIDGDRIIDAEKFTEANADFHEFLFRRADNSALMGAYQNLTVITEMKKALPGAEWIDPNIATEHLELVDAVAAKDIEKAREIIRTHAQHGIETMRKAESE

SEQ ID NO: 21898 - protein, 482 aa, Corynebacterium efficiens YS-314
MEELNSFVVVANRLPVDMTAHPDGTYSITPSPGGLVTGLSPVLEQHRGCWVGWPGTVDVAPDPFRTDTGILLHPVRLTASDFEGFYEGFSNATLWPLFHDLIVPPVYDVDWWHDFREVNLKFAEAVNQVAAENATVWVQDYQLLLVPGILRQMRPDLCIGFFLHIPFPNPELFRQLPWREEIVRGMLGADLIGFHLPQNADNFLSLTRQVAGTAGSHTGQPDELEVEGEAAIREVKAHVITADGRKVGVGAFPISIDTGAVEQASQSSVEALRADLGSPEIVFLGVDRLDYTKGILQRLLAFEELLESGGLDPATTVFLQVATPSRERIEHYRVSRSQVEEAVGRINGRFGRMGHPVVHYLHRSLPKDDLQILYTAADVMLVTPFKDGMNLVAKEYVAAHRSGTGALILSEFAGAADELTEAYLCNPFDLESIKRQMLAAVHDLRHNPDYAAERMRANSEQVLSHDVNVWASSFLTCLEDFK

SEQ ID NO: 21899 - protein, 368 aa, Corynebacterium efficiens YS-314
MDRYPATTAGVPVMTGAYRRPGRLLPTLVGALLSATLLASCVNPEIDTSATMDDMYPRINPEAGPPLPPGSKVEAPGTVPARPVITDTWEGSLSPDDRQPKERVPEIFQRGRLIVGVDQSKNLLSFRDPVSGQLRGFEVQLAKEIARDIFGNPEAVDFRFIEAGDSLRGLSRGDVDMVIRSVSVTEDRLRRMEFSTPYMRTQTRLLVMDNSGIQGIEDLAGNTVCVADGSTALQKTRAMAPESSILRTRNWSDCLMALQQQQAQAILGDDAVLAGIAAQDPYTRILPSILAWESYAVAIAPSRASRDTTGLVRQVNATMERIQEDTTWWSMFNDWFGQHLYTYGPPPLQYRDEPQAEDGDDGETDDGQ

SEQ ID NO: 21900 - protein, 398 aa, Corynebacterium efficiens YS-314
MALALVLNSGSSSIKFQLVNPANHATDDPFVSGLVEQIGEKMGRIILKIEGEKVVKEAPIADHSAGLSMSFDLMTEHGCGPSQVDIIAVGHRVVHGGILFSAPELITDEIVEMIRDLIPLAPLHNPANIDGIEVARRILPDVPHVAVFDTGFFHSLPPAAALYAINKDVAAEYGIRRYGFHGTSHEYVSSRVVDLMDKPAEEINTITFHLGNGASMAAVKGGVAVDTSMGMTPLAGLVMGTRTGDIDPGVVFHLARNANMSIDEIDNLMNKKSGVKGLSGVNDFRELHQMIEDGDQDAWSAYNIYIHQLRRYLGSYMVALGRVDCLVFTAGVGENAHFVREDALAGLEMYGIKVDPERNKLPNDGPRLISTDDSTVKVFVIPTNEELAIARYSAKFAE

SEQ ID NO: 21901 - protein, 504 aa, Corynebacterium efficiens YS-314
MRYRASNDAKLCEESQHLPRVPSGTHLVERITPISSGLREERRCMSDTPTSALITTVNRSFDGFDLEALARDLEVNLVPIRGDDFDMSKVLAADLLADGPALIVGAGNAHFDAQVAAALGVPMLMLVDKRGSHVTLARTQAKNVGAVVVAAFTAEEEAKPDKLKKAVRNHGNLEPVMSAALFENWLLKRARKEQAHIVLPEGEDDRILMAAHQLLEKDICELTILGDPEQIHSRATELGLHLEKADVINPLTDPKLDEFAEQFAELRKSKGITLEQARETMKDISYFGTMMVHNGDADGMVSGAANTTAHTIKPSFQIIKTVPEASVVSSIFLMVLRGRLWAFGDCAVNPNPTAEQLGEIAVVSAKTASQFGIDPRVAILSYSTGNSGTGPDVDRAIDALAEARRIDPDLKVDGPLQFDAAVDPGVAKKKMPDSDVAGHANVFIFPDLEAGNIGYKTAQRTGHALAVGPILQGLNKPVNDLSRGATVPDIVNTVAITAIQAGGK

SEQ ID NO: 21902 - protein, 619 aa, Corynebacterium efficiens YS-314
MGRAVGIDLGTTNSVVSVLEGGEPVVIANSEGSRTTPSVVAFAKNGEVLVGQSAKNQAVTNVDRTIRSVKRHIGTDWSVAIDDKNYTAQEISARILMKLKRDAEAYLGEEVTDAVITVPAYFEDSQRQATKEAGQIAGLNVLRIVNEPTAAALAYGLEKGEQEQTILVFDLGGGTFDVSLLEIGDGVVEVRATSGDNELGGDDWDQRIVDWLVEKFQSSHGIDLTKDKMALQRLREAAEKAKIELSASQNANINLPYITVDADKNPLFLDENLSRAEFQRITQDLLDRTKTPFNQVIKDAGISVSEIDHVVLVGGSTRMPAVTDLVKELTGGREPNKGVNPDEVVAVGAALQAGVLRGEVKDVLLLDVTPLSLGIETKGGVMTKLIERNTTIPTKRSETFTTAEDNQPSVQIQVFQGEREIASANKLLGSFELGGIAPAPRGVPQIEVTFDIDANGIVHVTAKDKGTGKENTITIQDGSGLSQEEIDRMIKDAEAHAEEDKKRREEQEIRNNAESLVYQTHKFVEENDGKISEELKGKVEEAAKGVEETLKGEDIDAIKTAVDKLNTESQEMGRAIYEAEAAAGATQADAGAEGAADDNVVDAEVVDEDVSEEKKDGDK

SEQ ID NO: 21903 - protein, 583 aa, Corynebacterium efficiens YS-314
MNQPPQDRWGTTLSGARNTMSPTTAPAQAAKPARPARKPKPEGQWKIDGTAPLNHVEEVKQDEAAFEVKQRVIDIYSKQGFSSIHPDDIAPRFKWLGIYTQRKQDLGGELTGQVPDAELQDEFFMMRVRFDGGQASPERLRVVGEISRDYARSTADFTDRQNIQLHWIRIEDVPTIWEKLESVGLTTMLGCGDVPRVILGSPVAGVAAEELIDATPAIDAIRERYLDRDEFHNLPRKFKSAITGNARQDVTHEIQDVSFVPSVHPEHGVGFECFVGGGLSTNPMLAQPLGAWIPLDEVPEVWAGVAGIFRDYGFRRLRNRARLKFLVAQWGIEKFREVLETEYLERTLIDGPEITTNPGYRDHIGIHPQKDGKFYLGVKPTVGHTTGEQLIAIADVAEKHGISRIRTTADKELLFLDIEREKLTEVARDLDEVGLYSSPSEFRRGIISCTGLEFCKLAHATTKSRAIELVDELEERIGDLDVPIKIALNGCPNSCARTQVADIGFKGQTVTDADGNRVEGFQVHLGGSMNLDPNFGRKLKGHKVIADEVGEYVTRVVTKFKEQRTEGEQFREWVQRAAEEDLS

SEQ ID NO: 21904 - protein, 404 aa, Corynebacterium efficiens YS-314
MIGVSRPTPQNSYPGGSTVIVSTKPLTDRSRLSEAHAEMIKATLPLVGSKINDITPVFYNRMFTAHPELLRSTFNRANQKQGDQQKALAASIATFATMLVDPEAPDPVDMLARIGHKHVSLGITADQYNIVHEHLFGAIVEVLGADVVTPPVAEAWDAVYWLMANVLIDLESDLYASNDLAPGDVFRHVTVTGKKQLSDKVWEYTFEGDLVTPAPGQYTSIGVKLPDGARQLRQYSLLSGTDSQYRIAVEDNGEVSTFLRDNVEVGDTIEASVAAGDLVMNDDVNPVVLISQGIGSTPMVGMLNQVAADRHVTVLHADQSEKDHAQREEMVALVGGLANGALYTFYRDADQWLNVAGHIPSDASVYLCGGNEFLQNVRGQLENLEEQPREIRFELFSPNDWLIS

SEQ ID NO: 21905 - protein, 602 aa, Corynebacterium efficiens YS-314
MLTRLAQALRLKTDPAVFFSSVGIMVAFVIITIVAGDTVSDVFGTASDWLLTNLGWFYVLGVTVFLIFLVLIAVSRFGHVRLGADDERPEYSTPVWFSMLFAAGIGTILMFWGVAEPISHFANPPIGNTEPESVEAANQAIALTHYHFALHTWTIFALPALCFAYFIYKRKMPPRVSSIFSPLLGSKVYGPIGKTIDVVALIGTVFGVATSVGLGTLQINAGLGELFDVEVSPMAQLVIIVAVTSVASVSVALGLDRGIKVLSNINILMAIALLIFVILAGPTVLILKGTFESVGTYLRWLPELAFWNNTIPNSPENETWQNTWTVFYWAWTITWSPFVGIFIARISRGRTIREFVAGVLGLPVMFSLLWFGAFGTAAFNIERNGEGGLVNRVVTEGDIPGALFEFLSNYPAATFVSGVAILIVIIFFTTSVDSAAMVTDMIASGQEPRFAPTHQKLIWTVLMGTVAAVLLVATGAGGLTALQQTIIVVGLPFFVMGFIQMYSLWVALKNDAGVAVPVVTRQWEPATDPEAWEKNEAVASPEPIGPIHHIPDRDVEDPVNPAVIGAVLEQIQHGDEDDYDNRVKYVEISSPRVPEDDKDQDR

SEQ ID NO: 21906 - protein, 251 aa, Corynebacterium efficiens YS-314
MEYGTPPPPSTSPTPDATCAHGLSNFPHCDEHHPRLPRQYAPQSGAELVLPRTSSPLTPHPHRTTCSHPVNPILTGYTEVLHRGKCQTHTSNPTGTGPRDLTRGELFSRGDYRWEGFHGTLDDGRGFYAQCLGARRRCTRERPVFFTRAVTAGVDGHRGVLTTRTSVNHAGERSITSSEIKVIHMAQGTVKWFNAEKGFGFIAPSDGSADVFVHYSEIQGNGFRNLEENQQVEFELGEGAKGPQAQQVRAL

SEQ ID NO: 21907 - protein, 641 aa, Corynebacterium efficiens YS-314
MTTPGCSEDTTMPETPRQPTDSFTRRLRRSRKTTAVGLYPHDLHPGLVPGISVEEQRQRFGLDKMVFFTTATIIIAFIIWGVTNPVSVSTVSSTAYSWAMGNAAWLLNLVMGLGLFVMLFLAFSRFGHIPLGKDDEKPEFSRYSWVAMMFGAGLGVGIFFFGPSEPLAHYLSPPPNTVEAGTPEALHQAMAQSHFHWGLSIWALYALVGGALAYSTYRRGRPSLISSVFRPLLGTRHAEGPVARVIDILAIIATLFGTAATLGLSALQIGRGVEIVSGVGPLANNAIIMIIGLLGVGFIISAVSGVARGIRYLSNINITLTLGLIAFVFISGPSLFLLNLIPSGVMTYLDELLPMMGKSLSWGEDTLEFQGWWTAFYWAWWIAWTPFVGMFIARISRGRTLREFALVTIAVPSFILILAFTIFGGAAIHFHREGVQDFDGTADNEQVLFALFDQLPLNTLTPFLLIGVLAIFFITSADSASVVMGTMSSKGDPAPSKVVVVFWGLCMMGIAVVMLLAGGETTLTALQNLTILIALPFSIVLILMTVAFLRDLTTDPAAIRRTYATAAVRSAVVRGLEEHGDDFELAVSASPAGQGAGAGFDSTADRVTEWYQRTDEEGNNIEYNYATGEWADGWTPDQEKR

SEQ ID NO: 21908 - protein, 205 aa, Corynebacterium efficiens YS-314
MTETQNLKDALVIHEEAQNILFREARTANAFTDEPVTDEQINAIFDLVKWAPTSMNNQPLRVVVIRSEEAKARLLPHMAEGNREKTAKAPAVALLAADLDFHEEMPQLFPHFEGARDMFASDDQMRAEAAKLNTGLQIGYAIIGIRAAGLAAGPMTGFDADAISKEFFPDGKHRVMVAINMGKPAENAWYDRLPRLTFEEVVETL

SEQ ID NO: 21909 - protein, 316 aa, Corynebacterium efficiens YS-314
MLNFIYWPISAILWFWHQVFSLVLSPDEGITWALSIMFLTFTVRVVLVKPMVNTMRSQRKMQDMAPRMQEIREKYKNDQQKMMAESRKLQKEVGVNPIAGCLPMLVQIPVFLGLFHVLRSFNRTGEGIGQLGMSIEENRNTPNYIFDVEHVQSFLAADLFGAPLSAYITMPEEAFAAFDFDVSRLNIALVAAPMILIIVVATHMNARLSVNRQEERKRSGKQVAPANDQMAMQMQMMNKMMLWFMPLTILFTGFIWTIGLLIYMMSNNVWTFFQQRYIFAKMDAEEAAEDELKKAAKRSTAPKPGAKPVNAKKRKK

SEQ ID NO: 21910 - protein, 156 aa, Ananas comosus
MSLVRRSNIFDPFSLDLWEPFEGFPFGGALSFPRPSASFPAETASFAGARIDWKETPEAHVFKADLPGVKKEEVKVEVEEGNVLQISGERTREKEEKNDTWHRVERSSGKFLRRFRLPDNAKVDQVKAAMENGVLTVTVPKEDVKKPQVKSVQISG

SEQ ID NO: 21911 - protein, 329 aa, Ananas comosus
MALSMSGIVAVLMVLSLAPLSLGGGYLCPEYYDKSCPQVKEIVWSMVAKAVAKEPRMAASLLRLHFHDCFVKGCDASILLDSSGSIVSEKGSKPNKNSARGFEVIDDIKAAVEQACPKTVSCADILALTARYSTVVAGGPNWEVPLGRRDSLGASLSGSNNDIPAPNNTLPTIITKFKRQGLDVVDVVALAGAHTIGFSRCTSFRQRLYNQSGNGLADSTLDESYAMQLRWGCPRSGSDDNLFPLDYVSPAQFDNYYYKNILVGKGLLNSDQILFTKSATTRQLVELYAANIGIFYDHFAKSMIKMGNITPLTGLEGEVRTNCRRINSS

SEQ ID NO: 21912 - protein, 662 aa, Neurospora crassa
MEHRTRSWALGLSILGFFALLFSAGFVQQAHANDTEAMGTVIGIDLGTTYSCVGVMQKGKVEILVNDQGNRITPSYVAFTDEERLVGDAAKNQAAANPHRTIFDIKRLIGRKFSDKDVQNDIKHFPNKVVSKDDKPVVKVEVKGEEKTFTPEEISAMILGKMKETAEGYLGKKVTHAVVTVPAYFNDNQRQATKDAGMIAGLNVLRIVNEPTAAAIAYGLDKTGEERQIIVYDLGGGTFDVSLLSIEQGVFEVLSTAGDTHLGGEDFDQRIINHFAKLFNKKHGVDVTKDAKAMGKLKREAEKAKRTLSSQMSTRIEIEAFYDGKDFSETLTRAKFEELNNDLFKKTLKPVEQVLKDAKVSKSEIDDIVLVGGSTRIPKVQALIEEFFNGKKASKGINPDEAVAFGAAVQAGVLSGEEGTEDIVLMDVNPLTLGIETTGGVMTKLIPRNTPIPTRKSQIFSTAADNQPVVLIQVYEGERSMTKDNNLLGKFELTGIPPAPRGVPQIEVSFELDANGILKVSAHDKGNGKAESITITNEKGRLTQEEIDRMVAEAEKYAEEDKATRERIEARNGLENYAFSLKNQVNDEDGLGGKIDEEDKETILDAVKEAQDWLEENDAATASAEDFDEQKEKLSNVAYPITSKLYSQGGAGDDEPAGHDEL

SEQ ID NO: 21913 - protein, 1124 aa, Mougeotia scalaris
MSSSKRSQSSGRSSTQTRIQNRVTQASADAKLSTAFEVSSSSGGDSFDYTKSVTASLNPTEPLAAKSVTAYLQRMQRGSIIQSFGCMMAVEPGTFRIIAYSENVSEMLGVTPQSVPTGDHQNAIGIGTDVRSLLSPSSVSVVEKAVAANDVSMMNPIAVYSLATQKLFFAILHMNDVGLVIDLEPISSSSDSAMFSAGAVQSHKLAAKAISRLQSLPGGDICGLCDVVVEEVRELTGYDRVMAYKFHDDEHGEVVAEIRRSDLEPYLGLHYPATDIPQASRFLFIKNRIRMICDCTSPQVKVVQDSRIPQEMSLAGSTMRGVHGCHTQYMMNMGSTASLVMSVTINDTNEIAGGPGMKGRKLWGLIVCHHSTPRHIPFPIRSACEFLMQVFGLQLNMEVELAAQHREKHILRTQTLLCDMLLRDAPMGIVSQSPNVMDLVKCDGAALLFGGRCWLLGISPTQEQVKDIATWLISSHTDTTGLSTDSLVDAGYPKARELGVDVCGMAAARITENDFLFWFRGHAQKEVKWAGAKDGGSEEDGSRMHPRSSFKAFLEVVKQRSLPWEDVEMDAIHSLQLILRGSFQDIEDKEDRKIVHARLKEMHLQGMEELSSVASEMVRLIETATAPILAVDTAGCVNGWNFKISELTGLSIPEVMGKSLVKDLTHPSSKDTVEKLLYMALNGEEEQNVEIRLKTWGMQQGKGPVILMVNACASRDVSEKVVGVCFVAQDVTGEKIVQDKFTRIQGDYTTIVRSHNSLIPPIFGSDESGFCVEWNPAMERLSGVKREEAIGKMLTRELFGGILRLKNVDGLTKFMIVLNAAMSSHDTDKFPFTFYDRSGKIVEVLLTTSKRCNSEGVVTGVFCFLHTASSELQQALTVQKAAERVAEVKAKELAYIRQEIQNPLDGIHFARSFMEHTVLSEDQKQLIETSATCEKQLRRILADMDLASIEKGYLELETGEFSMATVMNSVVSQGMIQSTQKNLQLYCDTPPDFKSLSVFGDQVRLQQVLADFLLNAVQFTPPSGWVEIKVEPVVKKLPGGVSVANVDFRVSHPGEGLPEDLIDQMFDRADARVKSQEGLGLSICRKLVRLMNGEVQYRREGERNFFLLQLELPLAQRDDQASMK

SEQ ID NO: 21914 - protein, 620 aa, Candida albicans
MSEQAQPQASADQQQHQHNHHHHHHHHHHNENQSQQQVPIDPAANPANRIGRYQILKTLGEGSFGKVKLAQHLGTGQKVALKIINRKTLAKSDMQGRVEREISYLRLLRHPHIIKLYDVIKSKDEIIMVIEFAGKELFDYIVQRGKMPEDEARRFFQQIIAAVEYCHRHKIVHRDLKPENLLLDDQLNVKIADFGLSNIMTDGNFLKTSCGSPNYMPAPEVISGKLYAGPEVDVWSAGVILYVMLCGRLPFDDEFIPALFKKISNGVYTLPNYLSAGAKHLLTRMLVVNPLNRITIHEIMEDDWFKQDMPDYLLPPDLSKNKNSKIDVDEDVIRALSVTMGYDRDCKIVNVIEKANKQVAAGNSSSQQSKSSNEILDAYLLMKENHALVKDLKKSKSENIESFLSQSPPPSPFPNRGSTSSAPGVQQSLTYQTLATVPDLSTLPNSTIAILPTSLPSIHRAYMAETKQNGDPSQQHAPPPTKKSKTRWHFGIRSRSYPLDVMGEIYRALKNLGAEWAKPTEEELWTIRVRWKYDTSAQFECGSAPNLMKMQIQLFQLEPNNYLVSFKFSGWESAHGNAGTDSPQSHRQQDLDEVGSFSAYPFLHLATRLIMELAVNSQSG

SEQ ID NO: 21915 - protein, 221 aa, Pinus radiata
MVRGKTQMKRIENDTSRQVTFSKRRNGLLKKAYELSVLCDAEVGLIIFSPRGKLYEFASPSMEEILEKYKKRSKENGMAQTTKEQDTQYSKHSKQKLANMEEQIRILESTQRKMLGEGLESCSMAELNKLESQAERGLSHIRARKTEILVDQIECLKRKERLLSEENALLSRKWVDRQSVDGSGSTSSSIGLGSIEQIEVETQLVIRPPNAQDHCSVNSGH

SEQ ID NO: 21916 - protein, 223 aa, Pinus radiata
MVRGKTQMKRIENATSRQVTLSKRRNGLLKKAYELSVLCDAEVGLIVFSPSGKLYEFASTSMQKLLEKYEICSQECGTSESNKKQDPQCLKQEIENMEKRVRILQSTQRKMLGEGLALCSIKELNQLEGQVERGLNHVRATKTKVLLDEIEKLKQKEHVFREEKALLHKKSVNLRGANGCTIPSIGLTSIERVEVQTQLVMRPPHATEMDDNFMDVDNVPLSG

SEQ ID NO: 21917 - protein, 214 aa, Pinus radiata
MARGKTQMRKIESATSRQVTFSKRRNGLLKKAYEMSVLCDAQLGLIVFSPRGKVYEFSSTCMQKMLARYENFSEGSKATSTAKEQDVQGLKRQIANMEERIEILESMHRKMLGDELASCALKDLNELESQVERGLRNVRARKTEILVTEIEQLQRKEWILSEENAFLGKKFVHPHSVSKTPGSESGSIQNSEVETQLVMRPPCTNAHFLINSSH

SEQ ID NO: 21918 - protein, 610 aa, Brevibacillus choshinensis
MSRVIGIDLGTTNSCVAVMEGGEPVVIANPEGNRTTPSVVAFKNGEKIVGEAAKRQAITNPDNTVISIKRHMGTSHKETLEGNEYTPQQISAMILQKLKSDAEAYLGESVTQAVITVPAYFNDSQRQATKDAGKIAGLEVLRIVNEPTAAALAYGMEKSEDQTVLVFDLGGGTFDVSILELSEGFFEVKATSGDNKLGGDDFDQVVMDYLVSEFKKEHGIDLSKDRMAQQRLKDAAEKAKKDLSGVLTTTISLPFITADATGPKHLEMNLTRAKFEELSSNLVERTMGPTRQALNDAGLTPNEIDKVILVGGSTRIPAVQEAIKKFTGKEPHKGVNPDEVVALGAAVQAGVLTGDVKDVVLLDVTPLSLGIETLGGVFTKLIDRNTTIPTSKSQVFSTAADNQPGVEIHVLQGERQMAADNKTLGRFNLNDIPPAPRGVPQIEVSFDIDANGIVNVRAKDLGTGKEQRITITASSGLSDEEIDRMVKEAELNAEADKQRKEQVEIRNEADQLVFTTEKTLKEVEGKVDQAEIDRANAAKDKVKKALEGGSIDEIKSAKDELSEIVQQISVKLYEQAAQAAGAAQGGAEGSAEPKKDNVVDADYEVVDDKK

SEQ ID NO: 21919 - protein, 353 aa, Senecio squalidus
MAVSRPSISVDLPNIDIDGKEHIIRTGGGLVSVTVYGDQAKPPLITYPDIALNHTTCFHGLFISPDSASLLLHNFCIYHISPPGHELGAATISSDDPVPSVIDLSDQILEILNYFRLGSVMCMGAMAGAYILTSFALKYSERVTGLILVSPLCRAPSWNEWFYNKLMSKMLYYYGISDLLKELLIHRYFSKEVCGNLERPESDMVRACRKLLAERDSINVWRYLQAIDRRHGITEELESLECKTIIFVGDSSPFHDEALYMSAKLGRDSSTLVEVHACGSMVTEEQPHAMLIPLEYFLKRFGFYRLCQYNDSPRSPLDLCCKNPKLLYPKHMGLKLRPIKTRVSPPQPRTSGS

SEQ ID NO: 21920 - protein, 353 aa, Senecio squalidus
MALSRPSISVDLPNIDIDGKEHIIRTGGGLVSVTVYGDQAKPPLITYPDIALNHTTCFHGLFISPDSASLLLHNFCIYHISPPGHELGAATISSDDPVPSVIDLSDQILEILNYFRLGSVMCMGAMAGAYILTSFALKYSERVTGLILVSPLCRAPSWNEWFYNKLMSKMLYYYGISDLLKELLIHRYFSKEVCGNLERPESDMVRACRKLLAERDSINVWRYLQAIDRRQGITEELESLECKTIIFVGDSSPFHDEALYMSAKLGRDSSTLVEVHACGSMVTEEQPHAMLIPLEYFLKRFGFYRLCQYNDSPRSPLDLCCKNPKLLYPKHMGLKLRPIKTRVSPPQPRTSGS

SEQ ID NO: 21921 - protein, 332 aa, Rhodococcus sp. RKJ300
MEVGEDEYILDAAFRQGIHLMHGCREGRCSACKSFVLEGDIQMEDYSTFACNDAEVDEGHVLLCRSTAYSDCTIELLNFDEDELLGGVPIQDVRTRVTRIEPMTKDIVSLRLAPVEPAGYEFKPGQYSDLHIPGTEEHRSFSMATTRSTPGHVEFLIKKYPGGKFAGLLEDGISVGDEIALTGPYGSFTIKEGHVLPMVFIGGGAGMAPLLSLLRHMSETGNTRQVHFYYGARTPQDLFYVDEILELGRGLTDFTFVACLSESMDPPPVGAIAVEDGNVTDVVGRREPDIGRAEVYLCGPPPMVDAALELLEANGTPKDQIFYDKFTSPAFE

SEQ ID NO: 21922 - protein, 427 aa, Triticum aestivum
MAQAVVPAMQCQVGVRGRSAVPARQPAGRVWGVRRTARAASGFKVLALGPETTGVIQRMQQLLDMDTTPFTDKIIAEYIWVGGSGIDLRSKSRTISKPVEDPSELPKWNYDGSSTGQAPGEDSEVILYPQAIFKDPFRGGNNILVICDTYTPQGEPIPTNKRHMAAQIFSDPKVTSQVPWFGIEQEYTLMQRDVNWPLGWPVGGYPGPQGPYYCAVGSDKSFGRDISDAHYKACLYAGIEISGTNGEVMPGQWEYQVGPSVGIDAGDHIWASRYILERITEQAGVVLTLDPKPIQGDWNGAGCHTNYSTLSMREDGGFDVIKKAILNLSLRHDLHIAAYGEGNERRLTGLHETASISDFSWGVANRGCSIRVGRETEAKGKGYLEDRRPASNMDPYTVTALLAETTILWEPTLEAEALAAKKLALKV

SEQ ID NO: 21923 - protein, 427 aa, Triticum aestivum
MAQAVVPAMQCQVGVRGRSAVPARQPAGRVWGVRRTARAASGFKVLALGPETTGVIQRMQQLLDMDTTPFTDKIIAEYIWVGGSGIDLRSKSRTISKPVEDPSELPKWNYDGSSTGQAPGEDSEVILYPQAIFKDPFRGGNNILVICDTYTPQGEPIPTNKRHMAAQIFSDPKVTAQVPWFGIEQEYTLMQRDVNWPLGWPVGGYPGPQGPYYCAVGSDKSFGRDISDAHYKACLYAGIEISGTNGEVMPGQWEYQVGPSVGIDAGDHIWASRYILERITEQAGVVLTLDPKPIQGDWNGAGCHTNYSTLSMREDGGFDVIKKAILNLSLRHDLHIAAYGEGNERRLTGLHETASISDFSWGVANRGCSIRVGRETEAKGKGYLEDRRPASNMDPYTVTALLAETTILWEPTLEAEALAAKKLALKV

SEQ ID NO: 21924 - protein, 666 aa, Hypsizygus marmoreus
MFTAAGSLRKSVVRFPKGLPRSLIARNMNSKVNGPVIGIDLGTTNSCVSVMEGKTSRVIENAEGARTTPSVVAFTKHGERLVGLPAKRQAVVNSANTVFAFKRLIGRKFTDKEVKEDMKHWPFTVVAKPDGRPAVEVDNGGKRQQFSAEELSSMVLAKMRETAEQYLNKKVNHAVITVPAYFNDAQRQATKDAGQIAGLDVLRVINEPTAAALAYGLDRADSSVIAVYDLGGGTFDISILEMQKGVFEVKSTNGDTHRGGEDFDVVLVEFILAEFKKESGVDLKGDRMAIQRVREAAEKAKIELSSTTQTEVNLPFITADASGPKHINIKLMRSQFEGLVGPLIQRTIEPCKKALSDAGVKASEIDEVILVGGMTRVPRVVETVKTIFGREPSKGVNPDEAVAIGASIQGGVLAGNVTDILLLDVTPLSLGIETLGGIMTKLISRNTTIPTKKSQTFSTAADGQTAIEVKIYQGERELVRDNKLLGNFNLVGIPPAPKGVPQIEITFDIDADGIVNVSAKDKATGKDQSMTIASSSGLSDKDIEKMVSDAEAYAEDDKARRNLIEEANKADSVCADTEKAMAEFKDQLDATEKDKVAKLVTELRELAVKGQASETTITAEDIREKINETQQASLGLFQKVYEKRSQENQTQEQPSESEEKKEEKKD

SEQ ID NO: 21925 - protein, 586 aa, Medicago sativa
MCGILAVLGCSDDSQAKRVRILELSRRLKHRGPDWSGLHQHGDNYLAHQRLAIVDPASGDQPLFNEDKSIIVTVNGEIYNHEDLRKQLPNHKFRTQCDCDVIAHLYEEYGENFVDMLDGIFSFVLLDTRDNSFIVARDAIGVTSLYIGWGLDGSVWIASELKGLNDECEHFEVFPPGHLYSSKDREFRRWYNPPWFNEAVIPTTPYDPLVLRNAFEKAVIKRLMTDVPFGVLLSGGLDSSLVAAVTARYLAGTKAAKQWGAKLHSFCVGLKGAPDLKAGREVADFLGTVHHEFQFTIQDGIDAIEDVIYHTETYDVTTIRAATPMFLMSRKIKSSGVKWVISGEGSDEIFGGYLYFHKAPNKEEFHQETCRKIKALHRYDCLRANKSTYAWGLEARVPFLDKDFIKVAMDIDPEYKMIKHEEGRIEKWILRKAFDDEENPYLPKHILYRQKEQFSDGVGYGWIDGIKDHAAKHVTDRMMLNASHIFPFNTPLTKEAYYYRMIFERFFPQNSARLTVPGGASVACSTEKAIEWDASWSSNLDPSGRAAFGVHNSAYENQVNSVAKTVEPEKIIPKMEISNLGVAIQS

SEQ ID NO: 21926 - protein, 312 aa, Buchnera sp.
MKLFSGNSIPKLAKFIANRLYINLGKASVGRFSDGEISVQINENVRGSDVFIIQSTCSPTNDNIMELVVMVDSLRRASAGRITAVIPYFGYARQDRRVRSARVPITAKVVADFLSSIGVDRVLTVDLHAEQIQGFFDVPVDNVFGSLILLEDMLQRELKNPIVVSPDIGGVVRARAIAKLLYDTDMAIIDKRRPRANVSQIMNIIGDVANRDCILVDDMIDTGGTLCKAAEALKERGAKRVFAYATHPVFSGDAPKNLKNSVIDEVVVCDTIPLSENIELLPNVRTLTLSGMLAEAIRRISNEESISAMFEH

SEQ ID NO: 21927 - protein, 656 aa, Ralstonia metallidurans CH34
  misc_feature (622)..(622): Xaa can be any naturally occurring amino acid
  unsure (1)..(656): unsure at all Xaa locations
MGKIIGIDLGTTNSCVSILEGNTPKVIENSEGARTTPSIIAYMEDGEILVGAPAKRQAVTNPRNTLYAVKRLIGRKFEEKEVQKDIGLMPYAIVKADNGDAWVGVRDQKLAPPQVSAEAVRKMKKTAEDYLGEPVTEAVITVPAYFNDAQCQATKDAGRIAGLDVKRIINEPTAAALAFGMDKNEKGDRKIAVYDLGGGTFDISIIEIADVDGEKQFEVLSTNGDTFLGGEDFDQRIIDYIIGEFKREQGVDLSKDVLALQRCKEAAEKAKIELSSSQQTEINLPYITADASGPKHLNLKITRAKLEALVEELITRTIEPCRTAIKDAGVKVSDIDDVILVGGMTRMPKVQEQVREFFGKEARKDVNPDEAVAVGAAIQGSVLSGDRTDVLLLDVTPLSLGIETLGGVMTKMINKNTTIPTKHAQVFSTADDNQPAVTIKVYQGEREMATGNKMLGEFNLEGIAPAPRGTPQIEVSFDIDANGILHVGAKDKATGKENRITIKANSGLSEDEIQRMVKDAEANAEEDKRARELADARNQADALIHSTRKALGRVRREARSWREGKDRSRDQGPGRRRPRVNKAEIDAKVNALSEASQKLGEKVYADMQAQAGEGAAAGAGAXRFSSRPSRRRQRVGCRVQGSERQEVIGDGGWRRG

SEQ ID NO: 21928 - protein, 729 aa, Arabidopsis thaliana
MVLKDDNSEKSIELFISIGLDEKTARNTINNNKVTANLTAVIHEAAVTDGCDRNTGNLLYSVATKFPTNALVHRPTLLKYIVNSKIKTPAQLEAAFAFFASTGPEDFKLNEFEEACGVGIEVSPEDIEKAVKGIFEENKKTILEQRYRTNVGELFGHVRKSLPWADPKIVKKLIDEKMYELLGEKTAADNEKPTKKKEKKEKPAKVEEKKAVVETTAEPSEEELNPYTIFPQPEQNFMVHTEVFFSDGSILRCSNTKEVLDKHLKVTGGKVYTRFPPEPNGYLHIGHAKAMFVDFGLAKERGGCCYLRYDDTNPEAEKEEYINHIEEIVKWMGWEPFKITYTSDYFQELYDLAVELIRRGHAYVDHQFAPHPKAGDKWCIYPSYDYAHCTVDSLENITHSLCTLEFETRRASYYWLLHSLSLYMPYVWEYSRLNVTNTVMSKRKLNYIVTNKYVDGWDDPRLLTLSGLRRRGVTSTAINAFVRGIGITRSDGSMIHVSRLEHHIREELNKTAPRTMVVLNPLKVVITNLESDKLIELDAKRWPDAQNDDPSAFYKVPFSRVVYIDQSDFRMKDSKDYYGLAPGKSVLLRYAFPIKCTNVVFADDNETVREIHAEYDPEKKSKPKGVLHWVAESSPGEEPIKVEVRLFEKLFNSENPAELNDAWLTDINPNSKMVISGAYAVSTLKDAAVGDRFQFERLGYYAVDKDSEPGKLVFNRTVTLRDSYGKGGK

SEQ ID NO: 21929 - protein, 496 aa, Bacillus subtilis subsp. subtilis str. 168
MQGNLTALLITAIIVLTVVCIGFLAGRDKSSRTSVEEWSVGGRRFGGLLVWFLVGADLYTAYTFLGLTSTTFTGGSVAFFAIPYSVLAYFIAYFFLPKLWKVAKIHKLTTLADYARERFNSKLLASLVAIVGVLMLIPYICLQLSGIQDTLQVAGTGYINVKFVVIISFILVALYTFFSGIKGPTYTAIIKDILVWVIMLFMVVSLPLIHFNGWTPMIDTLVKEAPQMLTIPSEGPKGIPWFITASIVSALALFMWAHAATGVFTAKSADAVRKNSMFLPLYNIVLILVIFLGFIAFLVLPEDTNPRLALLHLIQTSYGGVAQGFAYATIALASLIPCSIMAIGASNLFANNLYRDLIHPNVSQSKLTLVTRSMVFVVIGLALLFGMLFPTALVTLQLLGVSGMVQIFPAIAVSLFWKNQTKEATVIGLLAGLAVTFIVYITQSAHGIYEGFWGLAANMIAVVILNPLFVKNAGSNPVIEGLFGKKQDANPNQKGA

SEQ ID NO: 21930 - protein, 188 aa, Oryza sativa Japonica Group
AAAADIRRAQAQQGPASRCGGIPSPEAVKCPRCESTNTKFCYYNNYNLSQPRHFCKSCRRYWTKGGVLRNVPVGGGCRKTKRSGSSSAASSAPSTPTAATDNAKNQRRASASSPRSSSGGSGNTSPTAAAATTPTTPATPSSNTIAVINHATTTTTTTNPFPTDVPPPAPIFADQAAALASLFAPPPP

SEQ ID NO: 21931 - protein, 560 aa, Pseudomonas fluorescens
MNKNNRHPADGKKPITIFGPDFPFAFDDWIEHPAGLGSIPAHSHGAEVAIVGAGIAGLVAAYELMKLGLKPVVYEASKMGGRLRSQAFNGAEGVIAELGGMRFPVSSTAFYHYVDKLGLETKPFPNPLTPASGSTVIDLEGQTYYAQKLADLPALFQEVADAWADALEDGSRFGDIQQAIRDRDVPRLKELWNTLVPLWDDRTFYDFVATSKAFAKLSFQHREVFGQVGFGTGGWDSDFPNSMLEIFRVVMTNCDDHQHLVVGGVEQVPHGIWNHVPERCVHWPQGTSLNSLHLGAPRSGVKRIARAADGQFSVTDVWDNTREYAAVLVTCQSWLLTTQIECEEALFSQKMWMALDRTRYMQSSKTFVMVDRPFWKDKDPETGRDLMSMTLTDRLTRGTYLFDNGDDKPGVICLSYSWMSDALKMLPHPVEKRVKLALDALKKIYPKVDIAARIIGDPITVSWEADPHFLGAFKGALPGHYRYNQRMYAHFMQDDMPAEQRGIFIAGDDVSWTPAWVEGAVQTSLNAVWGIMKHFGGETHAENPGPGDVFHEIGPIALPE

SEQ ID NO: 21932 - protein, 199 aa, Pseudomonas fluorescens
MLDELLHRVSNHTPHDLQADRRFPEAAVLVPITRSDEPELVLTLRASGLSTHGGEVAFPGGRRDPEDPDLIFTALREAEEEIGLPPGLVEVIGPLSPLISLHGIKVTPYVGVIPDYVEYQANDAEIAAVFSVPLEFFRKDPREHTHRIDYQGRSWYVPSYRFGEYKIWGLTAIMIVELVNLLYDADIDLHTPPKSYINT

SEQ ID NO: 21933 - protein, 508 aa, Pseudomonas fluorescens
MRAQLKAVLPRELLASVVVFLVALPLCMGIAIASGLPPAKGLITGIIGGLVVGFLAGSKLQVSGPAAGLAVLVFELVRQHGVAMLGPILLLAGLLQLLAGRFRLGCWFRVTAPAVVYGMLAGIGVLIVLSQVHVMLDAAPKPSGLDNLAAFPAAVAQALPSFGWQAGLLGLSTIAVMWLWEKFRPHSLRFVPGALLGVGLATVASLLLALQVKRVEVPENLAEAIDWLRPADLLNLADPTLLIAAFAVAFIASAETLLSAAAVDRMHSGERADFDRELSAQGIGNMLCGLLGALPMTGVIVRSSANVQAGATTRMSTIFHGLWLLLFVLLLSSVLQSIPVASLAGVLVYTGFKLVDLKAFRSLGRYGRMPMFTYAATALAIIFTDLLTGVLIGFGLTLAKLAWKASRLKISLIDLPQDGEMELRLVGAATFLKVPALTQVLGSIPTGATVHVPLNNLSYIDHSCLELLEEWGRANASKGSKLLIESRGLKRRLEGRLRTTVGVGAASA

SEQ ID NO: 21934 - protein, 890 aa, Arabidopsis thaliana
MEDDGGSDGGEGNGGFSPNSSFGAFADTAMDLDFMDELLFDGCWLETTDSKSLKQTEQSPSASTAMNDNSPFLCFGENPSQDNFSNEETERMFPQAEKFLLEEAEVGKSWWIAPSASEGPSSSVKERLLQAISGLNEAVQDKDFLVQIWVPIQQEGKSFLTTWAQPHLFNQEYSSLAEYRHVSETYNFPADEGMKDFVGLPGRVFLQKFPEWTPDVRFFRRDEYPRIKEAQKCDVRGSLALPVFERGSGTCLGVVEIVTTTQKMNYRQELEKMCKALEVYSDFYCAALPEIKDFLATICRSYDFPLALSWAPCARQGKVGSRHSDENFSECVSTIDSACSVPDEQSKSFWEACSEHHLLQGEGIVGKAFEATKLFFVPEVATFSKTNYPLAHHAKISGLHAALAVPLKSKSGLVEFVLEFFFPKACLDTEAQQEMLKSLCVTLQQDFRSSNLFIKDLELEVVLPVRETMLFSENLLCGAETVESLTEIQMQESSWIAHMIKANEKGKDVSLSWEYQKEDPKELSSGRENSQLDPVPNNVPLEAEQLQQASTPGLRVDIGPSTESASTGGGNMLSSRRPGEKKRAKTEKTIGLEVLRQYFAGSLKDAAKSIGVCPTTLKRICRQHGIMRWPSRKIKKVGHSLKKLQLVMDSVQGAQGSIQLDSFYTSFPELNSPNMSSNGPSLKSNEQPSHLNAQTDNGIMAEENPRSPSSSCSKSSGSSNNNENTGNILVAEDADAVLKRAHSEAQLHNVNQEETKCLARTQSHKTFKEPLVLDNSSPLTGSSNTSLRARGAIKVKATFGEARIRFTLLPSWGFAELKQEIARRFNIDDISWFDLKYLDDDKEWVLLTCEADLVECIDIYRLTQTHTIKISLNEASQVKLSGSFGNTGLS

SEQ ID NO: 21935 - protein, 649 aa, Pennisetum glaucum
MAAKGDGPAIGIDLGTTYSCVGVWQHDRVEIIANDQGNRTTPPYVAFTDSERLIGDAAKNQVAMNPINTVFDAKRLIGRRFSDASVQSDIKLWPFKVVPGSADKPMIGVQFKGEEKLFSAEEISSMILNKMKETAEQYLGSTVKNAVVTVPAYFNDSQRQATKDAGVISGLNVMRIINEPTAAAIAYGLDKKSSSDGEKNVLIFDLGGGTFDVSLLTIEEGIFEVKATAGDTHLGGEDFDNRLVNHFAQEFKRKNKKDISGNPRALRRLRTACERAKRTLSSTAQTTIEIDSLYEGIDFYTTITRARFEELNMDLFRKCMEPVEKCLRDAKMDKSSVHDVVLVGGSTRIPRVQQLLQDFFNGKELCKSINPDEAVAYGAAVQAAILTGEGNEKVQDLLLLDVSPLSLGLETAGGVMTVLIPRNTTIPTKKEQVFSTYSDNQPGVLIQVYEGERARTKDNNLLGKFELSGIPPAPRGVPQITVCFDMDANGILNVSAEDKTTGQKNKITITNDKGRLSKEEIEKMVQEAEKYKSEDEEHKKKVDAKNSLENYAYNMRNTIRDDKIASKLPEADKKKIDEAIEGAITWLDNNQLAEVDEFEDKMKELEGICNPIIARMYQGAAGPDMAGGMAEDAPAAGGSGAGPKIEEVD

SEQ ID NO: 21936 - protein, 262 aa, Aegilops tauschii
MENRCLHTDVPPNHTFSRKGSSWGWPAYIKRDDLEVSSHLRDNCLSIRCDVTVMKEIRGEEARVPPSDLDRHLGDLLKNKDAADLIFQVGGQSFSAHRCVLAARSSVFKAELLGAMKESSSAAGPIKICDMEAHVFNSLLHFMYTDSVPLTLKLDVVMAGHLLVAADRYNVVRLKQICEEKLCAHIDSNMVATSLALAEQHGFPRLKEACLQFLDSPSNFKAMMASDGYEHLTSSCPSVLKELIARILPAEWSVAKEVVMKM

SEQ ID NO: 21937 - protein, 633 aa, Aggregatibacter actinomycetemcomitans
MGKIVGIDLGTTNSCVAVMEGEKPRVIENAEGDRTTPSIIAYTNDNETLVGQPAKRQAVTNPENTLFAIKRLIGRRFEDEEVKRDIDIMPFAITKADNGDAWVEVKGEKLAPPQISAEVLKKMKKAAEDYLGEPVTEAVITVPAYFNDAQRQATKDAGRIAGLDVKRIINEPTAAALAYGLDKGTGNKTIAVYDLGGGTFDLSIIEIDEVGGEKTFEVLATNGDTHLGGEDFDNRIINYLVDEFKKEQGIDLRNDPLAMQRLKEAAEKAKIELSSAQQTDVNLPYITADATGPKHLNIKLTRAKLESLVEDLVAKSLEPVRIALKDAGKSPSEIDDVILVGGQTRMPLVQQEVEKFFGKAPRKDVNPDEAVAIGAAVQGGVLAGDVKDVLLLDVTPLSLGIETMGGVMTTLIEKNTTIPTKKSQVFSTAEDNQSAVTIHVLQGERKQASANKSLGQFNLEGINPVPRGMPQIEVTFDIDADGIIHVSAKDKGTGKEQQITIKSSSGLSDEEIQQMVRDAEANAESDRKFEELVQARNQADHLIHSTRKQLDEAGDKVPAADRGTIESALSDLEKAAKGEDKAVIEAKIKALAEVAQKLAQTAQPHGDPQQAQSNSKPNDDVVDAEFEEVKDNK

SEQ ID NO: 21938 - protein, 395 aa, Streptococcus suis P1/7
MSKTIAINAGSSSLKWQLYQMPEETVLAAGIIERIGLNDSISTVKYDGKKESEVLDIPNHTVAVKILLEDLLKHNIIAAYEEITGIGHRVVAGGEYFKESAVISQQEIEQIEELSALAPLHNPAHVAAMRAFEEVLPEVLNVAVFDTAFHTTMPKHAYLYPIPQKYYTDYKVRKYGAHGTSHYYVAHEAAKVLGRPIEELKLITAHIGNGVSITANYHGESVDTSMGFTPLAGPMMGTRSGDIDPAIIPYLIANVEELKDAADVVNMLNKQSGLFGVSGFSSDMRDIEAGIQAHNPDAVLAYNIFIDRIKKFIGQYLAVLNGADAIVFTAGMGENAPLMRNDVVEGLSWFGIELDLEKNVFGNYGDISTAESKVRVLVIPTDEELVIAREVERLK

SEQ ID NO: 21939 - protein, 325 aa, Streptococcus suis P1/7
MVQPLGEHNIKLFSLNSNRDIAEKIADSAGIPLGKLSSRQFSDGEIQINIEESVRGVDVYIIQSTSYPVNNHLWELLIMIDACKRASANTITAVIPYFGYARQDRTASPREPITAKLVANMLVKAGVDRVLTLDLHASQIQGFFDIPVDNLLTEPLFAAYYMEKGLCGEDVVIVSPKNSGIKRARNIAEFLNAPIAIIDYAQDDSERSEGYIIGDVAGKKAILVDDILNTGRTFSQASKIVQEGGATEIYAVASHGLFAGTAAQLLDEAPIKEILVTDSVASKEQHPKNIAFLTASDLIADAIHRIQEHQPLSPLFKFTSPEKEN

SEQ ID NO: 21940 - protein, 437 aa, Sorghum bicolor
MEQYAETTARERAQEDKTKNARIDDWLPITSSRTAKWYYSAFHNVTAMVGAGVLGLPFAMSQLGWYVHGGELEMHEMIPGKRFDRYHELGQHAFGDRLGLWIIVPQQLIVEVGTDIVYMVTGGQCLRKFHDLVCRGRCKDIRLTYWIIIFGSVHFPLSQFPNFNSISAVSAAAAVMSLTYSMIAFVTSVVKGAEEATVAGAVVDYGLRANTTSGRVFGVLNGLGAVAFAYAGHNVVLEIQATIPSTPEKPSKKPMWLGVVVAYAIVALCYFCVAFAGYYAFGNSVEPNVLISLDKPRWLIAAANLMVVVHVVGSYQVYAMLVFDMIETVLVMKHKFTPGIRLRLIARSAYVAATMFVGMTFPFFDGLLGFFGGFGFAPTTYYIPCIIWLMLRKPKKYSQSWFINIICIVIGVLLTLISPIGGLRQIILDAKSFKLYS

SEQ ID NO: 21941 - protein, 320 aa, Sorghum bicolor
MAAQSIALWLLTTTMALQAGTSWAQLSTGFYSSSCPGLYSAVKPVVQSAIDSEKRVGASIVRLFFHDCFVQGCDASLLLDDTATFQGEKMATPNNGSVRGFEVIDAAKSAVENVCPGVVSCADILAIAARDSVVILGGPSWDVKVGRRDSTTASFSGANNNIPPPTSGLANLTSLFAAQGLSQKDMVALSGAHTIGQARCTNFRDHIYNDTNVDGAFARTRQSGCPSTSGTGDNNLAPLDLQTPTVFENDYYKNLVSNMGLLHSDQELFNGGATDALVQSYVSSQSAFFADFVTGMIKMGDITPLTGSAGEIRKNCRRIN

SEQ ID NO: 21942 - protein, 174 aa, Sorghum bicolor
MSRDPLVVGHVVGDIVDPFITTASLRVFYNNKEMTNGSDLKPSQVMNEPRVHISGRDMRTLYTLVMVDPDAPSPSNPTKRENLHWLVTDIPETTDASFGNEIVPYESPRPTAGIHRFAFVLFRQSVRQTTYAPGWRSNFNTRDFAAIYNLGSPVAAVYFNCQRENGCGGRRYIR

SEQ ID NO: 21943 - protein, 306 aa, Brassica rapa
QGDNNNVVQAQLTTNFYSTSCPNLLSTVRSTVKSAVDSQPRTGASILRLFFHDCFVNGCDGSILLDDTSSFTGEQNANPNRNSARGFNVIDNIKTAVEAACPGVVSCADILAIAARDSVVLLGGPNWNVKVGRRDARTASQAAANNNIPAPTSSLSQLISSFSAVGLSTRDMVALSGAHTIGQSRCTNFRTRVYNETNINAAFATLRQRSCPRAAGSGDGNLAPLDVNSANTFDNSYFKNLVAQRGLLHSDQELFNGGSTDSIVTGYSNNPSSFSSDFTAAMIKMGDISPLTGSSGEIRKVCGRTN

SEQ ID NO: 21944 - protein, 248 aa, Solanum lycopersicum
IQKYGEGKWHLVPARAGLNRCRKSCRLRWLNYLRPHIKRGDFAPDEVDLILRLHKLLGNRWSLIAGRLPGRTANDVKNYWNTHFHKKLSIIAPHLHPHSRPRSHPRLQIKHKSIAVTKNEIIRPQPRNFSNVKKNDSHWCNNKSMITNTLDKDDKRCNEIVVNICEKPIGENTSSIDDGVEWWTNLLENCIEIEEETANTNFGKTPTMLLHEEISPPLVNGEDNSMQQGPTNNWDDFSTDIDLWNLLN

SEQ ID NO: 21945 - protein, 250 aa, Solanum lycopersicum
  misc_feature (70)..(70): Xaa can be any naturally occurring amino acid
  unsure (1)..(250): unsure at all Xaa locations
NCIQKYGEGKWHLVPARAGLNRCRKSCRLRWLNYLRPHIKRGDFAPDEVDLILRLHKLLGNRWSLIAGRXPGRTANDVKNYWNTHFHKKLSIIAPHLHPHPRPRSHPRLQIKHKSIAVTKNEIIRPQPRNFSNVKKNDSHWCNNKSMITNTSDKDDKRCNEIVVNICEKPIGENTSSIDDGVEWWTNLLENCIEIEEETANTNFGKTPTMLLHEEISPPLINDEDNSMQQGPTNNWDDFSTDIDLWNLLN

SEQ ID NO: 21946 - protein, 88 aa, Solanum lycopersicum
CIQKYGEGKWHLVPARAGLNRCRKSCRLRWLNYLRPHIKRGDFAPDEVDLILRLHKLLGNRWSLIAGRLPGRTANDVKNYWNTHFTRS

SEQ ID NO: 21947 - protein, 98 aa, Solanum lycopersicum
CIQKYGEGKWHLVPARAGLNRCRKSCRLRWLNYLRPHIKRGDFAPDEVDLILRLHKLLGNRWSLIAGRLPGRTANDVKNYWNTHFHKKLSVIAPHLHP

SEQ ID NO: 21948 - protein, 112 aa, Solanum pennellii
KGSWTEQEDFLLRNCIQKYGEGKWHLVPARAGLNRCRKSCRLRWLNYLRPHIKRGDFAPDEVDLILRLHKLLGNRWSLIAGRLPGRTANDVKNYWNTHFHKKLSIIAPHLHP

SEQ ID NO: 21949 - protein, 114 aa, Solanum chilense
IRKGSWTEQEDSLLRNCIQKYGEGKWHLVPARAGLNRCRKSCRLRWLNYLRPHIKRGDFAPDEVDLILRLHKLLGNRWPLIAGRLPGRTANDVKNYWNTHFHKKLSIIAPHLHP

SEQ ID NO: 21950 - protein, 82 aa, Solanum chilense
IQKYGEGKWHLVPARAGLNRCRKSCRLRWLNYLRPHIKRGDFAPDEVDLILRLHKLLGNRWSLIAGRLPGRTANDVKNYWNT

SEQ ID NO: 21951 - protein, 134 aa, Solanum lycopersicum
KGSWTDEEDFLLRKCIDKYGEGKWHLVPIRAGLNRCRKSCRLRWLNYLRPHIKRGDFEQDEVDLILRLHKLLGNRWSLIAGRLPGRTANDVKNYWNTNLLRKLNTTKIVPREKINNKCGEISTKIEIIKPQRRK

SEQ ID NO: 21952 - protein, 133 aa, Solanum lycopersicum
KGSWTDEEDFLLRKCIDKYGEGKWHLVPIRAGLNRCRKSCRLRWLNYLRPHIKRGDFEQDEVDLILRLHKLLGNRWSLIAGRLPGRTANDVKNYWNTNLLRKLNTTKIVPREKINNKCGEISTKIEIIKPQRR

SEQ ID NO: 21953 - protein, 261 aa, Solanum lycopersicum
KGSWTDEEDFLLRKCIDKYGEGKWHLVPIRAGLNRCRKSCRLRWLNYLRPHIKRGDFEQDEVDLILRLHKLLGNRWSLIAGRLPGRTANDVKNYWNTNLLRKLNTTKIVPREKINNKCGEISTKIEIIKPQRRKYFSSTMKNVTNNNVILDEEEHCKEIISEKQTPDASMDNVDPWWINLLENCNDDIEEDEEVVINYEKTLTSLLHEEISPPLNIGEGNSMQQGQISHENWGEFSLNLPPMQQGVQNDDFSAEIDLWNLL

SEQ ID NO: 21954 - protein, 356 aa, Photorhabdus asymbiotica
MNLFPILLLNVFNRTSGSFKEFENNIMKKSFIEKQQQISFVKSFFSRLLESKLGLIEVQGPMLSCLGDGIQDNLSGHEKAVQVKVKTLPDSTFEVVHSLAKWKRKTLGRFDFQPEQGLYTHMKALRPDEDRLTPIHSVYVDQWDWEKVMGDGQRSLAYLKQTVGKIYEAIKETEKAVSKEFGLAPFLPDQIHFVHSEALLSRYPELDAKGRERAIAKELGAVFLIGIGAKLSDGQSHDVRAPDYDDWTTPNSDGFAGLNGDIIVWNPVLEDAFEISSMGIRVDAATLERQLSLTGDEDRLQYDWHQALLKGDMPQSIGGGIGQSRLVMLLLQMKHIGQVQCSIWSPEVRETVEDML

SEQ ID NO: 21955 - protein, 270 aa, Photorhabdus asymbiotica
MKKKRAFLKWAGGKYPLVDDIKRHLPAGSCLIEPFVGAGSVFLNTDYDSYILADINSDLINLYNTVKFRANEFIAHTRPLFTQEYNSAEHFYQLREQFNQSTDPFHRSVLFLYLNRHCYNGLCRYNSHGKFNVPFGRYKKPYFPEEELYWFAEKAQNATFICEHYQYTLDKAHKGSVIYCDPPYAPLSATANFTAYHTNSFNITDQENLAHIAFKLSSERAIPVLISNHDTPMTRKWYYQASLHIVKARRTISRNILARSKVDELLALYR

SEQ ID NO: 21956 - protein, 393 aa, Photorhabdus asymbiotica
MYNLARPIYLDNNATTPLDPDVLQSMMPYFTNAYGNASSNNHVFGWKAMEAVDDARQVISTSINATSHADIIFTSGATESNNLAIMGLQHRGKGGHVITSTIEHKAVLDCCGRLESMGTEVTYLPPQSDGIVSPDSISRAIRDDTYLVSIMAANNEIGSIQKIEEIGAICKARDIPLHTDATQALGKIEFDVQRMNVSLASFSAHKIYGPKGIGALYINSRDKNISLTPLIVGGGHERGLRSGTLNVPGIVGFGRAVELSVKNLTAESMRLRYLRDLLRLYIIENVADVRINGHLTECLPGLLNVSFNGIDADSLLLELSEVALSSGSACTSANRAPSHVLKAIGVSDALAQASVRFGLGRFNNEDEIRYVCLRLEKAVNKLRSMAPKSFVTQ

SEQ ID NO: 21957 - protein, 239 aa, Photorhabdus asymbiotica
MQEGNKILVVDDDMRLRTLLERYLTEQGFQVRSAANAEQMDRLLTRESISLIVLDLMLPGEDGLSVCQRLRNQNNSVPIIMVTARGEEVDRIVGLEIGADDYIPKPFNPRELLARIRAVLRRQANKLLGVPTEDDAIINFGKFSLNLSTREMFQGDEHIPLTSGEFSVLKVLVSYPSVPLSRNKLMNLALGREYSTMKRSIDVLISRLRRVIEEDPAHPRYIQTIWGLGYVFVPDGSCV

SEQ ID NO: 21958 - protein, 287 aa, Photorhabdus asymbiotica
MINYHQECSMKSRVLVTALLAGLALVTGVAKADKLDDIKKAGTVRIAVFDSNPPFGFIDPQTKKLAGYDVDIANAIANDLGVKLELRPTNPANRLPLLASKKIDLIAANFTVTDERAKQVDFSIPYFATGQKFIARKGVLKSPEDIKNLRIGADKGTVQEITLREHYPTAKVISYDDTPLAFAALRNGNVQAITQDDAKLVGLLANVPAAQKAEFEISPFSITREYQAVAAAKGEGRLVEVVNQTLLKLEKEGEAEKIYNHWFGPDTKSAQPRGDFKFAPLEQQAKF

SEQ ID NO: 21959 - protein, 486 aa, Photorhabdus asymbiotica
MTMQPGKIWIVDDDNSIRWVLERALSSTGMECSCFTDADSVLTALAQNTPDVLISDIRMPGMNGLNLLNNIKQSNPLLPVIIMTAHSDLDAAVSAYQQGAFDYLPKPFDIDEAVALMERALSHSREQNQPTRNPQAVTPVSDMIGEAPAMQDVYRIIGRLSRSSISVLINGESGTGKELVAHALHRHSPRANQPFIALNMAAIPKDLIESELFGHEKGAFTGANQVRHGRFEQANHGSLFLDEIGDMPLDIQTRLLRVLAEGQFYRIGGYAPVKVDVRIIAATHQDLERLVQKGKFREDLYHRLNVIRMQLPPLRDRVEDIPRLTRHFLQQTAKELGVETKILHPDAEMALMRLPWPGNVRQLENICRWLTVMAASQEILVQDLPSELFELHRTETGTTIPVNTILTSPTPINTMQETWPQLLTHWATNALENGQQDLLSEALPLLERTLLNCALKHTKGHKQEAARLLGWGRNTITRKLKELGLE

SEQ ID NO: 21960 - protein, 402 aa, Photorhabdus asymbiotica
MYHLDVYGTLVASALVLLLGRKLVQSVPFLEKYTIPEPVAGGLLVALILLILQQTTGWEISFDLSLKDPLMLTFFATIGLNANLASLKAGGKVLLTFVFVVVGLLLVQNTVGIALAELLGLDPLMGLLAGSVTLSGGHGTGAAWGKLFSERYGFENATEVAMACATFGLVLGGLIGGPVARFLVKNTKTPGLRADDTEVPTAFEKPYTGRMITALVMLETIALIAICLMAGNFVSEFLQGTWFELPTFVCVLFIGVILSNSLSVLGFYRVFDRAVSVLGNVSLSLFLAMALMSLKLWQMASLALPMLIILTIQAIVMALYAIFVTYRVMGKNYDAAVLAAGHCGFGLGATPTAIANMQAITDRFGPSHVAFLVVPMVGAFFIDIVNAIVIKLYLLLPVFPAV

SEQ ID NO: 21961 - protein, 879 aa, Photorhabdus asymbiotica
MIQIDLPTLVNRLNPMTRHALETAAAQCVSQQQPEITVSQLLLQMINTPLSDVRAIFSQAEVDSDLLKEQLDQMIPHHQAMVQAYPNFSPMLVEWLQDSWLLASTEMQHQELRSGVMLMTLLFSPLRYLTPQSARLLSGINRELLRQNFTQWTAGSAEQPVVENDKNGQGRNAANSDSLLARFTQNMTEQARQGKLDPVLCRDTEIDLMIDILCRRRKNNPIVVGEAGVGKSALIEGLALRIIDNQVPEKLRNSELMTLDLGALQAGAAVKGEFEKRFKGIMSEINQSSVPIILFIDEAHTLIGAGNQQGGLDISNLLKPALARGELKTIAATTWGEYKKYFEKDAALSRRFQLVKVAEPTAEEAIIIMRGLRAIYEQSHGILIDDEALKASAVLSDRYLSGRQLPDKAIDVLDTACARVAINLTSPPRQISALKNQLHQQQMESDVLTREQHMGLNQHTDRLEELQQQQQETAEKLAELETSWQQQQQLVQQVIELRRQLLTNETTDKTEENETPAEIVTEELVAKLSELNQQLEQLQQQQTLVSPHVDKNQIAAVIAEWTGVPLNRLSQSELSIVTELPTHLGQSIKGQQLAIKCLHQHLLTARADLRRPGRPLGAFLLVGPSGVGKTETVLQLAELMFGGRQYLTTINMSEFQEKHTVSRLIGSPPGYVGYGEGGVLTEAIRQKPYSVVLLDEVEKAHPDVLNLFYQAFDKGELADGEGRVIDCKNIVFFLTSNLGYQTIVDNADKPEEMNDLLYPELAAFFKPALLARMEVVPYLPLGYDTLKTIIQSKLARLDNLLRQRFNAEVTISDDVIEEILQRATRAENGARMLESIIDGALLPPLSLLLLQKMASGKQISAIQLTVDEHKFNAVVEELQ

SEQ ID NO: 21962 - protein, 636 aa, Photorhabdus asymbiotica
MGKIIGIDLGTTNSCVAIMDGTTARVLENSEGDRTTPSIIAYTQDGETLVGQPAKRQAVTNPQNTLFAIKRLIGRRFQDEEAQRDVAIMPYKIIAADNGDAWLEVKDQKMAPPQVSAEVLKKMKKTAEDYLGEPVTEAVITVPAYFNDAQRQATKDAGRIAGLEVKRIINEPTAAALAYGLDREVGNRTIAVYDLGGGTFDISIIEIDEVDGEKTYEVLATNGDTHLGGEDFDSRMINYLVDEFKKEQGIDLRNDPLAMQRLKEAAEKAKIELSSAQQTDVNLPYITADATGPKHMNIKVTRAKLESLVEDLVKRSMEPVRVALQDAGLSVSDVNDVILVGGQTRMPMVQKVVADFFGKEPRKDVNPDEAVAMGAAVQGGVLAGDVKDVLLLDVTPLSLGIETMGGVMTSLIAKNTTIPTKHSQVFSTAEDNQAAVTIHVLQGERKRAGDNKSLGQFNLDGIQPAPRGMPQIEVTFDIDADGILHVSAKDKNSGREQQITIKASSGLNEEEIQRMVRDAEANAESDRKFEELVQVRNQADQLVHGTRKQVEEAGEKLPAEDKTAIESAVAELEKVAKGEDKADIEAKIQALVQASAKLLEIAQQQAQAGGAADAGDSAKKDDDVVDAEFEEVKDKK

SEQ ID NO: 21963 - protein, 205 aa, Photorhabdus asymbiotica
MAKSCDTEAFLHFWSNRVTQSIPAVFLDRDGTINIDHSYVHEIDSFQFIDGVIEAMIELKRMGYALVLVTNQSGIARGIFNEEQFLQLTEWMDWSLADRGVDLDGIYYCPHHPDATEEQYKKSCDCRKPQPGMLLEAQEELNIDMSASFMVGDKLEDMQAATEAKVGTKVLVRTGKPVTHEVEQAADLIINSLVDLPKVIKDIKK

SEQ ID NO: 21964 - protein, 461 aa, Photorhabdus asymbiotica
MQNNETQLKRGLTGRHIRFMALGSAIGTGLFYGSAAAIQQAGPAVLLAYLIGGAAVFMVMRALGEMAVHHPVAGSFSHYASHYLGPLAGFLTGWNYIFEMLIVCLADVTAFGFYMKLWFPHVEQWIWVLSIVCFIGAINLCHVKIFGEMEFWLSIVKVTAIIAMIVGGMTIMIYGFGQQTDHVTGISSLWEYGGFMPNGISGVIASLAIVMFAFGGIEVIGITASEAKNPEKTIPKAINAVPFRILLFYVLTLFILMCIYPWNQIGQEGSPFVQIFSSLGINSAANILNIVVITAAVSAINSDIFGAGRMMYGMAQEGQAPKSFTKLSRNGVPWMTVVVMSVVLLVGVILNYLIPEQIFIIIASIATFATVWVWLMILLSQVAMRRKMNNEEIKTLKFPVPMWPIAPALTIIFMVFVIVLLGYFEKTRIALIVGIIWIVLLSIAYLLTIKKKKNSKYHRTK

SEQ ID NO: 21965 - protein, 126 aa, Photorhabdus asymbiotica
MLRTMLQGKLHRVKVTQADLHYEGSCAIDQNFMDAAGILEYEAIDIYNVDNGERFSTYAIAAERGSRIISVNGAAARRAAVGDKLIICSYVQISDEDARHHKPNVAYFDGDNIMSRIAKAVPVQVA

SEQ ID NO: 21966 - protein, 71 aa, Photorhabdus asymbiotica
MSNAMTGSVKWFNNDKGFGFISPKNGSKDVFVHYSAIQSNNFKTLEEGQEVSFSIENGAKGPSAVNVIVLS

SEQ ID NO: 21967 - protein, 308 aa, Photorhabdus asymbiotica
MTISTLGNQQDNSLVSNAFGFLRFPLNFQPYSSDAEWVITGVPFDMATSGRSGSRHGPAAIRQVSTNLAWESRRWPWDFKLRNYLNVVDCGDLVFDFGDAQDMSDKLQDHAERLLSSGKRMLSFGGDHFITLPLLRAHAKYFGKMALVHFDAHADTYPNGSKFDHGTMFYHAPNEGLIDPHHSVQIGIRTEHGQDDGFTVLDAAQVNDRSVEDLIAQIKETAGDMPVYLTFDIDCLDPAFAPGTGTPVIGGLTTDRTLKLLRGLQPLNIVGMDVVEVAPAYDQSEITALAGATVALEMLYLQAAKKII

SEQ ID NO: 21968 - protein, 575 aa, Photorhabdus asymbiotica
MEMLSGAEMVVRSLIDQGVEHVFGYPGGAVLDIYDALHTVGGIEHILVRHEQGAVHMADGYARATGKVGVVLVTSGPGATNAITGIATAYMDSIPMVVLSGQVASSLIGNDAFQECDMVGISRPIVKHSFLVKKTEDIPKVLKKAFYLASSGRPGPVVIDLPKDTVNPAIKLPYIYPEQISMRSYSPTVQGHRGQVKRALRKLLNAKKPIIYVGGGAINADCSAELLVLAEKFNIPVVSSLMGLGSFPATHQQNLGMLGMHGTFEANKAMHNSDVIFAVGVRFDDRTTNNLEKYCPDATVLHIDIDPTSISKTVSADVPIVGDAKQVLGQMLGLLETMEDTQDPDALKDWWLSIQQWRSRKCLNFDRSGEKIKPQAAIEVLYRLTKGEAYITSDVGQHQMFVALHYPFDKPRRWISSGGLGTMGFGLPAALGVKLVKPEATVICVTGDGSIQMNIQELSTALQYGLPVLVLNLNNRFLGMIRQWQDMIYAGRHSQSYMESLPDFVKLAEAYGHVGIAIQRYDELESKLAEALKEVTENQRLVFVDVTVDETEHVYPMQIRGGAMDEMWLSKTERT

SEQ ID NO: 21969 - protein, 413 aa, Photorhabdus asymbiotica
MVKVSLEKDKIKFLLLEGVHQSTVENLRGAGYSNIEYHKGALDSQELKEAIRDAHFVGIRSRTQLTEDIFQAAEKLVAVGCFCIGTNQVDLKAAAKRGIPVFNAPFSNTRSVAEMVLGELLLLLRRIPLANAKAHRGVWDKQAKGCYEVRGKKLGIIGYGHIGTQLGILAESIGMDVYFYDIENKLPLGNAHQVRHLSELLNMSDVVSLHVPETPSTKNMMGTTELALMKPGAILINASRGTVVDIPALCDALESEHLSGAAVDVFPVEPATNNDPFESPLRKFDNVLLTPHIGGSTQEAQENIGYEVAGKLAKYSDNGSTLSAVNFPEVSLPAHADDTNRFLHIHENRPGILNSINQVFAEQDINIAAQYLRTSGDMGYVVIDIVTETPAQAEMVFQKLKALPGTIRSRLLY

SEQ ID NO: 21970 - protein, 302 aa, Photorhabdus asymbiotica
MSEQETYCGFVAIVGRPNVGKSTLLNQLLGQKVSITSRKPQTTRHRIMGIHTEGTYQTIYVDTPGLHIEEKRAINRLMNRAASSSIGDVELVIFVVEGTHWTPDDEMVLNKLRNLRCPVLLAINKVDNVIDKAILLPHIGFLSKQMNFLDVVPMSAEKGMNVDTIAKIVRGHMPQATHHFPEDYITDRSQRFMASEIIREKLMRFLGDELPYSVTVEIEQFVANERGGYNIHGLILVERDGQKKMVIGNKGSKIKTIGIEARQDMERLFDVKVHLELWVKVKAGWADDERALRSLGYVDDLK

SEQ ID NO: 21971 - protein, 396 aa, Photorhabdus asymbiotica
MLDSQTIATVKSTIPLLATTGPKLTAHFYERMFKHNPELKNIFNMSHQLNGDQREALFNAICAYAANLDNLTALLPAVEKIAHKHASLNIQPEHYQIVGTHLLATLDEMFQPGNEILDAWGKAYGVLADVFINREEQIYHSGESTDGGWRGLRPFRISRKQVKSDVICSFEFVPQDGGKVMDYKPGQYLSIYLEDDSFDNREIRQYSLTTAPNGSSYRIAIKREPQGTVSNHMHDKMQEGDTVWLAAPRGDFFLDIKPETPVTLISAGVGLTPMMSMLHQLHQQNHNSQINWLHAAEHGGHHAFTHEVADIAQTMPNLNRTIWYREPRDGDQQGIHYQHKGFMDLSVLNGALNTEGMHFYFCGPVPFMQYVAKQLLDIGIDKQFIHYECFGPHKVI

SEQ ID NO: 21972 - protein, 404 aa, Photorhabdus asymbiotica
MKLPIYLDYSATTPVDPRVAEKMMQYLTMDGVFGNPASRSHRFGWQAEEAVDIARNQIADLVGADPREIVFTSGATESDNLAIKGAANFYQKKGKHIITSKTEHKAVLDTCRQLEREGFEVTYLAPQSNGLIDLKDLEAAVRDDTILISIMHVNNEIGVVQDIAAIGEMCRSRGIIFHVDATQSVGKLPIDLTKLKVDLMSFSAHKIYGPMGIGALYVRRKPRVRIEAQQHGGGHERGMRSGTLPVHQIVGMGEAYRIAKQEMESESQRLRGLRLRLWSGIKDIEEVFLNGDLEHGAPHILNVSFNYVEGESLMMSLKDLAVSSGSACTSASLEPSYVLRALGMNDELAHSSIRFSLGRFTTEEEIDYAIELIHKSIGRLRELSPLWEMFKQGVDLNSIEWSHH

SEQ ID NO: 21973 - protein, 463 aa, Photorhabdus asymbiotica
MQASSQLERGLNARHIRFMALGSAIGTGLFYGSAEAIKMAGPAVLLAYLVGGAAVFMVMRTLGEMAVHKPDAGSFASYAHQYLGPLLGFITGWTYTFEMIIVCLADVTAFGIYMGLWYPEVPRWIWVLSIIFIIGALNLCKVKVFGEMEFWLSILKVAAISAMIIAGVGIILFGFSGHFQATGVQNLWQHGGFMPNGFGGIIESLAVVMFAFGGIEIIGITSSEAKNPAKMIPQAINSIPFRILLFYVLTIFVLMAIYPWNSIGQEGSPFVAIFQGLGISSAANILNIIVITAAISAINSDIFGAGRMMYGMAEKGLAHKKFMNLSRNGVPWVTIMIMTLALLCAVVLNYLLPEQIFVIIASIATFATVWVWLMILLSQFAMRRKMSPEEARKLQFPVPMWPVAPILTIVFMIFIIAILSYFPDTRIAFYVGGIWILLLTSAYYLFIRNNVIIIGAQSVREMQ

SEQ ID NO: 21974 - protein, 708 aa, Photorhabdus asymbiotica
MLIPTSTSVGLTSVSLGVIRSMEQKGVSLSVFKPIAQPRCCGSQDQTTAIIRSHSSIKTAEPLNMAYVESLLTTNQKDVLMEKIVALYHENTKDAEVILIEGLVPTRKHPFAQSLNYEIAKTLNAEIVFVLALGNDSQEQLKERVELARAEFGGSKNQNITGVIINKLNAPVDDQGRTRPDLSEIFDESSKAIVANIDPNNLSKHSPLPILGCIPWSFDLIATRAIDMAKHLNARIINEGAIKTRRVKSVTFCARSIPHMLEHFRPGSLLVTSADRPDVLVSACLAAMNGVEIGAILLTGGYSIDEPIKQLCERAFGTGLPVFMVDTNTWQTSLSLQSFSLEVPADDHERIEKLQNYVAHHINKEWIDSLTANSERPHRLSPPAFRYQLTELARKAGKRIVLPEGDEPRTVKAASICADRGIARCVLLGDPEEIRRVAAAQGVELGTGIEIVDPVAVRERYVPRLVELRKNKGMTEVVAREQLEDNVVLGTLMLEQGEVDGLVSGAVHTTANTIRPPLQLIKTAPGSSLVSSVFFMLLPEQVLVYGDCAINPDPTAEQLSEIAIQSADSAKAFGIEPRVAMISYSTGNSGAGSDVEKVREATRLAQEKRPDLIIDGPLQYDAAIMADVAKSKAPNSPVAGQATVFIFPDLNTGNTTYKAVQRSADLVSIGPMLQGMRKPVNDLSRGALVDDIVYTVALTAIQSAQGEA

SEQ ID NO: 21975 - protein, 400 aa, Photorhabdus asymbiotica
MSSKLVLVLNCGSSSLKFAIIDPANGEEYLSGLAECFNLPEARIKWKMDGAKHEAALGAGAAHSEALNFIVNTILAEKPELSAQIAAIGHRIVHGGEKFTSSVTINDEVIQGIKDAVPFAPLHNPAHLIGIEEAKKGFPHLAAKNVAVFDTAFHQTMPEEAYLYALPYNLYKEHGIRRYGAHGTSHFFVSREAAKTLNKPVEELNVIVCHLGNGGSISAIVNGQCVDTSMGLTPLEGLVMGTRSGDIDPAIIFHLHDSLGMSVEQINKLLTKESGLLGLTEVTSDCRYIEDNYETKADAKRAMDVYCHRLAKYVGAYSALMEGQLDAIIFTGGIGENSALVRELVLKKLALLGFEYDHERNLTARFGKSGPITTDNSRLALVIPTNEELVIAQDAARLTA

SEQ ID NO: 21976 - protein, 419 aa, Photorhabdus asymbiotica
MLKNPFFTKIKARLSMLAVKKSSKLDNVCYDIRGPVLKEAKRLEEEGNKVLKLNIGNPAPFGFEAPDEILVDVIRNLPTAQGYSDSKGLYSARKAIMQHYQARNMLDVSVEDIYIGNGVSELIVQAMQALLNTGDEMLVPAPDYPLWTAAVSLSSGKAVHYMCDESSDWFPDLDDIRNKITPRTRGIVIINPNNPTGAVYSKELLLEVVEIARQHNLIIFADEIYDKILYDDAEHHSIAALAPDLLTVTFNGLSKTYRVAGFRQGWMVLNGPKKHAKSYIEGLEMLASMRLCANVPMQHAIQTALGGYQSISEFILPGGRLYEQRNRAWELINQIPGVSCVKPKGALYMFPKIDAKRFNVHDDQKMVLDLLLQEKVLLVQGTAFNWPEPDHFRIVTLPRLDELEVAIQKFARFIGNYHQ

SEQ ID NO: 21977 - protein, 460 aa, Photorhabdus asymbiotica
MSHNTEISIGTNQTGANNRVQLRKTLTLVQVVMMGLAYLQPMTIFDTFGIVSGLTDGHVATSYAIALIAILFTALSYGKLVKRFPSAGSAYTYAQKSISPHVGFMVGWSSLLDYLFMPMINILLAKIYLQAIFPSVEPWVFVVGLALVMTAFNLRGINVVANLNTGIVIVQVAIMVVFVGLLIHGVYNGEGVGTLWSVRPFTSEDAHLIPMITGATILCFSFLGFDGISSLSEETPNAGKVIPKAIFLTALIGGVIFIIVSYFLQLYFPDISRFKNPDESQPEIMLYVAGTLFQSIILVFSCVTVLASGMASHAGVSRLLYVMGRDGVFPEKIFGYVHPKWRTPAVNVLLVGIVALSAITFDLVTATALINFGALIAFTFVNLSVISQFYIRERRNRTLKDTINFLVLPVIGACTVGVLWMNLEQSSMELGLTWGAIGLVYMVFLTRRFRQPMPQCSEMI

SEQ ID NO: 21978 - protein, 571 aa, Photorhabdus asymbiotica
MNDAKTSQNQQFITTLTNIVGKSHILTASHKTERYRKGFRSGQGEALAVVFPSSLVEQWRVFKACVEADKIVLMQAANTGVTEGSTPSGNDYDRDIVIISTLRMNKIQILKQYNQVVALPGSTLWQLERALKPLGREPHSVIGSSCIGASVIGGICNNSGGSLIRRGPAYTEMALYGRVNKNGKPELINHLGIYLGETPEEILSCLEERRYSDQDIEHGQRKASDYEYAQRVRDVDADTPSRFNSDERRLFEASGCAGKLVVFAVRLDTFPAESSSQVFYIGTNQTDVLTELRRHMLANFRNLPVAGEYMHRDIFDIAESYGKDTFIMIDKLGTDKMPAYFTLKGKMDAIFNKIPFLPSHLIDRIMQGLSRLFPSHLPNRLKEYRNRFEHHLILKMSGDGVEEARSWLESYFSQAKGAFFACTPEEGAKAFLHRFSAAGAAIRYRAIHSNEVENILSLDIALRRNDREWFEQLPPEFDDVLVHKLYCGHFMCHVFHHDYIIKKGVDIHALKERMIEILDQRGAEYPAEHNVGHQYKAKPQLKAFYQMTDPTNTLNPGIGKTSKLKNWGGEF

SEQ ID NO: 21979 - protein, 459 aa, Photorhabdus asymbiotica
MAGQSQQSTLKRGLKNRHIQLIALGGAVGTGLFLGIAQTIKMAGPSVLLGYSVAGFIAFLIMRQLGEMVVEEPVAGSFSHFAYKYWGDFPGFLSGWNYWAMFTLVGMAELTAVGIYIHYWWPDIPTWVSAMVFFVLINSVNLINVRLYGETEFWFAIIKVAAIICMIVFGAYLLISGKGGPQASITNLWQYGGFMPNGASGLIMAMAVLMFSFGGLELVGVTAAEAENPRISIPKATNQVVYRILIFYIGSLTVLLSLYPWSNVIEGESPFVMIFHNLDSFWVANILNIVVLTAALSVYNSGVYCNSRMLYGLAKQGNAPKILTKVNKSGVPVRAIVMSALATSIGVLINYVMPGKALELLMALVVTTLVINWVMICMAHLKFRAQKVKEGVEPSFKAFWYPFSNYLCLVFLVFILVIILMTESIRISVILMPFWVGVLWIGFIASRSQRDKLKTINQG

SEQ ID NO: 21980 - protein, 759 aa, Photorhabdus asymbiotica
MDEKLKQSALDFHQFPQPGKIMVTPTKPLTTQRDLALAYSPGVAAPCLEIAEDPLAAYKYTARGNLVAVISNGSAVLGLGNIGALAGKPVMEGKGVLFKKFSGIDVFDIEVDESNPDKLIDIIAALEPTFGGINLEDIKAPECFYIEQKLREKMNIPVFHDDQHGTAIICTAAVLNGLRIMKKEISEVRLVVSGAGAASIACMNLLVALGLKRENIVVCDSKGVIYRGRDENMEGTKAAYAIEDNGSRTLGDVIPGADIFLGCSGPGVLTQDMVKTMAKDPLIMALANPEPEILPPLAKQVRPDAIICTGRSDYPNQVNNVLCFPFIFRGALDVGATTINEEMKLACVHAIADLALAEQSEEVASAYNDQDLFFGPEYIIPKPFDPRLIVKIAPAVARAAMDSGVATRPIKDFSAYIEKLNEFVYKTNLFMKPIFSQAKKAKKRIVLAEGEEVRVLHATQELVSLGLAYPILIGRPSVIEKRIQKLGLHIEAGKDFEVVNNENDPRFKEYWQEYHNIMKRRGISPEQARRAVIGNPTLIGAIMVLRGEADGLICGTVGSYSEHYDVVRDVFGFREGVHTAGAMNALMLPSGNTFIADTYVNHDPTPEQLAEITLMAAETIRRFGLEPKVALLSHSSFGSMDCPSAQKMRQTLALVNKMSPSLEIDGEMHGDAALVESIRRDIMPDSPLKGAANLLIMPNMESARISYNLLRVTSSEGVTVGPVLMGVSKPVHILTPIASVRRIINMVALAAVEAQTHPL

SEQ ID NO: 21981 - protein, 187 aa, Photorhabdus asymbiotica
MILLSDFINRFQLQLPSHPKRPSNNCRHAAVLLPIICKPKPTLLLTQRSTTLRSHAGQVAFPGGAADPEDKSIIATALREAEEEVNIPHHKVQVLGQLVPLDSISGYLVTPVVGLLPPELSFHSNPTEVSSIFEVPLSKALSLSSYYYLDVNRHGQQHRTYFYWYQGKLIWGLTAAIIHQLAQQVQI

SEQ ID NO: 21982 - protein, 248 aa, Photorhabdus asymbiotica
MLSVKNLRVSVEGNEILKGLNLEVKPGEVHAIMGPNGSGKSTLSATLAGREEYEINDGNIIFKGKDLRELEPEERAGEGIFLAFQYPVEIPGVSNQFFLQTAVNAVREYRDQEPLDRFDFADFIEEKIELLDMQQDLLTRSVNVGFSGGEKKRNDILQMAALEPTLCILDETDSGLDIDALKIVANGVNSLRDPSRSFIIVTHYQRILDYVKPDFVHVLYQGRIIESGDFSLAKKLEEQGYGWLIDQQ

SEQ ID NO: 21983 - protein, 115 aa, Photorhabdus asymbiotica
MTTIEKIERQINENPILLYMKGSPKLPSCGFSAQAVQALSACGERFAYVDILQNPDIRAELPKYANWPTFPQLWVEGELVGGCDIIIEMFQRGELQTLIKEAADKYRSQDENIVE

SEQ ID NO: 21984 - protein, 301 aa, Photorhabdus asymbiotica
MNQSIQKIAVIGLGTMGMGIARSLIRAGIPTYGFDLNPKACDQLLQEGARVAANNAADWASELDIILLVVVNGAQIENILFDGETPLVSQLKTGTIIVLHSTVAAEQAKDFAHRLSQYNIKMLDAPISGGALKAQQGQLTVMASGEPALFEQLKPIFNATTERLYRIGDEIGLGSTVKTIHQLLAGVHIAVAAESMALAAKAGISLDLMYDIVTHAAGNSWMFENRVPHILAGDYTPKSSVDIFIKDLGLVLETGKALRFPLPLSATAHQMFLAASNEGLGQWDDSAVIKTFKGITLPEKE

SEQ ID NO: 21985 - protein, 570 aa, Photorhabdus asymbiotica
MRWKRLQRWMPGLGNFSHYRKEWFGYDLRAGLSVAAVALPVAIAYAELMEISAIIGLYACILPMFAYALFGTSRQLIVGPDAATCAVIAAAVAPLAFNNEDVRWQLTIAMTLMTGIWCIIASHFRLGTFVDFLSRPILKGLMNGVALTIIVDQLAKVFGFSSVPVGLIERVFVLPAKLMNTHLPTLAMSVVTVLILLTVRFFRPAWPGPLLAMVLTTYISWQFGLEKYGIQIVGSVSDGGLPVVPMPDFQPGIMRELVIPSLNLAVISFVSFMMTARSFANKNGYQIDADSELRALGIANIASALSQGFAVSAASSRTAVNDAIGGKTQLVSVIAASVILLILLFLADFLTYIPLSSLGVVLIYSASSLLSLRAIWSLRKRNRQAFTLSLFTLIAVLVVGLINGVGFAVLLGLLQFLRIIFRPTDQLLGVNEQGMIHSINQGNEIKPIDGVMLYRFNSPLTYFNVSYFKKRVLQHVDRVQKRPGWLVVDAAVSFTYDDVSVFAAIDELITELKVKGVTLVLAGRRTELTRWIKQNKLKSSDDDLIVVPDLYFAVRMIQSKPEWYSNYIKK

SEQ ID NO: 21986 - protein, 533 aa, Photorhabdus asymbiotica
MVPYEAASLPKSDSGQGKFKKQLTLTDLTFIGLGAIFGSGWLFAVSHVSIIAGPAGIFSWVIGGIAVLLLGIVYCELGAALPKSGGIIRYPVFSHGELMGYLMGSITLIAFSSLIAIEVVAARQYAAAWFPFLSRPGSGDPTLAGWLVQFILLAFFFYLNYNSVKTFAKSNNIISIFKFVVPLLVIVILLNYFNPSNLQVHGFSPYGVSGVQAAVSAGGIIFAYLGLTPIISVAGEVEKPQKTIPIALILSILLSTVIYVLLQLAFLGGIPSELLFGGWKQIGQYFSLPFRDIALILGAGWLAFLVVCDAVISPSGTGNIYMNATPRVIYGWAKSGTLFNVFTHIDEQSGIPRPALWLTFILAIFWTLPFPSWEKLISVVSAALVLSYALAPVTVSALRRNAKEIKRPFYIKWFAIIGPLSFIISAFIVYWSGWETVSWLLGLQIVLFFIYLLFKNKVPVDKVSLRQQITSSLWLIGFYSAMIILSYLGTFGGKGIISAPWDIVAVAVISLIAFYWGTFSALPKAVLPTEDED

SEQ ID NO: 21987 - protein, 509 aa, Photorhabdus asymbiotica
MRIGVPKERLTNEARVAATPGTVEQLLKLGFNVVVESGAGHLASFEDSAYQQVGAEVTDRHDIWHSDIILKVNAPEDDEIALMKEGSVLVSFVWPAQNPELIQKLSDRKVTVLAMDSVPRISRAQSLDALSSMANIAGYRAIVEAAHEFGRFFTGQITAAGKVPPAKVMIIGAGVAGLAAIGAAGSLGAIVRAFDTRPEVKEQVQSMGAEFLELDFEEEAGSGDGYAKVMSDAFIKAEMTLFAAQAKEVDILVTTALIPGKPAPRLITKEMVESMKPGSVIVDLAAQTGGNCELTQADKLVVTANGVKIIGYTDLPSRLPTQSSQLYGTNLVNLLKLLCKEKNGEINIDFDDVVIRGVTVVKEGVITWPAPPIQVSAQSKEKPAPVKAEKPKPQPTSPWLKYGLLALAIILFGWLANVAPKEFLSHFTVFALACVVGYYVVWNVSHALHTPLMSVTNAISGIIVVGALLQIGDGGWVSFFSFIAILIASINIFGGFTVTQRMLKMFRKD

SEQ ID NO: 21988 - protein, 315 aa, Photorhabdus asymbiotica
MPDMKLFAGNAIPELAQRVANRLYTNLGDAAVGRFSDGEVSVQINENVRGGDIFIIQSTCAPTNDNLMELVVMVDALRRASAGRITAVIPYFGYARQDRRVRSARVPITAKVVADFLSSVGVDRVLTVDLHAEQIQGFFDVPVDNVFGSPILLEDMLQKELENPIVVSPDIGGVVRARAIAKLLNDTDMAIIDKRRPRANVSQVMHIIGDVAGRDCVLVDDMIDTGGTLCKAAEALKERGAKRVFAYATHPIFSGNAVDNIKNSVIDEVVVCDTIPLSAEIKALNKVRTLTLSGMLAEAIRRISNEESISAMFEH

SEQ ID NO: 21989 - protein, 468 aa, Photorhabdus asymbiotica
MAEKIQTALSSKPEETQLQRNLSNRHIQLIAIGGAIGTGLFMGSGKTISLAGPSIIFVYMIIGFMLFFVMRAMGELLLSNLHYKSFSDFSADLLGPWAGFFVGWTYWFCWVITGIADVVAITSYISYWQPDFPQWATSLLCVSLLLALNLATVKLFGEMEFWFAMIKIVAIIALIVTGAVLIGMHFQSPTGHIASLANIWNDGGLFPTGLSGFFAGFQIAIFAFVGIELVGTAAAETKDPMKSLPRAINAIPIRIITFYVLALIIIMSVTPWRSIIADKSPFVELFVLIGLPAAASIVNFVVLTSAASSANSGVFSTSRMLFGLAKEGDAPQQFSRLSRRSVPASGLIFTCLCLSCGVVLIYLIPDVMHVFTLVTTVSAILFMFIWSMILCSYLVYRKRRPALHKASIYKMPLGITMSWVCLAFFAFVLILLTLRDDTRQALIITPIWFLVLIIGFQIVKRHRTRLYS

SEQ ID NO: 21990 - protein, 581 aa, Photorhabdus asymbiotica
MNDKDLSTWQTFRRLWPIISPFRIGLIVAAVALIVNAAGDTLMLSLLQPLLDEGFGKASSDVLKWMPLIVIALMVMRGLSGFVSSYCISWVSGKVVMQMRRRLFSHMMGMPVSFFDQQSTGTLLSRITYDSEQVASSSSSALITVVREGASIIGLFILMFYYSWQLSLILIVIAPMVSWVIRVVSKRFRDISKNMQNSMGQVTASAEQMLKGHKEVLIFGGQKVETERFNKVSNHMRQQGMKMVSASSISDPIIQLIASFALAFVLYAASFPEIMDTLTAGKITVVFSSMIALMRPLKSLTNVNAQFQRGMAACQTLFTILDMEQEKDDGKLELKKADGNIEFRNVTFCYPTKEQPALQDISIRIPAGKIVALVGRSGSGKSTIANLLTRFYDVNEGSILLDSHDLREYTLSSLRNQVALVSQNVHLFNDTVANNIAYARENQYSREEIERAAEMAYAMDFIRKLDDGLDTMIGENGVLLSGGQRQRIAIARALLRDSPVLILDEATSALDTESERAIQAALDELQKNRTSLVIAHRLSTIEKADEILVIEDGYIVERGNHLSLLEQNGVYSQLHRMQFGQ

SEQ ID NO: 21991 - protein, 285 aa, Photorhabdus asymbiotica
MKADTPFNLLSPAVIAKFADDVGVYKTTKHPATTYISAITAGFFISIAFVFYITATTGTESVPYGLAKLVGGICFSLGLMLVVVCGADLFTSTVLTIIAKATGRITWSQMFKNWLNVYFGNLVGALFFVTIIWFAGQYRVANGLWGLNVLQTADHKVHHTFIEAMFLGILANLMVCLAVWMSYAGRSLIDKIFAMILPVGMFVASGFEHSIANMFLIPLGIVIKNFAPTEFWINVGATPEQFSQLTVSHFITDNLIPVTIGNIIGGAVLVGLTYWLIYLRSEQKH

SEQ ID NO: 21992 - protein, 355 aa, Photorhabdus asymbiotica
MNQKLLFIDRDGTLITEPPTDFQVDRLDKLALEANVIPALLALQKSGFKLIMITNQDGLGTESFPLAGFEPPHNLMMQIFNSQGINFDEVLICPHKPADNCNCRKPKTKLVEKYLAEGLMDTANSYVIGDRETDLQLAENMGIQGLHYQPENLSWSAISEQLTCQDRHAHIQRVTKETSIDIEVWLDREGGSKINTGVGFFDHMLDQIATHGGFRMNIQVRGDLCIDDHHTVEDTGLALGEALKLALGDKRGISRFGFVLPMDECLAHCALDISGRPHLEYKAEFKYQRVGDLSTEMIEHFFRSLSYTMACTLHLKTKGNNDHHRAESLFKVFGRTLRQAIRIEGDTLPSSKGVL

SEQ ID NO: 21993 - protein, 444 aa, Photorhabdus asymbiotica
MSFESLGLDADILCAIEEQGYSAPTPIQQQAIPVVLAGKDLLASAQTGTGKTAGFTLPMLQLLNNSPVQTKGRRPVRALILTPTRELAAQVGENVRNYSKYLRLRSLVVFGGVSINPQMMKLRGGVDILVATPGRLLDLEHQNAVDLSRVEILVLDEADRMLDMGFIHDIRRVLNKLPPKRQNLLFSATFSDEIKNLASKLLHNPVSVEVARRNSASEQIEQFVHFVDKKRKGELLSFLIGSRNWQQVLVFTRTKHGANRLAEQLNKDGVTASAIHGNKSQGARTRALADFKEGRIRVLVATDIAARGLDIDQLPYVVNFELPNVSEDYVHRIGRTGRADATGQALSLVCVDEHKLLKDIERLLKREIPRVAIPGYDPDPTIKAEPIQNGRQARGDNRQKNSHRRSGAPSRQRSHNRADVSNKASIPNRFQGASRRQGSESPGA

SEQ ID NO: 21994 - protein, 555 aa, Photorhabdus asymbiotica
MSEADARPTNFIRQIIDEDLAIGKHTSVHTRFPPEPNGYLHIGHAKSICLNFGIAKDYQGQCNLRFDDTNPVKEDVEYVDSIKNDVQWLGFEWSGDIRYSSNYFDTLYQYAIELIDKGLAYVDELSPEEIREYRGTLKEPGKNSPYRDRSIEENLALFEKMRAGEFGEGKACLRAKIDMASPFIVMRDPVLYRIKFAEHHQSGNKWCIYPMYDFTHCISDALEGITHSLCTLEFQDNRRLYDWVLDNITIDCHPRQYEFSRLNLEYTVMSKRKLNLLVVDKIVEGWDDPRMPTISGLRRRGYTASSIREFCRRIGVTKQDNNVEMAALESCIRDDLNENAPRAMAVLDPVKLVIENRSEGGQMLSMPNHPNKPEMGSREVPFSREIYIDRADFREEANRQYKRLVLGKEVRLRNAYIIKAERVEKDVDGNITTIYCSYDEQTLNKDPADGRKVKGVIHWVSATHAVPAEFRLYDRLFSVPNPGAEDDFLATINPESLVIRQGFVEPSLADAKSEKTYQFEREGYFCADSCHSSEEHLVFNRTVGLRDTWAKISQD

SEQ ID NO: 21995 - protein, 857 aa, Photorhabdus asymbiotica
MRLDRLTNKFQLALSDAQSLALGHDNQFIEPIHLMSSLLKQGGGSIRPLLTSIGIDTGRFSNQLERVLERLPQVQGAGGDVQPSNDLIRHLNLCDKLAQKEGDNFISSELFVLAALEERGSLSDILKAAGATKEKVTKAIKQMRGGEKVYDQGAEDQRQALKKYTIDLTERAEQGKLDPVIGRDEEIRRTIQVLQRRTKNNPVLIGEPGVGKTAIVEGLAQRIINGEVPEGLKNKRVLSLDMGALLAGAKYRGEFEERLKGVLSDLSKQEGNVILFIDELHTMVGAGKADGAMDAGNMLKPALARGELHCVGATTLDEYRQYIEKDAALERRFQKVYVAEPSVEDTIAILRGLKERYELHHHVQITDPAIVAAATLSHRYISDRMLPDKAIDLIDEAGASLRMQMDSKPEALDRLERRVIQLKLERQALKKESDDASKKRLEMLNEELIVKEREYSELEEEWKAEKAELTGTQHIKAELENARISLEQARRSGDLAKMSEIQYGKIPGLEKQLATATQAEGKNMKLLRNKVTDTEIAEILARWTGIPVARMLESEKDKLLRMEQELHKRVIGQNEAVDAVSNAIRRSRAGLADPNRPIGSFLFLGPTGVGKTELCKALANFLFDSDDAMVRIDMSEFMEKHAVSRLVGAPPGYVGYEEGGYLTEAVRRRPYSVILLDEVEKAHPDVFNILLQVLDDGRLTDGQGRTVDFRNTVVIMTSNLGSDMIQERFGGLNYGEMKDMVMGIVSHHFRPEFINRIDEVVVFHPLGRRHLSAIADIQLQRLYKRLEERGYQVAITQQALEMLAEAGFDPVYGARPLKRAIQQEIENPLAQKILSGQLLPGKPVTLDVENSQIVAKQ

SEQ ID NO: 21996 - protein, 408 aa, Photorhabdus asymbiotica
MDIIILGVVMFTLIVLVLTALILFAKSKLVNTGDIKVEVNGDPEKSFTAPAGDKLLNMLSSQGIFVSSACGGGGSCGQCRVKIKDGGGDILPTELSHINKREAKEGCRLACQVNVKQNLKIDLPEEIFGVKKWECEVISNDNKATFIKELKLKIPDGEVVPFRAGGYIQIEAQPHIARYADYDVPQEYREDWDKFNLFRFVSEVKAPAVRAYSMANYPEEHGIIMLNVRIATPPPRNSEAPPGIMSSYIWSLKPGDKVTISGPFGEFFAKDTDAEMIFIGGGAGMAPMRSHIFDQLKRLNSKRKISFWYGARSKREMFYTEDFDQLAAENENFTWNVALSDALPEDNWDGYTGFIHNVLYENYLKDHPAPEDCEFYMCGPPVMNAAVIKMLKDLGVEDENIMLDDFGG

SEQ ID NO: 21997 - protein, 1485 aa, Photorhabdus asymbiotica
MLYNKSQEKDNCGFGLIAHIEGEPSHKVVRTAIHALARMQHRGAILADGKTGDGCGLLLQKPDRFFRMVAQEQEWRLARNYAVGMLFLSQDTQIAQTCREIVEQELQNETLSVVGWREVPTNSDILGEIALSSLPRIEQIFINAPAGWRARDLERRLFVARRRIEKRISDSDFYVCSLSNLVTIYKGLCMAADLPRFYPDLADLRLESAICLFHQRFSTNTVPRWPLAQPFRYLAHNGEINTINGNREWARARAYKFKTPLIPDLQTAAPFVNETGSDSSSLDNMLELFLNGGMDLIRAMRLLVPPAWQNNPDMDEDLRAFFDFNSMHMEPWDGPAGIVMSDGRYAACNLDRNGLRPARYVITKDKLITCASEIGIWDYQPDEVIEKGRVGPGELMVIDTRQGRILHAEETDNDLKSRHPYKEWMDKNVKRLIPFEELRQDQSGHRDLDDQSLTVYHKQFAYSNEELDQIIRVLGENGQEATGSMGDDTPFAVFSSRPRIIYDYFRQQFAQVTNPPIDPLREAHVMSLTTCIGREMNVFCEAEGQAHRLSFKSPILLYSDFHQLTTQQSPHYRAERLDLTFNPQKTNLQNALLALCDLAEQLARDGAVLLILSDRNITPEKLPIPAPMAVGAIQHRLVEKSLRCDTNLIVETASARDPHHFTVLLGFGATAIYPYLAYESLAKMVDNGTINKPYTDVMLNYRNGINKGLYKIMSKMGISTIASYRCSKLFEAVGLHSELTEFCFNGVISRIGGANFGDFEQDLRNLSKRAWLARQPVDQGGLLKYVHNGEYHAYNPDVVSTLQSAVHSGEYSDYLKYARLVNQRPITTIRDLLAIKTKDESISIDEVEPAEELFKRFDTAAMSIGALSPEAHEALAEAMNTLGGFSNSGEGGEDPARYGTKKVSRIKQVASGRFGVTPAYLVNADVIQIKVAQGAKPGEGGQLPGDKVTPYIAKLRYSVPGITLISPPPHHDIYSIEDLAQLIFDLKQINPKALISVKLVSEPGVGTIATGVAKAYADLITIAGYDGGTGASPLSSVKYAGCPWELGLVETQQALVANGLRHKIRLQIDGGLKTGVDIIKAAILGAESFGFGTGPMVALGCKYLRICHLNNCATGVATQDEKLRRDHYHGLPERVMNYFRFIARETREIMAELGVRNLTDLIGRTDLLEVLEGISAKQSKLNLEPLLATAEPHQGKTLYCTENNPPFDDGTLNKNLLAQATSYIESQKSKTLYFDIRNTDRSVGASLSGFIAERYGNQGIAAAPIKIHFNGTAGQSFGVWNAGGLELTLIGDANDYVGKGMAGGRIVIHPPVGSAFKSHQATIIGNTCLYGATGGKLFAAGRAGERFAVRNSGAITVVEGIGDNGCEYMTGGIVCILGRTGINFGAGMTGGFAYVLDENDDFRKRVNPELVEVLAVDTLAIHEEHLRGLITEHVLLTGSQRGEDILANWQQWLSKFALVKPKSSDVKALLGHRSRSSAELRIQAQ

SEQ ID NO: 21998 - protein, 322 aa, Photorhabdus asymbiotica
MPKIDFQQAGKRVLHIERDGLAELEQYINEDFTRTCELMFNCEGKVIVMGMGKSGHIGCKIAATFASTGTPSFFVHPGEASHGDLGMITPQDIVLAISNSGESNEILSLIPALKRQKIPLICMTNNHNSSMGKAADIHLCIKVPQEACPLGLAPTTSTTATLVMGDALAVALLQARGFTAEDFALSHPGGALGRKLLLLVSDLMNTGDDIPRINRDSSLREALVEITRKKLGMTVICDENMHIDGIFTDGDLRRVFDMGIDLYNVKISDVMTAGGIRIKPNALAVDALNLMQSRHITSVLVTEGNKLLGVLHMHDLLQAGVV

SEQ ID NO: 21999 - protein, 481 aa, Photorhabdus asymbiotica
MQSEVILPLLGYLALVFLLSIYAYRRRQQGAFLTEYFLGNRSMGGFVLAMTITATYISASSFIGGPGAAYKYGLGWVLLSLIQLPAIWLSLGVLGKKFAILARRYNAVTLNDMLYARYGSRFLVWFASLSLLVAFIGAMTVQFIGGARLLETAAGIPYGAGLMIFGISIALYTAFGGFRAGVLNDALQGLVMLLGTVLLLVAVVYKAGGLPEAVATLRTINPELVSPQGAGHILNGPFMASFWILVCFGVIGLPHTAIRCISYRDSKAVHHGIIIGTIVMTILMFGMHLAGALGRAIVPDLTIPDQVIPTLMITVLPPFAAGIFLAAPMAAIMSTINAQLLQSSATIVKDLYLNLFPQQITQEKKLTRISNCSTLVLGLLLLLAAWRPPEMIIWLNLLAFGGLQAVFLWPLVLGLYWEKANAYGAVSSMIIGAVSYALLASFNIQLLNFHPIVPSLLFSLLAFGIGNIIGPRLPQRIAKPH

SEQ ID NO: 22000 - protein, 428 aa, Photorhabdus asymbiotica
MKHANWINAIIAAVALFVLSVFMMGMQLSLDGTQLVVHRADEVRWIWIGIGCAIVFLFQLLRPVVQQTMKKIPLKNRVLPDFDGSTKGQKQLAVLIIIAAIVWPFVVSRGSVDIATLTLIYVMLGLGLNVVVGLSGLLVLGYAGFYAIGAYTYALLSHYYGLGFWQSLPLAGLTAALSGLLLGFPVLRLRGDYLAIVTLGFGEIVRILLLNNTEITGGPNGISQIPKPTFFGLEFNRSVKEGGWDTFHNFFGWKYDPSDRVIFLYLVVLLLVIVMIFIINRLLRMPLGRAWEALREDEIACRSLGISPTRIKLAAFTISATFAGFAGTLFAARQGFVSPESFTFAESAFVLAIVVLGGMGSQTAVILAAILLVVSREMMRDLNAYSMLLLGAMMVLMMVWRPQGLLPMKRRDVRLKQQENHVQEGERG

SEQ ID NO: 22001 - protein, 366 aa, Photorhabdus asymbiotica
MLKVIQAPSKYIQGPDALLSIGKYTKTIADHVFVIIGNSAMKLVGDTVYNSLEEYDVTSHFEVFGGECSRNEIQRLSDILKENECQAVIGIGGGKVQDTAKVVAYESKLPILIAPTISSTNAPSSALSVVYTDDGEFEDYLFFPTNPDIVLVDTALIAKAPTRFLVAGIGDALATYFEARICSTAHKPRMTDGGISRTAMALAHLCYETLLEDGYKAKLAVDAGVSTPAVENVIEASIYLSGLGFENTGLAAAHSVHNGFTVLEECHHMYHGEKVAFGVIVQLVLENSPNEELDTVLDFCVQVGLPVTLDQLGVKDGEKLKEKVMAVAKASCAEGETIHNMPFEVTPEKVYAAILAADRMGRDWLY

SEQ ID NO: 22002 - protein, 392 aa, Photorhabdus asymbiotica
MRDVVVVAAKRTATGSFQGSLAAQPATFLGSTVIQALLAESGVAALDIEQVIMGQVLTAGCGQNPARQAALRAGLPVTIQAMTINKVCGSGLKAVHLGMQAIQSGEAEIVIAGGQENMSLAPHILPMSRQGIRLGHSELKDSLVHDGLWDAFHHFHMGVTAENVAKQFNITRAQQDEYALLSHHRAVHAQQAGYFNDEIVAVEIAGRKGEILRFVQDEGPRETSIEKLSSLKPVFQKEGTVTAGNASSLNDGAAAVLLCSREKAESLNLQPLATLSGFANTGIEPELMGAAPIEAIHQCILKQQWKPEDVDVLESNEAFAAQALAVLSSCGIPSERVNPYGGAIALGHAIGASGCRILVTLIHNLKRNRLQNGIAALCIGGGEGVALAVTRS

SEQ ID NO: 22003 - protein, 874 aa, Photorhabdus asymbiotica
MPDINRQSLFNKLNPPLFSALESASAFCKLRGNPYVELAHWLHQLMQQKAGDLQQIMGHFALDEQQVARDIVQALDMLPRGASAISDLSAHIDEAVERAWVCSSVTFAAGEIRGAHLLLALLTTFNLRQHLLAISAQFARINAGSLAQDFTHILSNSTENGPQRTQAENGNNQSTSESALQNYAQDMTALARDGRIDPVVGRDKEIRQLVDILLRRRQNNPLITGEAGVGKTALVEGLALRIASGDLPPSLCHVQLWSLDIGRLEAGAGMKGEFEARLQAVINEVQQSPVPIILFIDEIHMLIGAGGAQGVGDAANLLKPALARGQLRTIGATTWAEYKKHIEKDPALTRRFQVLQVEQPDEALALQMIRSLSGQLEQHHGVLLLDEALEAAVSLSHRYIPARQLPDKAIALLDTTCARVAVSQHSQPAVLEDYRRQLDALQIEYEIVCREQQLGGDHDARLAQLDEQRGELRAEEELMVQRWQAEIALAQQIISLRQQLIANDETAVDDAQRLAWQTQLQDCRQQLSLLQGEQPLITVAVDAHSVAAVVADWTGIPLGRMVKNELNVVQNLEHSLGQRVIGQQYALNIISERVRTARAHLADPSRPVGVFLLCGPSGVGKTETALALAESLYGGEQNLITINMSEFQEPHSVSTLKGAPPGYVGYGEGGVLTEAVRRRPYSLVLLDEVEKAHSDVHELFFQVFDKGWMEDGEGRRIDFRNTLIILTSNVGSQEVINACSRQDGLPNIETLTQQLRQPLLRAFPAALLGRLTVLPFLSLSDEMLENIVQLQLARVAQRLRENHGIAAQFDHRVTRQIMSCCMEQESGARRIDSIITNTLLPQISRKLLTATIENQHYSQLQVTWEETAFQCHFC

SEQ ID NO: 22004 - protein, 892 aa, Photorhabdus asymbiotica
MDTVSTSLLCRLNPYCAQALSAAAALCQTRAHAEITVEHWLLKLLEDGEGDITVIARRYEWDMHSLWQSLLTTIDRLPRSINQRPRLSDSLYRLLQVAEFVASQEAGNESIRSVHLLQVLRGQPDWLRTHDGWPLMSLSVSQLQHLRPLLDQHSAERPEVQAAARLADSGGGSAVAEIHPDKPAQNAQALSPALQGVLDKFTLDLTARAAEGRIDPVFGRDNEIRQMIDILSRRRKNNPILVGEPGVGKTALVEGLALRIAGGQVPDSLKTVSVRSLDLGLLQAGAGVKGEFEQRLKNVIEAVQQSPTPILLFIDEAHTLIGSGNQAGGTDAANLLKPALARGALRTIAATTWSEYKQYFERDAALERRFQMIKVDEPDDETACLMLRGLKARYARYHGVHIQDNAVKAAVTLSRRYLTGRQLPDKAVDLLDTASARVRMSLDTVPEALTQRQAQLTALEMEQQAIEADSAVLPTEEDNTRLKEIAVRREEVARQTEQLTAQYQREKSLAQRLLDLRQHSPKTPELREGIAELAELQGNEPLLSLNVDVRTVATVVADWTGIPLSSLLKDEQTGLLHLEQYLGDRVIGQDMALREIAQRLRAAKTGLTPEQGPLGVFLLVGPSGVGKTETALALADCLFGGERSLITINLSEYQEPHTVSQLKGSPPGYVGYGQGGILTEAVRQRPYSVVLLDEVEKAHRDVLNLFYQVFDRGFMRDGEGREIDFRHTVILMTSNLGSDQLMALLAQQPDAPTATQHELLRPILRDHFQPALLARFQTVIYRPLSAEALRRIVDIKLGQVTRRLNTHYGLTCTVESGLCDTLVNACLLPDSGARNIDSLLNQQILPVLSQALLERLAHHHKPVGVTLGFNEEEGIILAFTEQTAVSDSGENA

SEQ ID NO: 22005 - protein, 459 aa, Photorhabdus asymbiotica
MSAVSSLCPEIGGYVVAKFGGTSVANFDAMNSSANIVLANKEVRLVVLSASAGITNLLIALAEGCDADKRADYLKQIHTIQHAIVDRLHDSDVIRQEINRLLENIKALSEAASLATSDALTDELVSHGELMSTLLFTELLRQRGTDAEWFDVRKIMRTDDHFGCAEPDNIQLQSLVTEHLLPRLQNTLVITQGFIGREEKGRTTTLGRGGSDYTAALLGEALNLKRVDIWTDVPGIYTTDPRVVPTAKRIDKIAFDEAAEMATFGAKILHPATLLPAIRCDIPVFVGSSKNPQAGGTLVCDTTTAPPQFRAIALRRKQTLLTLHSLKMLHAQGFLAEIFTILSRHNISVDLITTSEVNVALTLDTTGSTSTNGYLLTNALMTELSTLCRVEVEEDLALIAIIGNQLSQVRGLGKQIFDALEVFNIRMISHGASNHNLCLLVPGKDAEQIVQTLHQSLFE

SEQ ID NO: 22006 - protein, 635 aa, Photorhabdus asymbiotica
MRHHYMTTETEISFADLGLSAPILSALEDLGYEKPSPIQQQCIPHLLNGRDVLGMAQTGSGKTAAFSLPLLHNINAELKAPQILVLAPTRELAVQVAEACADFSKHMRNVNVVALYGGQRYDVQLRALRQGPQIVVGTPGRLLDHLKRGTLDLSNLSGLVLDEADEMLRMGFIEDVENIMSQIPAEHQTALFSATMPEAIRRITRRFMNDPQEVRIQASVTTRPDISQSYWSVYGMRKNEALVRFLEAEDFDAAIIFVRTKNATLEVAEALERNGYNSAALNGDMNQALREQTLERLKDGRLDILIATDVAARGLDVERISLVVNYDIPMDAESYVHRIGRTGRAGRAGRALLFVENRERRLLRNVERTMKLTIPEVELPNAELLSQRRLEKFAANVQQQLESSDLDQYRALLSKLQPAEDLDIETLAAALLKMAQGERPLILPPDPVRRPRREFNERDDRRRNGFDDRGERGDRPRRERRDVGEMELYRIEVGRDDGVEVRHIVGAIANEGDISSRYIGNIKLFATHSTIELPKGMPGDLLSHFTRTRILNKPMNMQLMGDAQPFERRERRGGGRNGNGNAPRRDRESFNGGGRRFSGERRGGEGQSRSNFRGRSDDHGPSAAPRRRYSNSNAQ

SEQ ID NO: 22007 - protein, 653 aa, Photorhabdus asymbiotica
MSDMAKNLILWLVIAVVLMSLFQSFGPSDSNSRRVDYSTFINELAQDQVREVRISGREINVSKKDNSRYTTYLPVQDEKLLDTLLNKNVKVVGEPPEEPSLLTSIFISWFPMLLLIGVWIFFMRQMQGGGGKGAMSFGKSKARMLTEDQIKTTFADVAGCDEAKEEVGELVEYLREPGRFQKLGGKIPKGILMVGPPGTGKTLLAKAIAGEAKVPFFTISGSDFVEMFVGVGASRVRDMFEQAKKAAPCIIFIDEIDAVGRQRGAGLGGGHDEREQTLNQMLVEMDGFEGNEGIIVIAATNRPDVLDPALLRPGRFDRQVVVGLPDVRGREQILKVHMRRVPLDTDVDASVIARGTPGFSGADLANLVNEAALFAARGNRRVVSMVEFEKAKDKIMMGAERRSMVMTEEQKESTAYHEAGHAIIGRLVPEHDPVHKVTIIPRGRALGVTFFLPEGDQISASRQKLESQISTLYGGRLAEEIIYGPDNVSTGASNDIKVATSIARNMVTQWGFSERLGPLLYAEEEGEVFLGRSVAKAKHMSDETARLIDQEVKAIVDNNYQRARQILMDNLDILHSMKDALMKYETIDAPQIDDLMNRTNVRPPAGWENGNGSNNSSRPADNTSPLQPVKSTGDVDTSVQGGEQSGKPGSNDR

SEQ ID NO: 22008 - protein, 391 aa, Photorhabdus asymbiotica
MKFVDEARILVVAGDGGNGCVSFRREKYIPKGGPDGGDGGDGGDVYLLADENLNTLIDYRFEKSFRAERGQNGQSRDCTGKRGQDITIKVPVGTRVRDVVTGEVLGDMTRHEQRLMVAKGGFHGLGNTRFKSSVNRAPRQRTMGTSGETRELMLELMLLADVGMLGMPNAGKSTFIRSVSAAKPKVADYPFTTLVPSLGVVRMDNEQSFVVADIPGLIEGASDGAGLGIRFLKHLERCRVLLHLIDICPVDESDPVENARIIFNELQQYSEKLAQKPRWLVFNKVDLLEPEEAKQRVQDIADKLGWEGGFYMISAINRLGVKELCWDIMEFMKTQPRNMNTTEGEVQPEKVEFMWDDYHKEQLNQVSETDDDWDDDWDEDDNEGVEFIYKR

SEQ ID NO: 22009 - protein, 396 aa, Photorhabdus asymbiotica
MNSDSVLVIYYNRRYNPLIIRDLKSRFKEVIALYIDEGQVRDIDDIELECIVAGADKFIYKDYRKQYAENFISKAIKANAIYQHGYFLSAALSRPAIAEAAVEVANILDINYIAHQFRGNDQARMDMNIEILDKIPIASLRDFKYDENVVNNYAAQYGIPQEFGCNNPYSTSENIWGFSIECGSLEEPETFIPEDVKEKLFEHALSATEPIFLSLGFEHGVPVSLDGENKSLAEIIEILNEIGKKLSVGIFDIVEDGIVGLKTRAIYQSPAAHILITAHRDLELYCSNRRENWFKETVDKKWAELVYSGLWYDPLLTHLNYFIDSMNQNVNGEVKLELGYKYVNVCSRTSKTSIYDHNLAIYNCGHLYSQSDTEGFAKIFNIHTKQSAKSKMRQIL

SEQ ID NO: 22010 - protein, 394 aa, Photorhabdus asymbiotica
MTSLYFDYNATTPLSIKAQLAIKDALSIFANPSSHYSLSDMAKNLLTDARRSMASLMGTVPEQILFTSGGTESNNQALSSLLATLPGSDLSAYHVISSSIEHPSVLAPLLWYQQRGLQLTLIDPDNQGRISVQSIEKNLRPETRLITLMAINNETGVIQPYEAVASLAKEANVYLHIDAVQAIGKLPFNCDKFTGITTVSFSGHKFNGPKGIGGLYHAPGTQLTPLLHGGGQEQGIRSGTENTLGLAGLAAAAKESLNGLKERFDTYKILREILLSLLKQHHVNYLVNGSTNPEFQAPWTLNLSFPGVRAESLASRLDLCHGVSLSLGSACSNNKSTQRSHVLVAMGLPDDRIDSAVRISFGYTTSQNDIEMLANAIKQETYNLLKISGQSLNA

SEQ ID NO: 22011 - protein, 417 aa, Photorhabdus asymbiotica
MLINNKGILKGNFMHTKDIKKIVLAYSGGLDTSAIIPWLKEHYDNCEVVAFVADVGQSREDLEGVEQKALLSGASACHVVDLREEFIKDYVYPVLKTGALYEGSYLLGTSMARPIIAKAQVELALKVGADALAHGATGKGNDQVRFESTYTALAPQLKVVAPWREWDLRSREALLDYLKERDIPTTATLEKIYSRDENAWHISTEGGVLESTWNASNKDCWVWTAELEEAPNEAELVNVTIEKGEVVKVNGKALSPYQCLEQLNILGAKHGIGRIDIVENRLVGMKSRGCYETPGGTIMMAALRGVEQLVLDRDSFKWRQQLGLEMSYVVYDGRWFAPLRQSIQAAAEVLAADVSGEVVLKLYKGQVTAIQKKSANSLYSEEFATFGEDEVYDHGHAEGFIRLYALPSRIRALNSKK

SEQ ID NO: 22012 - protein, 811 aa, Photorhabdus asymbiotica
MSALAVAGAENGRQLHKFGGSSLADVKCYQRVAKIMANYSQPGDLMVVSAAGSTTNQLINWLKLSQSDRISAHQVQQVLRRYQQDLIKGLLPETVAEELMKCFIADLERLGALLDKPIGDVTYAEVVGHGEIWSARLMSAVLETQGVPSAWVDARQFLRAERAAQPQIDVELSQPLLSQLLTQNPSKRLVVTGFISSNHEGETVLLGRNGSDYSATQVGVLAGAKRVTIWSDVAGVYSADPRRVKDACLLPLLRLDEASELARLAAPVLHTRTLQPVSVSDIDLLLRCSYQPEQGSTRIERVLATGTGAKIVTSHDDVCLIELHVAAHHDFKQIYKDIDLLLKQGQIRPLATGIHPDCNLIQLCYTSEVVSSALNVLEDAALPGKLSLREGLALVALVGAGVCKNPLHCHRFYQQLKDQPVEFIWHAEDGISLVAVLRTNQTEHVIQGLHQSLFRAEKRIGLILFGKGNIGSRWLELFTREQKNISARSDFEFILAGVVDSRRSLLDYQGIDASRALAFFDNEATEHDVDELFLWMRAHPYDDLVILDVTASEELARCYTDFASYGFHVISANKIAGSSSSNDYRLIRDAFAKTGRHWFYNATVGAGLPINHTVRDLRESGDTILSISGIFSGTLSWLFLQFDGSVPFSDLVEQAWQQGLTEPDPRIDLSGQDVMRKLIILAREAGYEIEPEQVRVESLVPKDAELGSVEQFFDNSSAINEQMVQRFAAAQEMGMVLRYVARFNANGKAKVGVEAVCPDHPLASLLPCDNVFAIESRWYRDNPLVIRGPGAGRDVTAGAIQSDLNRLSQLL

SEQ ID NO: 22013 - protein, 159 aa, Photorhabdus asymbiotica
MFLNRHCFNGLCRYNSRGEFNVPFGNYKKTYFPATKILEFAKKSKITSIHCADWREILKIVDFGDVVYCDPPYFTKGVNFTQYCKNGFSHNDHQELATSLKQLNELLCVPVTVSNSIEAKELYADLGFTIHKIEAPSTIAVNGDRQPAIEIIAMLEASA

SEQ ID NO: 22014 - protein, 643 aa, Photorhabdus asymbiotica
MCGFAGFYCPKGLHSDPSAVLQKMGDAISHRGPDDNGIWFNINTGIAFSHRRLAIIDLTKTGHQPMHSPSKRFTISFNGEIYNHLNLRRDLKNITWKGNSDTETLLCAIEHWGLEKTLQRSTGMFSFALWDNTTHTLTLARDRIGEKPLYYGWQGNSLLFGSDLISFKHHPEFIPEINRQILTGYLKKGYIEAPNSIFENIFKLTPGTFKTFSNYTPKEGVENVYWSKEKVILSSIENPFIGTHSEAVEQLESLLSKAISQQMLADVPLGAFLSGGVDSSTIVSLMQSHSKRPIQTFTIGFNEENYNEAEYAKAVAEHLGTNHTELYVTAQDILNIVPNISKIYSEPFADSSQIPMFLVAKMAKQHVTVALSGDAGDELFYGYSRYNNTLSAWNKINSLPMSLRKIGKNFINYISPNLINKLGLVLTSGKKVYLGDKIHKGAELLEISNFEYFYKNYLLSHYNSTDKLVLNASTDDKNSLVSSFDSLNNQEKMMAIDSYSYLPDDILVKVDRAAMGTSLETRVPMLDHHVVEFAYSLPISYKERDNSSKWPLRQILYKYVPPSLIERPKKGFNIPVRDWLRGPLYEWANDLLDENRIKQEGFFDPIQIQNLWKEHTDGIRNWSNVLWAILMFQQWYQDYNTSN

SEQ ID NO: 22015 - protein, 546 aa, Photorhabdus asymbiotica
MDSQRNLLLIALLFVSFLVWQAWEADKNPQPTTVQATQQTDMPSGENQAVPGSGKGKLITVKTDVLSLTINTRGGDIEEADLLAYPDTLGSNQPFKLLETTPAFTYQAQSGLTGKDGPDNPTNSERPLYTTAQDSYVLDNGQDELRIPLNFVAKDGVVYVKTFVLKRGEYAISVDYRIHNTTEKPLQMTFFGQLKQNVELPKHRDTGSSNFALHTYRGAAYSSDDNKYKKHSFSDIESEPLSVTTKGGWVAMLQQYFATAWIPSANETSTFYTASLDKKMAAIGYKSAPISVAANSEKTVSSTLWIGPEIQDEMAAVAPHLDLSVDYGWLWFISQPLFKLLKFLHGFIGNWGFSIIVITFIVRGIMYPLTKAQYTSMAKMRLLQPKLAAMRERIGDDRQRMSQEMMALYKAEKVNPLGGCLPLLIQMPIFLALYYMLMGSVELRHAPFAGWINDLSAQDPYYILPLLMGVTMFVIQKMSPTTITDPMQQKIMTYMPVMFTIFFLWFPSGLVLYYIVSNLVTIIQQQLIYRGLEKRGLHSREKKPAK

SEQ ID NO: 22016 - protein, 401 aa, Thermococcus sp. AM4
MPVDLSGPLLSAFRKAKREFEDAIKKGDKETARKKALECARILKQLSKYDEFNCESYLKKAKKWEVIAKEVEEGRYGAKRKHKPVKEGGKGGKGGSEASVDEEDQFKRYVENLIARSKVKWSDIGGLDEVKRLIMETVVISALQRPQSIQPWKGILLFGPPGTGKTLLASAAAGSLNATFFSVKASNVLSKYFGESTKIISALYEVARERAPSIVFMDEIDALTTKRSGDQSEASRRMLSTLLTELDGFQDKGSDVLVLTLAATNTPWDLDEAVLSRFPRRIYVPLPDKKATKEIIKINTRGLDISRLDLDAIAEESVRRLYSGRDIKNLCQEAVWNMIREENPDLHKLAELPYEKLRRRSLRTRPLEMRDFEAAFKKIKSPLTRKDIERYEKWAEEFGGW

SEQ ID NO: 22017 - protein, 285 aa, Thermococcus sp. AM4
MEFLYTYEAFKLELPLVPPERADFVILGVPFDGTTSYKSGARFGPTLIRQATLNLETYVLDYDVDVSSVGVADIGDVAVVAGNPRETADRVRETVEELKKANPRAIPVLLGGEHSQTLGAVEALKPKSYVVFDAHLDLRDSYEDNPYNHACVARRIAELGVREAMFGIRSGTRDEVEFAEKNGIRWVHARDYGFDSFVDLVEPLPEPVYLSVDIDVFDVSMVPDTGTPEAGGLRFWEVIEAIEWLTANKRIAGFDIMEVAGERLGNPTALTAAKLLFYFLAMMKR

SEQ ID NO: 22018 - protein, 333 aa, Thermococcus sp. AM4
MRPNVAVLFKMKSKPLEELKKWADVDVILYPSVEELKEVIGKYDGLIVSPLNPVPGEVLEKAERLKVISCHSAGYDHVDVETATKKGIYVTKVAGVLSEAVAEFAVGLTVALLRKIAYADRFIRAGKWDSHRTVWSGFKGIETVYGKKIGILGMGAIGKAIARRMKAMGTEILYWSRSRKLDIEEEVGARYLPLDDVLRESDIVILALPATKETYHIINEERLELLEGKYLVNIGRGTLVDEEALVKALKDGKLKGYATDVFENEPVQEHELFDYEWETVLTPHYAGLSKEAMEDMGFQAVRNLLAVLRGEVPETLVNREVLKVRPPEEVKML

SEQ ID NO: 22019 - protein, 246 aa, Thermococcus sp. AM4
MLKVENLHVNVEDREILKGVDLEVKPGELHVVMGPNGSGKSTLALTIAGHPKYEVRDGRILFEGEDITELSPDERAKRGIMLAFQVPPEVEGVKIIEFLQQVLVELKGLDPVEAYDLIVEKAKELWFNEEDLHRYVNVGFSGGERKRLELLQAVLIEPKLLILDEPDSGVDVDSLSVISRKIEELHSKGTAILLITHYGRILEHIDREKITVHVMKDGRIVRTGGGELVDRIDREGFAGIFEEVGA

SEQ ID NO: 22020 - protein, 640 aa, Thermococcus sp. AM4
MTELEYLPYRPRPHQLEFIELVRDAVERGENAIIEAPTGFGKTVSVLAGVLPVAKELGLKVLYLARTHRQMDRVIEELKAINGKAKVSGVEMRSRKELCLHSYLREYTTDAYTAMVVCKNLRKSGKCPFYENEKKKKAELDELVNFFLETPASPVEVLNYSETLEICPYDVTRLVAYKADVIVASYLYALNPTIRENFLTYLDLDYSDLIVIFDEAHNLPDQAISALSDRMSIHTVNRAIKEADEYREHEIANFLSIFGKGLEILYSEKLGNRDVEETPIAPELIFGHLMNVLGLDTRWLVKTLNEMVAVGDAIREDRINKNKPPRSYIGRVGEFLLLWLSLIGRDDYLFLLSREKGLSLELVALDPSRALSFIRDVQSAIFMSGTLTPLEAFRDVMGIEKARLKKFPRMVKRENAQVLVAKDVSTRGEERSMELYRKMGDYIVEAVRLIPKNVGVFTASYEVLQGLLSANLQVRLEETGKAVFIEKQGASSRENDLLVAQFKAHARSGGAVLLGVMGGRNSEGQDYSGDEMNGVILVGIPYARPTPRVQAQIRYFERKFPGKGRYYGYYLPAHRKLVQAAGRVHRSAEEKGSIIILDYRVLWRNVRKDFPDWMVETMKPVDLARMRLYLRRFWGTPAKG

SEQ ID NO: 22021 - protein, 381 aa, Thermococcus sp. AM4
MQSLYLSLFEECKREYERALGRGHFEAAREYALKCARILRVLAEKVPGKREFYLEKAESWERAAKEIKSKPPSTASPGNVQRTGLEDEYRSYVEGLISKSAVTWKDIGGLYEVKKLLAQNVALAFAKKPEAIKPWRGILLFGPPGTGKTLLASAAAGSLKATFFNVKASDVLSKYYGESSKLISALYGIAKEKAPSIIFIDEVDALSLKRENVHEATRRTLATLLAEIDGFKGGEEKFVLTLASTNTPWDLDEALLSRFPLRIYVPLPDKEAAREIVKIHTRGLDISKLDLNVIAEESVRRLYSGREIANLCSMAIHHMLEDVNPELADLERLSSMEVKDLRLKVRPLEMEDFETSFRRIKSPLTRKNIEKYEKWAEEFGE

SEQ ID NO: 22022 - protein, 346 aa, Thermococcus sp. AM4
MHLMELPREVLLGESLAGETVSVAKRLKLGERALVLYGPRTKKIAGEEVEENLSREFEVSGVVVKGATMDEVERIMRIARETPADWMIAVGGGSIIDVAKLSSYRLGIPFVSFPTTASHDGIASANASIRDLGAKTSVKARPPIAVIADVKVIKTAPYRYLAAGVGDIISNLTAVKDWQLAHRIRGEYYSEYAASLSLMSAKMVMRNADIIRLGNEESVRKVIKGLISSGVAMSIAGSSRPASGAEHLFSHALDMLAPKPALHGEQCGVGTIIMAYLHGLKWERVRETLKRVGAPTNAYELGIDPEIIIKALTIAHTIRPERYTILGKEGLTWEAAEKAAKITGVI

SEQ ID NO: 22023 - protein, 838 aa, Thermococcus sp. AM4
MIFGRGEENVDEIKLRVAEALKVDVGRGIVRFDKQYQRKLGVGTGDIVELIGSRSTAAIVANAHPDDRGLDIIRMDGYIRKNAGVSIGDYVTVRKAQVQEAKKVVLAPAQKGVILQIPGDIVKQNLLGRPVVKGDIVVASSRGETGYYGSPLDDLIRGLFEAMPIGFGELKFVVVSTVPKGIVQITYNTEVEVLPQAVEVREESIPEVTYEDIGGLSDAIQKIREMVELPLKHPELFERLGIEPPKGVLLYGPPGTGKTLLAKAVANEANAHFIAINGPEIMSKFYGESEERLREIFKEAEENAPSIIFIDEIDAIAPKREEVVGEVEKRVVSQLLTLMDGLKGRGKVIVIAATNRPDAIDPALRRPGRFDREIEVGVPDKQGRKEILQIHTRGMPLEPSFDKEEVLAVLEELARRGGKFAEEVGKLKPLVEAAQSGREIKEILKGSGELYSEVKAKLIDRMLDRIADRTHGFVGADLAALAREAAMVVLRRLIQEGKVSPEQERIPPEVLQELRVREEDFYEALKMVEPSALREVLIEVPNVRWDDIGGLEDVKQELREAVEWPLKYPKAFERLGITPPKGILLYGPPGTGKTLLAKAVANESEANFIAIRGPEVLSKWVGETEKRIREIFRKARQAAPTVVFIDEIDAIAPARGSYEGGRHLDTLINQLLTEMDGIQENSGVVVIGATNRPDIIDPALLRPGRFDRLILVPAPDEKARLEIFKVHTRRVPLAEDVNLEELAKKTEGYSGADIEALVREAALIALRRAVSRLPRDVVEKQSEEFLESLKVSRKDFEMALKKVRPSITPYMVDYYRNFEESRRRRDRGEGKGVDYYTF

SEQ ID NO: 22024 - protein, 397 aa, Thermococcus sp. AM4
MGSFDEVSRDTGYDDYITFLKRRIRQLELQVRTLEADKERLERELSRLRTEMSRLRQPPAFAGNVIEVLDDDRAIVQNYNGPRFVVRIAPWIERDKLKPGSRVALDQRTMAIVELLPTEKDPSVLGFEVIEKPRVTYQDIGGLDRQLAELREAVELPLKHPELFEEVGIEPPKGVLLYGPPGCGKTLMAKAVANHVNATFIRVVGSELVRKFIGEGARLVHELFELAKEKAPTIIFIDEIDAIGAKRMDETTGGEREVNRTLMQLLAEMDGFDPRGNVKVIAATNRPDILDPALLRPGRFDRLIEVPLPDFRGRLEILKVHTRRMNLRNVDLSIIADITEGASGADLKAIATEAGMFAIRDRRTYVTQEDFLKAVDKVLGAEKRLAQAIAMHEVMYG

SEQ ID NO: 22025 - protein, 796 aa, Thermococcus sp. AM4
MSERKEIKLKVASAYQRDVGRGIVRIDRKAMRELGVQPGDIVEIIGTKNTAAVVWPAYPEDEGLNIIRMDGTIRKNAGVGLGDEVTVRKADVKEAKKVIVAPTEPIRFGRDFVEWLHSRLVGRPVVRGDYIKVGILGQELTFVVTATTPAGIVQITEFTDFQVSEKPVKEVSKAAALGVTYEDIGGLKDVIQKVREMIELPLKHPEIFEKLGIEPPKGVLLYGPPGTGKTLLAKAVANEANAHFIAINGPEIMSKYYGESEERLREVFKEAEENAPAIIFIDEIDAIAPKREETHGEVEKRVVSQLLTLMDGLKSRGKVIVIGATNRPDAIDPALRRPGRFDRELEVGVPDKQGRKEILQIHTRGMPIEPEFRRSKVLEILEKLRGDERFRDVIDRAIEKVEKAKDEEEIKKALKELDERLYEEIRAKLIDALLEELAEVTHGFVGADLAALAREAAMAALRRLIKEGKIDFEAESIPREVLEELKVTRKDFYEALKMVEPSALREVLLEVPNVRWEDIGGLEDVKQELREAVEWPLKYPEAFMGLGITPPKGILLYGPPGTGKTLLAKAVANESEANFIAIKGPEVLSKWVGESEKNIREIFRKARQAAPTVIFIDEIDAIAPRRGTDVNRVTDRLINQLLTEMDGIQENSGVVVIGATNRPDIIDPALLRPGRFDRLILVPAPDEKARLEIFKVHTRKVPLAEDVNLEELAKRTEGYTGADIEAVVREAAMLAMRRALQEGIIKPGMKADEIRRKVKVTMKDFEEALKKIGPSVSKETMEYYRKIQEQFKQSRG

SEQ ID NO: 22026 - protein, 571 aa, Thermococcus sp. AM4
MVEQLIWKYALINAYTHKGKANPKAVIGKVLGENPELRPKAREIIPLVNEIVEKVNNLSLEEQEAKLREIYPEFFEEKKAKKEEKKGLPPLPKAEKGKVVTRFAPNPDGAFHLGNARAAILSHEYARMYDGKFILRFDDTDPKVKRPEPIFYEWIKEDLEWLGFKIDEIHIASDRLEIYYDYAEKLIRMGKAYVCTCPPEKFRELRDKGIACPHRDEPVEVQLERWRKMLDGEYREGEAVVRIKTDLKHPNPAVRDWPALRIIDNPNHPRTGDKYRVWPLYNFASAIDDHELGVTHIFRGQEHAENETRQRYVYEYLGWEYPVTVHHGRLSIEGVILSKSKTRKGIEEGKYLGWDDPRLGTIRALRRRGIRPEAIRELIIEVGLKRSDTTVSWDNLAAINRRIIEPIANRYFFVADPVPMWIEGAEEFVAEIPLHPDHPERGVRRLKFVPGKPVYVSKDDMELFKPGNFVRLKDLFNVEILEVSEEGIKARFHSVDYEVAKKNRWRMVHWVTEGKPCEVWVPEGEELIIREGLLEGDADVKVDDIVQFERFGFVRIDEVKDGKVRAIFAHK

SEQ ID NO: 22027 - protein, 392 aa, Thermococcus sp. AM4
MKYKRRKYFMAGRINLIQRSKIRELFEKARKMENVISLGIGEPDFDTPDVIKEAAKRALDEGYTHYTPNAGIPEFREAIAEYYREFYKIDVDIDSIIVTAGAYEATYLAFESLLEEGDDVIIPDPAFVCYVEDAKIAEAGIIRIPLREENRFRIDPDELVELITKRTRMIVMNYPNNPTGATLDKETAKAIAQIAEDYNIYILSDEPYEHFLYEGAKHYPMIKYAPYNTILANSFSKTFAMTGWRLGFAIAPPQVIKDMIKLHAYVIGNVTSFIQIAGITALRDRRSWEAVENMRKIYAERRKLVLRYLNEMPHIEPFRPKGAFYVWAKIDPELDMSSEDFAEWLLENAGVVVIPGTAFGKHGEGWVRISYATKKEQLIEAMERMKGALEKL

SEQ ID NO: 22028 - protein, 334 aa, Thermococcus sp. AM4
MKPKVFITRAIPENGIELLREHFEVEVWPEEREIPREVLIEKVRDVDALVTMLSERIDREVFDNAPKLRIVANYAVGYDNIDVEEATRRGIYVTNTPDVLTDATADFAWTLLLATARRLIEADNFTRSGEWKKRGIAWHPRWFLGYDVYGKTIGIIGFGRIGQAVAKRARGFGMRILYYSRTRKPEAEKELNAEFKPLDELLAESDFVVLAVPLTKETYHMIGENELRLMKETAILVNIARGKVVDTEALIRALKEGWIAGAGLDVYEEEPYYNEELFGLKNVVLAPHIGSATFGAREGMAELVARNLIAFKKGQIPPTLVNKEVVKVRAPGFR

SEQ ID NO: 22029 - protein, 479 aa, Thermococcus sp. AM4
MCLIAGGIGEIRERLIKMALAGKHRGPDSFGVWTDEGVLKSDDFSKLGQIPGGRIGLLQCRLAMTGSKAFTQPFVNELALVHNGEVYNHAQIRAFLEGRGVSFESDVDSEVILRLIEFLRGKGLSFPQAVREAMRWIEGDYAVAFSDGERIYLFRDPVGIRPLYFSPNGFFASEKKVLWAIGEEAVPVEPGSLVTISRGGVEVSRLLSVEDLRPGTFTAERALGSLLRTIPYSVRIRCGRKTGVLFSGGLDSSLIALLASKHSDVVLYTAGAEGSQDLEWARKVSELLGLELREYVFTEEDVEEALKRIVFAMEEPNAMNLAIGVPLYFSTLLAARDDVRVLLSGQGADELFGGYAKYVEKPWLMEEDLRELAERNLARDDKIAMLNGVEGRFPYLALPVVTAALGIPVELKIRNGVRKFILRNAAEKLGLPKEVVEREKKAAQYGSGAQKILKRIGKRRGLSPRDLALQLFREVFHSS

SEQ ID NO: 22030 - protein, 304 aa, Thermococcus sp. AM4
MKVLVAAPLHEKALEVLRKAGFEILYEEYPDEERLIELVRDVDAIIVRSKPKVTRKVIEAAPKLKVIGRAGVGLDNIDLEAAKERGIKVVNSPGASSRSVAELVFGLLFAVARKIAFADRKMREGVWAKKQCLGIELEGKTMGIIGFGRIGYQVAKIANAFGMNVLLYDPKPNEERAKEVGGKFVELEELLRESDVVTLHVPLIDATHHLINEERLKLMKKTAILINAARGPVVDTNALVKALQEGWIYGAGLDVFEEEPLPKDHPLTKLDNVVLTPHIGASTEEAQMRAGVQVAEQIVEILRG

SEQ ID NO: 22031 - protein, 357 aa, Thermococcus sp. AM4
MQILEEKPKEGIVKVKAETLDDLWHLYHVIDPGDIVYAKTLRKQAQRADALRAEKVEVIPVYLGVKAEKINFHKFANQVRVTGPIVYASREDVPLGKYHTITIEEGTVVTIQKPRWKEHHIERLKEAIEASKRAKVMIVVIDEGEADIALVREYGVEMVASIRRNLGGKRYNTDRESEEKRFFHDLAKTMAELMEREKIEKAIVAGPGFVKEDFHKFLRENYPELAKKVVIEDTSVTGRTGIYEVIKRGTVDRVYHENRVAKEVQLVEKVLENIARNNGLATYGLREVEEAVNYGAVETLLVLDELLKGDLREKVEELMDAVRYSRGEVVIVSSEHEGGEKLKALGGLAALLRFRVK

SEQ ID NO: 22032 - protein, 389 aa, Thermococcus sp. AM4
MALSDRLELVNPSEIRKLFDLAAGMEDVISLGIGEPDFDTPGHIKEYAKEALDKGYTHYGPNAGLPMLRKAVARKLKRQNGIEADPKDEIMILVGANQAFLMGLATFLRDGEEVLIPGPMFVSYAPAVILAGGKPVEVPTYEENEFRLSVDDLEKHVSDRTRALIINTPNNPTGAVLTKKDLEEIADFAVEHDLIVFSDEVYEHFVYDGARNHSIASLDGMFERTITINGFSKTFAMTGWRLGFVAAPAWIIEKMTRFQMYNATCPVTFIQYAAAKALEDERSWKAVEEMRTEYDRRRNLVWKRLNEMGLPTVKPKGAFYIFPRIRDTGLTDKEFSELMLKEAKVAVVPGSAFGKAGEGYIRISYATAYEKLEEAMDRMEKVLRERNLV

SEQ ID NO: 22033 - protein, 243 aa, Thermococcus sp. AM4
MLCLRNVEYARGGRKILRSINMAFREGISYSILGPNGAGKSTIARILMGELKPTSGEVLLDSKDITELGVTERAKLGISMAWQEPARYEGITVRDYLTLGGKLSVDEDEIREVLEFVGLPYELYAGRLIDKNLSGGERKRVELASLLLLRPRYAILDEPDSGLDITAGEVIEALLKRFRKVGTTVILITHHEEIAVKTDFAYFICAGRIVRRGFSREVVDYYRKTCGRCIFGGVEYGNKDRPC

SEQ ID NO: 22034 - protein, 397 aa, Thermococcus sp. AM4
MIRPSERAMGVEYAIRDVVLPARELEKKGIKVIRLNIGDPGKYDFQPPVHMQEAYCRAIKEGHNYYGPSEGLPEMREAVVKREKWKNGVDITSEDVRVTTAVTEALQLIFGSLLNPGDNILVPSPSYPPYVGLVKFYGAEPREYLTVEENGWQPDIDDIRKLIDERTKAIAVINPNNPTGALYEKKTVKAILDLAGEYDLPVISDEIYDLMTYEGRHVSPGSLTKDVPVIVMNGLSKVYFATGWRLGYFYYVDPEGKLEEVREAIDKLMRIRICPSTPAQFAAIAGLTGPMDYLEEYMKKLRERRDYIYKRLTEIPGVSTVKPQGAFYIFPRIEERKWKNDKEFVLDVLHEAHVLFVHGSGFGKAGDWHFRIVFLPPVEILEEAMDSFEEFMRKRLG

SEQ ID NO: 22035 - protein, 502 aa, Nicotiana tabacum
MEHSLMSTGSYFLLFSSSAFLLILLSFSVEKSHALETRETIESHFHTLQLSSLLPSSSCNPATKGKRRGASLEVVNRQGPCTLLNQKGAKAPTLTEILAHDQARVDSIQARITDQSYDLFKKKDKKSSNKKKSVKDSKANLPAQSGLPLGTGNYIVNVGLGTPKKDLSLIFDTGSDLTWTQCQPCVKSCYAQQQPIFDPSTSKTYSNISCTSAACSSLKSATGNSPGCSSSNCVYGIQYGDSSFTIGFFAKDKLTLTQNDVFDGFMFGCGQNNKGLFGKTAGLIGLGRDPLSIVQQTAQKFGKYFSYCLPTSRGSNGHLTFGNGNGVKASKAVKNGITFTPFASSQGTAYYFIDVLGISVGGKALSISPMLFQNAGTIIDSGTVITRLPSTAYGSLKSAFKQFMSKYPTAPALSLLDTCYDLSNYTSISIPKISFNFNGNANVELDPNGILITNGASQVCLAFAGNGDDDSIGIFGNIQQQTLEVVYDVAGGQLGFGYKGCS

SEQ ID NO: 22036 - protein, 497 aa, Vibrio sp. Ex25
MIENSFAITSTFVAYLLIMVAIGVYAYKRTSNSSDYFLGGRSLGPWPAALSAGASDMSGWLLLGLPGYAYAAGIEAFWLAGGLLLGTWANWLISAKRLRTYSIQTDALTLPEFLSRRFNDKSKLIQTISAFFILLFFLFYTSSGLVAGGKLFETVFGLDYTYAVIIGTVCVVSYTLFGGFLAVSWTDLVQGLLMAAALMIVPVAVMDGGLGQLTSDLHDINPELATLWNDAKGEPLSAIAIISLAAWGLGYFGQPHILARFKASRSNKDLTTARRIAVIWTALSMVGAMLVGLVGLVWVTGHPGTQLEDGEKIFMLLVNAVFHPVVAGMLLAAILAAVMSTADSQLLVSSSALAEDFYKQVFKPEASSEEIVMIGRIGVIVISLVALFLAMTPDSSVLGLVSYAWAGFGAAFGPAVVLSLYWSGMNRNGALAGILVGGITIVVWKQLTGGWFDVYEIVPGIIFSTLAIVVISKATGGAAQDVLDQHQSYEKKLVELD

SEQ ID NO: 22037 - protein, 411 aa, Vibrio sp. Ex25
MNHLISVGALESFLVAISVLFLGHFINAKLPILKKFNIPEPIVGGLIVACMITALHFNGIDLEFDLPLQNTFMLMFFATVGLAANYTQLMKGGAKVFIFLAVASFYIIIQNGVGVSLAAALGLDPLMGLIAGSITLSGGHGTGAAWSQTFQDVYGLDNVLEIAMASATFGLIIGGIIGSPVAQRLVEKNSIESEYGRGGRDAKTHEKFPELVTYNEYEEDKVTAKKVVEKLFFLLICVTGAKYVEQWVSTYEISWLMIPDFVYALFIGVIITNFLEVTKLRKLDAETVDMLGTVSLSLFLAMALMSLKLWNIFDLAIPFLVILAVQSVVLAIFTYYVTFKVMGRNYDAAVIAGGHCGFGLGATPTAVMNMGSIVNRFGPSPQAFMVVPIVGAFFIDIVNLIILQGYISFLG

SEQ ID NO: 22038 - protein, 408 aa, Vibrio sp. Ex25
MNQVISIGPQESFLVAICVLFLGQFINTKLPTLKKFNIPEPIVGGLVVACVITTMHLNGVDVSFDLPLQNTFMLMFFATVGLAANYTQLIKGGAKVFIFLVVASVYILIQNAVGVSLATALGLDPLMGLIAGSITLSGGHGTGAAWSQTFQEMYGLHNVLEVAMASATFGLVMGGIIGSPVAQKLLNKHNLESEYGRTNQSHQSFPELVTYNEHEEDRVTAKRVVESLSIILLCVTGASYLESWVSSFGIKWLMIPDFVYALFIGVVITNIMEVTKVRKVDLETVDILGTVSLSLFLAMALMSLKLWNIFDLAIPFLIILAIQSAVLAVFTYYVTFRMMGSNYDAAVIASGHCGFGLGATPTAVMNMGSIVSRYGPSPQAFMVVPIVGAFFIDIVNLVILQGCIAFIK

SEQ ID NO: 22039 - protein, 392 aa, Vibrio sp. Ex25
MKNETWIVAAKRTPIGSFQGALASTDVTELGAKAIQGALAESQLDVQKIDEVLMGCVLPAGVGQAPARQASLKAEMPQSIGCTTLNKVCGSGMKTVMLAHDLIQSGNAHAVIAGGMENMSSSPYLLKKARDGFRLGHEQVLDHMFYDGLQDAYQGELMGVFAEQTAQKYQFSRESMDIWAQQSLTRAQQAIEQGLFKEEIVPVNVKSRRDETLVVDDEQPSKLDVTKIPTLRPAFAKDGGVTAANSSSISDGASAMILVDSEFGRQENLQPLAKIVAYSTHARQPDEFTIAPVFAIESLLEKTGWDKSDVDLWEINEAFAVVTQYAVKALELNESKVNPRGGACALGHPIGASGNRILVTLIHALKQTGGKRGVASLCIGGGEATAIAIEIC

SEQ ID NO: 22040 - protein, 567 aa, Vibrio sp. Ex25
MQSKPSNKNGAQLIAQQLESLGIKYIFGIPGAKIDRLFDAIEDTNIQMIPVRHEANGAFMAGVMGRLTGKAGVTMVTSGPGCGNLVTGVATANSEGDPLIAIGGAVKRTDQQKQTHQSMDTVSIFRSITKFSAEVQHVDAASEIMANAFRIAESGRPGACFLSLPQDVLSEQTQTDIIVPSPYTQPGCADIAAIEEAVSRISKAKRCVVLLGLHASRSQNAAAIARFLQNTQLPVVGTYQAAGTVDINYYHHFAGRVGLFNNQPGDVLLRDADLILTIGFSPIEYDPELWNSHRNPVIHLDIEPAEYQLNYQPCVEIVGNIAQSLDKMGSYISEYARLSPTALSVLEEVALQRQVIKTYPNVYNKQGFHPLALIKAMQSIITPDTTLCLDMGSFHIWIARYLSCFRARQMLVSNGQQTMGVALPWAIGASLLKPGSKVVSISGDGGFMQSSMELETAVRLNCNIVHIVWVDNAYNMVEMQEFNKYQRCSGVKFGPIDFKAYAESFGAKGFAVTSQHELLPTLNKAMDVEGPAVVAIPVDYSDNDKLMLPRTEKNQDPVFVSFEGEIA

SEQ ID NO: 22041 - protein, 637 aa, Vibrio sp. Ex25
MDKSFSLIDKPTFLGSLFLLLSVVIPLILFPTQGADWIASAKFFMTDKLGVLYLALGIAAMCFMIYTVFSDLGQIKLGEADEQPEFGNASWAAMLFCGGIGASILYWGCIEWAYYYQSPPFQLEAGSEEAIRWAATYGLFHWGPIAWSIYLIPALPIAYFFYVRKQPVLKISSALMPVLGEKRANGGIGKFIDVLFIFGMLGGAATTLGLAAPLINGGLHHIFGLPNNTFSQVAVLLLCTAIFGYSAYAGLEKGIKFLSNINFWGAMGLLLFVLAVGPTVFMLETGLDSIGRMLSNFFVMATWAEPFGGYGEFTDTHFPQDWTIFYWAWWLVFAPCMGLFVARISRGRTIKQMVVGSIFYGSLGCFLFFIVLGNYGLSLQLTGELDVIAILNESGAPAAIFATLDTLPLGPIVIGVFTLLCIIFTATSFDSISYILASVVQNDVTEEPMRWNRLFWAFTLSFLPTVLMFMGGLSTLQTAAIVGGLPLLVISVMLMVSFVRAASLDIKHQAEYEEPTINIEELPEIDPWSTEGMALAKFERFKDLAQQAAEEEREAMAALMSMRKIIRAFALEHSCESGFSDHHLPEEMQTELQQLTEALELAQQKKQELSEQAQESRMEFNHVLLGGASAGLAASQA

SEQ ID NO: 22042 - protein, 273 aa, Vibrio sp. Ex25
MAELATNIEPAEILLSVNNIEVVYDEVILVLRGVSLEVPKGQIVTLLGANGAGKSTTLKAISGLLKTEDGEVTRGEINFMGERIDNKSPEEIVRSGIFQVMEGRRIVEDMTVIENLRLGAYTRTDNEVEQDIEMVFDYFPRLKERTGLAGYLSGGEQQMLAIGRALMARPKMILLDEPSMGLSPLLVKEVFSIINKINKDQGITMLLVEQNANFALQAADYGYIMESGKIVLDGSKHELLNNEDVKEFYLGGGDEDRKSFKNLKSYKRRKRWL

SEQ ID NO: 22043 - protein, 355 aa, Vibrio sp. Ex25
MAQLSMRPCGDFRTTYKSDTPIFETKTIRSLAIAGVIAMLAAPLVLDIYFLNLFIQIAYLGIAALGLNILVGFTGQISLGHGAFFGFGAFASAWLNNQFNIPVVFAIPLAGYLTMIVGMLFGLPAARIKGLYLAIATLAAQFILEDFFARADWFSGGSYGAGANPINLFGFEFTTDESFFYIALFALIFMYMWASNLIRSRDGRAFVSVRDHYLSAEIMGINLTKYRLLSFGVCAFYAGIGGALYGHYLGFVSAEGFTIMMSIQFLAMIIIGGLGSVKGTLMGTIFIVLLPEVLEFGVTGLAAFSNNTSFVDGLAYFKEMAIGLVIMLFLIFEPQGLSHRWQQIRAYWKHYPFSY

SEQ ID NO: 22044 - protein, 892 aa, Vibrio sp. Ex25
MININLSSLIQRLHPIAKVALEDAAALAVSEKANEVQIEHYLLSLLERPNSDFDVLLSHFDCSENLLRQSVRSTLDTSAKGNGSKPVFSALLIEWLQESWLVSSLDLSETQIRSGALLLTLVSNPLRYGQHGYASTLEAVNPDSLKRNFAELTSQSIEAQVATSEKTQAREDGSALSKFTTDFTGKARKGEIDPVFCRDQEIRQIVDILARRRKNNPIAVGEPGVGKTAVVEGLALKIVQGDVPDNLKGVELYGLDMGLLQAGASVKGEFEKRLNAVLDEVKNSPTPIILFIDEAHTLVGGGNQAGGSDAANLLKPALARGEVKTIAATTWSEYKKYFEKDPALARRFQLVKLDEPSPEQAALIIRGLRPAYEKSHNVYVRDDAITAAAALSARYISGRQLPDKAIDVLDTACARVNISLNAIPASVETLQQELAAQQRELEALERDALQQTGDKHSLANIPDLELAMETTKEELAEQEAQWHKEKEQIQEMIALRSRLHELVFGETNEEELVAEEDSEQEQDVSPYAEMDEEAVRIAISACQEQLDAIRNGNPLVHFEVGPDEVSHVISDWTGIPMGKMLQDEAETTLKLKESLTQSIKGQEYAIDALSEGIQTAKAGLGNPDAPTGVFLLVGPSGVGKTETARSIADQMFGGERFMTTINMSEFQEKHTVSRLIGSPPGYVGYGEGGMLTEAVRQRPYSVVLLDEVEKADPEVLNLFYQVFDKGTLNDGEGRTIDFKNTLIIMTSNLATHEIESLVHQSKDIDANIIAEAIRPTLNQHFKPALLARMSVLPFVPLSDEAMTEIIHHKLNKVSQRLQSHHKLSLSYEESLVEFVLGNCRLAETGARNIDAVINRQLLPQLSTQLLVHDKDDSHTQIEVSVDEQGTLTYAFS

SEQ ID NO: 22045 - protein, 403 aa, Vibrio sp. Ex25
MMEKVFIVAAKRTPIGAFGGSLKNTSAGNLAAVAIKGALEAAKLTGDKIDEVIVGNVVGAGQGMGVGRQAALFAGIPDAVPAYGVNMVCGSGMKTVMDAVSHIRSGDTEIVVAAGVEVMSQIPFAAPSSIRDGNKMGNLELKDLLVADGLTDVYNQYHMGVTAENVTKEIGLTRQQQDEYALSSQQKAVAAIEAGKFKDEIVPVEVKQRRETVLFDTDEYPKANATMEALSKLRPAFDREGTVTAGNASGINDGASAIIVASESAVKAHGLTPIAEIVSYAQSGLDPKIMGLGPVESVNKALAKAELTVNDIDVYELNEAFAAQALGVIHQLAETNQVPVNAIQDKANFNGGAIALGHPLGASGNRILVTLVHELHKQNGQYGVASLCVGGGMGTAVVIKAVK

SEQ ID NO: 22046 - protein, 69 aa, Vibrio sp. Ex25
MSKVNGSVKWFNETKGFGFLSQDNGGQDVFVHFNAIVSDGFKTLTEGQKVSFNVEQGKKGPQATEVTPL

SEQ ID NO: 22047 - protein, 306 aa, Vibrio sp. Ex25
MNDLFTKNDYSLYSNSMSFLRLPYIRNPVSADADVVVLGVPLDMATSGRPGARMGPDAIRRASVNLAWEGKKFPWDFNVLDKLKVIDAGDLVFDCGDAEDFTYRLEAATSEILKSGKTMLGLGGDHFITLPILRAYAKHHGQMALIHFDAHTDTYANGSSYDHGTMFYHAPKEGLISAKNSVQIGIRTEYKQQDHGFNVINAMQANDMSVNEILEEIRRTVADKPVYVTFDIDCLDPAFAPGTGTPVCGGLNSDKALKIIRGLAGMNIVGMDVVEVSPPYDHSDVTALAGATIALEMLYAYASGRE

SEQ ID NO: 22048 - protein, 467 aa, Vibrio sp. Ex25
MSKHQEYLAKRQLKRGTAGWILLAGLGVSYVISGDFAGWNFGIAQAGWGGFLIAAIAMAVMYFTLVLSLAEMSAAIPAAGGGYSFARQAMGPTGGFFTGLSVLIEYALAPAAIVIFIGSAVNELVGIDGPVVYALFYAVFIAIHMAGVGEALKVMMVISGLAVLAILITAAVLIGHFDVNNLFDIAPATAQATEILPFGWYGVWAALPFAMWLFLAVEGVPLAAEEAKNPAKDVPKGIIGAMLFLLLTATLVVVLLAGAVGSKVIGDSAVPLVDALKLTGNSTIAMAVNLLGLAGLIASFFSIIYGYSRLVFALSRAGYLPQTLSLTSDKKVPSRALLVPGVFGFLVSLTGEGDLILAMAVVGATVSYALMSLSHILLRIKQPELARPYKTPGGVITSSISLVLSLIAMTGVYAFDPSAFFMTMGLFLIGGVYYGLYSRNKLVAATAEEEFAMLSVAELELESDVAR

SEQ ID NO: 22049 - protein, 528 aa, Vibrio sp. Ex25
MSNMTNAASHTAPIQDADYSAIHPPSLLKRLELTNPVFWLSGSFLTLFVLLALTNTDSLTAMVNTGFGFATKYFGAYWQVLLLLNFLIGLALAFGRTGYVRLGGLAKPDIDNFKWLSIVLCTLLAGGGVFWAAAEPIAHFVTAPPLYGEASPKTAAINALSQSFMHWGFLAWAILGGLSSIVLMHLHYDKGLPLKPRTLLYPVFGDKAIKGWIGDVADACSIIAVAAGTIGPIGFLGLQISYALNSLFGLPDTFVTQSMVIMAAILMYTLSALSGLSKGIQIVSRYNIILSVLLIGYILFFGPTSFIVDGYVQGVGRMVDNFFPMALYRGDTGWLSWWTVFFWGWFIGYGPMMAIFIARISRGRTIRQLIMSISIAAPLITCFWFSIVGGSGLAFELDNPGLISSAFEGFNLPAALLAITGELPYPMIISVLFLILTTTFIVTTGDSMTYTISVVMTGSTEPNAVIRSFWGLMMGIVAIALISMGSGGISALQSFIVITAVPVSFILLPSIWKAPGIASKMAKEQGLV

SEQ ID NO: 22050 - protein, 522 aa, Vibrio sp. Ex25
MGFTSLGLSAPILKAIQEKGYDTPSPIQAKAIPAILEGKDVMAAAQTGTGKTAGFTLPILERLSNGSRVRANQVRALILTPTRELAAQVQENVFMYGRHLPLSSAVVFGGVKINPQMQRLRKGADVLVATPGRLMDLYNQNAVKFDQLEVLVLDEADRMLDMGFIRDIRKILALLPKQRQNLLFSATFSDEIRDLAKGLVNNPVEISVNPANSTARTVEQSIYPADVKKKAPMLVKLIKDGDWKQVLVFTKTKHGANRLAKFLIEQNLPAAAIHGNKSQGARTKALADFKSGEIRVLVATDIAARGIDIPQLPQVVNFELPKVAEDYVHRIGRTGRAGEVGKAISLVCALEASELFAIERLIQEVLPRKELEGFAPTNVVPESKLDTRPIKPKKPKKPKKPKAPNAAGENAPATEKKAGNGANKPKRRFNGGNNGNKNSTNQGGAGKPKSNSEGQGRTNSKPDDRKPNGNKPNGNKPNGNKPNGSKSGNAGKPSGNRKPNNAKPAGNKPSGQRRKPRPQTAN

SEQ ID NO: 22051 - protein, 523 aa, Vibrio sp. Ex25
MTKGIDKYSIDSTDYTVGQDNVQKWGFDVHNPVFGISAGLIALFLVAALVLDAHTAKTALDGLKWKIIGSFDWLFIIAGNIFVIFCLALIVSPMGKIRLGGKDAVADYSFMSWLAMLFAAGMGIGLMFWSVAEPVAYFTGWYETPLGVEANTPEAARLALGATMFHWGLHPWAIYGVVALSLAFFAYNKGLPLSMRSIFYPLLGDRAWGWAGHIVDILAVLATLFGLATSLGLGAQQAASGIHHVFGVEPGLGLQIVVITVVTLLAVVSVVRGIDGGVKVISNINMVVAFLLLILVGLIGWAASLGSIPTTLMAYVENIIPLSNPFGRTDEAWFQGWTVFYWAWWISWSPFVGMFIARVSRGRTVREFITAVLLVPTAVTVVWMSVFGGLAIEQVVDKVGELGTNGLTDVSLAMFQMFDVLPFGSMLSIIAVVLVLVFFITSSDSGSLVIDSITAGGKVDAPVLQRVFWAFMEGAIAVALLWIGGSEAVQALQAGAISTALPFTFILLAMCVSLLMGMRTERQ

SEQ ID NO: 22052 - protein, 553 aa, Vibrio sp. Ex25
MSTDNNGGIQRPDGKVNAIDTDYQIGQDNVALKVGPFGLDIHNRVFAISGLAIILFVVVTLLFREQVEPFFADLRAGLLHHLDWFFLASGNIFVIVCVGLIFTPLGRVRIGGTEATPDYSYAGWLAMLFAAGMGIGLVFFGVSEPMSHFSSAIGGVNVENGVRTDWAPLGGAEGDASAASALGMAATIYHWALHPWSIYALLALGLAIFSFNKGLPLTMRSIFYPLFGERVWGWTGHIIDILAVVATVFGLATSLGYGASQAATGLNFLFDVPMTNTTQVLLIIGITALALISVVAGLDKGVKILSEINMGLAALLLLFVIVVGPTIAILTGFFENIVSYVANIPALSMPFGREDVNYSQGWTAFYWAWWISWSPFVGMFIARVSRGRSVREFIICVILIPSSVCVLWMTAFGGNAISQYVSDGYEAVFNAELPLKLFAMLDVMPLAEITSFVGIILVVVFFITSSDSGSLVIDTIAAGGKVDAPTPQRVFWCTFEGLVAIALMLGGGLAAAQAMAVTTGLPFTIVLLVATVSLVKGLMDEPRPKAASKKKSK

SEQ ID NO: 22053 - protein, 591 aa, Vibrio sp. Ex25
MVNPLAKILFAQWFPGLVQLKHYQKEWFVNDFRAAFSVVAVALPVAIAYAQLTGVSAIVGLYSCVLPMLVYAMMGTSRQLIVGPDAATCAVIAAVVTPLAAGDPTKHWQLVMTMTAMTGIWCVLASRFKLGVFADFLSRPILLGLLNGVALTIIVGQFAKVVGLKYEQRYLLERLWEAPQRLTELHWPTVTLSIVTVVVYLLTKRYRPTWPAAMLAILVTTASVWFFHLQEMGVSVVGLTQGGFPQFQTPEFELGEVRELVVPALNLAIVSFVSMMLTARSFAAKNGYDIDANKEFQALGFANIASAFSQGFAISGADSRTAVNDANGGKSQLVSIVAAITIAIIAVFIYEPLQFIPIASLGVVLIIASLSLLDLKAIWKLKSRDKDAFYLAIITFISVLIVGVIPGITLAVLLGLFQFLRIVMRPSDQLLGLDEKGTIRTIDDSGKASPIPGMVIYRFNSPLTYFNAPYFKRRVLEQVEHHKDASCVVIDAVSSFTHLDLSVMATLSDIHNTLKKRGVRLILAGRKRRLRQWCELTGISTSEGGILLRADMYLAIKLSGCYISAVGEGQIPTVQKEPDLEQPPKPIPEVA

SEQ ID NO: 22054 - protein, 637 aa, Vibrio sp. Ex25
MGKIIGIDLGTTNSCVAVLDGDKPRVIENAEGERTTASVIAYTDGETLVGQPAKRQAVTNPENTLFAIKRLIGRRFEDEEVQRDIQIMPYKIVKADNGDAWVEAKGQKMAAPQVSAEVLKKMKKTAEDFLGEEVTGAVITVPAYFNDAQRQATKDAGRIAGLEVKRIINEPTAAALAYGLDKKGGDRTIAVYDLGGGTFDISIIEIDEVEGEKTFEVLATNGDTHLGGEDFDNRLINYLVDEFKKEQGIDLKNDPLAMQRVKEAAEKAKIELSSTSQTDVNLPYVTADATGPKHMNIKVTRAKLESLVEDLVQRSLEPLKVALADADLSVNDITDVILVGGQTRMPMVQAKVAEFFGKEARRDVNPDEAVAMGAAVQGGVLAGDVKDVLLLDVTPLSLGIETMGGVMTKLVEKNTTIPTKANQVFSTAEDNQSAVTIHVLQGERKQAMYNKSLGQFNLEGIQPAPRGMPQIEVTFDLDADGILHVSAKDKQTGKEQKITIQASGGLSDEDIEKMVQEAEANKEADKKFEELATARNQADQMIHGTRKQVEEAGEALPAEEKEKIEAAISELETARKGEDKEAIDAKVQALMTASQKLMEIAQQQAQAQQAQGADADAQSKEDDVVDAEFEEVKDDKK

SEQ ID NO: 22055 - protein, 404 aa, Vibrio sp. Ex25
MKLPIYLDYSATCPVDPRVAEKMVQYMTMDGTFGNPASRSHRYGWQAEEAVDTAREQIADLLNADPREIVFTSGATESDNLAIKGAAHFYSKKGKHVITCKTEHKAVLDPCRQLEREGFEVTYLEPESNGLIDLEKLKAAMRDDTVLVSIMHVNNEIGVVQDITAIGELCRERKIVFHVDAAQSAGKLPIDVQEMKVDLISLSAHKVYGPKGIGALYVRRKPRIRLEAQMHGGGHERGFRSGTLPTHQVVGMGEAFRIAKEDMQKDYDHALALRNRLFDGVKDLEAVTVNGDLEQRVPHNLNISFAFVEGESLLMSLKDLAVSSGSACTSASLEPSYVLRALGMDDELAHSSVRFSFGRFTTEEEIDYAIEQIRVAVTKLRDMSPLWDMYKEGIDLSTVEWAHH

SEQ ID NO: 22056 - protein, 224 aa, Vibrio sp. Ex25
MIELYLDTADVAEVKRFNQCLPLKGVTTNPSILAKSKQGLNQTLAGMQEALGGTPRFHAQVVSTTVEGMVEEARQIHELPYDMVVKVPATETGLAAIKLMKKEGIQVLATAIYSAQQGFLAALCGADYLAPYVNRIDAMNGNGVEVVADLQLLLDQNQLPAKILAASFKNTQQAMEVMKLGIEAITLPVDVAAQMFSHPAVQPAVDQFDKDWKSAFGNKLSFES

SEQ ID NO: 22057 - protein, 416 aa, Vibrio sp. Ex25
MTDKTQQATFADLGLIPTLVERLEALEYSQPTPIQSHTIPYILEGKDIVGGANTGSGKTAAFSLPILQKIVQQDETNHRRGNFVSHLILVPTRELASQVAYNVKSYSYHLRDKIKTVAVFGGVSVNPQMLALRGGCDIIVATPGRLLDLVSSNAIKLDQVKTLVLDEADRMLSLGFTEELNKILALLPEKKQTLLFSATFPDKVTTLSQHLLRDPVEVQLQSAEASTLVQRVFSVNKGEKTAVLAHLIKQHQWRQTLIFVNAKNACNHLAQKLSKRGITAEVFHGDKGQGARTRVLDGFKSGEIQVLIATDIAARGLDIEKLPVVINFDLPRSPADYMHRIGRSGRAGEVGLGLSLIDYDDYHHFKVIEKKNKFQLEREQVEGFEVEDDQSEAYFLPMKPRAKPAGTGKKKKKRNQ

SEQ ID NO: 22058 - protein, 582 aa, Vibrio sp. Ex25
MSINTDETTWQTFKRLWQFIRLYKSGLVVAVIALVINAISDTYMISLLKPLLDEGFGNAESDFLRTLPLIIFAMMFVRGISGFVSTYCLSWVSGNVVMQVRRMVFNHFMHMPVSYFDKEKTGNLLSRITYDSEQVSAATSQALVSIVREGASIIGLLVLMFYNSWQLSLVLFAVAPVVAWGIGVVSKRFRKISKNMQTMMGNVTASAEQMLKGHKVVLSYGGQDIERQRFEKVSNQMRQQSMKLVTAQAAANPIIQMIASLAIVAVLYLASIDSIKEQLTPGTFTVVFSAMFGLMRPLKALTNVTSQFQRGMAASQTLFALIDLEPEKNEGKLTVERANGDVSVKNVSFTYTGAEKPALENVSFDIPRGKTVALVGRSGSGKSTIANLFNRFYDVDSGSITLDGHDIREYELKNLRQQFALVSQNVHLFNDTIANNIAYATDGKYERSDIEKAAKLAHAMEFISKMDDGLDTMIGENGASLSGGQRQRVAIARALLRDAPVLILDEATSALDTESERAIQAALDELQKDKTVLVIAHRLSTIEKADEILVVDDGAIIERGNHADLIAKNGAYAQLHRIQFGE

SEQ ID NO: 22059 - protein, 605 aa, Vibrio sp. Ex25
MSQPILSQINVFPVKSVGGLSLSSVWVEKQGLSFDRRFMIAKADGAMITARKYPQMVTIKSALLSDGVVFSSLGMEPLKIRYQDFKMQETPATVWKDTFTAYTTTDDADDWFSRVLGQRVELLFSGEQSNRVREKLGQNVSFADGYPVLVISQASLDELNRRSSEQHSMDQFRTNLVVSDTKPFEEDSWKRIRIGEVEFESLKPCERCILTTVNTQRGTFRESKEPLKTLQQFRANDVGGVFFGQNLVARNEGIIRQGDKVEVLEYKEPEFYADNSPVRMTLTCVEREEIAQDFVTLWLEPNKGSLPNYLPGQHLPIEVNIDGKKVGRRYTLSSSPSRPGRYAISVKRIAGGRVSNSLLDNLQVGDVLEAEQPDGQFHLKTHEAQPLLLLSAGSGVTPMLSMVRYLADHNQLENVVFYHQCRAENDIPCRSELEQLKRKHPGLEVKICLTQPAVDWFGLKGRLSLSHIKQIKDIEQRQVFVCGPDGFMEKAKNLLLRKGLPEENYHQEAFGVSSVTSRPEKSIAIDFNGTKVVGNNQKTLLEQLEDAGKVVSNSCRAGLCGACKVQLTSGQVHHPDVPALTDEERAMGTVLACCAVPETDVTVTN

SEQ ID NO: 22060 - protein, 578 aa, Vibrio sp. Ex25
MRATSGILKGLNPTVTIASKIVVIGFVLFCAILANQAGQYFETISGILLQNMKWFYIGLVSLVVGFLLYLMVSRYGHIRLSKDNEKPEFSYLSWVSMLFSGGMGIGLIFWSVAEPMWHYADNPFTQGLTNEAATTSMKLTFFHWGLHPWSVFIIVALALAYFSYRKDLPFTLRSILYPLIGDRIYGPIGHTVDILTVAVTAFGISQTLGMGVIQINSGLNQAFGLDISLGIQLFIIVSLCTCAVASVLSGVGKGIRRLSEWNMLLSLALVLVVLYIGPTRYILNTLLESTGLYAQNIVGMSLWSDAQNDSGWQNWWTAYYWPWWMTWAPFVGMFVARISKGRTIRELIGGALIVPTLITFLWISVFGGAALKVEQDARVAHQEQVTAAQEAKQTPPADFSGGPILEATKADTTRALFTLFDNLDTGMFGKLLSVLACLLLGTYFITSADSGTLVLCTLDAAGHSEPPTSIRVLWGIMIAAIAGVLLYAGGLKAMQTASIIAGFPIAIFIAVMSLTLFHSIRREPKPWAMLPEHVHPEQEKLDGPVEPLVESKTVVSEPIASTSSLKDDSTLNQGPVLS

SEQ ID NO: 22061 - protein, 419 aa, Vibrio sp. Ex25
MSVNFADLGIEQKLIETLSNLNIVTPTPVQEKSIPHVLEGKNLLAAAQTGTGKTAAFGLPIIQTVQQKKLNGTPQALVLVPTRELAQQVFDNLNQYSAQTELRIVCVYGGTSIGVQKRKLEEGADILIATPGRLLDHLFNGNVNISKTSMLVLDEADRMLDMGFWPDLQRIFRRLPAEKQILLFSATFEKRIKTIAYKLMESPVEVEVSPANTTAETVKQMVYPVDKKRKRELLAYLIGSRNWQQVLVFTKTKQGSDELAKELKLDGIKAVSINGDKSQGARQRALDEFKQGKVRALIATDVAARGLDIQELEQVVNFDMPFKAEDYVHRIGRTGRAGKSGLAVSLMSRDEEYLLHAIENLLDQRLPQEWLAGFEPTLIEEVEPEKNGSGRRRSRSSEKRKLKAKLAIHKNRGKSRNSR

SEQ ID NO: 22062 - protein, 272 aa, Vibrio sp. Ex25
MKLFKATITALLGLAIAMPTIAKEDVATPNVDQIKERGTLRVGMSTFVPWAMRNKQGELIGFEIDVAKRLAEDSGLKVEFVPTAWDGIIPALLAKKFDVIIGGMSVTPERSKSVLFTEPYSHSGVQVAANKELASGFSEFSDFDSRRVKIAARRGAFTVQIARETFPKAKILQFDDDAQAFQEVLNGNAHAVIASSPKPEHETVKHSDKLFLPFSERLSKGNEAFAVRLGEEDKKAFFNKWIEARTQDGWLKQRYEYWFSTLDWQDQVARGQ

SEQ ID NO: 22063 - protein, 586 aa, Vibrio sp. Ex25
MSRKNNKNLSILLKLNTFIAPYKWRVAAALVALVATASLTLSVGYGVRILIDQGFAQQSLQELTNAIQFIVGVTLCIAIGTFFRFYLVSSVGERVSADIRLSVFNHVITLHPSYFETNSSGDIMSRLTTDTTLLQSIIGSSFSMAMRSALMCFGAIIMLFATNVKLTLIVLASVPLVLVPILFYGRRVRALSRQSQDSMADVGSYAGEAIEHIKTVQSFSSEPYERAAFAVEVEKAYEVGRQRVKQRAILISGVIVIVFSAIAGMLWVGGSDVIHGKMSAGDLAAFVFYAIMVASSTATISEVMGELQRAAGATERLIEILQVDSDIKAPINHLPIRPDMPAEVNFKSVSFNYPSRPNQPAIKELNLTAEQGKVLALVGPSGAGKTTLFELLQRFYDPQQGQVLFGGEDIRQFDPNELRRQMALVPQQPALFSHDVFHNIRYGNPEATDEQVIEAAKKAHAHEFIEKLPEGYHSFLGERGVRLSGGQKQRIAIARAILKDPKILLLDEATSALDSESEHHVQQALEALMKGRTTLIIAHRLSTIQHADKIAVLDNGELVDVGNHQSLMQSCELYQRLVALQFKHLE

SEQ ID NO: 22064 - protein, 463 aa, Vibrio sp. Ex25
MDVQFFRKSWENAVSAFNVAKFGGTSVANFEAMSRCATIIENNPNTRLVVSSACSGVTNLLVELANGVQDQTHRTELLQNLANIHDAILTQLEDSTKTAAEVYGILDTVTSLAEAASIQASAKLTDHLVACGELMSTHILTQLMCERGIQAVRFDIRDVLRTDDNFGRAEPNIEAISTLAQDKLIPLCQQSVVVTQGFIGSDEAGNTTTLGRGGSDYSAALIAESVKAAGLEIWTDVPGIYTTDPRIAPKASPIPEISFSEASEMANFGAKILHPSTLVPALRHDIPVFVGSSKEPEKGGTWIRHQVESSPLFRALALRCNQTMVTLRSANMFHAYGFLAKVFEILAKHKISVDLITTSEISVSLTLDQTDTSGGAPQLPQAVREELEELCKVEVEHDLCLVALIGNNMSESKGYAKQVFGTLEDFNLRMICYGASPHNLCFLLHESVSKQAIQKLHTELFEK

SEQ ID NO: 22065 - protein, 320 aa, Vibrio sp. Ex25
MSLPTIVFLDRATIPEHIEIPRPSFQHHWREYDLTAPEQVIERLADADIVISNKVLLDQNILEQLPQLRMIAVAATGFNNVDVDYCAKHDIAVANVRGYATRSVPEHVIAMLFALRRNLFGYHQDIAAGEWQRNKQFCFFTHPIGDIGGSTLGVVGSGALGQATANLAQALGMTVLFSERKGAAECRPGYVPFEEVLKRSDALTLHCPLNEHTQNLIGQAELQQMKPNAILINTGRGGLVNEEALVDALKQGEIAAAGFDVFTQEPADESNPLIANMGLPNLLLTPHVAWGSDSSIQRLVEILIENINAFERGERINRLV

SEQ ID NO: 22066 - protein, 323 aa, Vibrio sp. Ex25
MSNQFDFRAAAKQVLDIEVAALQELDTYFDDQFEKACELILSNSGKVVVMGIGKSGHIGNKIAATLASTGTSAFFVHPGEAAHGDLGMISPGDIVLAISNSGESNEILSLFPVLKRLNIKIISMTGKPESNMAKLSDLHLQITVPQEACPLGLAPTSSTTATLVMGDALAVALLQARGFSAEDFALSHPGGALGRKLLLKLSDIMHFGEALPKVSPNALIRDALLEISEKGLGMTAIVDEHDAMLGIFTDGDLRRTLDKRIDIHTTAIGEVMTTNPTTAHPDMLAVEGLNLMQNKNINALILCKDEKIVGALNMHDLLKAGVM

SEQ ID NO: 22067 - protein, 577 aa, Vibrio sp. Ex25
IDLNQRKPQAIVLAPTRELAIQVAAEMKNLGKNIKGLKVLEIYGGASIVDQMRALKSGAQVIVGTPGRVQDLINRERLHLDEVNTFVLDEADEMLNMGFVDDVTAIMEHAPESAQRVLFSATMPPMLKKIVERFLREPVMVDVAGKNHTVDKVQQQFWVVKGVEKDEAMSRLLETEETDASIVFVRTRQDTERLADWLSARGFKAAALHGDIPQSLRERTVDHIKQGVIDILVATDVVARGLDVPRITHVFNYDIPFDVESYIHRIGRTGRAGRKGKAILLVRTNQIRMLRTIERVTKSSMEEIQLPLRDQVAEARLAKLGAELEAEKEHKALDKFAELVEKLQTSLDIDPATLAAMLLKRQQGKRPLFYIGEDPMVEAIERDKQRRKERREGGRDGGRNFNNQDWDTYQLQVGREQGVQVKDIVGALANELGLGKGSIGAIKLAQGHTFVQLPKAMTSEAAGKLSKLRIRQQDVGAVVCDFDDFRESRGGRRDGGRRDGGRRDGGGYRGNREGGNRGGDRREGGRREGGFRGNRDGNRDGNREGGERRFDRNRGGDHRGNHRGERGHGRGRRTQEA

SEQ ID NO: 22068 - protein, 397 aa, Vibrio sp. Ex25
MSNSFVLVINSGSSSLKFAVIDSETGEALVSGIGECFGLPEAEISWKYQGEKTVEAIPAGGNHHQYAVERVVKLLETLGLSSKFVAVGHRIVAGGETFKGTVKVDEKVIQEVERLAELAPLHNKANAEGMRAAMAAFPSLPQFAVFDTAFHQTMPAKAFMYALPYELYEEHKVRRYGAHGTSHYYVSREAAKMLDKPVEESSFITVHLGNGASVSAVKNGECVDTSMGLTPLAGLMMGTRCGDLDPSVIEFLFRKGWEKDEVFEMMNKKSGFLGVSGVTSDARGVLEAMEAGNSRAKLAFEIFTYRVAKYITSYLAALDSLDGIIFTGGIGENSLPIRREILKNLKLLGFVEDEKGNEDARFGNAGVIATSELLGAKALVIPTNEEWVIAQQSVELL

SEQ ID NO: 22069 - protein, 424 aa, Vibrio sp. Ex25
MSCKGVISQSSVHIYLKGMRIMEKDIWIVSAKRTPIGRFQGKLQTYSAPQLGALAIKAAMHEVNVTSVDEVFMGCVLPAGCGQAPARQAAIGADLPMSVGCTTINKVCGSGMKSVMLAHDLIKAGTIRTAIAGGMESMTNAPYLLKEARKGMRMGHQSTYDHMFLDGLQDAYEGHLMGVYAQHVADRLKFTREHMDEWAVMSAKRALEAQERGLFADELSPIEFNTKSEQGTLDYDEHPRSIDLDKIPQLKPAFDKKGTVTAANSSAISDGAAALVLMDEETAIHQGLEPLAVIKSHATHARKPAEYTLAPVYAIEQLLSQLDWSIDEVDLWEINEAFAVVTQIAVAELGLDMSKVNIKGGACALGHPIGASGARILVTLIHSLRQLQALGTDGDLDAKKVMRGVASLCIGGGEATAIGIEIPL

SEQ ID NO: 22070 - protein, 533 aa, Vibrio sp. Ex25
MSDLTNSMKASTMSVSSGKSKATHNTSTTENTTDKLGLNNPAFWYSGGFIALFVAIALYDGELLSTIVNAGFGWAVQVFGPYWQLLLLLTFLIGLGLAAGRTGKVMLGGIAKPEMDSFRWMAIIFCTLLAGGGVFWAAAEPIAHYVSPPPLYGAQDNPQQGAVNALSQSFMHWGFLAWAIVGSLTSIVVMHLHYDKGLPLKPRILLYPVLGERALKGQLGALIDACCIIAVAAGTIGPIGFLGLQVSYALNALFDIPDGFTTQLIIILFAIALYTLSALSGLSRGMQLLSRYNVILAMALMVYILLFGPTNFIFNGYIQGVGSMLDNFIPMATYRGDEGWLSWWTVFFWGWFLGYGPMMAIFIARISRGRTIRQVISTISIVAPLTTCFWFTIVGGSGLAFEIAEPGSVSAAFEGFNLPGALLAVTQQLPMPMLTSILFLILTTIFIVTTGDSMTYTISVVISGETEPNAIIRTFWGVMMGVTALILISLGSGGISALQSFIVITAVPVSLILLPSLWNAPQIAIKMAKEQGL

SEQ ID NO: 22071 - protein, 339 aa, Vibrio sp. Ex25
MLTLVGESTFMKTLDINDYYSISDEQKPVLASVAETFKHQANALNEMAKSIDFEQYQKAISYIIDCQGHVIVCGMGKSGHVGKKISATLASTGTPSFFLHPSEAFHGDLGMITKEDVIVLISNSGETDEVLQLIPSLKSFGNKVISITGRIDSTMSRNSDATLLLAQIQESCPNNLAPTTSTTLTIALGDALAVALMKMRQFMPNDFARFHPGGSLGRRLLTRVRDEMNAENLPLVDVSDSMTSVIIKMNEGRRGVAIVIENNGLKGIITDGDLRRALAKEAEFNSLKAGDVMTVEPKTCYDTEMLADAEEKMRQFSISSLVVLDDESKVVGLIQIFNM

SEQ ID NO: 22072 - protein, 416 aa, Vibrio sp. Ex25
MRYRSTETIIMSVTANQVHGAVQTLTQSSDTLFLLLGAIMVFLMHAGFAFLEVGTVRQKNQVNALVKILADFGISAIAYFFIGYWVAYGGTFFADAETLSQGNGYELVKFFFLLTFAAAIPAIVSGGIAERARFYPILIATFFTVGIVYPLFEGMIWNGNFGVQAWFENTFGYGFHDFAGSVVVHGVGGWIALVAVVFLGMRKGRVRAGKHTNFAPSNIPFLALGAWILCVGWFGFNVMSAQTVSGISGLVAMNSLMAMVGGIVASLLAGKNDPGFIHNGPLAGLVAVCAGSDLMHPIGALVTGAIAGVLFVYLFTYLQNKTKIDDVLGVWPLHGLCGAWGGIAAGIFGQSALGGLGGVSIIVQLLGTLLGISIAVIGALAVYGAINASMGLRLSEEDEFNGADLAIHKISSTNED

SEQ ID NO: 22073 - protein, 1487 aa, Vibrio sp. Ex25
MALYDPSLEKDNCGFGLIAHMEGEQSHKLVRTAISALDRMTHRGGIAADGKTGDGCGLLLQKPDSYLRLIAEENGFNLGKQYAVGMIFFNQDPVKAQLAKDIVNRELAQETLTVAGWREVPTNSEVLGPIAANSLPNIQQVFISAPAGWRERDIERRLYIARRRIEKQITEDPDFYICSLSTQVLVYKGLCMPADLPRFYLDLADLRMESAICLFHQRFSTNTQPRWPLAQPFRYLAHNGEINTIEGNRQWARARAYKFSSPLLPDLQTAAPFVNETGSDSSSLDNMLDLFLAGGMDIFRAMRMLVPPAWQNHPDMDPDLRAFYDFNSKHMEPWDGPAGIVLSDGRYAACNLDRNGLRPARYVITKDKLITLASEVGIWNYAPDEVAEKGRVGPGELLVIDTRKGKLWQSSEIDNDLKSRHPYREWMENNVRKLTPFSQLPEDQVGERSFDEDLLKTYQKQFAMTNEEVDQVLRVLGEMGQEAVGSMGDDTPMAVLSSKERLVTDYFRQKFAQVTNPPIDPLREKHVMSLATSIGKEMNVFCETDGHAHRVTFDSPVLLYSDMQQLLELGDDHYRNTILDINYDPQEKDLKQAINDLCEQAEQVVREGTVLVVLSDRALVKGKLPIPAAMAVGAVQTRLIDANLRCDANIVVETATARDPHQFAVLLGFGATAIYPYLAYEALGKLIDDKALEKDYRDVMQNYQYGINKGLYKIMSKMGISTIASYRCSQLFEAVGLSQDVVDLCFKGVTTRIEGANFDDFQQDLTNLSRKAWAKRKSIDHGGLLKYVHGGEYHAYNPDVVGTLQQAVKSGESNDYQSFAKQVNQRPVAMLRDLMSLKKSDSPLPLEQIEPRTELFKRFDSAAMSIGALSPEAHEALATAMNRLGGYSNSGEGGEDPRRFGTERNSRIKQIASGRFGVTPHYLTNADVLQIKVAQGAKPGEGGQLPGHKVTAEIAKLRYSVQGVTLISPPPHHDIYSIEDLAQLIFDLKQVNPNALVSVKLVSEPGVGTIATGVAKAYADLITISGYDGGTAASPLTSVKYAGSPWELGLAETQQALVANGLRHKIRLQVDGGLKTGLDVVKAAILGAESFGFGTAPMVAMGCKFLRICHLNNCATGVATQDETLRKEYFKGLPEMVMNYFTGLAEEVRELLSELGVEKLTDLIGRTDLLEAVEGFTAKQTKLDLSNILEAPVSPEGHPLFWTEPNKPFDKAELNQKIIDDAMHAVENSQSASFFYNVINTDRSVGARLSGEIAKRYGNQGLAASPIKIYLDGTAGQSFGVWNAGGVELYLTGDANDYVGKGMAGGKIAIKPHLGTAFKCHEATIIGNTCLYGATGGKLFAAGKAGERFGVRNSGTIAVIEGAGDNACEYMTGGIVAILGATGVNFGAGMTGGFAYVLDENQSFEGRVNTESVEAISLSDLYIHQEHLRGLIAEHLEETGSSHAENILANFDEWIPKFYLVKPQAADLRTLLGHQSRSAAELRVQAQ

SEQ ID NO: 22074 - protein, 554 aa, Vibrio sp. Ex25
MCSVFGILDIKSDAAALRPIALEMSKKLRHRGPDWSGIYSSERAILAHERLAIVGLNSGAQPLYSPDKKLILAVNGEIYNHKEIRARYEGKYEFQTDSDCEVILALYQDMGADLLEELNGIFAFVLYDEEKDEYLVGRDHIGIIPLYQGHDEHGNYYVASEMKALVPVCKTVSEFPPGSYYSSKDAEPTRYYVRDWNEYAAVQGNTTSKEELTEALEAAVKRQLMTDVPYGVLLSGGLDSSITSAVAKRFAAMRIEDDEKSEAWWPQLHSFAVGLEGAPDLKAAREVADQIGTVHHEMTYTIQEGLDAIRDVIYHIETYDVTTIRASTPMFLMGRKIKAMGIKMVLSGEGADEIFGGYLYFHKAPNAKEFHEETVRKLLALNMFDCARANKSLAAWGVEGRVPFLDKEFIDVAMRLNPADKMCGNGKMEKHILRECFEHYLPESIAWRQKEQFSDGVGYSWIDTLKEVAEQKVTDQQMETAQYRFPYNTPTTKEGYVYREIFEELFPLPSAAECVPGGPSVACSSAKAIEWDESFQNCVDPSGRAVQTVHNDAY

SEQ ID NO: 22075 - protein, 391 aa, Vibrio sp. Ex25
MKFVDEAVVKVQAGDGGSGVVSFWREKFITKGGPDGGDGGDGGDVYIQADENLNTLIDYRFQRFYEAERGENGRGGNCTGKRGKDIVLRVPVGTRAVDIHTNEIVAEVAEHGKKVMIAKGGWHGLGNTRFKSSVNRAPRQRTLGTKGEVREIRLELLLLADVGMLGLPNAGKSTFIRAVSAAKPKVADYPFTTLIPSLGVVSVVPEKSFVVADIPGLIEGAADGAGLGIRFLKHLERCRVLLHMIDIMPIDQSDPVQNALTIIDELEQYSEKLASKPRWLVFNKVDLMPEEEANEKIQEILDALGWEDEYFKISAINRNGTKELCYKLADFMDNLPREEEEVAEEDKVNFMWDDYHKDAMAGKDVITEDDDDDWDDWDDEEDDGHVVYVRD

SEQ ID NO: 22076 - protein, 574 aa, Vibrio sp. Ex25
MTAMLSGAEMVVQSLIEEHVEQIFGYPGGSVLDIYDALHAKTDQIKHVLVRHEQAATHMADGYARATGKPGVVLVCSGPGATNTITGIATAYMDSIPMIVISGNVPNSLIGNDAFQECDIVGVSRPVVKHSFLVKKAEDIPETIKKAFYIATTGRPGPVVIDLPKDVMNPQIKLPYQYPETLSMRSYKPTTSGHKGQIKKALKSLLEAKKPVLYIGGGAVISGAHEHILELSDKLNLPVVSTLMGLGAFPGTHKNSLGMLGMHGTYEANMAMHEADLIFGIGVRFDDRTTNNLEKYCPNAKVMHIDIDPSSISKNVKVDLPIVGSAEKVLTTMLGLLAEQEGGNDEDAITAWWDDIQVWRDRNCLAYEKSPERIKPQQVIETLHKLTNGDAYVASDVGQHQMFAALYYPFNKPRRWINSGGLGTMGFGLPAGMGVKFAMPQEEVVVVTGDGSIQMNIQELSTAMQYDIPVKIINLNNRFLGMVKQWQDIIYQGRHSNSYMSSVPDFAAIAEAYGHVGIRIETPDQLEEGLQKALDMKDRLVFVDINVDETEHVYPMQIKGEGMDKMWLSKTERT

SEQ ID NO: 22077 - protein, 360 aa, Vibrio sp. Ex25
MDKIIISPSKYVQGEQVLTSIAHYVKTLGERPLVIADEFVTNLVGDDVKQSFADEKLPLTMNIFGGECSRVEIERITDICATQKHDVIVGIGGGKTLDTAKAVAFYTKIPVVVVPTIASTDAPTSALAVIYTPEGEFAEYLMIPKNPDMVIMDTSVIAKAPVRLLVSGMGDALSTYFEARANMTSGKATMAGGLATRSAQALAKLCYETLLEDGVKAKAAVENGVSTKAVENIIEANTYLSGIGFESSGLAGAHAIHNGLTKLEECHHLYHGEKVAFGTLVQLVLENAAMEEINTVLAFCRSVGLPTNLFDMGVKELNHDKLREVAEASTAEGETIHNMPFPVTAENVYSAILTAHQLGQ

SEQ ID NO: 22078 - protein, 802 aa, Vibrio sp. Ex25
MTLQRQLHKFGGSSLANPECYLRVVDILKEYSTENDLVVVSAAGKTTNRLIEFLEGLEKDGRIAHEALQSLRQFQTELIENLLENEVQEELLALLHDEFSTLSELTAPLTGAQKAAVLGHGEVWSARLLAALLSQRSIPAVAQDARAFLRAEAGTQPEVDRARSYPLIKEVLAQHNHKRVVITGFMAQNETGETILLGRNGSDYSATVIGALAEVSTVTIWSDVAGVYSADPRLVADACLLPLLRLDEASELARLAAPVLHSRTLQPVAQSTMDLNLKCSYLPESGSTRIERVLASGRGAKIITSLDDVLLVQLSFMHGHDFEKTQNDVLQALQRAQLEPLAFEAQPDQHTLRLAYTAEIAGGALKHLQELAVEAEIKLKEGYSLLAAVGAGVTKNANHCFGFYQKLKHSPVEFISETESGLSLVAVLRRTDTEVLVQTIHSQLFQAQKRVAVALCGKGNIGSSWLNLFATQKGELEKRHGMSFDLVAVVDSQTYWFDEQGIDAASVAERFDDESLANDGSWLTHLGALKNYDEAVVLDVTASKDLAQRYVEIAQQGIHLISANKVAGSADSQYYHQVQDAFAKIGRYWLYNATVGAGLPINHTVRDLRESGDEIVALSGIFSGTLSWLFQQFDGSVPFNDLVDLAWQQGLTEPDPRSDLDGSDVMRKLVILARESGLDIEPGSVKVESLVPEELRELSIDDFFDNGGLLSEILQERLTKAQRNDQVLRYVARLEKNGKATVGVEALSREHALANLLPCDNIFAIESKWYKDNPLVIRGPGAGREVTAGAIQSDLNRLAGLF

SEQ ID NO: 22079 - protein, 404 aa, Vibrio sp. Ex25
MSKVNVNKVVVAYSGGLDTSVIIPWLKENYDCEVVAFVADVGQGAEELEGIEEKAKASGASECYIADLKEEMVADYIYPTLKTGAYYEGKYLLGTSMARPIIAKAQVEVARKVGADALCHGCTGKGNDQVRFEGAFAALAPDLQVIAPWREWDLVSREECLDYLAERNIPCSASLTKIYSRDANAWHISTEGGVLEDTWNAPNEDCWVWTVDPEQAPNEAEYVTLKVEKGEVVEVDGEAMTPYNALVYLNEKGSKHGVGRIDIVENRLVGMKSRGCYETPGGTIMMEALRAVEQLVLDKSSFEFREELGLKASHLVYDGRWFTPLCKSILAASEELAQDVNGEVVVKLYKGQATVTQKRSDNSLYSEEFATFGEDEVYDQSHAGGFIRLYSLSSRIRALNSQKK

SEQ ID NO: 22080 - protein, 714 aa, Vibrio sp. Ex25
MSRTIMLIPTSAGVGLTSVSMGVLRAMERKGVKVSFYKPICQPRSGGDQPDLTSTIVGHNSDMKIGEPMAMSVAESLIGNDNMDELLETVVERYNQINKDADVTLIEGLVPTRKHPFANQVNAEIAATLGAEIVLVATPGTDNPAQLKERIEVACSNFGGTKNKNISGVIINKLNAPVDEAGRTRPDLSEIFDDADSAKQNELKVMEIFNTSPIRVLGCVPWSIDLIATRAIDMAKHLKADIINEGDINTRRIKSITFCARSLPNMIEHFKPGSLLVTSADRPDVIVAASLAAMNGVDIGAVLLTGGYDIPREIEGLCKPAFDTGLPIFKAQGNTWQTSLNLQSFSIEVPADDKERIEFINEHVAGHIDGNWIESMTEGTQKSRRLSPPAFRYQLTELARKAGKRIVLPEGDEPRTVKAAAICAERGIADCVLLGNPDEIRRVAAQQGVELGTGVTIIDADAVRENYVARLVELRGAKGMTEVVAREKLQDSVFLGTMMLENDEVDGLVSGAVHTTANTIVPPFQIIKTAPNASIVSSVFFMLLPDQVLVYGDCAINPDPTAEQLAEIAIQSADSAAAFGIDPRVAMISYSTGESGKGADVDKVREATRIAKEKRPDLVIDGPLQYDAAIMENVAASKAPNSPVAGKATVFVFPDLNTGNTTYKAVQRSADLVSIGPMLQGMRKPVNDLSRGALVDDIVYTIALTAIQADQEAK

SEQ ID NO: 22081 - protein, 398 aa, Vibrio sp. Ex25
MSKLVLVLNCGSSSLKFAVVDAENGDEHLSGLAECLHLPEARIKWKLDGKHEAQLGNGAAHEEALAFMVETILASKPELKANLGAIGHRIVHGGEQFTQSALITDEVLKGIQDAATFAPLHNPAHIIGIEAAKKNFPELKNVAVFDTAFHQTMPEESYLYALPYNLYKEHGIRRYGMHGTSHLFITREVAGLLNKPVEEVNIINCHLGNGASVCAIKNGQSVDTSMGLTPLEGLVMGTRCGDIDPAIIFHLHDALGYSVDQINTMLTKESGLQGLTEVTSDCRFVEDNYGEKEEATRAMDVFCHRLAKYVAGYTASMDGRLDAITFTGGIGENSGPIREMVLNRLGIFGIEVDSEANLKARFGGEGVITTENSRIPAMVISTNEELVIAEDTARLTGL

SEQ ID NO: 22082 - protein, 375 aa, Vibrio sp. Ex25
MLRASLRGGAIYFELKIATTKEIVMFFEWQGNQPVTLRCIDKYFETHDTVSIKLAELTESLLFQFKPGQFINLGVEIDGKMEFRAYSISSINEDNHLQLTIKRVSGGKVSNYIVDSLLLGDTVQALPPAGEFNCIDHPPVLRDGETKALLISAGCGVTPVYSMAKHWLSNQDENDNDVDIAFLHIARSPEETIYYDQLETFDAVYPNFHLKLLLKNREGTSHPQGRLNADWLKELVPDFKQRTVYLCGPSQFMQDVHGYLNDLGFDMTNFYQESFTPATGAETSVSDEVVRVSVPDFAQTIDAQKGQVLADVLEGAGLPLIVACRSGICGSCKCKVRQGNVSSTSLETLTPEEIEQGYVLACSSTIEADLEVQIG

SEQ ID NO: 22083 - protein, 286 aa, Vibrio sp. Ex25
MNFNQFDSLLPPQAAERAAEVGVGKATKAPIKSFLLAISAGLHIGIAFIFYTTVTTGAGDLPWGITRLIGGLAFSLGLILVVVTGGELFTSSVLTLVARASGKISWQALIKNWFVVYFGNMVGALLLVACMLVTKQYMFDHGQVGLNAMAISQHKLHHGFFAAVALGIMCNVLVCIAVWMTFSGRTLTDKIAVMILPVAMFVSAGFEHCIANMFQVPMAIGIKYFAPEAFWQMTGADIANYADLNMMGFIVNNLIPVTIGNIIGGGVFVGMWYWMIYLRDEDKHLR

SEQ ID NO: 22084 - protein, 548 aa, Vibrio sp. Ex25
MTGAQLVVAALRQQGIETVFGYPGGAIMPIYDALYDGGVEHILCRHEQGAAMAAIGMARSTQDVAVCMATSGPGATNLVTGLADAFLDSVPLVAITGQVASSHIGTDAFQEMDVIGMSLACTKHSYLVTEIEDLAPTLAEAFEVAKTGRPGPVIVDIAKDVQLAQTPTDLLPPYVAPAIEDVSAEDIKRAQDVLAASTRPVLYVGGGVQLAKATDAVREFLRLNPMPAVSTLKGLGTIERHDPHYLGMLGMHGTKAANLVVQEADLLIVVGARFDDRVTGKLDTFAPNAKVIHIDIDAAEIHKLRHANAPLRGDINTILPQLELTQDISPWVHHSESLRSGFKWRYDHPGELIYAPLLLKQLSDMMPDSSIVSTDVGQHQMWAAQHIQPREPQNFITSAGLGTMGFGLPAAMGAAVARPDDQSILITGDGSFMMNVQELGTLKRRQIPVKIVLLNNQRLGMVRQWQSLFFDGRHSETILDDNPDFVMLAKAFDIPGKTITKKEEVEPALKEMLASETSYMLHVLIDEEENVWPLVPPGASNSDMLENT

SEQ ID NO: 22085 - protein, 526 aa, Vibrio sp. Ex25
MDNAFKKYSIDTTDYQVGQDNVQKWGFDIHNPVFGISAGLVVFCLISLLLVEPTTARDVLNGLKNGIIEQFDAFFMWSTNFFLLFAVALLFSPLGKIRLGGKEATPDHSTVSWLSMLFAAGMGIGLLFWSVAEPTAYFTDWWGMPLNAVPYTEEAKSLAMGATMFHWGVHGWSIYALVALALAFFAFNKGLPLSLRAAFYPIFGDRAWGWLGHVIDILAVLSTLFGLATSLGLGAQQATSGINHVFGLEGGIGTQMIVIIFVTFIAVLSVIRGIDGGVKLLSNVNMVVAFALLIFITFITFDTAWGSLRDTTMAYIENIIPLSNPHGREDETWMHGWTVFYWAWWVSWSPFVGMFIARVSKGRTVREFLFAVIVIPTVVTLIWMSVFGGIALDQVVNKVGELGANGLTDISLTLFHVYDALPYSSVISMLSIVLILVFFITSSDSGSLVIDSITAGGKIDAPIPQRIFWACIEGAIAAVMLWVGGKEALQALQSGVVATGLPFTFVLLLMCVSLVKGLRTELSAYK

SEQ ID NO: 22086 - protein, 394 aa, Vibrio sp. Ex25
MLSNQTIEIVKATAPLIAETGPKLTAHFYERMFTHNPELKDIFNMSNQRNGDQREALFNAICAYAANIENLPALLGAVEKIAHKHTSFLITEDQYQIVGKHLLATIDELFNPGQEVLDAWAEAYGVLANVFIQREEQIYQQNEALEGGWRGLREFELVDKQIESEHICSFVFKPTDGQKVAPYKPGQYLGIYINSDQLENQEIRQYSLSSAVQENTYRISVKREEGGKVSNFLHDSLNIGEKVQLAAPAGDFFMDAEPQTPVVLISAGVGLTPTLSMLESLSAHQAPVTWVHATENGQQHAFKQHVNQLVAAKENMNALVWYNHPTAEDKLGEDFHFKGFVNLYEIEAALKQDNVQVYFCGPVGFMQHVAKQLLELGVPEEQFHYECFGPHKVV

SEQ ID NO: 22087 - protein, 357 aa, Vibrio sp. Ex25
MSKQQKILFIDRDGTLIVEPPVDFQVDRLDKLKLEPFVIPSLLSLQDAGYRLVMVTNQDGLGTDSYPQADFDAPHNMMMEIFESQGVKFDDVLICPHFEEDNCSCRKPKLGMVKEYLQGGKVDFQNSVVIGDRQTDLQLAENMAIRGIQYNPETMGWKQILKDLTVKARIAEVIRTTKETDIKVAVNLDEQGGNDISTGLGFFDHMLDQIATHGGFQMVCKVEGDLHIDDHHTVEDTALALGQALKEALGDKRGIGRFGFSLPMDECLAQCALDLSGRPYLKFDAQFSREQVGDLSTEMVVHFFRSLTDTLACTLHLSSAGNNDHHIIESLFKAFGRTLRQAIKVEGTELPSSKGVL
